United States Patent Application Publication US 2019/0348154 A1 - sequence listing, part 62

SEQ ID NO: 231039 - DNA, 876 bp, Klebsiella pneumoniae
atggttaaaaatactggtaaggcgtatgaagagtttgttggtacaatacaacaaagcttgataaatgcagaaggcatatcccatttaaaaaatataaaagtagaaaccaacaaaataataaaagatagaaatggcatcgatagacaatttgacgtgtattgggagtttaacattggtggccatgaatataaaaccgtgattgaatgcaaggattatgcatcgaccattacggttgataaaatcgatgcatttctcggaaaaacagatgacatcccaggattaaggcttatttatgcaacaaaaaccggctaccaaagtggagcaaaaataaaggccgaaaacaacaaaatagatttacttattgtccgagaggcaaatgattgcgactggatggcacctgacggaacaccattaattaagcaacttcaaataaatgtcactgcaataacccctccaataataaaatatttcacgccatctattgaacaatcatggctagactcgcaaaaagatttggatgtcgatacaataattcagaaacttagtagcattccgagcaatgaattattcattaaaaattgtaccaatggcgacttttactctctttataaactatccagcatgttgacagttaaaataactgacatcaagtatggagaaggaacttttagagaagaattgaatgacaactcttaccttcaaagtgagaacggcgactttcaaataaaaatcagtggttatgaacttggttacgaataccatgaacccataacattcatatcaacaattgattattcaaaagatttgctgggcattgttcaaaactatctttcgggttcaaaacaaatgattttcaaagatggaagaacaaaataa

SEQ ID NO: 231040 - DNA, 591 bp, Klebsiella pneumoniae
atgaacgaaaaaatgacacgaattgaactgagcggtgtgcttggtaaaacttttggtaaggttcatcatcgtttaattagtaccgtacatgaggcggggatcgcattagctgcgacgttacctgggtttgaaaagtatatgattcatagtaaggaacaaggattaaccttcgctattttcaagggtaaaacaaacataagtgagaacgatttaaattttcctataacaggtgatgccatccgtattgtaccggtgatcatgggtagcaaaaaagctggtttccttcaaactatcttaggggcggttattgttgcggttggtacagtagccacatttgtatttgatcaaccgtggggcgttaatgtgatgatggctggtggtgccatgatgctagggggtgtagtccagatgctttctccacagcccgtaggcttggctcgcaaggaatccccggaaaataaagcatcatacgcttttggtggcgtcacgaatacggtatcacaaggttatccagttggattactatacggaaagcgtcgaatcggaggggcaattatttccgctggggtttatacagaagataagcagtga

SEQ ID NO: 231041 - DNA, 240 bp, Klebsiella pneumoniae
gtgaataaagtcgaattgcttcagaagatatcggcgctcgctactgaatgccacgcgctggcctgtgagcttgatattggtgatgagcgaaccgaaatgttcgaaatctacagcgtgctacacaacctcggtcgccgcggctacgccagtcaggtggggaggcgaatgaatccgctgctcgcttcctgcgatgatgacgaggatgaggaagatgacgattgggatgaggatgacgactga

SEQ ID NO: 231042 - DNA, 426 bp, Klebsiella pneumoniae
atggcactgaccaaaaaacagcgcgcagaactgcgcatgaagtttggcggccgctgcgcttactgcggttgtgaactgccggagaaaggctggcacgccgaccacgtacagcctgtggcgagaatatctgagcaggatatgaaggccgcagaaaaaggaattttcaaactgaaagcgactggagaggtacggaatatctacgccgaaactttagaaaatcagtatccggcatgcgctccctgcaaccttttcaaaacctcttactcgcttgagatgttcagaaaacaaatatctctccaggttgaaaggggtagaaagagcagcgttaacttccgcacagcagagcgtttcggcctcgttgaagtcgtcgaaaagccagtagtgttctggttcgaaaagtatcaggcagaaggggccaaccaatga

SEQ ID NO: 231043 - DNA, 435 bp, Klebsiella pneumoniae
atgcttaacggcagcaccgcccacagataccagtttctggtattcgttggttttggttgtcttcactgtcgcgatagatcgcatcacgctgtcatcctgcaactggcgcatgatctctttgtccagctcagggataacggtatagccgccatcagcctgcaccagcgtggagagagaacgggtatcaccggtcatgatgtagtgccgcagttcgtcgttgcttactggctcagcttcaacggaagtaccaggcagattgcgctcatcgttggcaacggcttcaaggcgggtaatttccacttcaagcgtatcagcccgggcgcggagttcgtcgaactgtttaccctcttcatcattcaggctgcgcttctcgctgtcggctttgtccagcatagaacgcatctgggttttgagagcggctttctgctggcgtaa

SEQ ID NO: 231044 - DNA, 261 bp, Klebsiella pneumoniae
atgccagttactattcaggatattaaagagcactacgatcaatatgggcttcacgacatgagtgcaatgcctactgctgagtatcggcaggttctcaaaaatggtgcgctgttctggatcgaccatcatgattttgttcgcagcactctatcagaggagatacttgccacgaaccgtgaacaattggatgccatgattgagcatttgcaagaatatagaaataagatgtcaacgccgccggactggatgagcgagaaatga

SEQ ID NO: 231045 - DNA, 192 bp, Klebsiella pneumoniae
atgatcgttagtgatttcatggaagagccggaacttttcgctcttctgggtaagaaaaaaacagccatatggcgtttacgcaaagatcacggattcccaaacctgatactcacctatccctctcgctacagccgtaaagctgtaatgaaatggcttgaggatggtggcattaaccgcgttgtaacagcttaa

SEQ ID NO: 231046 - DNA, 1803 bp, Klebsiella pneumoniae
gtgaaaaatgcacctaacgtaaaggcgctgccgaaagacaagtttacagaagcgattattttcgcgggtgccgacgcgtggagtcatgccaaaggctgggaagaggggttaggaaagcagatcgcggaagataccacgcctcctgtttatcttggcccgcggcaactggaggaactggataacctgcgcattatcgatgatggccgccgagctgcgcgggtgtacctggctggcgatatcgagacgtcgatgattagtgccattggtgccaagctggcacaggctggggtacaggaggcaaaactttataagggtattcccgatactcatccggaggactggcgcgatcatcttaatcggattagggaaggaaaaagcacagtagtaaatctgccagtgacgaaaagagaaccagcgcatgatgaagttagcccggctcttaatcagatgggggccagccagcgcgggcaagtgctgctggcccattacgatggagacctagctattcatgctgattcggacatggttcaccactataacggtgcgatctggaatccactcccggataaagagctgcaacgggcaatggcgcagatttacattgatgctgaggtagcctattcgcagaacgccatcaaatcggcggtggaaaccatgaagctgagtctgccggtgatgggcgtaacagcccgcaacctcattggcttcagcaacggcgtatttgatacccggacggggcagttcagggagcacagcaaaaccgactggttgttgattgccagtgaactgccattcagtccaccagcagagggggagacactggccagccatgcgccgaacttctggaagtggttacgccgttccgtggccaacaacgaccgcaaaacagaccgtgtgctggcggcgctatttatggtgctggcgaatcggtacgactggcagctgttccttgaggttacgggccccggcggtagcggtaaaagtgtgatggcggaaatatgcaccatgcttgcgggcaaggccaatactgtatcagccagcatgaaagcgctggaggatgccagagatagagcgctggtggttgggtactcacttatcatcatgccggatatgacccgctatgctggcgatggcgccggaattaaggcaattaccggcggtgacaaggtttctatcgatcctaagcataaagcgccatattcaacccgtattcaggctgtggtgctggcggtcaacaacaatgcaatgaccttcagcgaccggagtggtgggatatcgcgccgccgagttatattcaacttcacggaaatagttccggaaaacgagcgcgatacgatgttggctgaaaagatagaaggtgagctggccgtcattattcgccatctgctgacccgttttgcaagccaggacgaagccaaacagctgctgcacgaacagcagaagtcagaagaagcactggctatcaagcgagaaggagattcgctggtggatttctgcggttatctgatggcgtcggtagtttgcgatggaatgtttatcggcaatgcggagattgtgccattcagcccgcgcaaatatctgtatcacgcctatctggcatacatgcgggccaatggtctgagtaagccagtctctctgatgcggtttggtaccgatatgccaggcgcaatggccgagtacgggaagaagtacgaaaagcggaaaaccaagcacggtatcaggtcaaacgttacgctacacgacgactcagacgactggatgccgtcatgtaacaataattctgaaagtgctggggtagagtaa

SEQ ID NO: 231047 - DNA, 759 bp, Klebsiella pneumoniae
atggactatataactgaaggcgttttagataaagtaattaatgatttaacttatagagctaataaagccagaaaagcaagatttttaatcggtggttcgattatcctcattgcaaccatgctttctgggttcatcacttatagattaactactaatcaatcagatagtagccttgctaatacattcatggcttttagagatcgttttgttgtcagtgaagatggtggtttgagaggatttattaacaaagaattaggccaggtttatgagagtgaaaaagatgtagttcgtttgcgagtagagaacgaaagttcaataccatctgaaaaaaacaaaattaacaatgacgggaatggtaggcagatcacacaaaccactaataagaaagaggctctggataatgcaagtaggttggttgatttttacacaaaagtggttgcggcgaataacggtaaaccaataaataaaacggatgatacttatagtaatttaataagctccatagcattatctgcaggtattgtaggttttctactctatatacttcagattgctgtaagttttataagatattattctaggcttgcagagttgtatgactcacaaaaaacagctttaattgcttctgatggtaatgtcgaatccgcagagattttaatgaagatattatctaatgaccatattggattagggaaggaacctactaccttatatggaaaagcattagatgtgattggtgaggtagcgaagtcaaaataa

SEQ ID NO: 231048 - DNA, 408 bp, Klebsiella pneumoniae
atgcgatacccggtaatttttgagcatgacgaaaccggctgggcggtattctttccggatatcccagaggcaatgacgggaggagagaccagggaggaagcgttagaaatggcgcaagatgccctggtgacggcgtttgatttttactttgacgaccgccgggagattcccgctccatcagcagaaggtgatgcgtttgttgaggttccggccagcgtggcagctaaagtattgctgttaaaccgtctggtcagcaccaacaccagcaatgctgatctcgcccgcttgattaacacgcgcccacaggaagtgcagcgcatcgtgtctcttggtcacagtaccaaaatcgatacgatccaaaaagcgctatcagcgttggggcaaaagatggaaattgtcgtccactaa

SEQ ID NO: 231049 - DNA, 1755 bp, Klebsiella pneumoniae
atgagttcaaaaaccatagagccgttcatccgacacattaggtttcctttctataaaaatcttgaagagttcagtgtaattaattttaattatcctatcacagcattagtaggacaaaacggaacaaataagagttcggttttaagggccctctatggctctcctaataactactctcttggtagcttgtggttttccactgacattgatgaaataaaagatgatggaagatcaagattcatatatggttatttcgattattcaatcaaagaagttgtcgaagtaattaaaacaaggatcgttgaccctgatgatcctgatctttgggaaacatctagaccacttgcaggtgatggcatgaaaaaaatgccaaaaaatattgtttccccaaatcaacaaaagtcgcgatggaaacaaattgataaattagttacctatatcgacttcagggcatcaataagtgcttttgacaaatttttttaccactctgactttaatctttatcctaagaaaacttttttacgtaaaagaagccacatattaaaagatgtaattgaaaacaattcatccagctgcaaacctttcaagggtaaaaaggagaggttatataataacgaacttctttccaaagagaaagttgaaattataagccatattttaggtcgaacttataaaagcatcagactagtggagcatgccctcttcactaatgataaagcatctacagttatactggaatcaaacagtcttaactattctgaagcctttgcaggcagtggggaatttgcagtaactttattggttaatcagataataaacgccccaaatgcttctttaatcttattagacgaaccagaagtttcgctccatcctgctgcacaaataagactcatggaatttttaaaccaaatttgtcttaaaaacaaacatcaggttgttatttcgacccattcgtcatcaattgtaagggatcttcctcaagagtctataaaactttttacattaaattccacaacaggcaaagtaagtattcttgaaaatgttagtccagaggaggcatttttcactctcggtgacagactgtcaaaaaaaacaattttcgtcgaagataaactcgctcagaaattcgttgaaaaggctttaaaaactggtggttcagctttagtcaatacatttgatataatttactgtcctgctggagcaaccactttactaggtaatattgctgtcccgttatttttatccaatgtaactaatgcagtatttttattggatggagatcaaaaaacacttactgactttataaagtccacccaaattccagaagaccaagatcctgctctatctgaaatattaaaaagcatccttgggtgtgaaataaaaattccgacagatggaaatggcggcaaacctaatgagaagcaaaaaaagcttcttcatcgtggatttattgatttctcatataatttcataggttatttaccggtaataaacccagaggtttttttaatcgaaaacctacctgacttttatttagatttaatcaaagacaaggacacagcaggcctatcacccaaagaaataaccgtggaaatatgtaaaaatgatattgggagcaatgaaattacatcagatgatatatttgccacgcaaatcagaatcctatcaaaaatacctgataatcatcctgcatttatagaaacaagagagatgctgaaattttttcttaaacatggtatgatcagggataagtaa

SEQ ID NO: 231050 - DNA, 1050 bp, Klebsiella pneumoniae
atggcgggttttataatgagcaaaaagatcagagttttcgattttttctctggctgcggtggcactagccaaggtctaaaaactgctggttgtgagattgtttttggcctagattttgattatgactcaagcgaaacctttaaggctaacaatcctgatgccgtattcatcaatgatgacattaggtcagttgatgttgctgacatctctcaattagttgaaacggcaaaaaaagatgcaaagattctgttctgcgggtgcgctccatgccaacctttttcaaagcaaaatcagaataaaaccacttcagatcccagaagaggtttgttatcagaattcggtcgctttgtcgaattctacgaacccgattatgtattgatagaaaatgtgcctggtttacaaaaagtggatgtaaatgacggtcctctctatggttttatttctattctaaaaaataggaattacaatcttgtttatggcgttattccagcattatggtatggtgttccgcaaacgcgtgaaagatttgttttaatggcgtctcttgaatctcaaattcatttaccggagcgcactcataatggaactgatattccattcgctacggttagagattggattggtaacataccctctattgaagccggggaatctcatccgttggtgaaagaccatgttagtgcaaaactttcagagctgaatttaaaacgaattagatgcacccctgaaggtaaaggacgagaatattggccaagagaacttttgcttgaatgccacaagaagcatacaggtcatagcgacgtttatgggcgtttggcatgggataaaccagcaagtgggttaactacacgatgcattagttactcaaacggccggtttggacatcccgaacaagacagagctatttctgttcgggaggcggccctacttcaaacgtttccaatagattacatttttaaaggctccatgctatctaaggcgaaacaaataggtaatgctgttccgccaaaaatggctgagtcaataggaaatgtttttatcaaaatttaa

SEQ ID NO: 231051 - DNA, 2439 bp, Klebsiella pneumoniae
atgacagataccaaaagcgattggggcttttcagttcgcaattttgatgatcatgaaacgcaacaatttttaaggggcatccttatccaggactcatgtgtacctttcttaggagctggttttactcgaggagagaaagcaagacataaggccgttcctggggggggcgaatggatggagataatgcgacaacaaataaaaaagtcccctgtcacagaaaagccatccgatgaagaattaaaaaactttaactttcaggaactttcagatatttactttagggataaaatagtttcattggaaactataaagtccgatgttaataactgctttacacatgtaaagatagataatgaatcaaaattaaatttcttatcagttaactggccatatatttacactctgaatattgatgatggtattgagcgggctatagatggtgtaaaagtattaccttatcgagaattctctagatatgaacagcgtcgatatgtatataaactacatggggatgcagaagatgtgatgactgctgcaaatcacgacgatttaagggtaatatttggcaggggagactacattaatagcttaaatactaacaagtatttaattagcggattaatcaatgatttttgtgagaagaatattatttttataggttgtagtcttactgatgaattagatattgcatatgcactagctaatcctgaattcacaaataaagatatcaacactgctcgtatttttattactcaagaacccttaaatagttatgcggataaaaagaagttaaaatcatacggcataacagatgtaattataactgattattctaacttctacgattttgtagcatctgttgcacatacagaggagcatcagttacctgccatagaatctttccagtatgttaataataacgaatcttttaatgggaaaaattttgcttcatatttattacaaagtggatggaatcaagaaagaaatccgggggctgtttccgttcctcgagtggtcgaacaaagggttcttgctagaataaatgaaccacttattgttatttggggcagaagattttctggtaaatctaccattttatttaggattgcggaaaaaataagaacacgcaaacgttatcttatacactcaaaaaaatcaatgagtataagagcctttaatgatatatttaaaatcaaggattcattgatagcaattgactcaggatcaattcattttaatcaacttaaaagtatatctcaaaaaacagatattctgagagaaaataatacaactattgtcctaactgtttctagagctgatttaaatgcttttggtagtgactttgaggaagaggctatacagctccaatctcgactatttggaaatgagattcaggacatcaacaaactgcttgatactcaaggtttgcagcggtgggatgggagagatagtattttagataacatcttttcactagctaaatcaccaatcgtaagacaaatacttaacactcaatcaaaattggaagaccgcattattagcattttcaaccaaagaattggggatgaaaacgtaactgaatcaagtaagttagagttttcgctacttttttatctagttagcagagagaaaatattttctttagtacatcgcgaacttatccgtagttatgggttaggatacttactaaatacacatttaggtaattttgctaaaaagtgggccccatttattgagtatgaaaagacggatattattagcgccagagcagaaaaatccggctatgttactgtttgtaactcatatgcttggatacagcttgctgtaagcattttctctgagaaattaggtgtcaaaagaacagcttcttttatagctgaattataccaatgcgtatgttcaatagatcaaggagcgcacaagattatcatgtttgataatcttaatgccatttatagtccgactatgcatactaaccatgattggtgtaagaaaatgattacatcagtttatgaagagctcgttacgtattgcgctcaagatcctgattattggttacaaagagcgaaaggcatttactatctctccgacagagaagatgaacttcgtattgcaattgaatattgtaaaaaaagtatagttgaaagatcaatcaagactcgtatcaacgcaaagctcaccaaagctaatttattgggtaagctttgcatgattacgaattatattaatgaagaagatgtttctgatgcaattcaagcatatgctgatgcaattaatgatcgtgattccaatagctcatacattgatggactcttaaaaaagaacagatatggttttggatatatgaaaaaagtctgtgaagaagcaagcaagaagatagctttgcttcctaaaaaggcagatattggcctaatacagcattatataaacaatgcatag

SEQ ID NO: 231052 - DNA, 219 bp, Klebsiella pneumoniae
atgaatagtcgtcacgtcataggctgcaatacgacggccaaagcgcgcgacaggagtcgtaccactatctccgatcagttctttatattgattagcatagcgagtgagaagcgcgacctgctgatcggcgcggcgcgcaggcatatccttagtcacaaagtcccggaattcattgtaaaggcgcgacaaatccacctcactgcgtttttcagcctgtag

SEQ ID NO: 231053 - DNA, 2490 bp, Klebsiella pneumoniae
atggctcatatcagcgccgtcgtaaccctacgaccaattcgattcgcattcctcgttaaacctaatgacagtaaacggttactggaaatcttccaaataaacacatgcctttggggcggtaaatttaaccctatcattccaatttttggccatgtgcctaaatggtgggatagggatgactacaaacctgagagcgctttgcagatcgtcaatggctatcttgatgctttcgaacctgatttccttgtagaagctgaagcagggctggctaaagggtttggctatgacccagaccgagtactgcaactttcagccatgctaaggcgatctgatgaactgcggggtcaagctgggcttgatgtcttcgacctatataaagatctgtataagaaacaatttcaattcgtgcgtcgacatgagcacaatatcgtggaactcatacctcggacgaatgcattgaagtcgttctgtgcttgcctatctggcagcttccctgaggatgaagaccttaaatattttggccaagggttctgtgatgcttttgatcccaaacaggttgaattatccccagaagctctagtagacctgtacaaggatggatttaattcagcactacaaatcggtcactcgaatattgaggttaattatcatgacaatgcggatccaacgctctttgtcatggatgcacatgactcgcgcgatcttattgacttctggaaccttcgcgctatgcggaaatatgtccgaccaattccactccaatggattgatgcgctttccccatactgcagagaatacattgaagattgccatcgccccgttcgagggaatcaatttggcttaatgactcatgctaccgtaatgtttgcaagatctatccctactgcgaatatcgaacaactttacgccgactatttgcgggttaatcaagatgaggcaaataggcgtcaagattggtatccaccgatttggcgaccatcatctggttttacagttcgcagtactcgacctactctatcctgtgcagaaaaaacgtttgacacacaaatcgaaggtgaccgaaccgaagttcgatttgattatctccatccagaattcactgaaagatatggtgccaatgatgctcgctgggtgaacgtagtgaaattaaaaaattggtcaaataccagtcgggctgcaaccgtttatccttgtaattacaggtcgcccaagatgccacgtttccagtcaatacagagaagcatcttatctacaactgaaggttttgttgtattttgccgtttccataatatgtccgatctctggcgtttgagtgacggcacaacggcgataagtgaatggctaaaaaacaatggagttgaaagccaaatctccgatgcaggacaagctacacagcaaattattaatacgctcggaggtttcaggggaattagtagttttgctcatgcagagatagtgaaacttctcaataaaatttctcgacggcccatttcaccctcaattcaacaccaagaatttcagaataaaattaataatgtggtgaagggtgatatatggcgaaataaaaatgctgaaactttagttgagcttggtgctgttgagcttggcttggagttaaagtgtgcaaaatgctctacttggggatggcacgcgctacgcgaactggatcttgtagtagcatgcggcctttgcctaaataagtttagctttccaatgatcgatccaagttcgagtcaattgtcccgttgggcttacaggttgataggcccctttgcacttcccgattatgctcgtgggggatacgccgcatccctaacgctaagatttctcgccaacacatttggaaatcatgatgccacgattacatggtcaaccggccaaatactgacattggccccaaaacaatatattgaagctgacctaatactctggcaccgacgcaaagttttcaatgagctggatcaccacgcagaactcgtatttggagaggcaaaaagctttaggggcgagaattccgaagagaaaaaagctgttgctgatgcatttgaagttgaagatgtagaaagaatgaaacaacttgctatccgcttccctggcgcaattttggtttttgcaaccatgaagcaggcaggagatctttccccggccgaaattcagcgaattacaaaactcgcgtcttgggggcgtgaatacatccacgagcgccgacaaacaagggctcctgtaatactcttaactggtctagagctgttcgcaccatattcgctttctcaagcctgggatgctgcaggtggccgccatgctgaaatgggaaagggacacttcggctatacagataatcttcgcgttctggccgatatgacacagcagttataccttaacatgccggcatatagcgaatggttacgagcaaagtgggaaaaaagaaatcagcgtcgtcaagtgcgacaagctgctgcggtgccagcacgagatgctggagatcattaa

SEQ ID NO: 231054 - DNA, 537 bp, Klebsiella pneumoniae
atgattaccacacatgttttcatcgcggtcagtcttgatggttatatcgctcgacaggatggcgatatcgactggctgttgaagcgcgatgacccgacagaagaccatggctatgccgcattcatcgcggacaaagattggatcattatggggcgaggcagttatgagaaggtgctgacttttgaggaatggccttatgatcgacccgtgctggtactttcccggcagctaaccaataccccggtgcctgaggcgctgaagggcaaagtgcagttttcatgccgcacgcccagggaggctcttactgacctgatggagaagaacgtgcaccgggtctatatcgatggtgggcagttaatacagtcgttcctgcgcgaaggtctggtcgacgatatcgttatcactaccgttcctgtcctgctcggttcgggaaaaccgctgttcggagtgctgccccatgatgtcgatttgacgctattatccagccgcagcttcccttcgggtctggtgcagtcgcactatcggctgacgtcataa

SEQ ID NO: 231055 - DNA, 1680 bp, Klebsiella pneumoniae
atgaatatcttcgaggcgcattttcgcagactgcacgcccgctacggcgcaggtcagacgcacgaattacagatgcaggagatcgccgccatcttcggctgttcagtgcgtaactgccgtattgcgctgaagaagatgcatcaggaaaaatggctcgactggcagccgcagcgcggacgcggcaagcgctcacggctccatctgttaacctcgccggaaaagctgttcagccagaacgtcaataagctgctggagaagcaggattacggcaacgtgctgaggtttatcggcaacgacaagtatctgctggatcgcctgagcctgtggcgctttggggtacaggataaaagcagcgaaacgcgggtgcgcatcccctactaccgcaatctggatccgcttaatccgctcgttcccctgcggcgaaccgaacgccacctcctgcgccagtgcctgagcgggctgacgcgctatgacgccattcagggcaggatcgtccccgatatcgcccactactggacccacaacgacgactttacccgctgggagttctggctgaaatccaccgcccgctttgccgatggcaatgagctggatgccagcgccgttcagcgcggcctgctcgccgccagccagagcccgcagttcgcgccgcttttcagcccaatcaaagccatcaccgctgacgccccctggcatctggtgattgaaacgcatcacccggtcaggcggctcgactgcctgctcgccacccagccgacgatgctgtttgattaccagcacggacacatccgctgtaccggcgctttccacctgcaggagcacagcgacaactttatggttttgcggcgcaatcaacactggcatcaggcgcgccccggactggatgagatcaccattttcacctgggcgccagaacatatcagcatgagctttattcccctgctgcggggcgaagaggcgcaggatgaccgcccgcttaacgagcgtagtctggaacagggatgctgttttgttctgctcgacggtgacggtgcctttgcggatgaggccagaagacggtttatcaattatctgctgcaacctgtcgaactcctcagccagacgcagcttcccgacgaatacgcacgcatcctctccgttgctcagggcatgctgccgcattggaatcaccgcccggtggatttcggcgggatcaccgcgccgtttaacctgcgtcagccggtgatcatcagcacctttcagcaaccggaactggcggagcttgccggggcgattcgcatcctgcttgagcgctggcatattcgcgccgaaatacggatcgacgcatttgaccgctttaacagccagccgcttcctcctgcggatatctggctcagcaactttatgctcgatacgctttcggttccggcgtttctggaatggctggcgtccaccacgctgtttacacgactgcctgaatcccagcgacgcaacctgaacgccctgctgtcgaccattctgaacagcgacgatgaacaggcattcgccaccattgccgcctttttccatgagattacccatcaacgatatgtcattcctttgctgcatcactggatggaatttgcgaccgagaagtcatttacctggcgggatttaaatacgctgggatggccggatttcagccaactttggctcgaataa

SEQ ID NO: 231056 - DNA, 1527 bp, Klebsiella pneumoniae
atgaaaagattcaaccttctgcaaatgttacaaagcatcgggcgatcgctcatgatccccattgccatgctgcctgccgccggtattttgctggccttcggcgtcagctttcaggatcccaatattgtcgccagcctgccgtttctcggcgcggactggctggttcacgtgctgaagctgatggcggaagcaggcagcgtgattttcgctaacctgccgctgctgtttgcggtcggcgtggcggtagggcttagtgacgatcagggcattgccgggctgtcggcgatcgccgggtttctgattatgaacgtcaccatcggccagtttctggggatcacgcccgagtcggtggcgcaggtgcgtgactacacgatggtgctgggcatcccttcgctccagactggcgtgtttggcggcatcatcattgggattatcgccgcctggctgtataaacgctattaccgcatccagcttccttcgtggctggagttcttttccggcaagcgttttgtgccgattataacctccttcgccgcgctgttcgtcgggctggtgatggcggtggtctggccgcctgttcagcatctgattaatggcctgtcgaataccatgacggtgcaggggccgggcgtgtccgccttcctgtttggttttgtcgagcggctgctgatcccgtttggtcttaaccatgtctggtggccgaccttctggctgcagtttggcgagtacgtgaataaggccgggcaggtggtgcatggcgaccagcttatcttctttgcccagttgaaagaccaggtgccgattaccgccggaacctttatggccgggctgacgcccatcaaaatgttctgtattccggcgattgcgctggcgatctaccgctgtgccagcccggaaaacagagcgcgggtgaagggcattatgctctctggcgcgatcacctccattgtctgcggcatcaccgagccgattgagttctccttcctgtttgttgcgcccgtgctgtatggcattcacgccgtcctggcgggactggtgttcctgctgatggagtggttcagcgtgcatatcgggctctctttctctggcgggcttattgactatctgttctttggcgtcctgccgcgcgcgcctcactggtatatggtgttcccggtcgggctggtgatgggggcgctgtactacgccctgtttacctttgctattcgtagctggaatttgctgacgccggggcgtgaggttgaagaaaacgcggtggcgcaggaaagcgaacaaaacgacctggtgagcggcatcattctggcctatggcggactgggaaatatgaccagcatcgaagcctgcatgtcgcgtctgcgcattgacgtaacggataagacgctggtggacaaagcgctgctgaaacagcttggcgcggcgggcatcgtcgaggtcgggaacaacatccagagcgtatttggcatgaagtccgatcggctgaaagaggcgatccgcgcagctaacgcgtatacacaggaggcaaaatga

SEQ ID NO: 231057 - DNA, 843 bp, Klebsiella pneumoniae
atgaaacagctacaccacagcggcctgccgctgtatctcgatgatgatggcgtaatggcgctgaaaccgccgctaaactatctcggctttggccgcaaaagcgccgggcagatggcggtggtcttaccggagttcaccgaagcgctatgcgatgaaccggcttacgatgtttatcgcggcttgtgctttccggaggatcaggaacggcttgccgctgatcagtatcagtacgacatcaccatcatcatgccgggaacgattggcaaggagcgcaagaaaaccagcggtcactatcacggctataacgatacgcggcgcaacacccatccggaagtgtatgaagtgattaagggcactgcggcgtatatcctgcaaaagtcgccggattttgccgttgagccaaaagatctgctggtggacgatcttatcgtagcggtggtgaaggaagggcagagcattatcgtgccgccgaattacggccactgctctatcaatatcggcgacgggccgctggtattcagcaacctggcgtataaaccctgcgcggttcactacgacacggtgcagttttaccacggtatggcctgctacatcgtggaggagaacgggcagctctgcgtgcgcaagaatcattactatccgcatattccgtacatcaaattcgccaccgtcaaagagaacccgcatcttggcatcaccttcgatacgccactttaccagcgctatcgcgccgcgccggaacgtttccattttctggggcatgtcgataactatgtccgggaaatcatggggatgctcgagtatcaggatgatttattcccgctcagtcaggaggacgcatga

SEQ ID NO: 231058 - DNA, 567 bp, Klebsiella pneumoniae
atgatggaaacgcaatttgttgcaggcgttgcctgtactgacctgcatcaggcgatgtcgcggattgatggtgccgcactggcgagtctggagcaggccatcgctgaggcgaacgcggtatttgtttttggcgcagggcgttcgctgttaatgctgaaagcttttgcgatgcgcctgatgcatatcggcctgaaggtgcatgttgtcggcgatgtggtcacgcctgcgctgcaaaaaggcgacctgctgttactggcgagtgcatcgggcgaaacggcttcgctggtgaatgtggctgcgaaagcgaagcaactgggtggcaccgtggccttgctgaccattttccccgagtccacgctggggaaactggcggatgtggtggtcaggatcccggcctataccgacaaattgccggatggaccggataacgtgaaaggaattctgcccggcggcagcctgtttgaagaggctgtcatggtgctgggtgacgccatgattgtgaatctggcccagtcgacgggatatcacttaaccaaaggctttgcgctgcacgccaacctcgaatag

SEQ ID NO: 231059 - DNA, 636 bp, Klebsiella pneumoniae
atgaaattacagcttgccctggacgagttaaccctgcctgaagcgctggtatttattgataaggtggttgacgacgttgatattattgaagtgggcacgccttttctaattcgggaaggcgtgaacgcgattaaagccattaaagaaaaatacccgcataaggaagtgctggcggatgcgaaaattatggatggtggccattttgagtcgcagatgcttttcgacgccggggcagattatgtcacggtgttaggcgtgactgacgtgttgactatccagtcatgcattcgggcggctaaagaggccggaaagcaggtggtggtggatatgatctgcgtcgacgatctccctgcgcgggtccgcctcctggaagaggcgggcgcggatatgctggcggtacacacaggcaccgaccagcaggcggcagggcgcaagccgattgatgatttgataacgatgttgaaggcgcgccgtaaagcccggattgccgtggcaggtggtatcagcagccagacggtgaaggactatgcgctgttaggcccggatgtggtaattgtggggtcggcgatcacgcattcggcggatccggcggatgaagcgaggaagatttcacaggtgttgttgcagcatcactga

SEQ ID NO: 231060 - DNA, 885 bp, Klebsiella pneumoniae
gtgagtaaactcttcaccagaggtagctcacgtagaaaaattaataactcaggagtctctcgaaaatgtttgtgctctatttggttatacaattatacttcgcgtcatattttattgtttctattgaaggttaccgtgattataattaattccattaaagataaactggaaaaatccacaaatcactccaatccttttattggtgttgatgagttaggcaatgattggtttgtaaaaacatatttcagcaagtccggtcatgaaacaaatgcgttatttaatgaattagtagcttttaaattagctgagaagataggtttaccttggccaaagggccatctagttcagttttcagaaagtgtaaagagtgaactaaatgtatcaacttctcattttattgcatatgagttcatgcataatctagaagagttgcctgagggttatcaattcagtaataaccaaataaaaaatctctatggcaaatcaatatttgataattggctatcaataggtgatgtaaaaaatgatacttgcaaattgttaaatggtgaactgctattcatggatgctggaatagcctttgaggatgataattgtgaggcgtggggggaaggtggtcttatatggacagaaaataaattgtttattgaatcatcgccatatcatcgcggaattttgcattctgcagaagagtataaatcatgtatggataaaatttgtgaaatacctattgaattttatcaatccatcgcagatagcatccctcaagattggcatgttccggaaagttacaaattaaaatttgttgaggtattttcatcatcttgtgagaggtttattcctatgatgaaatcatgtattgagtgggaattaaatcaccaataa

SEQ ID NO: 231061 - DNA, 444 bp, Klebsiella pneumoniae
gtgtacgccgtcgggcagaagcggctgatggctgaatgcggcctcgacaccttcgacagcgtgcagagcctgctgacgatggccgacggcagttcgtgggtggtggaaaactcgtgggtactgccggagggctttccgaaggacaacgacgggcgtatcgatattctctgcgaggcaacgtatatccgcagtacttcccaacatcgcgggctggaaatcaccacgccgggcatgacgctcacgcccaacagctatttcatcaactaccgcaacggcatcgccagtggtttcggtatcgacccgatcaatgactttgttcactccgtcagacataaagcgccgtacccggtcaccgcaatggacggactggcggtcagccggatttgtgaggcagtgcaccgcagcctggaaagcggcaaacttgaacgcccgataaagccataa

SEQ ID NO: 231062 - DNA, 2052 bp, Klebsiella pneumoniae
atgtcaggcagaaaacagcactatataccacagttattcctgcgcgggtttctcatatgccagcaatctgggcaaacacacgtttatcgcagagataaaatgttcatatctaaaactgatagtgtggcagcacaaagggatttttactctaagccagcaaatgatgcaaataaaactcttgatgataaactgacggattatgaaggtagattaggggaattgcttcgcatattgcgggaaaaaaacgttggtactgatgtcgaggcatctattgctgcagaagtaattgcacatttaacacctagaagtaaaagccttcgtagtatatttggccatggcacacaaaaacttatctctggcttagctgatgtaatatctgataaaacgttaatgatatctcttttagggctggatgaacctacaacaaataaaaaatggagtgaacatatagcatcttctttcaatagaaatccggaaatagctaaatccttggggggtgtttcggaggaaattggcattccaaaagattcgatagagcgaatgctatttatgagtgcaaaagaaagttttttaggtgatgcaaatccattttactttcaattacagcccttgttcactcaacttctcactggtattgaggatgctattagttatggccataaaaaggtacttaataatggtgttgttgtagaggctcggaagcagtctctcgaatcattattatggcgtattttccctgccccgcaagaaggggcgattatgccagattgcatagctattggttttgatgaggaagagggtgtttaccttccctatattatggcctcctctatctctactgtcatcatgcctcttacttccgagaaactacttgttggagttcgagcgagtaatatcaatgttgacctatctggattcaacgatgacgcctcggaatgcagtgatgaattatttattgctgcatcatctgctcatgaatatttacgtaaaaatattggtgggcgatggaaaaatagaatggataatcttgtccatgacacattggatactctatgtgaacataaggcctatgataatttaaatgttgcggaaagtatctcttgtccttcatttagctatcagattacttttaatgatgggcttagtgatgatattgagaatattaatgagatagttcagggggttgtggcaaaactaagccaatggctggatctttcacgattggatggaattacatatgcatctaattgtgaaaaggcacttgaagatatcgaacgtggttttgatggaaatgaaactccagaaagtgaagcagattaccttgctcaaggtggtgctgctcttttagtcaagcggaatgggataataaaagtacgcattgtctttcatcaagattatgctcatgctttggctggtgaagatctgcaaaatagggaagtagctattcatcttcttgtttcatcattatttattgttcatacaattaatcactttgagtatgtacttccagaattcctgctggagcccgtaatgatgaataatcatccagctgttatgcattgtgctatgcgaaaggctctgcgtgcctattattatgcttttgcaagtgcagaatttggagccgaaggattattagaacaggagttttcacattacgtaattagagcccttgattcgaatttttttaagatagttagcgcaaaagaagaacataaaatagacaacaatcattcaaaattgtttaggactgtgcatgctgcagtagctgatattttgattgctatggctcgattaatcggccatttacagggaataagtaaatcaccgttactaaactctgatactgatgtaggtgcagcaatcgccgcacgtgaacttgctgggtgggtggatgtgtttgcacatgatcttgaacgcttctggaagcaaccatcttggactagagaggacttatatgcactaaacgttcatgttgaacgcttgttgtggcctcatggtattttccttttttcgtcagataatgaacaagggacgatgattttatctgtatga

SEQ ID NO: 231063 - DNA, 4317 bp, Klebsiella pneumoniae
ttgaattcgaaaaaaaaattccccatcgatagtataaaaattccattttaccaatctcaactattgtttgaaacattgaatgagcatattttattcaaagaattaccagataaagattatttgttgcaaaaattcagtgaatatccaaatgtcatcccaccaactcaagaacaacttgaaactttctataaaatttttttactaaaaataaacaactgtaaagaattaaaaaaactccacattgaggagacttataaagataagatattcgatgtaagcaatgagatcattcagataaaacttttgctgcaatcatttgatgaaaaatttacttttcacttaaacgataattggttaaataataaaaatagagaagctatagctgatttaggaggacgttacacacccgaactaaatttaaaattagagatcgcagatatcttcgaagggcttgggaaaactaacaaattttccaaaatattttacgaacatatcgataatttcttgatcaaaggaaacaatcttcgaaactgcgatgaaatacgtgagcagttagctttgatttctaaagccttaacagacacctcaattctgtttctaaaaattgattttcacgaatccaaaagcattccaatcaataaatttaatgaatatatctcaaattgtcaaaaatacatttctgaggcggagtcgacactatggaaaatcgaggaaaaggaaaatccggataagacaacaagttttagcgataagtattcatcaattttgagagacttaagagaattttattatgagtgtgacactttatatatatttctcaattctataacggtaaaattatcgaataacccatttctgctccttgaaggagaagctgggattggtaagtctcatttgcttgctgatatcatcgaatcaagaattcaaacaggatatccatctctatttttattagggcagcaacttacaactgatgaatccccttgggtgcaaattttaaaaaggctacagctaaacactgtatcctcagaatttcttgaaaagctaaatctctatggtgaaaaacaagggaaaagattcctgatatttattgatgcaataaacgaagggaatggtaacattttttgggaagataacatcaatagcttcgttgatgaaataagaagttttaaatggcttggccttataatatcagtcagatcaacatataaagatattactatctcaaacgaacggatctctcgtaataattttgaaatttatgaacacttgggttttaagaataaagagatggaagctgttaacttattttatgataattataatatagaaagaccatcatcacctaatttaaatccagagtttaaaaaccctttatttcttaagttactatgcgaggggataaagaaaagtggtctgacaaaagtccctgtaggatttcatgggatttctaagatcttaagtttttttgttgaaggcgtaaataagtcactatcctctcacaaaagatataatttcgatcctagtttcccattagttagtgatgctctcaataaattaattaaagttaaactagctaatggcagaaatagtattgctcttaaggatgctcatacagctgtccagtctgttgttaaagactatgtgaacgataaaacatttctcagctctatgatagatgaaggaatactgaccaaaggtatcgttcgcaatgaagacaactctgttgaagaggtcgtttatatatcctttgaaagatttgatgatcatttaacagttaactatttattaaatggtgttgataacattgaagatgaatttaaaacaggaggttctcttcaaaaatacttcaatgatgaatacagtttttatcgcaatcaaggaatcattgaggctttatctattcaatcaccagaaaaatatggaaaagaaatttatgaattactgcctaattacagtgacaattataatttagtgactgcttttatcgatcgcttagtttggagggattccgcagcaattgattttgaaaaaattaagccttttgtaaacaagcaagtactcggtttcgataatagttttagtcattttcttgagacgctaatatctatttctggattagaagaacatcctttcaatgctaatttcttacataactggctattacagcattctttaccaaatcgagatgccttttggactactgcgttaaaatatagatatagtgaagactcagcatttaaaaatttgattgactgggcatggagtgggactgataaaagctatatatcagatgattcgatagagttagttgcaaccactctatgctggtttttaacttcaactaatagagagctaagggattgtacaactaaagcattggttaatttgttagaggaacgtatctccgttttaattaggataatcaataaattcgatgggataaatgatccatatgtttgggagagagtgtttgctgtagccctaggttgcacattgcgaacaaagaatcataataagctaagtcaattggcagagacagtttttgccaaagtgtttcaacctaaatatgtgtatccacatattctattacgagactatgcgagagagattatagagtatgtttcacatcttcaattgataccggaaggactcgacctatccaaaactaagccgccatacaaaagtaaatggcctgaaaatataccaaccaaagaagaacttcaatcactttataaaaaggatgggtattggtcactttggggatccataatgggtggaggagatttttctagatatactattggaacaaatcataatcactcaaattggtctggttgtaaatttggtgaaactcctattaatcgcaaaaaaatttttaacgattttctaggtcaattgtcagacgaacaaaaagcgctctacgactctacagaccctattatttacgataaaaattataaaagcatttcattcggtaatacacttattaaatatggtgtagcaataggtagaaagagtgaggaggaagttctttcccataaatccgcgttcaagaaatcattgccagaggacttattagctacatttgaaagagacatagaaaaatatttagatcacaataataatctgctcgaaaccgataaatattttgatctaagaattgctgaacgcatgatttttaatcgtgttattaaccttggttgggatccaaaacttcatggtgattttgataagcaggtaggctctgggcgcggacgaagagaatcgttacaagagcgaattgggaaaaaatatcaatggatttcttactatgaatatatggcaatgctttctgataattttattcgttttgatgggtatggagatgaacgcaaagaaaatccttatcaaggaccttgggatccatatgtaagagatatagatccaaccattttaatcaaaaatacaggaacaaaagagttaacccaacaagaaatgtggtgggatactaaagaagtatttgattgggattgtacttttcaagaatgggttagcaatccttccacgataagtaatccatatggactgattgaagtcaatgacaacaatggtactgaatggttgatattagaaagctatccctcatggaaagaacctaaaactatcggtaatgaagagtgggggcatcctcgaaaggaagtttggtgtcaaatcagaggatatttagttagaacaacagaattaaatgctcttaaaaattgggcagaaaaccaacactacatgggcaggtggatgccagaaggaagcaataggtatcaattatttaatagagagtattattggtctgaagcattccattattttaaatcagattattatggcagtttagattggagttctgtaacagatcaagattctggagctaaaattgctgatgtaagcgtcacatcgatcaattatttatgggaagaagagttcgataaatcaaaaacagatactttaagtttcctcaaaccaaccagcttaattttcgacaagatgggcctcaaagatggtaaatatgaaggtagttatgaggataaatatggaagtatagtttgtttcgccactgaagctttaaataactcaaaagcacatttgttaattaagaaagagccgttcttaaaaatgttgaatgaaaataatctagaaatagtgtggacgcttcttggtgaaaaaggtgttatcggtgggtccttaagttcaactcaccagtatggtcgtatagaattcagtggttttttttcttacgacgatggaaaactgactggagcaaacaaaatatattcatcttga

SEQ ID NO: 231064 - DNA, 189 bp, Klebsiella pneumoniae
atggatccaatatcagttacaacagtatcaatttatgtcgcaacaaaatttattgatcagttcattgcagaagaaggttacggatggttaaaaaagaaattattccccaaaaacaactatgttaaccagctctatagaataattgaagaaacggctattgaattcgaaaaaaaaattccccatcgatag

SEQ ID NO: 231065 - DNA, 1092 bp, Klebsiella pneumoniae
atgaaattatctatcgacatttctgaacttattcagttaggaagaaaaatgttgccggaaggcgttgattttttccttgacgaaacgtctgtagtttttgatccaattgatatcgaactttctgcaggtaaagaagttagaattgaagatcttgatcccggcagtggtcttatttcctaccaagggagacaggttcttttgtatattagagaccataccggacgttatgatgcggctattgaagatggagagaaagggaagcgatttcatattgcctggtgtagaacattagatgacatgcgccaaaaaaatcgatttgaacggtatcatgcaacaaatcgtgttgatggcttatttgaaattgatgatgggctcggtcggagccaagatgtcgctcttaaagtttgtatgaactgcctagaacgccttaattacaaaggaagtatagataaacaacagaaaagagtaatatttaaatcattttctttgaatgaatttttttcagattatagtacctgctttcgccatatgcctaaaggaatctatgataaatcaaatagcggctatgtagaaaattggaaggatatatccagaactactcgagaacaagctaactacaaatgtaatgattgtggtgtgaatttaatgtccatgaaaagtctatgcgatgttcaccacaaaaatggtattaaatatgataactcagctgaaaatctactcgtcttgtgtaaagattgccatcgaaagcaacctttgcacgaaggaatatttgtcactcaggctgacatggcaatcattcaacgcttacgttcccaacaagggcttttgaaggccgaatcctggaaggatatttacgatctgacagatccatcgattcatggtgatataaacattatgcaacacaaaggatacccgccaccagttccgggattagacttacaaaacgcggagcatgaaattattgctaccgtagaagctgcctggccggtttcaaaaattgcagtaaatttaacaccggtaaaagtcgatggttggaaagtattctccgtgggagaactcgttaaagaaatacaatctggggttattttctaa

SEQ ID NO: 231066 - DNA, 708 bp, Klebsiella pneumoniae
atggataaaatccttggcaagcaggcccctaaaaaagatcaagataatgaacattgggtttcaatgtcagatttaatggcaggtctgatgatggtatttatgtttatttctatcgcctacatgcactatgtgcgtattgaaaaagaaaaaattaaagaagtggctgtcgcctatgaaaatgctcaacttcaactctataatgcactagaaactgagtttacaaaggatttgccagcttgggatgctgaaattgacaaacaaactcttgaggtccgttttaaatcacccgatgtcttatttggtttaggtagcacagagcttaagccaaaatttaaacagatccttgataatttcttccctcgctaccttaaagttcttgataactaccaggaacatattactgaagtacgtattgagggacatacaagtactgactggaatggagcgtccaattctgacatggcctattttaataacatggaactctcgcaagggcgaacacgagcagtactgcagtatgtctatggtttaaaagaaagcgcagcacaccagaagtgggtaaaaagtaaatttgctgccgttggatattcttccgcacaccctattcttgataaatctggtaaagaagatcccaatcgctctcgccgagtaacatttaaagttgtaacaaatgccgagttgcagattagaaaaataattcaggagtaa

SEQ ID NO: 231067 - DNA, 1653 bp, Klebsiella pneumoniae
atgttagctcagctttttgaacatttgtttcaatcaattgattccacactcgtcacaaacatttttatttgggctgttatctttgtattttgtgctgcttggtggtgtgatcataaaaatattcataacaaattccgagagtacgctccaacattaatgggagcattaggcatactgggtacttttatcggtatcattattggattgcttaattttaatactgaaagcattgataccagcatccctgtattattaggaggtcttaagacagcattcattaccagtattgttggaatgtttttcgcaattttgtttaatggattagatgctttcttttttgccaataaacgtcgcctattggaggcgaatactccagcgtcggttactcctgagcatatccatcaagaattaaaagaacaaaataaacatttagtgaagttaatctctggcatgagtggtagcgaagagggttccattgttgcccaaataaaactactgcgtaatgaaatcagtgatgcttcccgggcacaaatatctaaccattctaatttcagtaataagctctgggaacaattacagcaatttgcagacctgatggcaaaaggagcaaccgaacaaattatcgatgcccttaggcaagttattattgatttcaacaataatttaactgaacaattcggtgagaatttcaaagcacttgatacttctgtaaaaaaacttgtcgactggcaggaaaactataaaaaccaagttgagcagatgggtgagcaataccaacaaagtgttgaatctttagtcgaaaccagaaaagctgtcgcagggatctgggaagaatgcaaagagattcctcttgcgatggctgagcttcgtgacgtgctgcaagtgaatcagcaccaaattggtgaactctcccgtcatctggaaacctttgtcgccatacgcgataaggcaactgatgttttacctgaaattcaaacaaaaatgtctgaagtgggtgaactcttaaaattaggtgccgcgaatgtcagcgcgtctcttgaacaaaccagtcagcagatacttatcaatgctgattcgatgcgagttgcccttgatgaaggcactgaaggtttcagacagtcagtgactcagacacagcaagcttttgcatcaatggcccatgatgtcagcaattcctctgaaactcttaccagcacgctaggagacactattacggagatgaaacaaagtggtgatgagttcctgaaatctctggaaacacactcaagagaattgcatcgaaatatggaacaaaacactactaatgttattgatatgttcagtaagacaggtgagaaatttaatcaacaattatccagcaatgccgataacatgtttggttcaatgcaatcttcgtttgataaagcaagcgcgggactgacatctcaggtgaaagagtcaattgagaaatttggtagttcaattaacgagcagttacatgcttttgagcaagcaacagagcgcgaaatgaatcgtgagatgcaatcactagggaatgctctgctctcaatcagcaaaggttttgtcggtaactacgagcgactactcaaagagtatcaagctgtcatgggacaactgcaaacattaatttctgctaatcaaaaacgaggataa

SEQ ID NO: 231068 - DNA, 3354 bp, Klebsiella pneumoniae
gtgaaaactcccgttaacccacttttgcgatggctcaatgcgttttttagcagtcgttcattacccggagctgatgggagggcgctgtatgcttaccgttgtcatgatgcagagtatgaaagtttggctgctcttcttcgtgcccatgttccacgtaactaccccaaaaccatattcatttcttacagtgatgttttgttcagcatatacgccgctgagtttatccgccgtaaccatactgcaggacatccaagatgggacgttattttagaatcgattggctggaaggtaccttacgcacatcggcaaaagctggtaaatgatgggattcgttactggaaaagaaaggtgagaagtctgggtcaagcatcgggttatctgcatactctggcttgcgaaggcggtttgcccatccggatgattgaaaatgaaagtggctatttaataacctatttcaaacgagtttatcaggcactacgtgggcaatcgtcaaggcgtcctgcggaaataatcgcacaagaactgggcgacactattcctgcgacaatgcaaaatgaactcgtctatgaaatagctggtgaattttgcgagacacttcatacgttactcaatgagcatcccactcatggtcaggaccccgtttcctcactacgcaaacaatatcctgactggcatcttcaacttccgttggtactcccggaagagaatgcctcagagattgtaagacgattactttctcaatcttcagagccccgtatatcaagcaatgtgctggttgaaaggatatgggttgatgttgatgacagttggtattgcgatgcccggtttcgatttccggccacaatgcgtactgaacagttaatatccctgtttgaaagcaatattcagccggaacagacacgactcatcatttctgcaaaatggagaaatggtggggcccggttggcaatgctaagccgttatgaacagcaagattggcgagtagagttattacccttcgctatgcaaaaactctctggggcagatgcgatgaccgaaatatcgttgtcgctccatgaagggccgattctgctaggtcacgtaattcccaaagggggttatgagcttaccgaagatttaccatgggtttttgaagcgatgaatgagagcgagtcgcagttaaaacttgtcggcatgggctctgttagttccaggcaaaactctctttttatttcgctaccgacaaatagtcatttggatattagtggagaaggtgagtttgatatcccgaggttgctgaaaaatagtgaacgtagcttaactaaaataagcggagtattcagcgttgttttacatgatggcgcagtttgtacgattcgcacgcagcaactttatgattctgcgattgagtattatataaaaccgacagagatcgatctggtaaaatctgattatcctgtccatcgtgcttggccaaagatcggctggaaaaaggatatgcagcatggcattgtcccagagaacgaacttttttggcgatccattcgttcaggtaacaactcctggttttctgtcgcatcagtaatgccgaaagggcagatagaagtcaggcgaatagtcaatggtgaggttttatttagcggtaaagttgtgattttgccagcagatttcgatattcaaattattcccgagactgctcagcaaggagttattgtactctctggtataacggatgcaagggttgataaatattcaaacaatgaaaaagtaacacttaaatcagattatttgcaaaacgagtgtgttattgattgtaattcatcacagatgctagagagcaccatcaatttacgagtatcctggaaagatggttctaatcttaaattgttattacctaagcccgttagcggtggacggtttgtaagtaatgatggttctgttcattttgacggtgttgcatctatagcacatttgcatggcgtggacgctgagctgttaacaatatcttgtgccgggaaaggatatcttaatatcgagttgttggatgaaaacccgatgtctgaaaaatttcattatttacatgcggatattccattgttatctggccgtaatgaaaaattgcaacagatttcactttatgagaattataatctgctgaacgccatgcttgtatgtgcatggaaaaatgatagtacattacgtgttgatttttactctgacagatttggtaaggacaaaacaacactcaatattaaacgctacgatggccgttttattgagggtgatgaaagattgctggttgatataaaagattctattgtttttccttaccataaaatagacgacatggttgttgaagccatttctcttaatactcctgacttatgcacagtcctgctgaaaaaagatgagtctggttatgatttctcgacgttgaataatcaaggtggcccatggttaattgtgggtaaaattgatggtgcaattcgtattgcaccagtgattaaatggatgctacctacattacagacagatgatttatttctaaatgctatatgcaacgcatcgccagaacaacgcaaggaatattgtaatgcgctgtttttggaaatgaaaaataatcctttgcaaaactcttgttatttgttggttgagtacattaaaaaatataagttgaataatagcttgcctttgctggaactggatttatttagagaaatttcgagtaattattgcgtggttgttcagttgttaatatcatcatgtctttctggggatagtgatgctatttatgatatacaggaggaattacccttctcatggggatggattcctgtttcaatatggaaagatgtctttgaacagtgttggtgttctctggaaaaacagattaatgataaggcatttgcattaaatatactacagccatttattgcatttataaatcatcaagcgcatatcgatcgtcgattagttcccatcgctaatatgttgcttacacatagtgagatattacctgcaggttgcactgtattgccatctgtaagccgcgagcagtttaatgatgccaaacagatgttattaagaaacccagatagttttggacgtgtcagcattttttctaaagagctttgggatagtgctattactccagaccttaaatctgtttttaataaattttggatcgaaaacacatatcacactcgttttgaaaaacgttttaatttgatgttagtcgcggcgctgctttcccaaagaaacaataaacttatgcatcagctaactgcactttttgaatttcactatcagcaagccccgcagcaattgggggttatctatcagtattattttgaacaagcaggagtatgtcattga

SEQ ID NO: 231069 - DNA, 6327 bp, Klebsiella pneumoniae
atgaacgttcagcaactgcattatgcgccacttctaaatcagcttcatcagcgtgcggtgaggtcggtggtaagtcagctggcattgcggagcaagtcgttgagtcaatatctggaatctcaatatttccagcctccaggtctgggggggtcactgcttgcagatccggtattcgaaagtacgtttggctggatgcccgcggatgaaacaatggaggatttgcgtgacaaactgatctccagcccgctggttgatgctttgagcaatgcgccagtgccgtttcgtcatcagctaactgcgtggcgaacgattcttgaagacaagcagtccctattagtgagcagtggtacagggtcaggaaaaacagaatgttttatggtgccggtgctggaagatcttattcgtcagcaaaatttgacccggcagtcactaacagggacgcaggctattttcttgtatccgttgaatgcgctaataaatagtcagcaagagcggcttcgcgagtggactcgcgggtttaaagggaagatacgctttgcgctatataatggcgaaacccggcataccaaatatgaagttcaggaagaccagctcaaagtacctgaacaggcattgagtcgggaagccatttatgaagccccaccgtccatcatggtgacgaataccacgatgctggaatatatgctgattcgtcgcaaagatgcccctgtcattgaaaagtcccagggaatgctgaagtatatcgtccttgatgaggctcacagttatattggctctcaggcagctgaattagcgctgcttttacgtcgcgtcatgcaggccttcaatgttggacctggtacagataaacctgtgcaaatcattgctacctcggccactattggtgaagattctcctgaaggtaataaagaacttgctaaatttgttgccgatctcgcgggggtcacagaacgtgatgtaaaagtagttcgcggctatcgacaaataccgccgatatcggagtctcttattcgtcatgaatatcccacatctttagcatctcttaactcactaagttctcaggaactttaccaacagctgtgccattaccgtgtggcccagcaattgcgtcaggcgttaactcgccccggacgcctggcggtacgtttgagtgaattgctcaatgttgccagaagaacctggccagacattaatcaccgtgagctgctgcagcttctcgatctgatggcgaaatcgcgagagggtgaatctaaattttcactagcttttacgccattacgtatgcatgggtttatccgaacactcgcgggcctatgggcatgttcaaataaacaatgcgcacataaagcgagtgaattaggtgagagtgactggccatttggtcaggtatggtttgaacaacgccaatattgtgactgtggtgcgcctgtatttgaaatcttacgttgctccgggtgtggttcagcttatttgtctgccaaggaggaagtgcgcggtgatggaacgagctggttggtggcgcaacctgctgctgccgaagaggatgagtttgctcttgatctcgatgtttattctgaagatgaagataacaacgaattagaaaataactcccaatttgatcgtcttatagcgagcgatggtgaaaaatatatcatttcactggaggaagcgacggcgggtaaaatcgaccgcgaggcgcaaaagcactatgagataaatctgctaagacctgaatctcgaggtgagggacgcaataattcctttgcttgtgtttgttgtggtgacacccaacggaaaaataatcctttgttccgtccgcttcgactcggtgcacccttttttttaaatgaaattattcctactctgcttgaattttcgcctttaccgcaaacaagagaagagcagttaggaccgtttaatggtcgacgtttgctcacctttacggattcacgtcagggaaccgcccgtatctctgcccgattacagcaggacgcagataaagctacgttacgaaccctttgttatcaggaactggcaaatattaatgagccatcagtaaagctcagtccggcacattgtgcattattagagagttttattacccagttttctatccctccgttaaaaaattccatcgacgcactgagaaaagcgatggtttcgaatgagaagcttagcccagcagacgttcaggcgcttagaattatcgagccgatggttagttccttaagtcaggaacatgctgaagcaatgcaaatactcctcgtcaattcaggcaatcagcagaagaaaaccatgtcgtggcatactctgtctgaacaacttgttggcagtgtggatcttgcggacagaatgagaggcagttttaaagacttgtctggacttgagcttactaaacaacagtttgctgatttttgtttatacagtgagtttggtcgccgccctaaaaatgcctggaccctcgaaagtctggggctggtggccattcactatccatttattgataaagtcacaacctgcccgcaggactggaagacattattacccgaccccgataagcaattaccggaatggcgtaatttattgaagattacccttgatttctttatacgtgaaaacagtgccgttttttacgaaaacgaggagtaccctcgctggatgggagcacgtttcccggtaaaaatgctgcaggggccagataaaaaatacaaagggcagaaacgtgatcaactttggccacaaatacgcgatcgtcattataaccgggtcattaagctattaattgctgtctttccggcaatacagcctgagcaggctcactggaaagcgctggttaattacttaatgaatgaggtctgggaagctattcgaccatgcctgcgtcagtttgaatcgggttatcaattggacattaaacaacaagctgaattttacagtccaaagcaagtctggcgttgcccctatactcgccgtgcgttagatgtcactttattgggttattctccgtatttaccaggtagcaaagagatagcacctgaaaaagctgtattgattgaaatgcctgagcttcctgcgcgtcactggcgtttatctggtggtggagaaatggcgcgagaagagcgcctgcactggctggaatgtaatgaacgcattcaacatgctcgggaggagggggtatggtctactcgcagtgatcgattggccctgaaagatagctggtatcgtctggaggaacactcagcgcagcgaacaccagagaagaaccagtttaatgaaaaacaatttaaagcagggaaagtcaatgtgttgaactgttccacgaccatggaaatgggcgtggatattggtggtatgagtttggtcgcgatgaataacgttcctccggctccggcgaattatttgcagcgtgctggccgtgctggccgtcgcggtgaaagcgcatctgccgccattacgttatgtaaaaacaccgcgcatggaatggaggtattcaaagaccctctctgggcgttcaacaccgttgcgagtgccccacgggttcgttttggtagcagtagtattgttcagcggcatgttaacgcattggttttaggtgcgtttttacgggctgaagttcctgatgcgacaaaactgagttgtaaatggttctttgaaggtgatgagagccagtgtcttcgttttctccattggttaaatcatcaggccgatcagctggcggataaacttaaacgccttacccagggaactgtactgatgtcattgacgccgccacagctcttgactcgtacgcaaacgatgatgcagctggttgatactcgttggagaagccaacttgccatactgttggaaaacatcgaagcgttgaaagcagataacagcgcgtgggaagaaacgccagcaggcaaagcaatcacttatcagcttcgtgattatcgcggtgcttatctgttttctaaactcatcagtgaagcgttcctgccgggtcatggtttcccggttggcgtggtcaatttcaattatctgactgcggatgaactggaaagacgtcgcgcaataaaagccactcaggctgaccctaatgaagggggagaaaacttttctcgccgcattgaaaaactgcccagccgtgacctgcccacagcattacgtgaatatgctcctggtgctgatgtggtattgggcggaaaagtatatcgttcctcgggtattatgcttggtaaagtacttgccagcgggcaggagctgtctggcgatcatcatattccgtggttctggcattgccgtaaatgcggcgcgggagcgaccagcgccacccggcctgtcgaatgttgccactgcaaggcagatatacagcagcttgatgtgaagcggtatttacagcctgtcggtttcgcgacagacattcgttatcaggcacataatgatgtatccatgcctgcgcaacttccctggaaagatcctcgtgttcttgtaccttcttcggtatgggtctccttacccgatgctggactcggacgttaccgttttagtcatagcggggaattgttccactttagtgagggtgaatttggtcatggctacgcaatttgtctttcctgtggccgggcagaatctcaaacccagccccagcgtactccggagaatctaaagaacccggagaaggaaaatacacactacctgttgagaggcggtagtaatgatcggcaggggaacaataaattgtgccacggtcatgttcataaagatctgtggttgggatatagcagccgtacagatatggttgagctgcaactcagtgatgatagtggcttactgatcagggatgatgttgccgcgcgttcccttgcggttgctttgcgtgaaggattagcgcataaattgggtatcgaaaatactgagctgggcgtgacgacacagcaagcgcgcgatatcgatggcttcactggatattctatctttatttacgataataatgctggtggtgcgggttatgcagtgcaattgatcgataattggtcggatgtctttaattacgccagaaaattgctcgattgcagctgtgataaattctgccaccactgcttgctcagttacgacagtcagcattatgtcggcaaattagatcgtcaccaggcattaaccctgctcactaatcttcgtctacagcggcttaatctcgcgccagaatatcagtacttcggagaaagtagtcgggttgaaaccaacccactcagtttgcgtattgcgcaatgcctgaacagcgaggtttatgattcttgctcgttggttcttgctgggtcgcaggaacagtggagttttgcgcaatggccattatttaaagagttactccagtttgcttcctctgggggcaatgttgagttgctgattgccacgcagctggaaaacttagctgatagcaccagacatcagctttccgcgctagcggcgataccgggtgaatgcttgcaagtgaaatctatagacactgcgcaacttgtgcaagggaatgggcacttactggcacaggtcactcgtgaggggcaaacccaacagtgggccgctgccgacagtgccaccgtttcgcccggtgaattatggggacaaagctcggcatcgccggtagtgacgattaaaggggcgtccagaaaaacattctcgggtcagactttgagtgcagaagacttactgccagcattgcccgccggggcggtacgcatcaatctcagccaacaacttgacggtcaggtggaaggttttggttcgcgtttctgggcactgatagctcagcagcatgctgactggaagaaggtttttactaatggacgcgaaattactcacgtccattatagtgatcgttatctcaatagcccatttactgtacgtttgttaggtgaaattttgacggaattggttgaacaggggctggcagaacgtgccgaactcactgtttcagttaaaaagttagagtacagttctcgccaacacgattcactctataacgcatggcttgatgagcaggatcgccagcaagttatgaccacgttgctggaagagggctaccttgggccagcctggtcagggaaaatctcatggttagcaggagataatcagaacaccgatcacggacgtgaactgaccgtgaccttcagcgatggcagtgaacattatgtgttgctcgatatgggactgagttactggcgttgtacaggtgacacattcttcgatttttcaggacgaataccgaatcaggtcgagcgcctggcaacatgccgggcattggttatagccccggataatggattgaagagttatatcatcgcaggctaa

SEQ ID NO: 231070 - DNA, 2547 bp, Klebsiella pneumoniae
atggactccatgccctttcagctcgatcccacgcgcatggcactggcgcaaccgcgccagcggatattaattgctgatgcggtagggctgggtaaaacgctggaagctggtatcctggtttcagagctgattcgccgtggacgtggcaaacgcattctagtgctggcggttaaatccatgctcacgcaattccagaaagagttctggagccgttttgctattccgttgacgcgacttgactccgctggtttacaaaaggtgcgtaaccgcatcccaaccaaccacaacccgttccactatttcgataagaccattatctccatcgatactctgaaacaagacatcgaatatcgccaccacctggaaaacgcctggtgggatattattgttatcgatgaagcacataacgtcgctcaacgtgggaccagttccttacgcagcaaactggcaaaattgctctccgggcgtagcgatacgctgattatgctctcggccacgccgcatgacggtaaggctgaaagttttgctagcctgatgaacatgctcgacccgacggccattgctaatcctaaagagtatgaatacgccgattttgccgacaaaaatctggttgtgcgtcgctttaaaaaagacgtaaaagatcagatggctggcgagtttccggagcgcaatatcgtcaaattgatgcgcccggcaaccggagctgaagaagaagcctaccgccgattggttgagagtcagttccgtgacgatgatgatgaagactcgcggtcaaataaaggccgcctgttcaaaattacgctcgaaaaagcgttgttctccagtccaatggcatgtgccagcgtggtggctaaccgcctgaagcggctggagaaccgcaaagaaataaacagtcagagccagattaacgaattagagtcattgctgctggcactcaataatattgatgccagtcagttcagcaagtatcagttattgctggagaccatccgtaacgatctccgctggaaaacgaataacacggaagatcgtttggtgatctttaccgagagtatcaaaacgcttgagttccttgagcagcaactgcgttccgatctcaagctgaaagacgatcaaattgccacgttgcgaggcgatcagggcgatacagttctgatggaaaccgtcgaagcgtttggcaaatcccagtctccgctgcgcctgctcatctgctcggatgtcgcgtctgaaggtatcaacctgcaccacctcagccataaaatgattcacttcgatattccgtggtcgctgatggtattccagcagcgtaacggacgtattgaccgctacgggcaaaaacaccagccacagatccgttacttgctgactgaagccagtgaaccgcagatcaacggtgatatgcgcgtgctggaagtgctgatcaataaagacgaacaggcgcagaagaatatcggcgacagttccgaatttaccggcaaatttacccaggaagaggaagaagagcaggttgctgaattcatgatgcaggacgatggcgccagcctgttcgacgacctgttgaatagcaatgtcactgaaaattctgaacacgacctgtttggcgaaatctgcagcgcagtgtccagcgatgcctcaaccgtgaccgaaagggacattagcctgtttgataatgagcaggcatactgcgaaaaagcgctgggctatctgaaggcctgcggccagaccgtgcaatacgataccttgcctgataacaccttatcgctggtcgcaccggaggagttacgccgtcgctttaaccagttaccgccggaaattgcgccggaaaactggcagctttatctaagccaggacaaaactgttattacggaagccatttcgcgtgcgcgtggtgagcaacatgcctggcccgatgtgcagtatctctggcaaattaacccggtcgtgcagtggttagacgacaaaattcagtccgcctttggtcgccaccaggctccggtgatgcgcctgccacacctgtttgagcctgatgaagatcatttcatcctttccgggctgttcccgaaccgtaagtcgcacccgatggtgaacccgtggctggtggtcagctttaaccgcgaaacgttaagcggtagcctgccttttgctgagttcctgaaacgacatccgcaactgagtagcaagctgactaacagtggcggcaaagatcgcaaccatcaacgccagcaggatctgctggaggcggcaatcgcccatgcgcgggatgtgtttgttcacgatcgaaatgcttttgaagagcgtatcaatcagcagctcaatgagcatctacagaagctggatgttctgcgtgggcgtcagctgagtcaactggagctggattttgccgataataaacagcagctttcggtgaaacagagccgcaaagaacaacgtcagcgagaaatcgaacacaattttgacagttatatccaatggattgaggacaccatgaccaccgaaaaagagccctacatccaggttattgctgtaatcaccggagcggagggctaa

SEQ ID NO: 231071 - DNA, 4914 bp, Klebsiella pneumoniae
atggcgctggtcggtattaataacgaaaacgaattttactccaaccactatctgggcgaagtctttaccagcgacatccgtgatgttctggagccttggattgagcaggaaaatgccgctcgcgaggctgaacgcgctgcccgtgaacagggcaaagaggttgaggcaggctaccgcgcgccgtggaaccagcttaacagcctggcgacagagtttttccgcaaactcactgatcatgaaaaacagcgccagatcccgcagcgtcttgccgatcaacgcactcgctggcagccgctattaaaggcattgggttatgaactcaatccgcatattcagatgctggatgacgatacgcctttgccggtactggctcgttacaacagcaccgacggcagtccgtggctgtggattgtcgaagcacatgaccaggaagaaggaacgctggatccgctggcgctgtcgctgctgaccgcgcagttcccggcagataccgataaacataagcgcgacagtctgcgtaaaaaagcgaacggcgaataccgcagctggcaggatctgctctccacggtggtcttcacgcaaaatgaaccgccgcgttttgtgctgctgctcggtaaccgccagctgttattgctggatcgtactaagtgggcgcaaaaccgcctgctgcgctttgattttgaagaaattttaagccgtcgtgaaacggatacgttgaaagcgacgtcggtgttgctacacaaagattcgctgttgccaggcagcggtgcaccgtacctcgattcgctggatgacaattcgcacaaacatgcgtttggcgtgtcggaagatctgaaatatgccctgcgtgagagcattgagctgttgggtaatgaagcgatgcgttatctcatcgacaacgagctggcttattataccgggaaacgtgctattaacccggatgagttgagccgcgaatgcctgcggtatatgtatcgtctgttgttcctgttctatatcgaagcgcgcccggaactgggctatgcgccgatgaccgccaaaacctatctgcagggctacagcctggaaacgctgcgcgatctggagatgatcccgctgaccagcgaagaagatcgcaatgggcgctacttccacgatagcctgaatatgctgttcaaactggtgcgtgacggctacagcggcggcgtgaaaatgcagagcgacctggagagcggcgacctgatcactattcacagccatcagttcagcgtgccgcgtctggaaagccatctttttgaagcgaataacacccgtattcttaaccgtgtggtgttccgcaacgaaacactgcaacaaattattcaggcgatgtcgttaagccgcccgggtaaaggacgttttaatcgccgggggcgtatctcctatcgccaattgggtatcaaccagttaggtgcagtgtatgaagcgctgctctcctaccgcggattcttcgccagcgacgatctctacgaggtgaaaaaagccggagaagagtttaacgagctggagacgggctatttcgtcagcaaagacgagatcggcaaataccacgacgacgagaaggtctacgaaaaagacggcagcctgcgtattcatcgtaaaggcagctttatctatcgcatggccgggcgcgaccgcgaaaaatccgcctcttattacaccccggaagtgttgacccgctcgttagtcaaatatgccctgaaagagctgtttaaagagcagattgatccgattaccgatctgcacgccaaagccgatgcaatcttaaacctcaccgtgtgcgaaccggcgatgggcagcgcagcgttccttaacgaagccatcaaccagctggcggaagcttacctgttccacaaacagcaggcggaaggtcgccgcattcctcaggatcgctacacccaggagctgcaacgggtgaaaatgtacattgccgacaacaacgtattcggcgtggacttaaacccggtggcggtggagctggcggaagtgtcgctgtggctgaatgccatcagcggcgatgcatttgtaccgtggtttggctaccagctgcactgtggcaactcgttggtgggcgcacgccgtcaggtgttcaacaagagcgagctgacctacaaaaaagcgaaagatccgagctggcttaacagtgaaccggccgagctggcgatgaatattccacgcgaggagaagcagattttccacttcctgctgccggacagcggtatggccaactacagcgacaaaaccgtcaaacagcgctatccggatgatttcaaagcgctggacagctggcgcaaagagtttaccaaaagctttgaagcgcatgaggttgctgatgtgcagcgcattagtggcaaagtggaagcgctctggaacacattccgacagcagttgaaagccgagcgccagaaaaccgccgacaattacccagtatggcctgcggataatacggctcaagtccgctcttctatacgcagtaaagatgaaaccttcagcggtcgcctcgaagataacagtacctatcagaaactgcgctgggtgatggactactggtgtgcgctatggttctggccgatcgacaaagtggatgaactgccggatcgcggtatgtggctgatggagatggagactctgcttgacggtattgtcgtcacggaaagagtcactgaagccgcagaacaggccaccggcgatctgtttgccgacgagggcatggtgcgtgaagagtcttcgctgttttccggcgccggtcgcctgaaaacagatgtgctgttccgccatttgccgcgtctggcgattgttgatgcgttgaagaagcagcaccgtttcttccattgggatctggaattctgcgatctgttcgccgagtgcggcggttttgacctgatgctcggaaacccgccgtggttgaaagtagaatggcaggaagctggcgtgctgggtgactacgagccggaattcgtgctgcgtaagctgagcgcctcgaagctggcgacgttgcgtgctgatacctttaacgccattccggcgctggaagcggcctggcgcagcgagtatgaaggctgtgaagggatgcagaacttcctgaatgcgcagcagaattaccctgtactgcgtggtgtgcagaccaatctgtataaatgcttcctgccgcaggcatggcgcttaggggcgcagaaaggcgtggcaggtttcctgcacccggaagggatttatgacgacccgaaaggcggtcagttgcgtgcgtcggtgtatccgaggttgagggctcattttcagtttcagaaccagagaatattgttccctattggcgatagagttaagtacagcattaatatttattccagtacaaaaaacgatcatgttgagtttgttaatattgctaaccttttctcagccaaaacgatcgagctttgctttgctcatgatggctccggtgaagttggtggcattaaagatgacgaaacaggttcctggaatgaagcggggcatcaaagccgtattttggctgttggaatggagcgacttgcactatttgccagtctttatgatgaagagggtacgccggctcttgaggctcgacttcctgcgcttcatgctgaaccgcttgtttctgtacttgaaaaatttgcaaagcagcccagacggttgggggacttgcaggggcaatatttctccaccgtcatgtttgatgaaacatatgctcaagctgacggaacgactaaacggcatacccaatttccggaagacacatcacaatggattctgtctggcccacatttctatgtcggaactccgctttataaaacaccacgagagatttgcacagagaaaggacactatgattgcctcgacctgctaactctgcctgatgactatctgccacgcactaactatattccggcatgtgatgtgcaggaatatgccaaacgtacaccacgcgttacgtggactgaaccaggcgaagatgaaccgaggaaggtgacggattattatcgcttggctctgagagctatgattagtattggagctgaaaaaggattagtacctgcattagtaccaaaagatgtagctcatactaacggcgtgagaacatattgttttaattcatccgatttacttattcgcgtctctggagctgcatattctctgatttatgatttcatgatgaagttgtcaggcagaactaaccttcatcagagtatagaagaatacgcgttgcctgattttgttgaaacagcgcatcacttatctgctcgtgtcatgtcattaagtgcattaaccacgagttattctgatttctggcaatcctgctataccccagatttcaacacccagcgctggagccgcaatctcccgcaactcccacaagatttcttcaccaatttgaccccagagtggcagcgtaactgcgccttgcgctccgactacagccgtcgtcaggcgctagtggaaatcgacgtactggttgcgcaggcgctggggttaactctcgaagaactgctcaccatctatcgcgttcagttcccggtgatgcgccagtacgaagccgatacatggtacgatcaaaacggccgcattatctttaccccaagcaaagggctggtgggcgtcggcctgccgcgtaccgcgcgtaaagcggacctgaaaaacggctttgtctttgatatcgacagcccggactggtccggtggcgactgtaccgataaagctattggctgggatgatgtcaagcatctgcaagccggtaccgtcagcgtcacttttgatgactatacccgcagcgatgaaagcgagcgccgaaccgtcacttggcaggctccgtttatcaaacccgaccgcgaagatgattacaaagtggcctgggcattctttgcacaagataaggagagcgcgtga

SEQ ID NO: 231072 - DNA, 6342 bp, Klebsiella pneumoniae
atgctgccttctgttgtcagtcggcaggttgccgacagcgttgcttcctttttacgggcagccttcccgcttaacagcccgctgtttaatggtgaagaaaataataacgtctcgatgctggagcaatttctgtcccagccggaaacgctgctgaaagggccgtatctttccgctcagctgccgtttcgtaaaagtgacttaccgctgaacttcttccctaacctgacgctgccgttcccaccgcacgcgcatcaggcgcaggcgtttcagcgcctgggtatcgagatgcctcaaccgacgctggtggcgaccgggacgggttctggtaaaacggaatgttttatgttcccgctgcttaaccattgtgcgggggcatcagaggccggtgttaaagcgatcatcatttacccgatgaacgctctggcaaccgatcaggccagccgtttcgccaaaactatcgccagcgatccgcagttgcatggcaaagtaaccgtcggcctgtttgtcggcgacagtgaaatcgaacccagcaaaaagatgtctgcggataaagtcatcacctgcaaacataccctgcgtgagaacccgccggatatcctgctgaccaactataagatgctggattacctgctgatgcgccccggcgatcagaaactctggcgctataaccagcctgggtcactgcgttatctggtggtggatgaactgcatacgtttgatggtgcccaggggtcggatctggcctgtctggtgcgccgcttaaagcatcatattggtgtcgatgacaagcgttttgcctgcgtggggacgtcggctaccgtaggtgacgaactgggacaactactcgattacgcgaaaacgatctttgatcagccgtttagcgatgacgcggttattcgcgaagatcgctacacggcggcagagtatctgcagggttataccattgagtacagtcagtatccgggccaggaggccagcgctgtgctggatccgcaagcgtacgccagcccggtagattatctgaacggacaaattccgctgtggttcccggatagttcactgcaattacctgccgatctggacagcgatctcggacgtgaaaagcgtattgagttgggctcactgttacgtcgccacagcatcctgcacgtactccttgaggatttgcaggggggaattttgtcggaacagcagtgcctggaaaatctccaggtgatgctggcggaaagcgccgggcatgcaacccgcgtgctgcaaagcattctggcactaattgcccaggcacgcctggaggttccagaaaaacaggaagatcgggaaaagcgcctgcaggcgaataaagcgcgtcccgttctgccttttgtgcaactacgttctcagctgtggttgcgcgagatgcgccgcctggttgccagcgtgtcaaaaacacctaagcttgtctttgccgatgatgtcgcggtggaagatcgcgaacattatcttcccgttattcactgtcgtgactgccatgctaccggttgggcgagcctgcgccatggtcagagtgttcaactcgaaaccgacctggatggtatttatcgtcagttcttcgaaaaaggccgttctattgtgcttgccttcccggataacaacgataaaccggtcagcggtgttcaccagaaactgtgcccttcctgtttaaagcttaacaagcagactaacgtacagtgcgggcattgtggccatactgatctgctacaagtactcatcccggatatgctcaaagagcgtaaggatgagctggaatttgctaacgaatgtccgtactgcaacagcaaacagagtatttcgattcttgggtcgcaggcagccagcctgtcggcggtgatgatccatcaactttatggcagccagttcaacgaacataaaaagctgattacgttttctgactcggtacaggatgccgcacaccgcgccagcttctttaccgcccgaacctggccgttgatggtacgcggacaaatcgccagcgtgttgggtgaaaaagaaacgttaccgttggatgcctttgcggcacgcgtctgccagcagacgcgtgaacgttcaccggatgatgctcattttgccgcgagcttcatcgcgcccaacatgcagtggatgaacgattaccagacgctgaagaacgaaggccagctggcagagagttccgatttaccggagctggtttctcttcgtctcgactgggaggtatacagcgaatttaccctacgcgcacgaattggacgtacgctggaggccaccggttacgcagctgcaggaattgatgttgcacgtttcaattcagcgataacggcgcttcaccaacagcttgtcgaagagctgggtgatgaaatggttggggttagcgttgagcaagtggcacacctggtaattggtgtcctttggcatcagcggcaggcgggagctgttctgcatccggcgttcgaaagttatcggcgtgagggtaagacctttatgatgacgcagaaggagcgaacttcgcgctatatgccgtctattggtccgaaaacgcgtaaacccgcctatgcctcgtttgaaaaaataaatggcttccatcgcctgattggtgcgaaatctaaccccagctggtatcagcattggatcaaccgaacgctcagcaacggcaataatctgtttatcagcagcctggccgagacggttttacgacgtctgtttgcgacactgaaaatggccgggttggtaaaagactttgacacaaaaggcaaagaagcttgggggctggtaccttcagcgctggtagtgagccgagatgttattcagctaaactgctcttgctgtcgtgaggttgttcgggcaccggccgatcaggggtggcactggcgaaacgcgccatgtctttctctgcgctgtgaaggccgctatcaggaagttgaaaatgctgtgacctggcactgggataatatggacatcgcgcgtgttcagggggcagagcataccggattactgagccgtgaagatcgtgaggctacggaacaatcgttctatcgtggtagtcagccatggaatatcaacctgctttcggcaacaccgacgctggagatggggatcgatgtgggtgacctttctacagtattactctgttctgttccacccgcgcaggctaattacttacagcgtattggtcgtgccggacgtaaagacggcaatgcacttaacatcacggtggctgaggggaacccgcacgatcagttcttctttgaagagcctctggagatgatgcaagggcaggtacaggcccctggtgtgttcctgaacgcaacggctattttggagcgtcagttggccgcattctgcatggacaactgggtgaaaacaggtgttccggtatctgctatcagcaaaaacgtgaagcagatgctggacgagctggagtttggacacaagtctgggttcccttataacttcctgcgttatattgatcagcatcatgtgtatattgctcagcagttctcatccatcttccctgatcttacggaagacactcgtctacagttactgtcatatttgcaaggggcaccagggcagcgttctctggttcaacgtatcgaacaagcattaaaactgctggtggaggatcgcaaatcgttgcgttcccgaattgataaactcaagcgcagtatcgacaagctggatagcgacccgcacgatcaaaactttgacagcgatatgcgcgagttgacttcggaacgtcaggcgctaatgacgctggtgaaccagatcaataacaagcaaacgcttaatttcctcaccgatgaaggattacttcccaactatgccttcccggaggccggtattacgctgcgttctgtgctgtggcggcgcaaggacggtggggaaacgcgtgagtatcagaacacgacctacgaatacgaacgtccggcttcaacggcgctggctgagcttgccccgttgaataacttctatgcgggtgggcataaagttgaaatcgaacagattgatctgaaagtgtctgagcctgaaaactggcgtatttgcagccactgtaactacagcgagaatatcgatcagactggcgatcagcataaatactgtccaaaatgcggcacaccaggttgggctgatgccgggcaaaaaacgacattactgaagcttcgtcaggtttatgcccgctcaagcgcgcgtgacagccagatcagtgatgagagcgatagtcgcgaaccggcattctttcagcgacagctactggtcagcttcgaaaaagaggatgtatcggccgcttatgctattgatgaaggagaaatcccgtttggctttgagtttttgagcaaagtgactctgcgagatatcaactttggcaaaatggcggatgatgccaatgagctgatgatcgcaggagaggcaaagaaacgcaccgggtttaaagtttgcctcggctgcggcatggtgcagcgccctcgagatcatgaaccacgtcatgacctgagctgtaaatatcgcgctgaacccgaaaaagcgaagtttgaagattatctctacctttatcgccaactggaatctgaggcattgcgtatcctgctgccagtgaccagctacagcaacgatcgcgtggtggaagcctccctaggggcagccattcagcttgggcttaaacattacttcaaaggtaacgtggatcatctgaaaggcgtggtgtatcgcgagccggaaaatgagggcgaatcctggcgtcagtatctggtgatttacgacaccgtaccagggggaaccggctcactcaaagaattgatgcgtacacctgacaacctgctgaaattacttgagctggcctacaaggcgctagtggaatgcagctgcaaccatgatacgcataaagacggctgctatcgctgtgtttacgcttaccgtgaccgcgggcgtatgaagtatgtatcaagagatcaggcgcgtctcttactggcgaaaatcctgaaggccagtgctgctatacgcgttattgattccatcaaaaacatttcgcttgatgccatgatggggagtgaactggaaaaacggttcattcactgcctgcaggataacaaaaatcttctcgtgagccggagttatgcccatcagaatgcaggctggattattaatatccgtacagaaccggcgatgagctggcatctcaaagcacaggttgatttaggggttaaagaaggagtaggcatccttagccgaccagattatgtgctctatcctctgatgcagtcagaaaagataaaaccggtagcaattttcctggatggttttgcttttcataaagatagcgtgtcggatgatgtccaaaaacggcaggcgattaaagacagcggtaatttttgggtatggacactgacctgggctgaccttcaagaacaaggcattaaacatgtacagaatgttatggggcttggccataatccggatatgaaacagcctaagttttataacctgttccatgatacaaactttgctacgcttgaaggttcattccgggagagaaacagttttgcactgctactcgattatctctctgatcccggtaataaaactatgctatggcagaaaatggccgctgcctttgcctgggtgtggctggatcctaaaaagtcgcaggatactggagccaaacaaaagtacgcctatgaaatgcaggagaacgctcccgcttatcggttgaatgcacttttgcctgatgaaccttttgtatttggtggtttactggatagctgtagttcatcacaacagttcattgagctggcagctgttgtaccgcaacaagccattaaatcaacgacaagcattgaacaaatgcgaaattggttgaggctgcatatttgctttgacgatcgttattcccaggatgatggctatgaagccggatttaacggtttctggtggatggtgaatttactgcagttcctgccagatatgacatttaccagccgtaaagcggttcatttaccgcaggaggctgaaacggtaaaaatgcagacttcggttgtagtggatattcagcctgacgagagctgggcagaaatacttgagtttggcttattgggcgcagaagaaatcgctttgcttcagtcgttatcactaccggcaccgacggttggatatgaattgcaggatgacgatggcgaaattattgcagaagccgatctcgcctggccattacaaaagcaagccttgattattgataatcaggagtttactgctttattcgcaagtaagggttggcacgttgcattcgggccaattgacgaaaatacattgcagcatctgtccggaggtgacaaatga

SEQ ID NO: 231073 - DNA, 2124 bp, Klebsiella pneumoniae
atgacgattccaacgccaaaggtggcactttctgatggttttctgggggcttttgcgcggattcctaaagcgcagcaaaaaaaggtccaggaattcatctctaagttccgccaggatccgacgagtaatgggctgaactacgaaaagatccacgatgcacgcagcaataatgtgcattccgtgcgtatagaccaaacctaccgggggatcgtcctgaaacctgagcagggtgctctgtatatgctgatgtgggtggataagcacgacgaagcctacgactgggcgcggcgacacgaatgtgcgattcacccggtaaccggtgcgattcaggtgattgataccagctatatcaaacctacccccgagccgactgttgtcgataaacccaaactctttgctgcgtatacggcagagcagatcctcgcactgggtgttcctcctgtgtttattgagcaggtgatggctcttgtggataccacagggctgaatcagctggaaagcgtgatgccagcagaagcctgggagcccctacactggctggcagaaggtctggattaccaggaagtgctggaggagtttaacgatcaccgtgatgagcctgttgataccaacgactttattgaggcaattgagagaagtaaacgtcgtttccatgtcgttgaaaatgaacaggagctactgcaaatgctcaatgcgccactggaaaaatggcgtgtattcctgcacccgagccagcgaaaactggtggagtctccggcaaatggtccggtgcgagtgttaggtggtgcaggcacgggtaaaacagttgttgcgatgcatcgtgcacgttggttatcccaacgcctggccgataaacccggtaaaaaagttctgttcacaaccttcacccgtaacctggcggcggatattcgcgccaacctccagcgtttgtgtagccgtgaggagatggcgcgtattgaagttgttaacattgatgcctggatgagcgagcagcttaaacgccatggatatgatttccgcgtggtctatgacagcgatgaagggcgacgtaaatgctggaactatgccttgcagcaagttcctgctgaattgggattaccggataacttttattctgaagagtggcaacgtgttgttcagccgaatgcggtttacagccgtgaagaatatctgaaggtgagtcgtattggtcgtggcacggcgttatcccgtattcagcgtgcgaaaatctggcctgtgttcgaagagttccgggcacaaatggcgcgagccaaactgcgagagatgggagatgccatgcatgaggctatcattctgtttaaagaaaaacaggtgcaattgccttatagcagtatcgtagtcgatgaagctcaggatataggcgcaccggcctttacccttattcgtagcctggttccagagtctcctaacgatctctttatcgtgggtgatggacatcagcgtatttaccgcaataaagtcgttctaggtcagtgtgggattaacgttcgtgggcgccgtagtaaaaaactgaaaattaactaccggactacagaagagacgcgacagtttgctgtcgggttgttaaccggcgttaaggttgacaacctggatggtgaaactgatgccagcaacgattatttatcattgcttcatggtgaaaaacccatgatcactcatgcttcagattttaaagaagaggctgcgacgattatcaagcaaattcaggcgttgttagccaatgatgtccgttcccaggatatctgcattaccgctcgtacgaagcatgcttacgagcgttatgcttctgctctgaatgatgctggaatcgagacctataatttaggtcaggatagtggtgatagtgatcaacgccctggtgtgcgtatggcaacgatgcaccgcattaaggggttggagttccagtatgtgtttcttgcgggcatcaacgatggtgttgtgccggaagtcaaagcaattgcatctgatgaccctgtagaacagcgcgatgcattatttaatgaacgagcgttgctccatgtggctgcaacgcgcgcggtaaaaggattgtttgtttcgtcttacggtaaacctagttttttactggagcctgaaagcgagtaa

SEQ ID NO: 231074 - DNA, 1383 bp, Klebsiella pneumoniae
atgtacatcgagaaatttctgactgaatacgatgactcgctaacgggtgagttgaatgtggatccgcttgggcaattagtcatctggtcgtcctgggggcaggacatctttcatagccgtattacttctatcgcaaatgatgtacggcaatatacgctgaatctgctgcatcacagcgtattgcgccagatactggtcgatgaaaagctgcaaacttcaggcgtgatgaaaggtctgtatcccaaaaagcaattacatgagtttagagttgcctgtctgatccatttggaaaatatttatatctactccatgctggcggctgaaaaaagaggtgtcactctcactggtgtgcagggtattaataaagccagatctaaatggaacgctgcaaataaaaatcctcagatattttttggtcatgagaaaagtagtgagttactgactaatcagatcgctcttggtaccaatgggcgctataaatcgccaatgatgaaaatgcattttttctctactgattatcgctatgatctgccggaaagcaagccagtgtggcaggcagcagaggcatttattcggaatgtaccagagctgaaaaaattacatgcagcggcattgacttacatgcaattgaaaatgcaggcctcacataagcgcgacctcaacccatttttcgaagatattcctttcggcctaaaaaaggcgtatgtaaaggcattccgcgacccgaaaatggtcggggattattcgcgaatattctggctacaaagaacggggttagataaatatgcagcgggtgctatttatcgggtactcaagcaggaacgtttggacgagttagagcttacagatgctgaagttttcaaacgtgccatgcatcaggcgaaaagtatgcctgaaatgaatgaaagtgacctcagggcgttacaacatatcagtcaggcggagccatttttatccctgatcgacctgatgttttcaggcttacgccgacagagtagtcagactttggcagaatttcgtcaattctggcagtcgcgcggtcttacggaacttgatctgccacaaaaggcggctcagcttctggaaaatgatgtgctcctttcctcgctttccggtacgcccgccagacgttttcagcaactattagcactggcctgtatgccgtcgctggaagatcaggttcgaggcttgctggattatcatcacaagataatggagtcaagggggcagttcccgtggctcctgcttgaaggtgatgatattttgctgcaggtaccaccatgttcgctacgcgaagatcgtcagaatagcgactgggtaaaccgttattatctaccacagttcagacatttgctgaacggtttatgggggcattctgcatga

SEQ ID NO: 231075 - DNA, 1902 bp, Klebsiella pneumoniae; identical to SEQ ID NO: 147911

SEQ ID NO: 231076 - DNA, 2655 bp, Klebsiella pneumoniae
atggcgaataagttaaaacagatcattaccccggttgaggtttcagccgtgatgaatttcgatgcaactgatacgcactggcagtatcaatccggtgcttccagcatggcggcgaagcaggcagagggggtggctgggttgtggaatttgctgaataaacaacgactggcactccttgctgatgaagtcggcatggggaaaacttatcaggcgatgggagtaatgttgttgttatggcaggcaaaacctgatgcacgcattctggtaatggcacctaacaggacgctctgtgataactgggagagagaatttagcattttcacagagatacactatcgggctgaacataatgcctttaccactttagagggtaagacaaaatatgccccacaaatttatggcagactggcggagctggcggccgctgtggaaaaaaaatctcaccatttttaccttactactatccattcactaagcggtctggtccctccagatgaaaaaaaagatgctttaaatgctgccgcgtcttatggcgtgttatatcgtcagcagattaagcaagctcttggaaaaggagggtttgacttaattataatcgatgaggctcattactttcgtaaccgaagcggatcacagcgtgccgccgccgctcaggccttctttggtgatgcgcaggaccggctggggagcaatgtactgttgttgacggcaactccaaatcactcagcatcgcgaaatgtttatgacatatttagctacttcagtgacatgccaaaacgttatgcagaggatgatgtccgtgcgctgatgaatgattttgccatccgccgactgcgcaaaatgcagggcagagagagcagccacagcaaatatgaatatcgtcatgagcgcgctagcatttccagttttactaataagatggatgctgagttgttttttgctctatatcagaaacaactcgtggttcaactggacaaagagaaaaaggcaggtggcggcaggcgcatgctatatggctatcttgaagggtttgaatcaacgggcagtaccgcaagtgagcgggataatagtagtgatgaagaggggcaaatccataatgacttcaaccacgcgccggattctgctctgctcaatagcttgacccggcagtttcacgatatctataaccgctttccagatcatcccaaatacgacactctggtagaggcctgctttaccagtgatccgttcaagcagtctcagccgctacattgtagtaagcatttggtttttgttcgtcgaataccatctgtacgcgaaattactcagcgcatcaacgcacgttatgatgaaataatggctgagcgattgatgaatgtctggcagctacctgcaaaggcgctggcagaatggcgagagtcgggttggtcccgagatatttttgttaagcttttatcggaaaaatccaatgaaaagtccgattttgatgagcatatgctggaggacggggagacagatgagcctgaaacggataacgagctaaagctttcaagtaaaattgccgagctatttgttatgaagaaaacgggcctgcgcagtaccgactgcgccaacgttagtttgcgtttccgtcgccctgaaagcctcttttcattatttcttgagcctgcattggatggtacgaccgggacttatcattatcattaccgcaaagagtctggtgaacgtcaacgtgacagctatggtgatgccgcgagagatgcccggctgcagcagtcgacaacagctcagaaaatcaaatatatcactgctttgcccacagcctggggattgatgtttcatgagctgccgcggccagcaaaagagcaattgattaagtggcgtgaccagcctaacggtatggcaattattgagaactttgccaactatcttcgcacgggttacctgtttgccagtcctgtgatcattgagctctattgctggtttacagagttcaaccgtcgacctcaaacaggtgaggtccagcagcgatatcagcattttgtagaatgggtcaccccaaaattgaatggatcactgatgctacgttattttgtggctgccgttgaaactttcgaaacgctatgtgtgaaaattgttggccagaaactagataatactcaatatacttggcgcgagttcactagcttgagtagtccaagttggtatgccagcgggcagtcaaaaaatcgcgaacgtttaattcgtggatttaattcacctttcttccctaatgtgctggtagcaacctctgtgttgcaggaaggcgtgaatcttcatcttcaatgcaatcaagttcatcattatggcatcgcctggactcctggcgataacgagcagaggaatggacgggttgatcgcctctttggtcgaatcaatacaatgcttcaagtccagggggcggctgagatgattatcaattatccctaccttgcaggtaccttcgaccaggatcagttggcatcatttatacgccataaacacagtgttgaagagaagttagatagttgcgagctggaggattttgacagcgaaattgatattcaggaggatcctcaaggttggcaaaaatggctacggcatccttgtaaggataaagataaagaagatccttacccagccaagtttgatcagtag

SEQ ID NO: 231077 - DNA, 534 bp, Klebsiella pneumoniae
atggagcctgaggtcgccaagtaccatttaggtgcactcgcgttggccgttgcagacagcatcgccagtgtctcggcctcgttttcaccaagcggcccggggaccgccgtgatggtgttactcagcatggagcccggactgccgatcagcgttttggctacctcgatcgggctttctcatgccgggacggtgcgattgatcgataggctcgagcgcgaacagttggtggaacgacgaagacaaatcaccgacaggcgggcgcgcttcattcacctcaccaattcggggaagaagataacggacgccttgctcaaggcacgggagcaggtgatctccgaatgtatttcgcccctgtcgcccaatgacctcgacattctaggcatgctgtcggagcggctccttgtggcaaacggcttcgacaaagatggctcggtcagcctttgccatctgtgcggctacagcaggatcgcgccttcccgtggtaaagctaagccggggcgctcgccacgctggaacgtcgcatcagaaggctga

SEQ ID NO: 231078 - DNA, 960 bp, Klebsiella pneumoniae; identical to SEQ ID NO: 127100

SEQ ID NO: 231079 - DNA, 489 bp, Klebsiella pneumoniae; identical to SEQ ID NO: 127102

SEQ ID NO: 231080 - DNA, 495 bp, Klebsiella pneumoniae; identical to SEQ ID NO: 127104

SEQ ID NO: 231081 - DNA, 1023 bp, Klebsiella pneumoniae; identical to SEQ ID NO: 127105

SEQ ID NO: 231082 - DNA, 423 bp, Klebsiella pneumoniae
atgcctgatccgacctacgcgagacattacggccatgcggaagcagtggaagtgaccttcgacccttccgttctcgcctatcgctcgctcttggaactcttcttccagatacatgaccccacgacctacgagcaacaaggcagcgatgtcggtccgagctatcgatcggcgattttctacaccaccgaagtgcagaaggaagtcgccctcacaaccatcgcggaaatcgaggcatcaggaagctggccaagcccggtcgtgtcggagatcaacccagaagaacccttttgggaggcggagccagagcaccaagaatacctggtgcgctatcctgggggctatagctgccacttcgtgcgcccgacctggcggttggaccgctcagacgaacgcccagctgtaatacttgacagaaagagttga

SEQ ID NO: 231083 - DNA, 1233 bp, Klebsiella pneumoniae; identical to SEQ ID NO: 127107

SEQ ID NO: 231084 - DNA, 960 bp, Klebsiella pneumoniae
atgcgccaagcatacttctgcgacctgctttccaaaggcggtctcacggaagaggtatcagtcaggcgcgtgggccaaaggactatggaactcaatcaagtcagctatttcatcaacttggccgagacgctgaatttcacagcggccgctcgcttgagcggtgtgtcacagccaagtctgacccgcgcgatccgccgcttggaagatgagcttggcgggccgctgatctatcgcgacgggaagaacagccgcctgactggccttggccatgacgtcgaggcagaattccggcgcatggtggtcgcgatgaagagcgttcgcaatcactcggagcactgggcgatgggggggcaccgcgtgctggatgtcgccgtcgcgcccaccgtcggaccaaaggaatttacggcattcttcgagagcgcattggcggagatgccatccatcgaaatcaagctgcactcgctccagtcgaacgaggacacatcggaggtgctttcaggaaaataccacgcgtgcatcatgccgcgtgaaacaagaccggaacgcaagctggatgtgcatcctctatttcgggagcgcttcgtgctcggctgttctgcaaaccatcccttggctgccaacgagatcgtgcgcggcgaagacctgctcgagtttcctttcgtcgatcgcctgaaatgcgagtttcgcgatcggatcctcgatcacttcgcgcgacgggacttgctcatgcgacctcgctttcgatcagatcgcgaggactgggtgcaacgggtcgtcgctgacggccacgccatatgcattcttccggaacgatcgccgaccgtgcaaggcctcgtcactcggccgatcgacggatttgtcttggagcgcgaagtcgtgatcgcgacagtatccggctccacggcaacggtcgatatacggaacatcgcgcagctggcagcccggtatgagtggaactga

SEQ ID NO: 231085 - DNA, 444 bp, Klebsiella pneumoniae
atgaagtttgagaagtcacaggcagcagttgaccgcctgacccccgagcaacgccggattacccaggattcggggaccgaaaggcccttcacgggcgagtacaacgacaacaaggagcctggcatctacgtcgacatagtgtcgggagagccactgttcgcttcgacggacaagttcgattcgggtactggctggcccagcttcaccaagccgatcgtttcggcaaacgtgaacgaggtgcgggacagcgcacacggcatggtccggacggaggtcaggtcagtacacgcagacagtcatctcggccatgtgttccccgatggtccttccgaccgcggcggtctgcggtactgcatcaactcagcgtcccttcgcttcatcccgcgcgacgagatggagtccgagggatacggtgaatatctcgatcaagtagaggaggcttaa

SEQ ID NO: 231086 - DNA, 540 bp, Klebsiella pneumoniae; identical to SEQ ID NO: 54408

SEQ ID NO: 231087 - DNA, 705 bp, Klebsiella pneumoniae
atgccagacctctcgtcctttccgatcacgcagcgctggccggcatctcatcccgatcgcctgcaactctacgcagcccctacgcccaatggcgtcaaggtctcgatcatgcttgaggagactggcctggcgtacgagccccacctgatcgacatctcgaacaacgagtcgaaggatccggcgttcgtgtcgctgaacccgaacggacgcataccggcgatcatcgatccggctggccctgacggtagacccatcgccttatgggaatccggtgcgatcctcctctatctggccgacaagacgggtcagttcatctccaccgaaccaggccagcgttacgagaccctagcgtgggtgttctttcagatgtcggccatcgggccgatgttcggacagctaggctttttcctgcgatttgccggcaaggactatgaggacaagcgacctcggcagcgctttgttgatgaatccaggcgtcttctcggggtcctggatcaccggctggagggccgcgaatggattgtcgatgattactcgatcgcggacattgcgacgtttggctgggtgaatgcgctggtcgaattctacgcagcgggcgacatcctcggcctaagcagctattcgaacgtgcaggcatggctcgaacgcgggctggcgcgaccggctgtacagcgtggcctgcgaattcctgcgaggcctgcatga

SEQ ID NO: 231088 - DNA, 969 bp, Klebsiella pneumoniae
atgaccattatcgccgcatattattacaacgaaggtaagcgagtccgtgaaatcaggctcgatgagcacgtcgaactaaacgagaatcgctcgggcttctgctggatcgcgcttagcgagcccaccgcagacgaactcagcgcgatccagacgacgtataacctccatcctttggcgatcgacaacgccatgcacccgctgtgcccgcccaagctcgaggtctacaacgatgagttgtacgtcgtcgcccagaccgccgagctggtcggcgaccggatcagctacggcaagatggcgatcttcaccggtcacaatcaccttatcaccgtgcggcacggcaatgccggagcgctgggcaaacttcgggagcaactcgaggcatcgccgacgcagttcggcaagggtgtcgactatgtgctgcacgcgatcttgcaccgagtggtcgaccagtatctgcccatcttcgaaatgatcgaggacgacgtcctggcgatggagcgacggtcgctgcacgatttcctcgggccagaagaggtggcgcgaatcttcgaactaaggtccgaactcacgcggttccagcgcacgctcggggctatggccgagctggtgcgaaagctcgttcgcggccactttccctgcatcagcgccgaaatgacaccatatttccacgacgtcgcggaccatgtccaccgcgtgcagtccatggtcgacggcctcctgcttgtcctgtccacggtcttcgaggccagcagccttctggaagcgcaaaggatcggtgtggtcactcgccagctcgcggcctgggcggcgctcttggcggtcccgacggcgatcgccggaatatatggcatgaacttcaagcacatgccggaactggacacgccatatggctacttcgtcgtgctcggagtgatagcggtgttctgccttctcctattcatgcgcttcaagaaggccaagtggctatga

SEQ ID NO: 231089 - DNA, 573 bp, Klebsiella pneumoniae; identical to SEQ ID NO: 127114

SEQ ID NO: 231090 - DNA, 450 bp, Klebsiella pneumoniae; identical to SEQ ID NO: 197221

SEQ ID NO: 231091 - DNA, 402 bp, Klebsiella pneumoniae; identical to SEQ ID NO: 130533

SEQ ID NO: 231092 - DNA, 1272 bp, Klebsiella pneumoniae; identical to SEQ ID NO: 130532

SEQ ID NO: 231093 - DNA, 513 bp, Klebsiella pneumoniae; identical to SEQ ID NO: 130531

SEQ ID NO: 231094 - DNA, 471 bp, Klebsiella pneumoniae; identical to SEQ ID NO: 130530

SEQ ID NO: 231095 - DNA, 306 bp, Klebsiella pneumoniae; identical to SEQ ID NO: 130529

SEQ ID NO: 231096 - DNA, 432 bp, Klebsiella pneumoniae; identical to SEQ ID NO: 200677

SEQ ID NO: 231097 - DNA, 1011 bp, Klebsiella pneumoniae; identical to SEQ ID NO: 130527

SEQ ID NO: 231098 - DNA, 1269 bp, Klebsiella pneumoniae; identical to SEQ ID NO: 200679

SEQ ID NO: 231099 - DNA, 372 bp, Klebsiella pneumoniae; identical to SEQ ID NO: 200680

SEQ ID NO: 231100 - DNA, 1275 bp, Klebsiella pneumoniae; identical to SEQ ID NO: 200681

SEQ ID NO: 231101 - DNA, 990 bp, Klebsiella pneumoniae; identical to SEQ ID NO: 200682

SEQ ID NO: 231102 - DNA, 237 bp, Klebsiella pneumoniae; identical to SEQ ID NO: 200683

SEQ ID NO: 231103 - DNA, 366 bp, Klebsiella pneumoniae
atgaacgcctacacggtgtcccggctggcccttgatgccggggtgagcgtgcatatcgtgcgcgactacctgctgcgcggcttgttgcggccggtggcgtgcacgccaggcggctacggcctgttcgacgaggcggccttgcagcggctgtgctttgtgcggtccgccttcgaagcgggcatcggcctcgatgcgctggcgcggctgttccgggcgctggatgcagcggacggtggcgaagcggccacgcagcttgccgtgctgcgccagttcgtcgaacgccggcgcgaagcgttggccgatctggaagcgcagttggccaccctgccgaccgagccggcacagcacacggagagtctgccatga

SEQ ID NO: 231104 - DNA, 1698 bp, Klebsiella pneumoniae
atgaccaccctcaaaattaccggcatgacctgcgactcctgcgcggttcacgtcaaggaagctctggagaaagtgcctggcgtgcaatcagcggaggtttcctatgccaagggcagcgccaggctcgccatcgaggccgacacatcgccggatacgctgaccgctgccgtggccggactcggctatcgggctacgctcgccgatgcgcccgtggctccggcgggcggcggattgctcggcaaggtgcgcgaatggctgggcagtgatgacaaggctggcggggatgctggcaagctccatatcgccgtgatcggcagcggcggcgccgcgatggcggcagcgctgaaggccgtcgaacaaggcgcgcacgtcacgctgatcgagcgcggcaccatcggcggcacctgcgtcaatgtcggctgcgtgccgtccaagatcatgatccgtgccgcccacattgcccacctgcgccgggaaagtccgttcgatagtggcattacggtcgccgagccggccatccagcgcacagcgctgctggcccagcagcaaggccgcgtcgatgaactgcgtcacgccaaatacgaaggcatcttggagggcaatccggcgattaccgtgctgcgcggcgaggcccgcttcaaggatcaccagagcctgactgtgcgcctggttgacggcggcgagcgcatcgtgacgttcgaccgctgtctggtcgccaccggcgcgagtccggccgtgccgccgattcccggcttgaaggacacgccttactggacttccaccgaggcgctggtcagcgagactatccctaagcgcctggccgtgatcggctcatcggtcgtcgcgctggaactggcgcaggcgttcgcccgactcggagcgaaggtgacgatcctggcgcgcaacacgctgttcttccacgaagacccggccatcggcgaagccgtcacggccgcattccgcatggaaggcatcgaggtgcgggaacacacccaggccagtcaggtcgcctatatcaatggtgaaggggacggcgaattcgtgctcaccacgacgcacggcgaactgcgcgccgacaagctgctgatcgccaccggccgctcacccaacacgcgcagcctggcgttggatgctgcgggcgtcacgctcaacccgcaaggcgcgatcgtcatcgaccccggcatgcgcaccagcgtggaacacatctacgccgccggcgactgcaccgaccagccgcagttcgtctatgtggcggcggcggccggcacccgtgccgccatcaacatgaccggcggtgacacggccctgaacctgaccgcgatgccggccgtggtgtttaccgatccgcaggtagcgaccgtgggctacagcgaggcggaagcacaccatgacggcatcgaaaccgacagtcgcacgctgacgctggacaacgtgccgagggcgcttgccaactttgacacacgcggcttcatcaagctggtcgttgaagaaggtagcggacgcctgatcggcgtgcaggcggtcgcgccggaagcgggcgaactgatccagaccgccgcgctggcgattcgcaaccggatgacggtgcaggagctggccgaccagttgttcccctacctgacgatggtcgaggggctgaaactcgcggcgcagaccttcaacaaggacgtgaagcagctttcctgctgcgccgggtga

SEQ ID NO: 231105 - DNA, 423 bp, Klebsiella pneumoniae; identical to SEQ ID NO: 200684

SEQ ID NO: 231106 - DNA, 276 bp, Klebsiella pneumoniae
atgaaaaaactgtttgcctccctcgcgctcgccgccattgttgccccggtgtgggccgccactcagaccgtcacgctgtctgtaccgggcatgacctgctccgcctgcccgatcaccgtcaagaaggcgatttccaaggtcgaaggcgtcagcaaggttgacgtgaccttcgagacccgcgaagcggttgtcactttcgatgatgccaagaccagcgtgcagaagctgaccaaggccaccaccgatgcgggctatccctccagcatcaagcagtga

SEQ ID NO: 231107 - DNA, 351 bp, Klebsiella pneumoniae
atgtctgaaccacaaaccgggcgcggcgcgctcttcactggcgggctggccgccatcctcgcctcggcctgctgcctcgggccgctggtcttggtcgccttgggattcagcggggcatggatcggcaacctgaccgtgctggagccgtatcgcccgattttcatcggtgcagcgttggtcgcgttgttcttcgcctggcggcgcatctaccgccctacgcaagcctgcaaaccgggtgaggtctgcgcgattccccaagtgcgagctacttacaagctcattttctgggtcgtggccgtgctggtcctggtcgccctcggatttccctacgtcatgccatttttctactga

SEQ ID NO: 231108 - DNA, 435 bp, Klebsiella pneumoniae
atggaaaacaatttggaaaacctgaccattggcgtttttgccaaggcagccggcgtcaatgtggagaccatccggttctatcagcgcaagggcttgttgcccgagccggacaagccttacggcagcattcgccgctatggcgaggcggatgtaacgcgggtgcgctttgtaaagtcggcccagcggctgggcttcagtcttgatgagattgccgagctgttgcggctcgacgatggcacccactgcgaggaagccagcagcctggccgagcacaagctcaaagacgtgcgcgagaagatggcggacttggcacgcatggaggccgtcctgtctgatctggtgtgtacctgccatgcacgaaaagggaatgtttcctgtccgctgatcgcgtcgctacagggtagaacaagccagacaggggctgctacagcttag

SEQ ID NO: 231109 - DNA, 354 bp, Klebsiella pneumoniae; identical to SEQ ID NO: 4285

SEQ ID NO: 231110 - DNA, 447 bp, Klebsiella pneumoniae; identical to SEQ ID NO: 4286

SEQ ID NO: 231111 - DNA, 837 bp, Klebsiella pneumoniae; identical to SEQ ID NO: 4287

SEQ ID NO: 231112 - DNA, 252 bp, Klebsiella pneumoniae; identical to SEQ ID NO: 4288

SEQ ID NO: 231113 - DNA, 282 bp, Klebsiella pneumoniae; identical to SEQ ID NO: 4289

SEQ ID NO: 231114 - DNA, 324 bp, Klebsiella pneumoniae; identical to SEQ ID NO: 4290

SEQ ID NO: 231115 - DNA, 246 bp, Klebsiella pneumoniae; identical to SEQ ID NO: 4291

SEQ ID NO: 231116 - DNA, 330 bp, Klebsiella pneumoniae; identical to SEQ ID NO: 4293

SEQ ID NO: 231117 - DNA, 273 bp, Klebsiella pneumoniae; identical to SEQ ID NO: 4296

SEQ ID NO: 231118 - DNA, 210 bp, Klebsiella pneumoniae
atgatgaatcgttgccgtaattcaattgataagatcggtcgtaatttccatcatatcattgttaatgatcagaccagggttcttgataaagatggtttctatcaggatgcggagcgtcttacaacagaaatttttaatcttaagaatcagtttgagaattacattatgttatgtaaagggagaactgtttcaaataaagtggagatgtga

SEQ ID NO: 231119 - DNA, 1167 bp, Klebsiella pneumoniae
atgggcgtttacgttgataaagaacatcgtgttaaacgaaagtcatcagaaaatggtcgtaagtcagctttcgctcacaaagtcaaaaatggtggaaagaactatagccgcaatgttcaggaacgtatcaaccgcaagggtgccagtaaggaggttgttgtcaaaatatctggaggtgctgttactcgtcaggggattcggaacagtattgattatatgagccgtgagtcagagctaccagtgatgagtgaaagcggtcgggtatggacgggtgacgaaattctggaagctaaagagcacatgatagatcgtgctaatgatcctcagcatgtgatgaatgataaaggtaaagaaaataaaaaaatcacacagaatattgtcttctcgcctccagtttcagcgaaagtaaagcctgaagatttgctggagtctgtcaggaaaacgatgcagaaaaaatatcctaatcaccgttttgttcttggataccactgtgataagaaagaacatcctcacgttcatgttgtttttcgtatccgagataatgacggtaaacgcgctgatatcaggaaaaaagatttacgggaaattcgtacagttttttgtgaagagttgaagttaaaaggttatgacgttaaagcgacccataagcaacagcatggacttaatcagtctgttaaagatgcacataatacagcaccaaaaagacagaaaggtgtttatgaggttgttgatattggctatgaccattatcagaacgataaaacaaagtctaagcaacattttataaagctaaagactcttaacaagggggttgagaaaacatactggggggctgattttggggacttatgttcgcgggaaagcgttaaagcaggtgatcttgtcagactgaagaaacttggtcagaaagaagtaaaaatcccggcgctcgataaaaatggtgttcagcatggctggaaaacggttcacagaaatgagtggcagttagaaaatctgggggttaagggcgtagacagaacaccttcagccagcaaagagctggtactgaacagccctgatatgctgctgaagcaacaacagcgaatggcgcagtttacgcagcagaaagcatccacgttacagtcagaacagaagctgaaaacagggattaagttttttaatatttaa

SEQ ID NO: 231120 - DNA, 519 bp, Klebsiella pneumoniae; identical to SEQ ID NO: 106310

SEQ ID NO: 231121 - DNA, 648 bp, Klebsiella pneumoniae; identical to SEQ ID NO: 4300

SEQ ID NO: 231122 - DNA, 2754 bp, Klebsiella pneumoniae; identical to SEQ ID NO: 4302

SEQ ID NO: 231123 - DNA, 750 bp, Klebsiella pneumoniae; identical to SEQ ID NO: 4303

SEQ ID NO: 231124 - DNA, 285 bp, Klebsiella pneumoniae; identical to SEQ ID NO: 4304

SEQ ID NO: 231125 - DNA, 1062 bp, Klebsiella pneumoniae; identical to SEQ ID NO: 106315

SEQ ID NO: 231126 - DNA, 714 bp, Klebsiella pneumoniae; identical to SEQ ID NO: 106316

SEQ ID NO: 231127 - DNA, 903 bp, Klebsiella pneumoniae
atggcgcttctgatggcggcgcacgtctgtaatgctgctgttcttccttcaggcagtcgctttgacccacgcaatcagatagtcagttataaccccaataataccaccataattaacagtgccgttggatacaccaccacactggtatttgatgaagatgaaacagttatcagtgccagaaccggttttccgcagggatgggcggttaataaagaagataacctggtatacctggaagttcgtcctgttaaacaaactgttcagaaaaataatacggatgcaaacggtaacacctcttctgaatccgtcagtgttgctcttgacccggaaaatgagcttgaacgctggcgaacgaatctgtttgttcgcaccacgaaacgtaattacagcatggagctgaacgccagaacgttccgacagccggagaaaattgcgtttgtggtgaattaccagtatccgcaggaacgccggaaggaacaggccgaaattgagaagaaacgcacagaggctcttgccagacgcctggaggaacaggcaatcaaccgttccctggaaaatgcgaaatcgccccgtaactggcagtactggaagcgggttgctgaaggcagccaggatatcagccctgattatgcatatgacgatggtcgttatacctggttcggcttcagtccgttaaagaaaattcccagcgtctttgtgatgaacggtatgcaggagactcttaccaatcctgtgattaaacagagcgggagttttacggctgttggcgtaccggttgataagcgttttgttttacgtcttggtgagcaggtggtggggattgagaacctgggcttcggaaaagtacgtttaccagccggggatacggtatccccggatgttaagaaagaggtgatccagtga

SEQ ID NO: 231128 - DNA, 1206 bp, Klebsiella pneumoniae; identical to SEQ ID NO: 106318

SEQ ID NO: 231129 - DNA, 567 bp, Klebsiella pneumoniae
gtgaataacgaaaacagacatctgatttatgatgtggtcaacgattatttttatcactggctgaatgagattgatggtgtcacggaaatcgctgttaaccgaccaggagaaatatttataaaggtcaggggaaagtggcaatggtatgaacaaaagatgaattacagtgattgtctttcttttgcatccacactggctgattttcatgacggtggttctgtgactcctgaatatcccctgcgttccgccacgcttccgggtggagaacgtgttcaggttgtgatcccaccggcaacagaaaaagatactgtttctataacaatccgtaagccgtcaggtatttttatcagtcatgacaaatttataaaacaggggttttattcacgcgtcggtggtttaagtggtgattccattatggaagataatatttctgctttaatcacttccgaatattttgaacgggttatacctgaatcactgagtcaggggaaaacgatagttttctgtggagggacggggtctggtaaaactaccttggctttgttgaataaatcgaacttttgctga

SEQ ID NO: 231130 - DNA, 1014 bp, Klebsiella pneumoniae
atgttaaattttaaaagtgtcaaaagtggtttattcttagttgcatttataactccgcaggttctatttgctcaaaatattgcgttaggtgttaattcacacattataaatcaaaacattgatcaaacaaaaaaatctattattttaacaaaagatttaaagatgcaatatatacgcatggatttaccctggagactaatagaatcaacaaaaggcaattatcaaataccgaaagatgtgaacgctaaaatcaatttattgttacggagcaacatacaaccaataataatattagattatgggaataaatattacaacaatggcgataaacctataacggatgaatcaattgatgccttcgtaaaatatgctacatatgtcgtaaattactataaaaacagaatattttattaccaaatatggaatgagtgggatagtaaacttggaaacacaaaaccaggaaaagttgacgattataaaaaacttgttaaagcaacatatacagcgataaagaaagaaagccctgaaataaaggtaataacatcttcattttctgcggctgcattcaataaaactcttggtatagattcgagaaactttataaatacgtatctaactgatgacatgtctcattttacagacattattgctatacatccctacacagcatacaggaaaggatatttttcaaactatcaaatctataaaaagcaaattcagtacactatgaattttataagaaaagggagttttaaagataagcctgtctttattactgaaattgggtggagtaccagcaactcacctcagggtatatcagaaaaaactcaaaagcaatttattaacaatgcaatatgcgatgctaaaaaggctggaatatcagcaattatcatatacgaacttaatgatgcatcaagtaatatttatgacacagaatcaggatttggtttggttaaatacaacggtttaaaaaagccggcatatgttgggataaaatccaataattgtttgtga

SEQ ID NO: 231131 - DNA, 1149 bp, Klebsiella pneumoniae
atggaggttgttttgttaaaatcaaaaccgataatcgtacaaatctgccgtgatgcaactgataccggaggtggacgcgtagctcttgaaattagtaaatattttgcattgagtggatataaagtaattattattactgatacaatatgtgatgctgatatccatgatgtatcttttcagtatacatcaatggggcaactcttaaaggattggaaagctggtaataaaattactaaaacacttagacatctgttacaactagtggtttttatgtttacgtcttactttgaactaaccaaaataaaagataagaaaataacaattaatcataatcttgaatcactagctggcgatgtttatgtaatacataatgttttcaattatgaaaacaaaaataagcctattttaaagcgtttattgcgttggtttaacccggttttttttataagggctgggagagaataccttctgttgcgtttagcttatgataaaaaaataatatgtgtttctgagcagacattaagtgaagctagggcatattgccctagtagttctaatttgtgttatataaataatggtgtgaatgctgattttttttcttataaaaaaagatttcttaaacaaaaagaattcaatttgatttttgttggtcatgagtttgaacgtaaaggtttggaatatgtaataaagagtcttttattagttcctgaatatatcaagttatatatcgtaggtggggctggaagttcgcgaaaaaaatatgaagaattaattgatgaacacaatttgcagggacgagttatattcaaaggaactatacttggtcaggacttggttacactttaccacaagtgcgatttgtttgtattacccagtaaatatgaagcttggccattagtaggtttagaaagtatgtcttgtgggttaccagttctcatgacaaatgtgggggggattcctgaatatttaaaagatggccttaatggtttttttattactcaaaatggaaaagatattgctgaaaaagtaaatgttatttcaagcaaaaaagaactttatgagcagatgtctgctaatgcaaggcaaactgcgttaaagcattcttggaatgcttgcgctcaaaaatatttaaatgttatagagcagtga

SEQ ID NO: 231132 - DNA, 261 bp, Klebsiella pneumoniae
atgtttccaatgaagttctttgagtatctcgcagcagggaaaaacgtggttagtgtcgatttggcttcaattcaagagttttccgattatttaaaaattgcacactcaaaagaggactttgtcaataagattcaagaaattcttgctggcgatggtttctctgtacaacatttgcacaaattagcaagcgaatacacgtataaatcacgaacagataagatgtttgaattaattaatactcatttaaaaaagacaaattaa

SEQ ID NO: 231133 - DNA, 606 bp, Klebsiella pneumoniae
  misc_feature (553)..(562): n is a, c, g, or t
atgaaagcgttgaaaccacctaagaaagtaaaagataatatatgggtatggtcgccgctatcaataccttttaataaatacgcgatcattcgtaaattaaataaagtgctactttctggcatgttacgattatggtccattacgttgggtttcaaaaaacccatcttatggacatataatcctttgacttcaaattttttagatcttaacagattcaaattcaaagtttatcattgtgttgatgaaataaaggctcaaccaggaatgccagtctcaatcctagagacagcggaagagatattagttaaaagctctgatttaacttttgtcacctcgcctactttattggaaagcagaaaaaaatggagtgataacgtttactatcattctaacgtagcagatttcgaacatttttcaaaagcttgcagtcaagatttaattgtacctgatgatatattatgtttacgtaagcctgtattagggtttatcggtgctatcagtagttataaggtagattttgaattattaaattatattgctaaatcctgccctnnnnnnnnnnactcaaagaacttcattggaaacatcgatcgctttaattggtga

SEQ ID NO: 231134 - DNA, 258 bp, Klebsiella pneumoniae; identical to SEQ ID NO: 106323

SEQ ID NO: 231135 - DNA, 435 bp, Klebsiella pneumoniae; identical to SEQ ID NO: 106322

SEQ ID NO: 231136 - DNA, 2154 bp, Klebsiella pneumoniae
atgagactttttattgcagaaaaacccgcagtagcaaatgatattgttaaggcacttggtggcaattttacccgccatgatggctggtttgaaagtgataacgccattgtgactaactgttttggtcatattatcgaatcacaaccgccggaaaactataatcctgaatacaaagcctggaaggttgaaacgcttcctttacgtctttatcccgtgaagtatcagcctgttgaaagtgcagcaaaacaggttaaaacgattctcgaacttatcagacgtggagacgtgactgaaattgttcacgctggcgatcctgatgatgagggacagctacttgttgatgaagtcctggaatatgcaggaaacacaaaacccgtaaagcgcgttctgattaacgacaacacgcttccggcagtgaaaaaggcactggcaaatcttaaagataatcgtgatttcaaagggctttaccttaaggcgctggcgcgttcagttgctgatgccgtctatggtttctccatgacgcgtgcttacaccattcctgcaaaagccagaggatatcagggcgttctgtctgtcgggcgcgtccagacgcccgttcttggcctgattgtgaatcgtaccagtgctaaccagaaccataaatccagtttttactacaccatgaccggagtctttcagcgtggtgctgatgttatcagggcgaactggaagccaggggaatttgctccgctgacagaccgtaaattacttgataacgcgtgggcagacggaacggcagcatcccttgcaggaaaaccggctacagttgaagcggcagcaactgatgataaaaaaacggctgcgccgttgccgtttaacctggtcagactccagcaatacatgaacaaaaagttcaaaatgacggcacaaaaaacgctggatattacgcaacaattacgtgaaaaatataaagcgattacttataaccgctctgattgctcatatctttctgatgaacaattcagcgaagcgccgcaggttatcgatgccctgaaatcagtctttcctcagtcgctggatattgattctgcacgtaaaagcaaagcgtttaacagtgaaaaggtgactgcgcatactgctataatcccgaccgccagtgtgcctgatgttaacgcactcagcaccgacgagcgcaatgtttacctggcgatcgcacaacactatcttgttcagttcatgcctgaaaaagcataccaggaagtatcggttgccattcagtgtggtgatgagtcgttctatgcccgtgccagaaaaacaactgacagcggatttgaggcgtttcttggcgcggaaaccacagacgtaggtgaatcagaagataatgatgattccgcttttgaactgctctgtaaaattcgcactggagaaacactgacgacaaaagaagttgttgttaatgagaagaaaacaacaccgccgccgttattcaccgaagcctccttgcttgctgcgcttgttcgtgtcgcggattttgtcactgatccaacgattaaaaaattgttgaaggataaggataaagacaaaaaagatgaacatggcggtattggtacgccagctacccgcgctgccattctggaaacgctgaagaagagaagctatatcacgctcgaaaaagggaaacttattcctactgataccggatatgcgcttattgatgccctgcctggtatagcggttaatcctgatatgacagcattatggtctgaaaagcagactgccatagaaaatggcgacctgacggttgaacagtttattaatgagctgtacggtgaactgacaggcatgatttctgatgttgacctgggcgagatgaagattgaacccgctgcgccagcagggcagtttcaacgcctggactctccctgcccttcctgtggtaaacatattgttatcaggccgaaaggttatttctgtgccggatgtgaatttaaaatctggagtgagttttctggtaagaaaatcacccaggcacaggccggaaaactggttaaatcagggaaaaccgatttgattaagggatttaaaaagaaaagtggtggaacgtatgatacagttcttgtccttgaggataagaaaacagggaagctgggttttccggcaagggctaagaagtga

SEQ ID NO: 231137 - DNA, 924 bp, Klebsiella pneumoniae
atgttacataaaaaatcagcacaagaaaatgtagccttcgggcttgctgtacttaaatactatcttcgtttcaactccaaagagaatttacaagatgctaatgtgagttcggaggaattgataagcaatttaataaacattttgaaagatactaattttgtttgcacgtcagaaatttcagccacatatccaggaatagatgccttagacaaagaaaataaactaggccttcagataacacatacaaaaaatacttcaaaaataaataaaacaatagataaaatacgcattaataaagttaacgaagaaattgacaccttatattttttcattacatcggaaaggcagaaaaaatacactatcaaagcacaatgtccaaaactaaatgtcacaacaaataatatattagactttgatgacctagctaagctgttatcgaaaagtcaggataaactgagtaaagcagaatccgaacttatgaaagcaatgcctcgtctctaccaagaaggaaaagaacggtatcaagcaatgcttaataacattcttgaaaccagaaataaactagatcgaagagtattcactgctaacaaaatcttagaagaacctgaagaaatgctgttgtccctcaaagagatcaggatagatatacaaaaagatggcataatgaacaaagccaatcctgctgtctctgattcatttaataaaataataaatattattgatgatgtagagagtaaaattgctgtacaatatcccgatgaatacaaaaaatataaagcaaagatccttccatcgtggaattctccagaaaaagaagaatgcttagatattttaatggctataagaaaagatgttttggaacaaatagacaatattgatattgaggtaaataagctaaaaagcattcttgataataacatttag

SEQ ID NO: 231138 - DNA, 306 bp, Klebsiella pneumoniae
atgacagaaatcaggggggctgaggcatgggattttctgaaagcatcgagttcaggccatgcaggaaacatcaccaccgttcacgaaagtagtcctgaatctgccgtgcttgggattgtccagcgatgttatatgaatcctgaatgtcagaatctaccattcaatgtcattttaagacgtgtactgagtaatattgatattatcatgagtattaaataccttgatgatgaagattttcggttcgcttccggtatttactacaaacaacttcattttgatgactatttcagaaaactgaaggagtga

SEQ ID NO: 231139 - DNA, 897 bp, Klebsiella pneumoniae; identical to SEQ ID NO: 197161

SEQ ID NO: 231140 - DNA, 1221 bp, Klebsiella pneumoniae; identical to SEQ ID NO: 197162

SEQ ID NO: 231141 - DNA, 582 bp, Klebsiella pneumoniae
gtggccgccggcgacacagtgcgctggatcatcggcgacaccgagagcggatcgggggcaacgcgccagatccacatcctagtaaagcccacccgcgccgacctgatgacaaacctcgtcatcaacaccaacatgcgcacctatcacatggagctgcgctcgacagagcgcacctatatggcgtcggtctcatggcagtatccgcaagaccagctcattgcgctgcgccgtcagaacgccgaggcgcaggcggcccagccggtggcgagcggcgtcgatctcgcgaacgtcaacttccgctatgcgatcgagggcgaccgtgcgccgtggcggccgctgcgcgccttcgacgacggacgccaggtctttatcgagtttccgcgcggcatcggtcagggcgagatgccgccactcttcgtcgtcggccccgagggcaacacctctgagctcgtgaactatcgcgttcgcggccaccacatgatcgttgatcgtctgttcgcggctgccgaacttcgcttcggctccggccgcgagcagaagcgcgtcaggatcgtccgcacagacgggaggccgacctcgtga

SEQ ID NO: 231142 - DNA, 222 bp, Klebsiella pneumoniae; identical to SEQ ID NO: 200673

SEQ ID NO: 231143 - DNA, 612 bp, Klebsiella pneumoniae; identical to SEQ ID NO: 200672

SEQ ID NO: 231144 - DNA, 864 bp, Klebsiella pneumoniae
gtgactgagaaccggactctgttcacccattaccggcaggttaaaaacccgaacccggttttcacgccgcgagaagggaaaaagaccctgccgttctgccgtaagctgatggcgaaagccgaaggcttcacgtcccgttttgatttttccattcatgtggcgtttttgcgttcgctgggtaagcggcacaggatgccaccactgttgcgccggcgtgcaattgacgcgctactgcaggcaatgtgttttcactatgatccgctggccaatcgcgtgcagcgctcgattaccaatatggccatcgagtgtggactggccaccgagtcaaggagcggcaacctgtcagtcagccgtgccacgcgggcgctgaagtttctggcggagctggggctcatcacctatcagacggaatatgacccgcagatcggctgtaacatcccgaccgatatcaccttcaccccggctctgttttccgcgcttgacgtttctgaggtggctgtggtggccgcgcgccgcagccgtgtggagtgggaaaacctgcagcgcaaaaagcagaaactgaaaccgctggagatggacgagctgatcgcaaaagcgtggcggttcgtgcgtgagcgttttcgcagctatcaggctgagcgtaaatctcacggccggaagcgggatactgcacggcgggatgcatcacggcagcgtcatgacatcgagacgcgcgtgcgtcagcaactgacccgcgaatacgccaccggccgcttcaggggcgataaagaagcgctgaagcgtgaggttgagcgccgtgtgcaggagcgcatgctgctgtcgcgcgggaacaactacacgcgactggccactgtgcccatataa

SEQ ID NO: 231145 - DNA, 873 bp, Klebsiella pneumoniae
atgtcaattaacaatttaagtttaacttcatttaagatagaaatgtgtagagagaatgctgacagcgatgagttaacaattctgagtacagccactgcatttttttattgttttaatgaggagatctatttaataacaaactggcataacgttacaggaagaaactccttaaccggaaagccattagataccatcaatttatcagttcctaacctcatggctctttatcttcctaaaagaatagaggctgtaggtaactctttttatttatcatggagaaatgttcttaaacttaatttatacgaggaggacaatggtgaatatgctcctgtatggtttgaacatccaaaccatgagaacaaggtcgatataattgcaatacctgttaactacactatgaaaaccttaaaagaaaatgggtttgctatttttcctgttaattcagatgagctgaacttggaagattttgatattaaagctggtatggatgcattcctcattggttatcctctaggtatggttgccggggggaatctaccaatatggaaaagaggtagtgtagcttctgaacatgatgtaaatattgacaaactacctaagtattttattgatacagccacaactaaaactggcatgtcaggctctgctgtatttataaaatcaaatggatttacttttccaaaaggaaaggaaaatattgatgatatgattatgtcacaatgctatacctttggaggagtctattcaggacgctctcaattaatacactccggaagtagtatttatcccgacctagcaattgtttggaaagaatcagcgataattgaaattattgaaggtaagcacaaatcaaaacatgtatattacggatga

SEQ ID NO: 231146 - DNA, 948 bp, Klebsiella pneumoniae
atgcgtgatctgatccttcaactcagcaaaagttcgatttattcaacaaagcccctcaaagtgtcgaaagatgctcctgtggaggtaatacaagctgcttaccggacgctggcaaagaaatatcacccggatataaacaaaaacaatcctgaagctgtcaggataatgcaaataattaatgcctcatacgaagtattaattaaccctttgaaaagaaaagaacatgaccgctggattattaaagaaacctggagagaaaaggccgaagccacaatagcacgaaactcggaagcaaatgttaatgtccaggcatcagttaaaacaacaccagaaagaaaaaagaaatcattaatgacaatattaggtgttgttttttaccctttgttttctatgctgaaaactgttgccggcctgtgtgtgatagggattattgcgtatgtatttattcataacattaatgaaaaagatgcttctttaaataaaacagatataggaagcaactcatctccattaaaaccagaacgtgtaaataacaataacggaatttgtgattcatctgtgcaacaactactatggcctactatcccaactgttttatctgaaaaagacaggcgaaatggtttgtcctcacttagattagataacactcaaaataacgaagggttacgagtccggttaaccctggataatgcatacatcaaaactgattttgtacgtgaagtattcgttcccgcaggtagccaaattactctggaacaagtcccatcaggaatatatcgggtaaaaacacaaagtgttaaaaatggatgtgtacaagtttctgaaccaatcaatatgattgaaagacaaacttcaacgggaacagagtacagtgataattctttaactttttatcccgtaataaatggtaatacacatttcttatccttgccggcttcacagttttaa

SEQ ID NO: 231147 - DNA, 3582 bp, Klebsiella pneumoniae
atggactttaacccggagctggggagcacgtctcccgctgtgctgcttgataacgctgagcgtctggataagctggtcaatgggtctgcgctgactgagccggatcgcgctggcgatgatctggatacctggcgcggaatgatggcgaagaatgaagcccttacagaggagacacgacagaatctgattcctctcagccgccagtatgcgacgctggctgcggcgcaggcggatatcgcgaatatccccgatggctccgcaacctacgtgcgaagtgcagacgggagttcgctggcggatgagtacatcaacaacgccggcacgctggaggctaccgggcggaaaatgccatctcaggaagctgttggcgacgcagaaacaaaacctcaatttctgtcgagggagttacgctctacagaaacgtttcattcgtccgtgataaggaccagcaactggaccaatgccaccacaagtacatgggcggtaggatctacatctgatggtcgagtttttaattttatcgagatgtgggttgatggaattaacaatattgatagcctgaaaatcagcatttattctcgctctgttgatggtgcaactatctttcctggtgctaatggcgataagctgctgagttcgaaaatcatcaatatgaatgacgttgcgattaagtcatctattgcaaccggatatcagcttatccgccttgtttttgatgatacggcggtaccagcagacaaaacagcgcttttcgtggttcagccgctcgatgcaagcggtaatcctgtttatatggggtgtggacgtcaggatattgctaatagcgagactgctgcgctatcaaactcccttggcggtttctggatgccagttgaccagtctgagtggcgtcgcattactattccagaaacatcgctatatcgcatcgcttttaatgttgggtatgaaagtccggtaaattacggttcatttaatggtgagtctgtttccgtagccagtgttccgcccaattctcctgactgggctattacggggagcgcgaatcgtcagttttatggatgggtactgagcttccctggtaaaacaggatttaacagcatcacgcttcgccacagcaatctgacgcatgttaatcagatttattatcgcgcggttttacgtaaaaactctgatgtagcatcaacatccatgcccggtacgctggctggtgatattcaggtttacgcaggccgcgttcaccccgatgcgcctgatgacgggttctatggcgttaattattccatccccaacctgaatatcccggctggatatttcgttatgctggttgtctatccgcgcacagaagctggtgaaacagccgatatggggacgcaggcgcatgagtattctaccgctggcgaaaccgcgccatcaggttttgcactgggcgcatttatcaaccgggtgacaaatacatggcagatgattaccggcacaaaaggggttgcgtactggctgaataatgtatctttcgtgggcgttgttgaacaggcttcggtaaatgaagtcaccctgtcggataccatggcaaaactgaacgcgttacagcaacaggtgaacgatgagggcgcacagtctgtaattcgtgaatcatccagcaataaatggggctatgcaacccaacccctggccggtacttttttccgctgggcggtacccattccccatgaaatggatacgctcaatgaaatcgagctatggctggacggtctggcattaaatgattacctgcgcattaaggtctttgctcgcgcgattgacatgaccggaagtgaaacacctcccggagagctggagggggatgcggaaatctatagtgaagatatccctgtctaccttaaatctacaggtacagcaatgaccagggttccattccgccttgatgttgcgataccggaaggtgcgttccccctcatttctgttgaggcttttctcccggaaaatggttcgtctgaggttatcggttatctgggggccggtgcagcgctctattcttccgcaacattacccgttctcgctcagcgcggctggtatagtcgacggggaattaatggcggagcatggacaaccattggtgacgggcaaacagcagcggttgcttactctgttacttataaaaagcaggaagatattcccgggaaaatagccgatattgacgggaggcttacagccgttgagtcggcagtgcatccattaattactcgctaccttccagttgttagtgtcctggggcgagcgctcgacttttccggatcggcggtcgtagccaacggagtgagtcagcctgtaacaggatcgctgacgctggatgcgacaagctctggttctgcgactgttgagggttatagcctgaggcaaaccgccgccacttcgcagtggccgtcaaatgtgaatgcgtggctgggttataagcgcatcagtaatgttgtcgtaacggatgccagtaccggtacccctttggttgaagggaccgactataacattgacagctatggcgggaagttgcgcggcctgactgccacgactcgcgccgtgaacgtcaccttcagttacgttaatgaacggtatgaccttgtgtacatcgaccctgttacgcttgctgtgggaataaccaaagggacggacaggatttttgatgtgcaggaataccgcccggctgtgccatcaggaaaagttgcgctttactatgcattagtcgcgggtagcagcgttgaactggagccggtatatcgctggcccgaggccggatgtgacatgctgggggcgggggatgctgattttctacgacagcataatcgccgttgcctgcaaaagactctggcgcgactcaaccagggtaaaaatattacgctggtcggttatggtgattcgattacagccgtgtcgaatatcgctagtccggaaaccgtggcaaacggcagcacccgtgatttgcagcgcatcctgcagggttatgcaactgatacactgacaaacttatatcccgctcaggactggggagacggaggtggcgcggtacatgtgaagattggatggaactggcgactgaaggaatggatggaggaaacctacggcgtcaccgttgattatcttaacttcggcgtatcgggtaccaattcaaccagcggtgtgggaaatacccgcatgaatgcagtcatcgcgacagcgccacacgttaccgttgtctgttttgggatgaatgataatgcagggaatgttctgtatggcaacctccgcaacatcatcaaaaaactcaaggcagcaggctctgaggtcgtgataatgcccgtgccgcgcaccccttcacacgatgatggtcgctatacactggaacagtggcgatacattaacgggcaggtataccgggctgccatggatgaggtcgctgcgtatgtgccgacagactggttaacggatgaaaacagccgtggtgggatgggtattgttccaacctcactttgtggctctgaccttcgaaaccaccctggaggctatgagttcagtatttacggtaaggcgttggtgaatgctttctgtttttaa

SEQ ID NO: 231148 - DNA, 162 bp, Klebsiella pneumoniae
gtgacctttttatcgcgcaaccatcataatgtgattattgaaggtgtcgaaagcgaagcccataaagaatggctgcagggaatggagtggtttgctatccagggacattactggcgggaagtcagtattgaacaactggtcgccgatgatattgccatgtaa

SEQ ID NO: 231149 - DNA, 636 bp, Klebsiella pneumoniae; identical to SEQ ID NO: 84879

SEQ ID NO: 231150 - DNA, 996 bp, Klebsiella pneumoniae; identical to SEQ ID NO: 182287

SEQ ID NO: 231151 - DNA, 2487 bp, Klebsiella pneumoniae
atgaagcagaggtcattctgcccgggaagattaagcaccgcgatcgccatcgcgctgtgctgctttccgccattttccagcggacaggaaaacccgggaacggtatatcagtttaacgacggctttattgtcggcagtcgcgaaaaggtcgatctgtcgcgcttttcgaccagcgcgattaccgaaggcacttactcccttgacgtctacaccaacgacgagtggaaagggcgctacgatttacgcatcgcgcgcgataaagatggtcggctgggcgtctgctacaccaaagcgatgctggcccaatatggcatcgcggcggaaaagctcaatccgcagctgagcgagcaggagggctactgcggtagcctcaaatcctggcgcaacgaagaaaacgtcaaagacaacctggtccagtcctccctgcggttgaacatttcggtaccgcagatctatgaagatcaacgcctgaaaaactatgtcagcccggagttctgggacaaaggtattaccgcgctcaatcttggctggatggcgaacgcctggaacagccatacctcttcggtaggcgggtcggataacagcagcgcctatctgggcgtcaacgccggtctgtcgtgggacggctggctgctgaagcacatcggcaacctgaactggcagcagcagcagggtaaagcgcactggaacagcaaccagacctatctccagcgccctatcccacagctcaactccatcgtcagcggcgggcagattttcaccaatggtgaatttttcgacaccatcggtctgcgcggggttaatctttccaccgatgacaatatgttcccggacggcatgcgctcgtatgctccggaaattcgcggcgtggcgcagagcaacgccctcgtcaccgtgcgtcagggcagcaatattatctatcagaccaccgttccgcccggaccgtttaccctgcaggatgtctatccttccggctatggcagcgatcttgaggtctcggtgaaagaagcggatggctcggtagaagtgtttagcgtgccttacgcttccgtcgcccagctgctgcgtccgggaatgacccgctacgcgctctccgccggtaaagtggacgacagcgcgctgcgcaacaagccgatgctctatcaggcgacctggcagcacgggatcaacaatctgttgaccggctacaccggggtcaccggttttgacgactatcaggccttcctggtggggacagggatgaacaccggcatcggcgcgctctcttttgacgtcacccattcgcggttgaagagcgatgcccatgatgactcgggtcagagctatcgcgcgacctttaaccgcatgtttaccgatacccagaccagcatcgtgctggcggcgtatcgctactcgacgaaaggttattacaacctcaacgacgcgctgtacgccgtcgatcaggaaaaaaatagtcgcagcaactacaccctgtggcggcaaaaaaacggcatgaccttcacggtgaaccagaacctgccggacggctggggcgggttttatctcagcggccgtatctccgattactggaaccgctccgggaccgagaagcagtatcaggtcagctacaacaattcatttggtcgtctctcctggtcagcgagcgcgcagcgcgtctatacgccagacagctccggtcatcgtcgcgacgatcgtatttcactcaacttcagctacccgctgtggtttggcgataaccgcaccgccaacctgacgtcgaacacctcgttcaataactcgcgctttgccagctcgcagattggtatcaacggttcgctggacagtgaaaacaaccttaactacggcgtgtcgaccaccactgccaccggcggtcagcatgatgtggcgctcaacggcagctaccgtacgccatggaccaccctcaacggcagctacagccagggcgaaggctatcgtcagagcggcattggcgccagcgggacgatgatcgcccacagcggcggcgtggtgctctcaccggaaagcggctcgacgatggccctgattgaagccaaagacgcggccggggcgatgcttccgggatcgccgggcacccgtgtggacagcaatggttacgccatcctgccgtatctgcgcccgtaccggattaacgccgtggaaatcgacccgaaaggcagccatgacgacgtggccttcgatcgcaccgtggcgcaggttgtgccgtgggaaggcagcgtggttaaggtcgcgttcggcactaaggtgcagaacaacctcaccctgcaggcgcgccaggcgaaccacgagccgttgccgtttgcggcaagtattttctcccccgacggcaaggagatcggcgttgtcggccagggcagcatgatgtttatcagcgatgcgaacgccaaacgcgcgattgtgaagtggagcggcgggcagtgttcggtggatctgggacagcaaacaacaaaggatagcgtatgtcgctga

SEQ ID NO: 231152 - DNA, 609 bp, Klebsiella pneumoniae; identical to SEQ ID NO: 213515

SEQ ID NO: 231153 - DNA, 417 bp, Klebsiella pneumoniae
atggattactccaaaaacctcagctacttcacctatggccaggggggctactttagtccgcaaaactacgtcagcgtgtcgctgccggtcagtctgacggaaaaatatgataactggaccatgaagctcggcggctcggtgggctaccagtcttacagccaggataagagcgcctatttcccgaccaattcggagtggcagcagaccctggagacggcggtgagcaatgggtttgccaaggaagcctactattctgcgacctcgaagagcggcatcggctataccctgcgcgccggggcggattacaaggtcaacaaacagatgacgctggggggccagattggctatgacaccttcggggattataacgaaagcaccgccgggctctatattcgctatatgttaggagatcattga

SEQ ID NO: 231154 - DNA, 477 bp, Klebsiella pneumoniae
atgatgacggagaacaataacccggtggtgatgacctggtttcagcagcagcaaacgcctgccggatggttcgatctgttgattattatggtcgaaggtatgttaaataatgccggcgagctggaaagtcagcccttcctgcgtcagatgggcgcctcgttggcggagacccatccgttgccggcgtcggagaccgtaggggagctggaggcgaatatcaaccggctgctgacccatttccactggggggtggtgaccatcgacgtcggtgaggatggcctgcgcttgcgccatcaggcgttgccggtcagccgcgatgatgcggggcgcgtgcgctggtgcaacgcgttctgtgccatactcgaggggttatattctcgctggctgcagagtcagggaggcagcgctcacgtaatattgcagcgtgagcgggtgttctctgtctctgacgttcagtttctttactaccatccataa

SEQ ID NO: 231155 - DNA, 1002 bp, Klebsiella pneumoniae
atgcccctgcgtgctttagtggcggtgatagtgacaacggcagtaatgctggtgccccgggcgtgggcggatacggcctgggagcgttataaggcccgttttatgatgccggacggccgtatcattgataccgccaatggcaatgtgtcgcatacggaaggccagggcttcgccatgctcctggcggtggcgaataacgatcgcccggcgttcgacaagctgtggcagtggacagacagcaccctgcgcgacaagtctaacgggctgttttactggcgctataacccggtggcgccggacccgatcgccgataaaaacaacgccaccgatggcgataccctgatcgcctgggcgctgctgcgcgcgcaaaagcagtggcaggacaagcgctacgccacggcctccgatgccatcaccgcctccctgctgaaatatacggtggtgactttcgccggtcgccaggtgatgctcccgggcgtgaaggggtttaaccgcaacgaccacctgaaccttaacccctcctatttcatcttcccggcctggcgggcctttgcggagcggacgcacctgaccgcctggcggacattgcagagtgacgggcaggcgctgctggggcagatgggctgggggaaatcgcatctgcccagcgactgggtggcgctgcgggcggatggcaagatgctgccggccaaagagtggccgccgcggatgagtttcgatgcgatccgtatcccgctgtatatctcgtgggtcgatccgcacagcgccttgctcgcaccgtggaaagcctggatgcagagttacccgcgcctgcaaactccggcgtggatcaacgttagcaccaacgaggtcgccccgtggaatatggccggcggcctgctggcggtgcgtgatttaacgcttggcgaaccgctggaagcgccgcagattgacgacaaggatgattattactccgccagcctcaagctgctggtctggctggcgaaacaggatcagcgctag

SEQ ID NO: 231156 - DNA, 1677 bp, Klebsiella pneumoniae
atgacaaataaaaaaacgaccgcggcaccgcttccgctctggcagtactggcgcggccttggcggctggaacttctactttctggtcaagtttgccctgctgtgggccgggtatctcaattttcacccgatgcttaacctggtgtttctcgcctttctgctggtgccgatcccgcgcgaaaagctgcaccgcatccgccactggatcgccattccgctgggattcgcgctgttctggcacgatacctggctgcccgggccagagtcgatttttagccagggatcgcaaatcgccggcttcagcgccagctatatctgggatctgattgtccgctttatcaactggagcatggtcggcgccttctttgttttactggtgctgtggctgtttatcagccagtggctgcgcgttaccgtgtttgtctccgcgatggtcgtctggcaggcggtcagtccgctgctgccggcctttaccatttggcctgccggtcagcccaccactgccgccgccaccgcgccggccaacgtcgggaccaacgccgccgctggcgccgcgtccagcccggccagcagcgatattccgccgcagaccgaaccgccgacctcggccaacctcaccaactggctgaacggtttctatgccgccgagcagaagcgcaagacaccgttcccggaccagctgccggcggatgcgcagccgtttgacctgctggtgatcaatatctgctcgctctcctggtcggatattgaagccgccgggctgatggaccacccgctgtggaagcatttcgatatcgtcttcaaaaactttaactcagcgacctcctacagcggacctgcggcggtgcgtctgctgcgcgccagctgcggccagctgtcgcataccaacctgtatcagccatccggcgccgattgctacctgtttgaaaacctggcgaaactcggcttcaaccagcagttgatgctcggccacaacggcctgttcggcgacttcctgaaagagctgcgttcgctgggcggcatgcagagcccgctgatggaccagagcggtctgccggtcagcctgcaggcatttgatggctcgccagtgtatgaggatctcgcggttctcaaccgctggctgaagaccgaagaggccagcagcaatccgcggagcgccacgttctataacaccctgccgctgcatgacggcaatcacttcccgggacaaagcaaaaccgcggactacaaagtgcgggcgcagaagctgtttgacgacctggataacttcttcaccgaactggaaaaatcggggcgtaaggtgatggtggtggtggtgccggaacacggcggcgcgctgaagggcgataagatgcaggtgtctggcctgcgggatatcccgagcccgtcgatcactaacgtcccgacggcggtgaaattcttcggcatgaaggcgccgcatgaaggcgcgccaattatcatcgatcagcccagcagctacctggcggtgtcggagctggtggtgcgcgccctcgacggcaaaatgttcagcgaagacagcgtcaactggcagcagtatgtcgccaacctgccgcagagcgcggcggtgtccgaaaacgccaacgccatcgttatccagtatcagggcaagccttatgtccagttgaatggcggcagttgggtgccttatccgcaataa

SEQ ID NO: 231157 - DNA, 198 bp, Klebsiella pneumoniae
atgatgtctatcgccgatattctgcaactggtggtgctctgcgccctgctgttttttccgctgggctacctgacgcgccactatcagcgccggatccgcacgacgttaagactgatgttctttaaaccccgttacgtgaaaccggcaggggtattacgccggggaacaacggttaagcaaggcaaagcgaacaaatga

SEQ ID NO: 231158 - DNA, 264 bp, Klebsiella pneumoniae
atgacctgcttattcgcaccttccctaaatcatatcttcccgctaccgactggcgatattttttctaaccgcatggtgtggtttgaagacaaacagattctctcggaaattgtgatcatgcgcggcatcgagccggcgcgctggaatacgccgctgcctctcacggtcggtaaaaacgagaccatcaacgccacccatgatggacgccactggcgacgctaccccgaaccacaccggttaaccacccgtgaggagcaagcctga

SEQ ID NO: 231159 - DNA, 822 bp, Klebsiella pneumoniae
atgcgtttagcatcccgatttggacttactcattccattcgtcaggaacgcccactgactaacgatgaattagtcaaggttgtaccttctgtgttttcagaagaaaagcataattcacgtagtgatcgctatacctatattccaaccattacactgctggataaattacgtgaagaaggtttccagccattttttgcctgtcagtcacgagtaagggatgaggataaacgggggcatactaagcatatggtaagacttcgccgtgaaggggccaataaaggaacagaagtacccgaaatcattcttcttaactcgcatgatggatcgtccagttatcaaatgatcccgggtatgttccgttttgtatgcacaaatggccttgtgtgcggtacgtcgtttggtgagattcgtgtacctcataaaggtgatattgtgggaagggttatcgaaggtgcttacgaagttctgggaattttcgataaaataactgaaggcgttgatgtcatgaagtctattacattaaccagggaagaacagcgtctgtttggacaagctgcattaacctaccgatatgaagatgaaaataaatctccggtcagtattgaacagataattcatccgcgccgttatgaagataaaaaagatgacatctggactacatatcaaagggtccaggaaaatctgattaaaggcggtttgcctggccgaactgaaaaagggaaaagaacaacaacccggccagtaaaagcaatcgatggtgatgttaaactcaataaggcattgtggttaattgcggagaaattccgcactcttaaaggctaa

SEQ ID NO: 231160 - DNA, 153 bp, Klebsiella pneumoniae
atgagtgagcaggaacagcagcggctgattagtgggctgataaagcagcatgagtcatggcaaccagccagacagagagtgcataagaatcccgcagcaaagcgcatgagccagcgtgaccgggagcttatggagtgctttcacaaccgctga

SEQ ID NO: 231161 - DNA, 393 bp, Klebsiella pneumoniae
atgatgctgtttcttcgaaagtatggatttttgtttatccctccagtctactggctcatctatctgggagtcagactgacttacaatggactgacaggagagttttctgctgatttctttcagggtattcgacatgaaggcgtctatattatctgtagtttgtgtgtattttattttttctgcttagaggtggaagttggtgatggggagttctcagcgaacattctgttcctgattgttttctttcatgtggttttattatttatcactctgcttatttgtttgtggcaaggggcgatgttgttggatgcgatctttatgggtcagattattgcctccatgtgtttattgttttttattccagtgctttccattataagaaggagattctag

SEQ ID NO: 231162 - DNA, 405 bp, Klebsiella pneumoniae
gtgaaagcgtactatatacttggacataacgttgcatggcttaacggtatatgcctgattctttttgttattggtgtggtcggtgcgctggcaatggttgccatccctgaaaaattcaatcttcgagttaacagaggcgatacattcatatactgtgcgcttatagcggtggttgggttttccgggatgttcgttatctccattcactcattttcgatggatgaacttgaagcaggtagacactggaaagatgactgccggacacttgaggtaaacatgccgacaggcgcttttaccagccctgttaataaactggactgtgatggcatcatcattaatgtgcctggggggcagtattattcctatatccatcagtgggaattatataaagctaactcaaaatga

SEQ ID NO: 231163 - DNA, 312 bp, Klebsiella pneumoniae
atggctgaataccagttaggttttgatggttttgttcgacttttttttgcaatggcaatcattatctgcggttacggctatgtaattattggtgtttttataagagatacgctttcctgtattttaatgttgtttgggcttacaggtctcagtgctttattttcattaatggtattcatggataaaaacatgtgggccggctctcctgatttgacgctgtcagtaataacgggattttttacagccacagtggttttttatatgttttatgtcttgatttattactttgatcggatgggggaaggtgaatag

SEQ ID NO: 231164 - DNA, 219 bp, Klebsiella pneumoniae
atgcatgcctttatttttctggtgctgatgacgccgagtagtggcggtgggatttgggatattactcccatgcctaatacagatgtctgcataaaaatgctacgggtactcgaagcacgtggaggcagaggttacggaagtaatacaggagagtgcattgaaattaaaacccgcgagcctttgagcagcgtgatagaaacattgaatgagggtgggtaa

SEQ ID NO: 231165 - DNA, 585 bp, Klebsiella pneumoniae; identical to SEQ ID NO: 216544

SEQ ID NO: 231166 - DNA, 1140 bp, Klebsiella pneumoniae; identical to SEQ ID NO: 111107

SEQ ID NO: 231167 - DNA, 726 bp, Klebsiella pneumoniae
atgacagcacacacaatcggtttcagagccgctgaccgctggctgcaggcattactgacctggacaccgggtcagacggatatgattaaaacggtggccctggtcctgatggtcaccgaccatgccgggttactgctggcacacaataacgagataatgcggcttctgggacggggctgttttccgctgtttggtctggcatggggaatgaatctggcccggcacgcggaaatacgccagtcgcagctgaacagcctgtggggctgggcgctggttgcccaggtgtcgtttatgctcatcgggtacccgtggtataccgggaatattctgtttgcctttgccgtcacgggccaggtcctgcggtgggtcagccagccgtcctggtattacaccctcccggcggtcggactgctggtcgcctggatacccctgtcaaccggcagctacggcatggccggagtgggcatgctcaccgccagctggctactttgtcgcgcacagcatgcaccggaacggctgggatacggggtgctgtgggccctcatggtgttgctgatgaatatgcataacgtgagtgaatcggcggccgggctggcgattgcgctgctgacgctgatcgtgtgttcatctgccggagaacgtgtgaaacgcttctggccgcggcatttctttgtgatgttctatgcagtgcacctggcggtactgggtattgtcatctcgatgtaa

SEQ ID NO: 231168 - DNA, 348 bp, Klebsiella pneumoniae
atggattttgaagcgcggaaacaaaaggcgctggcgataatggccagccgtaagatgtggaaaagcaattatgcaccgcttctgatacgactgttgtggcggctggggataaacattcccccgctgccgtttgctccgctctggcaggtttttgtcgtaatgacaggctatttctcccttggatatgggctgtggatgtactggacggtgtggcgggcccaggggatgcctctcctgttcgcctgcgaagtcagtcttatcgcgggcgtgttatttggcctgacgatggcactttttcatctgtggcggcgaaaggtgaataaattacctgactggaaagatctgtaa

SEQ ID NO: 231169 - DNA, 726 bp, Klebsiella pneumoniae
atgagagcacaacacacatttccaggcgcgacagacagctggcttcagcgcctgctgacctggacaccgggacaaacggatatgattaaaacggtcgcactggtactgatggtgactgaccacaccggcttactgctggccggaaacaatgaagtgatgcgcctgctgggacgtggttgttttccgctgttcggtctggcatggggaatgaatctggcacggcacgcggaaatacgccagtctcaactgaacagcctgtggggctgggcgctggtcgcccaggtgtcgtttatgctcatcgggtacccgtggtataccgggaatattctgtttgcctttgccgttacgggccaggtcctgcggtgggtcagccagccgtcctggtattacaccctcccggcggctggactgctggtcacctggatacccctgtcaaccggcagctacggcatggccggagtgggcatgctcaccgccagctggctgctttgtcgcgcacagcatgcaccggaacggctgggatacggggtgttgtgggccctcatggtgttgctgatgaatatgcatgacgtgagtgaatcagtggccgggctggcgattgcgctgctgacgctgatggtgtgctcatctgccggagagcgtgtgaaacgcttctggccgcggcagttcttcgtgatgttctatgccgtgcacctggcggtactcggtattgtcgtctcgatgtaa

SEQ ID NO: 231170 - DNA, 489 bp, Klebsiella pneumoniae
atggcccgcgacaatcccgataccggggtggtggtgcggctggccggtgatgaccgcccctggaaccccggggccatgaccggcgggcgggtatgggctgatccggcgccggtggctccggtaccgcaggccggggctgacattatcctcccgccagaggttctggcgcagcgggcggcagaagaacagcagcgccgcgaaatggaaaaacaggcggaacagactgcccgggaagtggccggggaggcgcgtaaagccggcgagccggcggaccgggtgaaagaggttatcggggacgtcattcgcggactggagcgtgaccggccgggtacggagaaaacgacgctaccggatgatcctcagttccggcgccaggaggcggcgattcagcaggtggcctcagaaggtctgcagcgtgagcgtctgcaggctgtggagcgggacatggttcgtgaccttaaccgcgagaaaacactcgggggcgactga

SEQ ID NO: 231171 - DNA, 141 bp, Klebsiella pneumoniae; identical to SEQ ID NO: 36145

SEQ ID NO: 231172 - DNA, 645 bp, Klebsiella pneumoniae; identical to SEQ ID NO: 106325

SEQ ID NO: 231173 - DNA, 621 bp, Klebsiella pneumoniae; identical to SEQ ID NO: 4279

SEQ ID NO: 231174 - DNA, 231 bp, Klebsiella pneumoniae; identical to SEQ ID NO: 4280

SEQ ID NO: 231175 - DNA, 294 bp, Klebsiella pneumoniae; identical to SEQ ID NO: 106327

SEQ ID NO: 231176 - DNA, 429 bp, Klebsiella pneumoniae
atgcagtatgtgacaacacgccccgtcctgaatgttgaagagtgtgaccgcctgtcttttatgccctggatgttcggcgctgattttatgctcgcagaatcgcaggtgtatgcgctggcgaaacaatggatgcctgaatacagcagtgagttctggcactttatccggctgccagagggcggcggttacatgatgccggattgtggccgggttcatctggtcaacagtgaaaacgggttcgaccgcattgtgagcgccgacgcggcgggcattattctgacatcgctggccgttaaccgtcgtctggcggcaaatcatgacagcggcaacccggccctgactcacctttacatgctgcgtgatgcccagctctggaatcacatcacccttcacccggaatgcaacgccatttacgccgcgctggactga

SEQ ID NO: 231177 - DNA, 804 bp, Klebsiella pneumoniae
atgccgttgatttgcgtctgttcaccgaaaggcggcgtagggaaaacgaccctggcggccaatttagcctattcgctggcgcggacgggcagcaaagttctggcgctggattttgatgtccagaacgcgctgcgtttgcattttggcgtaccgctgaacgatgagcggggctatgtggcgaaggcgctggagctgcacgactggagccagtgcgtgttgagcgccggcagtaatattttcgtcctgccatatggcgaagtgagcgaggcgcagcgtcaggcgtttgatgagcaactgacccataatgaccatttcctccagcgcggtctgtccgcgctgcttaattatcccgggcttatcaccatcgccgatatgccccctggaccttcgcccgcgctaaaggcgctgacggggctggcggacctgcatcttatcccgctgctggcggataccgcctcgatgtcgaccctggcgcacgtagaaaagcagcgcctgaccggcgcggcgctgaatcataagcacgggcactatttcgtcattaaccaaagcgatagccgtcgccaggtcagccgggacgtcaccagcctgatggaagagaaactgggcgagcgactgcttggcgtgatccatcgtgatgaaagcgtggtggaggccaatgcctcgcagaagtcgatcctggactttaacgcttcctcggcagcggccttcgatattgaaatcatggctaaaaaaatatcttcgctgttgggtattcatattggcgatggcacggtgcacagccagccacgcatgtcagggcgttaa

SEQ ID NO: 231178 - DNA, 1482 bp, Klebsiella pneumoniae
atggcgattatcaagcgcgaccacgcggcagccgcccatcgacagatccgcggtatggctgcgcgagacgatgccgctggcgtaatggatcaccaccggaatgtcgacatcgatacgaatggtttttcgcacctgccgcgtttcgcgcgccacggcaatcgccgccagcaggaagatcagactgtagatcccccacccgacgttgagggcgataacgttgggatccgagccaaagtagtcatggccaatcgcccggacgatgccgaccaccacccccagggccagcaggcaggccaccaccaggtgcgggcgcaccacggtgaaatcgaagtagccgacgtccagcaggccgcccttatcggtgacgttgaacttgccgcgtttagggaaaatcatcgtcaccagggtcggcagcaccaggtggaaggccagcacaatatcgtaaatttccccccagaagctgtagcgatagcggccgttcattcgcgaaccgacgtaaatagcgaggaacaggtgcggcagggcataggagacgatcaggctcgccgacgagtaaataatattgaggttaaacagcaggtaagccagcggggcggtgacaaacaccaccctgggcagcgcgaactggtagtagagcatggcgctgagatagcacaagcgctgctgaaaagtcagcccgcggccaaacagcggattatcgacgcggaaaatctgcgtcatcccgcgcgcccagcgggtacgctggatgacgtgcaccaccaggcgttcagtagcgaggcctgcggccagtgggatatcgagaaaggccgacttccaccccagacgctgaaacttcagcgccgtatgagcatcttcggtcaccgtttcgacggcgaaaccgccgatctgcgccagcgcctcgcgacggatcaccgcgcaggagccgcagaaaaaggtggcgttccagttgtcgttcccctgctgaatcgggccatagaacaacatcccttcgttgggaatgttgcgtccgacggagaggttacgttcaaacgggtccggggaatagaagtagtgcggcgtctgcaccagagccagcatcgggtctttcaggaaaccgccgacggtggcctgcaggaagacgcgcgtggcgacgtggtcgcagtcgaaaacgcagataagctccccctgagtcagggtcagcgcatggttaaggttccccgctttggcgtgcttgttgtcattgcgggtgatatagcccaccccaacgtcggcggcgaagacggcaaactcgctgcgcttaccgtcatccagaagatagattttcattttatcttttggataatcaatgcattgtgccgccaggacggtatcgcgcaccacctccagcggttcgttatagctcggaatatagatatcgaccgtcggccacttactcatatcatccggcagcggaacaatgccgcgcttcagcggccagaccgtctgcagatagttaagcagtag

SEQ ID NO: 231179 - DNA, 2136 bp, Klebsiella pneumoniae
atgaatgattatgatatacctcgtagaatcttcgacactattattgaagacacgattttcgatactcataatgctgattcgcaaaaaaccctattttatgtagttaaaggatacgcaggaagtgggaaatctatatgcctgaaacgaactgcgtgggaagtaggagtaacttataatgctcccagtttttatctaaatgaaggagcgcaaataagaaaagagtacatattcgaactatgttatttaataaatgaacgaatttacatttttatagatgatatactcgatcttggcaatgatgcgctggagttaataaaggaggcaaaaaaaaaccttcttcccatcacattcattagcacaggtcgaactaatgagtggaatactcatggagagttcttcgaacaagaagtaaatagcacttttgatttgttagaccttaatgatagtgaagttcaaaatttactcgaaaaattaacgagatataattgcttaggatatctcggaacccttccagagaatgagagatttaactatcttaaaagtagattggataaccagttattagttgctttacacgaggctactgaaggtaaaacttttgaagaaattattattgatgaatatgaaaatatttaccctcttgaagcaaaggttgcgtaccttgatgtttgctctcttcatcgattcgatattggagttagagccggtttactttcaaggattgagggggtaaacttcaatgaattttataagaaattgatggctccacttgagaatattgttaacgtaaattatgattatcgagttggtgactatgtatataaaagtagacatcaacatatagcaaatattgttttttccaaaacacttccatctgccgaagaaaaatctcaacagattattaaaattataagatatcttaacgttagttacgaaactgacaatttagctatatcacaaatgattaaaggaagaatattagctgatgaattcacaaataaatctctagtaaactctatttttaatgttgcagaagacgcaggtattcatccggctgttataaatcatcaaagagccgttttcgaattgcatcaccctggcggagatcttagatctgctctcaactatataaacaaagctgaagaagaacccgggaatttatctcgaaaaacattgcagcacactaaatcaaatatatatagaaggcttgcatcagcttctaatattgatgtcgagaagcggaagttaagacaagatgcgttgactatcttgaatcgttctatgacaggggctcgtgactcactaccttattttacaaaaggccaaatattatttgaagaacttaaagagcgcatggaccttgtaaaagaaagtgacagcgaaactgaagatgaagtcatcaatgaactaacaaaacaaatggagtccaaccttgtaactggcctgcagttatttccctccgatgacaagctattaatgcttgaatctgattactcaagttatattaaagactcacctcgcgcattaaaagctctagaacagtcttttagaaagaataaagatagcatttatacagctgttcgcctggcgagatcatatttctcaacaaatagaagagaagaagctatatcccttcttcgttctacattatcaaatcatccgataaataaaacattacactttgaaatagctaaattcttgatttcaatggatgagttcacaaatagagatgagatacttactcatctcaaacgtagtttttctactggtgatacacattacgaagcacgctatacttacgccaggcatgaatatctctatggtgatattgcaaaatccaaaaaagagtttgcggatttggctaaaattccatacccaccttctgctttaaataaggttagaggcgatatgaagacgcctgagggaaacaaaattatttatcatggtactgtaagtagtgtacatggttcattctgtttcattaactgcattgagttttcagaaaatatttatgtccactatactgctttagttaatagtgctgactggccaaaaataatcccagggacaagaatatcatgccatataggatttagttttagagggattgcgggacattctctaactgttgcttga

SEQ ID NO: 231180 - DNA, 165 bp, Klebsiella pneumoniae
atgatgtgcgtgactcatgaaatgaactttgcgcgtgacgtagccgatacgatctggtttatggatcagggacaaatactggaaaaggctgctccggataaattcttcaccgcgccgcaacatccgcgcgcgagacgtttcctgaatgatttactgctccattaa

SEQ ID NO: 231181 - DNA, 1824 bp, Klebsiella pneumoniae
atgaagcgtgatggagtggcctccgatattaagattggcgacctgcctattcttaaaaactccgaaattcagaacttctgcctccacggtaccgtgggttccggtaaatccgaagttatacgccggctactgaactacgtgcgtgcccggggcgatatggccatcatttacgatcgctcctgtgagttcgtcaaaagctattacgacccgtcactggataaaatcctcaacccgctggactcgcgctgtgcagcctgggatttgtggaaagagtgcctgacgctgccggacttcgacaacatctccaacacccttatcccgatgggtaccaaagaagatccgttctggcagggctccggtcgcactatctttgccgaaggcgcgtatctgatgcgcgaagacgacgatcggagctacgagaagctggtcgataccatgctgtccattaagatcgacaagctgcgcgcctatctgcagaacacgccggcagcgaacctggttgaagagaaaattgagaaaaccgccatctccattcgagctgtgctgaccaactacgtcaaggctattcgctacctgcagggcattgagaagaacggcgagccgttcactatccgggactggatgcgcggcgtccgtgaggaccgacccaatggctggttgtttatttcctcaaacgctgacacccatgcctccctgaagccggttatctcgatgtggctgtcgattgccatccgcggcctcctggcgatgggcgagaaccgtaaccggcgtgtgtggatcttcgctgacgaacttcccacgctgcacaagctgccggacctggtcgaaatcctcccggaggcgcgtaaatttggtggttgttatgtgttcggtattcagtcctatgcccagcttgaagatatctatggcgttaagcctgccgccacgctctttgacgtgatgaacacccgggccttcttccgctccccgagtaaagagattgcggagtttgctgccggtgaaattggtgagaaggaaattctcaaagccagcgaacagtactcttacggtgctgacccggtgcgtgatggggtgtcgaccgggaaagaaaaagagcgggaaacgctggtcagttactccgatattcagacgctgcctgacctgtcctgctatgtcacgctgcccgggccgtatccggccgtgaagctggccctcaaatacaagccgcgtccgaaaattgccgaaggatttattcctcgcactctcgatgcgcgggtggatgcgcggctcagtgcgctgcttgaagcgcgggaagctgaaggcagtcttgccagggcgcttttcacgccggatgccccggcatccgggccagatgatgccggcagtcacgccggtgaacagcctgagccggtcagtcagcctgcgccagcagtaatgacggtaactcctgcaccggtaaaatcgccgccgacaacaaagcgtccggcagcggaaccctccgccaggacagctgagcctcccgtcctgcgggtcacgaccgtaccgttgatcaaaccaaaagcagccgcagcggccggaactgccgcaacagcatcctctgccggtacccctgctgcagcggcaggcgggacagaacaggtactggcgcagcagtccgcagaacaggggcaggccatgctgccggccggtatgaacgaggacggtgtgattgaagacatgcaggcgtatgacgcctgggctgatgagcagacgcagcgggatatgcagcggcgtgaagaggtcaatatcaaccacagccaccgccacgatgagcaggatgatctcgaaattggggggaatttctga

SEQ ID NO: 231182 - DNA, 804 bp, Klebsiella pneumoniae
atgccgttgatttgcgtctgttcaccgaaaggtggcgtagggaaaacgaccctggcggccaatttagcctattcgctggcgcggaccggcagcaaagtgctggcgctggattttgatgtccagaacgcgctgcgtttgcattttggcgtgccgctgaacgatgagcgcggctatgtggcgaaggcgctggagctgcacgactggagccagtgcgtgctgagcgccggcagcaacattttcgtcctgccgtatggcgaagtgagcgaagcgcagcgtcaggcgtttgatgagcagctgacccacaacgaccattttctccagcgcggactgtccgcactgctgaattatcccggacttatcaccatcgctgatatgccgccagggccttcgccggcgctaaaggcgctgacggggctggcggacctgcatctgatcccgctgctggctgatactgcctcgatgtcgaccctggcgcacgtggaaaaacagcgcctgaccggcgcggcgctgaatcacaagcatgggcactatttcgtcattaaccaaagcgatagccgtcgccaggtcagccgggacgtcaccagcctgatggaagagaagctgggcgagcgactgcttggcatcgtccatcgtgatgaaagcgtggtggaggccaatgcgtcgcagaagtcgattctggactttaacgcttcctcggcagcggccttcgatattgaaattattgctaaaaaaatatcttcgctgttgggtatccatattggcgatggctcggtgcacagccagccacgcatgtcagggctttaa

SEQ ID NO: 231183 - DNA, 336 bp, Klebsiella pneumoniae
atgggcatcttcggtcaccgtttccacggcgaaaccgccgatctgcgccagcgcctcgcggcggatcaccgcgcaggagccgcagaaaaaggtggcgttccagttatcgttgccctgctgaatcgggccatagaacagcatcccttcgttcgggatgttgcgtccgacggagaggttgcgctcgaacggatccggggaatagaagtagtgcggcgtctgcaccagagccagcatcggatctttcaggaagccgccgacagtggcctgcagaaacacgcgcgtggcaacgtggtcgcagtcgaaaacacagataagctccccctgggtcagggttag

SEQ ID NO: 231184 - DNA, 426 bp, Klebsiella pneumoniae; identical to SEQ ID NO: 188205

SEQ ID NO: 231185 - DNA, 693 bp, Klebsiella pneumoniae
atgtgtgcgaaggatcgtagtcaaattactgtacttagtcaaacggaaaccattcattcttttagcgagatgctcaacttttcatcttgcccttccttcattagaaacacccaaggtgaattccttcatactagccctctttttgacaaaatcttcttaacttccgtaacatctgttgcctggttttcggcgctccccttaaaaactaaaatagaacttatccagtcggaaattaaatcttttacggaagattcttctgttttggtaagaggtattggttttggggatatatcatggacagtttttattgagagctttcaccttgatgatgagaaatatagtcgatgggtttttattagagagggtgaggctatatgcgatcatgcaaaagaatatgctgatttttcatcaaagatggaaaaatatatagaccgcatttcaaaaacggccagttctgattgggctatatttaatctttattcggttgggttttctcatgccactatatctaaaattacaggtgttaaagaacagacatccagaaatgcagttcgtcatataaaaaacgatctcaatttccccgatcgtgactatattatattgtcttctatttatgctcttagttatgggagagttgtggggaatgttattaaaatactaaagggtaatgttaattctttgttaattcaatag

SEQ ID NO: 231186 - DNA, 936 bp, Klebsiella pneumoniae
atggagcatctaactgagtacttactgaatcaaatattaaatggcaatgctattttatttttaggtgcaggtgcgtccctggagtctcaatcagaggacggaaaatataaaggcatgactggtaatcaacttaaagatttaatttgtgatgaattcctctctggaaaatcaaaaaataaaagtttgagttatgttggtgcagttactaaagaccttgcgagtactggaccggtacatgaattaataaataaacatactagtgagcttctaccaacagttgggcatagtattatcccgaagattagatggaaagcaattgctactactaattacgatgagttagtagagaaagcttataaaaataattcaaaaccgattcaaatattaaagcgaattgtcggcgacaatgatgatatacagagtatactttcagatgtaaatgccgttccacttctgaaattacatggctgtatatcacgattaaatgatcatcaactgcccctaattctgtctagccatgattatcataaattcagattaaacagaagctctcttttttctacattgaaagaactagcgtataatcatccaatagtattttgcggttacagtatttctgatgaaaatattagagatcttatattcgatgtgagtgaaattacaaatgaacggccaaaatatgttttggttgatccaacccttgagaaacaagatatttcatattggagctcaaatagatttgaatgtataccgcttacttttgtccaatttatgaaatcccttggggaagaactcgatgataacatggcgaagctaagcactgctgtaaaaaagacagcgattacattcaaaaaacacatcgcctcccatgatataccaagcgctaatttattagcgtatgtagaacgtgaattactgcatatacaccccgggtga

SEQ ID NO: 231187 - DNA, 1227 bp, Klebsiella pneumoniae
atggctgggctggaaaaacaacgcgagcaatatgctcatgcggttgaggcattatccgatcctgaacgaactcgccttgtgctggtcgcgcgattgcaaaaatcaacactgcaggaagtcgctcgtactcatgacgaattatcagctattggccttaaaaatcagtatttagtcattaacggtgtcctgcctgcgagcgaagcagaacgtgatgcactggccgctgcaatatggcaacgggagcaagaggcgctggcaaatcttcctgccgggttatctgatttgccgacagacaacttatacctgcagccgctgaacatggttggtgtatccgcattgaaaggcctgctcaacgaacacgctgagataacatcgcttcctgaacaaagcccacagaacaagccagagaatatgtcgttgtctgtcctggttgatgatatcgcccgcagtgaacacggtttgattatgctgatgggcaaaggtggtgtgggcaaaaccacaatggctgcggctatcgccgtcagtctggcggataagggttttgatgtgcatctcaccacctcagatcctgctgcacatctcagtacaacgctcaatggcagcctcaaaaatctgcaggtcagccgaatcaaccctcacgatgaaactgaacgctatcgtcagcatgttcttgagacgaaaggcagggatctggatgaggctgggaaacggctgctcgaagaggatttacgttctccttgcacagaagagattgcggtgttccaggcgttttcacgcgtaattcgtgaagctggcaaacggtttgtggtcatggatacggcacctaccgggcatacgctattactgcttgatgctaccggggcttatcaccgtgagattgccaggaagatgggggataaaggtcattttaccactccgatgatgcagcttcaggaccaggaacgtaccaaagttttgctggtcactctgcctgaaaccacacctgtactggaagcggcaaacctgcagtccgatcttgaacgtgcggggattcatccctggggctggattatcaataacagcctttcgattgcacagacgcaatcgccgctgctttgccagcgcgccctacaagagcgtcctcaaatcgaggttgtgaaaaaccagcatgcaagccgcatagcgttagtaccggtaatggctgcagagcccactggcatcgagaaactcagagagctggttgtttaa

SEQ ID NO: 231188 - DNA, 1227 bp, Klebsiella pneumoniae
atggcggggctggaaaagcaacgcgaacaatacgctcatgccgttgaagcattatccgatcctgaacgaactcgcctggtgctggtcacgcgattgcaaaaatcaacactacaggaagtcgggcgtactcatgacgaattatcagctattggccttaaaaatcagtatttagtcattaacggtgttctgccagctagcgaagcagaacgtgatgcactggccgccgtaatatggcaacgagagcaagaggcgctggcaaatcttcctaccgggttatctgatttgccgacagacaacttataccttcagccgctgaacatggttggtgtgcccgcattgaaaggcctgctcaacgaacacgctgagatagcattgcttcctgaacaaagcatacaaaacaaaccagagaatatgtcgttctctgtcctggtcgatgatatcgcccgcagtgaacacggtctgattatgctgatgggcaaaggcggtgtgggtaaaaccacaatggctgcggctatcgccatcagtctggcggataagggttttgatgtgcatctaaccacctcagatcctgctgcacatctcagtacaacgctgaatggcagcctcaaaaatctgcaggtcagccgaatcaaccctcaagatgaaaccgaacgctatcgtcagcatgttctggagacgaagggcagggatcttgatgaggccggaaagcggctgctcgaagaggatttacgttctccttgcacagaagagattgcggtgttccaggcgttctcacgcgtaatccgtgaagcaggcaaacggtttgtggtcatggatacggcaccgaccgggcatacgctattactgcttgatgctaccggggcttatcaccgtgagattgctaagaagatggggaataaagttcattttaccactccgatgatgcagcttcaggacccggaacgcaccaaagtcctgctggttactctgcctgaaaccactccggtactggaagcggcaaacctgcagtccgatcttgagcgtgcggggattcatccctggggctggattatcaataacagcctctctattgcacagactcattcaccactgctgtgtctgcgtgctcaacaagaacttcctcagatcgaggctgtgaagaaccagcatgcaaggcgcatagcgttagtacccctaatggcatcagagcctaatggcatcgagaaactcagagagttggcagtttaa

SEQ ID NO: 231189 - DNA, 612 bp, Klebsiella pneumoniae
ttgctccgcctggggcaaatctttgttgtgccgcagcacatcggcgcggaacagcttcgccgaggcgccctgcgccccgctctgctgcgccaacggcgcggagagcgccagcgcctggctgatattgccctgcttataggcctgctgggcctgcgccagctggccgtagaacagcgcatcggccgcctgctgacgacgggtcgccgaggcgtcgccgccgaggtccgcggcccggctcagatactgcgacgcggcctggtagtcgccgctgcgctgggcgatatagcccatgcccgccagcgcatcggcatcctgggggttagtctgcaatacctcttcaaactgctgcttcgcgccggcggtattgccgctgttgaggttggcgtagccctggccgcgcgcctgaccgctgcgccgttcgcgaaagtaattctgaacttcgctgtcctggggatgccgctgcatccaggtgtcgtaatactgctcatccccggcctgcgggcccagccagagcagcgcctggcgcaagccgctgtccgcctctttattgccgctggccatcggctcgagcagggcgatcccttcccggcgagtctcttcccgccaggttaa

SEQ ID NO: 231190 - DNA, 603 bp, Klebsiella pneumoniae
atgcccaccggcgggggggatttgcagtcgctgcgtgaacgtgacgtgctggcggtcaccgctctcgatcagcaggcctttaaccagagcctgctggccgactcaccctatcgcccggtagataatgtgctgagcgtccgcgagccagacctgtggcaaaaagtccagcgccggctcaccggcgactggacttccgccagcctcgacgccgatcgctacttttcgtcgagcagcgcctggcgcgggttcatcagctatcgctcgccgtggaattccacccgcctggtggtggtggcgctggccagcaatgatgaccagctggcgcgactgaagaccgatctggaatcgccgcgcattaacgccgggatccgcggcgataccgcggtgatcaccagcgataacggggtgcgcagcttccaggtgagtacgccgttccccagcggtcagatgccgtggtacatgatggcggtctggtatgccagccagcactcaggtttcctggcggtgctggggctgattgccacctcgataatgggactggcgctgaccgcgatgtttaaacgtcacgcccgtaagcgtctgggttcgggggataaccaatga

SEQ ID NO: 231191 - DNA, 1071 bp, Klebsiella pneumoniae
atggccagaagcaagatgatgaatgctgtagattcgtatgctaaagctaaccatattagccgtgatgaagcattcggccagcttatggacaagtcagtgagaggtgatgtttctggcgaggcttatgtaggagccagaggtggtgttggattcgagctcttcggtaatggcggtaaagctgaattcggtgggaggatgtcggcgagagggacagcaagttctggatctcaggacaatactactgagtcaggacgccaatctaatgctgacaatcatgataccagcagtcaggcagttaaagacttcagagagtcttctgattacttcatcaaccagaaatcaagccagtctggaaacatcactgataacaatgcatcttctcgggttgatcaattttctgcctctttggccagtgcgaaaaatagctatgaccagtacacgacgagcaaaacacgtagccatgagtatagtgaaatggcctcacgaacagaaagcatgagcggccagatgaacgaaaacctgactcaacaatttgctaatttcgtacagaaaaatgccccacaaaatgctgaagctattcttactgacacgtcttcacctgaaatcgctgcccaaagggagcaactggctcgtgaatttgtgaaacaacaggttgaacctaaagtcgatgaggcgtaccaggagggcagaagaaacattggcgcaaatatgccatcagtttctgaaggtaaaggaagcggtacagtatatgcggactacaactctcacggtgatagtatcgatgagatgaccaaaaatgcaggtatcaaaaatgatgttcaccaatcggttgaacacatgtttagcgaaaaccagcaagctcataaggataggcaagatagcatacataagcaggaggatgatgttcagaatgaacacactcgtctgaaaaaccaccataatttggaaggaaataaatttgagaaagaatacaatgacaaaaaggctgaacagagagcacttcctggagcggatacaagagacgaactcctagctaaggcccaggaatttgagcggaagcataaaccctaa

SEQ ID NO: 231192 - DNA, 1086 bp, Klebsiella pneumoniae
gtgagcatcatccagcacgttggcgaacgggttaaacttgagggtatcgccatcgaggtatacgccccccatgttttcacacagggacttatagccatcgcccatgtcgaacacccaggcaaacccgccggagtcgagcacactgcgaatgaggggctgaatcagaccggttttacccgccccggacgtcccgcagactgccatgttgaaattggtattgttcattccctcgtagaacaggtcgatgaacgccagctgatttcggtaggtgggcgccaggagtcccgccggcgccagcgggctgtcagcgacgatcggcaggaggttagccacctggaacgtctccgcccgcttcaccacgcctgccgcctgcagctctttaaacaggccctcaccacacttgaacggcatcatggccagaaagttacgcaggtgatggtagcgggccgggatcagctggaaaccgcctttacggtagctgttgagcacctgctgttcagcggcgagagaggcctctgtgctgtctgcggtgtacgtggtgatattaaagaagtaggacaccagggaggtctggttggtcgccagtcgctggcggatatcgccccactcctgcatttcttttatcacgttcggaaaaaacttcgcgtaggaggttttgcttttcttctccacgtccatgaatttcatgttggcttcattctgggtcttcacctggtcctccaccatcagcgtcagcgtaatgacaaaggggcaggaaatggagagctccgggttaagcaggttggcgtagttatccgcggaggtccagaggaaggccatttccggatcactctccagatggtagctcgtcacccgggttacgcactctttcccgtcacgccccaggcggccaattttcagatgaccggcggtgacctgcatatcaaagctgtcatcgacacactgatagttcagatcctgataggggtccagcttatacggtacgcggtacatctcgtgcgggtccgggtttataagctcgcgcatcagttcgaccagcccggcagcatcaaggatacgcgtcggaatataggcaccgcccagtga

SEQ ID NO: 231193 - DNA, 963 bp, Klebsiella pneumoniae
gtgttcggtattcagtcttatgcccagctggaagacatctatggcgttaagcctgccgccacgctctttgacgtgatgaacacccgggccttcttccgctccccgagtaaagagattgcggagtttgctgccggtgaaattggtgagaaggaaatcctcaaggccagcgagcagtactcctacggtgctgacccggtgcgtgatggtgtatcgaccgggaaagaaaaagagcgggaaacgctggtcagttactccgatattcagacgctgcctgacctgtcctgctatgtcacgctgcccgggccgtatccggccgtgaaactggccctcaaatacaaaccgcgtccgaaaattgccgagggatttattcctcgcactctcgatgcgcgggtggatgcgcggctcagtgcgttgcttgaagcgcgggaagctgaaggcagtcttgccagggcacttttcacgccggatgcgccggcatccgggcccgctgatacaaacagtcacgccggtgaacaacctgagccggtcagtcagcctgcgccagcagacatgacagtatctccggcaccggtaaaagcgccgccgacaacgaagatgccggcagaggaaccttccgtcagagcaacggagccttccgtcctgcggctcacgaccgtaccgttgatcaagccaaaagcagccgctgctgccgctgcagccgcaacagcatcctctgccggtacccctgctgcagctgcaggcgggacagaacaggagctggcgcagcagtctgcggaacagggacaggacatgctgccggccggcatgaacgaggacggtgtcatcgaggacatgcaggcgtatgacgcctggctggcagatgagcagacacagcgggatatgcagcggcgtgaagaggtcaatatcaaccacagccaccgccacgatgaacaggatgatgtcgagattggagggaacttctga

SEQ ID NO: 231194 - DNA, 405 bp, Klebsiella pneumoniae; identical to SEQ ID NO: 219785

SEQ ID NO: 231195 - DNA, 585 bp, Klebsiella pneumoniae
atgtcgcagcacatcggcacgaaacagcttcgccgaggcgccccgcgccccgctctgctgcgcaagcggcgcggagagcgccagcgcctggctgatattgccctgcttataggcctgctgagcctgcgccagctggccgtagaacagggcatcagccgcctgctgacggcgggtcgccgaggcgtcgccgccgaggtccgccgcccggctcagatattgcgatgcggcctggtagtcgccgctgcgctgcgcgatatagcccatgcccgccagcgcatcggcatcctgcgggttggtctgcaatacctcttcaaactgctgcttcgcggcagcggtattgccgctgttaagattggcgtagccctggccgcgcgcctggccgctgcgccgttcacgaaagtagttctgaacttcgctatcctgcggatgacgctgcatccaggtgtcgtaatactgctcatccccggcctgcggacccagccagagcaaggcctgacgcaagccactgtccgcctctttattgccgctggccatcggctcgagcagggcgatcccttcccgacgggtatcttcccgccaggttaa

SEQ ID NO: 231196 - DNA, 183 bp, Klebsiella pneumoniae
gtgagtacgccgttccccagcggtcagatgccgtggtacatgatggcggtctggtatgccagccagcactccggtttcctcgctctgctggggctgattgccacctcgataatgggactggcgctgaccgcgatgtttaaacgtcacgcccgtaagcgtctgggttcgggggataaccaatga

SEQ ID NO: 231197 - DNA, 399 bp, Klebsiella pneumoniae; identical to SEQ ID NO: 200718

SEQ ID NO: 231198 - DNA, 960 bp, Klebsiella pneumoniae
gtgttcggtattcagtcctatgcccagctggaagatatctatggcgtcaagcctgccgccacgctctttgacgtgatgaacacccgggccttcttccgctccccgagtaaagagattgcggagtttgctgccggtgaaattggtgagaaggaaatcctcaaggccagcgagcagtactcttacggtgctgacccggtgcgtgatggtgtatcgaccgggaaagaaaaagagcgggaaacgctggtcagttactccgatattcagacgctgcctgacctgtcctgctatgtcacgctgcccgggccgtatccggccgtgaaactggccctcaaatacaagccgcgtccgaaaattgccgagggatttattcctcgcactctcgatgcgcgggtggatgcgcggctcagtgcgttgcttgaagcgcgggaagctgaaggcagtcttgccagggcacttttcacgccggatgcgccggcatccgggaccgctgatacaaacagtcacgccggtgaacagcctgagccggtcagtcagcctgcaccagcagaagtgacagtatctccggcaccggtaaaagcgccggcgacaacgaagatgccggcagcggaaccctccgccaggacagctgagcctcccgtcctgcgggtcacgaccgtaccgttgatcaaaccaaaagcagccgcagcggccgctgctgccgcaacagcatcctctgccggtacccctgctgcagctgcaggcgggacagaacaggagctggcgcagcagtccgcagagcaggggcaggacatgctgccggccggtatgaacaaggacggcgtcatcgaggacatgcaggcgtatgacgcctgggctgatgagcagacactgcgggatatgcagcggcgtgaggaagtcaatatcaaccacagccaccgccacgatgagcaggatgatgtcgagattggggggaacttctga

SEQ ID NO: 231199 - DNA, 1134 bp, Klebsiella pneumoniae
atgaaaaaaattgcgatttttagaaaccaactgtttaaaaactctgaatctttcataacaaatcaggcaaattcaattgtcaattacaatattgtttatttaggtagaaaaagattagggactaattcttctaataatatggatatggttatttcggatctgaaggggaaatgtattagagaaaaagagatatggaatgttgtctttaatgatccttatccatacttaagattggtaaaagacctagagctgcatttaatacatgcgcattttgcaattgattcgttgtatgcattacctctagcaaaaacgttaaaaataccactagtaacaacacttcatggatttgatgtgacaacaaaaagaatggattttttacgttcaggttctccgtcttggataaattatagtctttattcagggaaattaaaaaataatggtgacctttttttatgtgtttctgattacataagagaaaaggctatttcaaatggttttccagaagaaaaaaccattaagcattacattggtataaaaatagaccacaattttgttgattcaaataaagacagaacaatattacatatagctagattagttgaaaaaaaagggactacatatctaattgatgcgataaaaaagattgaaaatcatttagatgggtttgttgtcaatattgttggtgatggtcctttgtttaacgaattaaaagggaaaattgaaagtcttggtcttgatagacacatcaagatgttaggggaaataccgcacgaacaagtaatgaatcttgtcaaaacctcttcaatgttaattgtgccaagtgtaacagcaaaaagtggtgattcagagggactgccaacggttattctggaagcctctgctaaccaagttccagttataggtacatatcatgcagggatacctgaggctattagagatgaagtaacgggttaccttattgatgaaaaagatattaacgcattgggagaaagaattaaatttttaattcagaatgaaaatttgagaaatactttaggcaagaatgctcgaaaattgatgtgtgaaaaatttgatcttgataagcaaagctttttattagagcaggaatatgaaaggttaatcaatgaaaaatga

SEQ ID NO: 231200 - DNA, 186 bp, Klebsiella pneumoniae
atgcttactgaccataaacccctgatgtttgcgcattgggggttttgctttttggtcatcggggcaacgttacagcgattcggccaactggtcaaacgggggtcactcatggtgttgcggattagtcagtggtcggaaccctttaaaacccgtcttacaggtgtgtgtcacctgctgcgcacgtaa

SEQ ID NO: 231201 - DNA, 489 bp, Klebsiella pneumoniae
atggcccgcgacaatcccgataccggggtggtggtgcggctggccggtgatgaccgcccctggaaccccggggccatgaccggcgggcgggtatgggctgatccggcgccggtggctccggtaccgcaggccggggctgacattatcctcccgccagaggttctggcgcagcgggcggcagaagaacagcagcgccgggaaatggaaaaacaggcggaacagactgcccgggaagtggccggggaggcgcgtaaagccggcgagccggcggaccgggtgaaagaggttatcggggacgtcattcgcggactggagcgtgaccggccgggtacggagaaaacgacgctaccggatgatcctcagttccggcgccaggaggcggcgattcagcaggtggcctcagaaggtctgcagcgtgagcgtctgcaggctgtggagcgggacatggttcgtgaccttaaccgcgagaaaacactcgggggcgactga

SEQ ID NO: 231202 - DNA, 834 bp, Klebsiella pneumoniae
atgtcgcagctgagttttgccgatgtgttcaacatggccagagaaaccgctgagaatagccctgtgatccaggtcagggcgcaggtcgcggaagtggtgccttctgttcagcgtttgatgagtgagcagcacagccggagccggtttatccacgtgtttaaagacacgggtcgccatctgggacgctgggaggtgttcagtgattttctgtcactggccgccagtgaactggatatggcccggataagagcgccggaaagcattgagcactgccggaaaatctgcgcgcgttatgaggcgtcagatatcgcgaagatgcaggagatgttctgcatgatggtgtgcgcactggaggctaaatttcatgatttcctcggcgccattttcatggtgcttgagctgggcgataactttcgcgggcagtattttaccccatatccggtccagtccctcatggcccggatgctgatgccgggcgtcagggacactatccgccgggaagggatagccacggtcagcgacccggcctgtggtgccgccgggatgctgattgcatatgccgaatgcctgctcgaagcggatatcaatccttccatgcacatgttcggcagctgcatcgatatcgatccggtggcggcagatatggctttcatccagctgtctctgctggggattgccgccgaagtggtcacgggtaacaccctgacaatgcagttccggcgggtaagatacactcccgtgtactacctcaatgactttgaaaaacggctggctgacctgacccggttcagggcgatgcgggactttatgcgcgggatacaggaggctgcgtaa

SEQ ID NO: 231203 - DNA, 579 bp, Klebsiella pneumoniae
atgggcaatgaagacgcccggttcgtggcgctgcagaacagtcgtaacggtgaaagcctgctggccgggaatatgggggagggcgtcagaatggcccgcgacaatcccgataccggggtggtggtgcgtctggccggtgatgaccgcccctggaaccccggggccatgaccggcgggcgggtatgggctgatccggcgccggtggctccggtaccgcaggccggggctgacattatcctcccgccagaggtactggcacagcgggcggcagaagaacagcagcgccgggaaatggaaaaacaggcggaacagactgcccgggaagtggccggggaggcgcgtaaagccggcgagccggcggaccgggtgaaagaggttatcggggacgtcattcgcggactggagcgtgaccggccgggtacggagaaaacgacgctaccggatgatcctcagttccggcgccaggaggcggcgattcagcaggtggcctcagaaggtctgcagcgtgagcgtctgcaggctgtggagcgggacatggttcgtgaccttaaccgcgagaaaacactcgggggcgactga

SEQ ID NO: 231204 - DNA, 249 bp, Klebsiella pneumoniae
atgaatcacaacgttaaacctccgctgggatccctgtcagatggcacgtttacccgcgagcaggccagagcggtcgcggcgcagtatcagaatgtggcgattgaggatgatcagggaacccattttcgccttgtcgtccgtcatcaggatgacgacagcctggtctggcgcgtgtggaattttgaaccgggcggtgagttcctgatgaaccgttatatccgggactacggagtacgtagagcgcaataa

SEQ ID NO: 231205 - DNA, 576 bp, Klebsiella pneumoniae
atgccatccggaagagttgccaccaggtccgggatcgtggccggatatggggagagagtgtggcaatatctgccacccggacctgaggacacaacagccagcgtgttcggctggtatgcctcagcaatgcccggaaaaaatgttgttcccgtggcgtcatcagtgtgtcattacccacccagacccgctggcgacacaaccgttgctcagcctctgaggggcgaatacccagggctttcagtgacctcagaaccggggaagtcttcgttactgcacgtcctttcagaagcagcaccagaaatcccagcaaactcagcacaacaacggtactgcccgccatcattaatatctttgccatgtattttattccctgatgttcctttctttcccgatgcgttttcctgtcgtcttcctcatctttctgtccctcttctgataaggcagaactctgccggcagcctgtcgagcaacgcgcggcgaaatacattcggcagtcctctcccggctacaacatcagcaatcagaactgatatgacgctaatctgcaggaagtggcacaggacaaaaccaatctga

SEQ ID NO: 231206 - DNA, 489 bp, Klebsiella pneumoniae; identical to SEQ ID NO: 231170

SEQ ID NO: 231207 - DNA, 390 bp, Klebsiella pneumoniae; identical to SEQ ID NO: 92385

SEQ ID NO: 231208 - DNA, 765 bp, Klebsiella pneumoniae
atgataatcctgctcgatcagtacacggtaaatgggatctacggggactatttcaactcagatacaccaacactccacgatgatgcccggatggtggtactggagctcggtggcctggagtcgcggccatctctgcttatcgctgtgatgttctcattgattatttacatcgagaacaggatgtatcagtcaccgcgtggcctgaaaaaactgaacgtcatcgatgaaggctggaagctccttgatttcaagaatgaaaaagtgggtcagttcatcgagaaaggctaccgtaccgcgcgtcgacataccggcgcatacatcaccatcacgcaaaatatcgtggacttcgactccccgaccgcatcgagcgctgcacgcgctgcctgggggaactcgtcatacaaggccattctgaaacagtcagcgaaggaatttgccaagtataaccagctgtacccggatcagttcagcaagctggagaaagacatgattaacggcttcggttcggccaaagagcagtggttctcctcttttatgctgcaggtggaagcgaactgctcctggcaccgcctgttcgttgacccgctcagccgggcgatgtactcctcaaaaggcccggattttgagtacatgaaagcgcgccggcaggagggggtcgatatccacgatgcggtatacggactggcgtgccgcaactttaaagacgaaatggcagagcttgaatcccgaataccggtgaatgacattgaggataaacagagatga

SEQ ID NO: 231209 - DNA, 675 bp, Klebsiella pneumoniae
atgaccgacatcattgagcgcagcctgtcagccgaccgcagcgccacacgggaagccgttttaaaacgcagtatctgccgctatgcagatcgcgacatctggacgcgcctgatgaatgatacgggcatgtttacgctgatgagcgaggcgcagcgcaaggcgtgggacacgcagctctacagcgatgactgccccgaaatcaccctcgacaacgtgatcgccacgttccgggcgcttaacgccagcaagggagaaacgtttgagcagggcgtgatcgacgtgttccgcaatctctcatgggactataaaacgcataacccgtgtttgcttggaaagaaaatcatcattgatggcgtgctcgataatcatcgcgggctgtatttttccgtgcgcacgtatgcacagaaccggatcgatgacctcgcccgcccgttctggatactcgacggaaagaccatacccgacaatcgcgtctccgagggggcaagcctgagtgcctttatcagtcagggtggcgcggcgagtgtgggcgaggtgttcatctgcgaatatttcaccatccgggcttacaagaaaggctctgcacatatcaccttcacacgtcccgacctggtggagaaggtgaacgacattatcgcgcggcactatccgggggcgctgccgccggtggtctga

SEQ ID NO: 231210 - DNA, 165 bp, Klebsiella pneumoniae
gtgctgggcgatgcgctggattatctggacgcgctgccgctgaaagaccgcccggcgctcatgggcgcggcggcaaaacgcggttacatcctgacgctggctgaagaagggtacgcgcaggaagcccgcgatgtgctgatgagtgaactggcggaaaacgaatag

SEQ ID NO: 231211 - DNA, 165 bp, Klebsiella pneumoniae
gtgctgggcgatgcgctggattatctggatgcgctgccgctgaaagaccgcccggcgctcatgggcgcggcggcaaaacgcggttacatcctgacgctggctgaagaagggtacgcgcaggaagcccgcgatgtgctgatgagtgaactggcggaaaacgaatag

SEQ ID NO: 231212 - DNA, 429 bp, Klebsiella pneumoniae
atggaaacgactgctgttaactcagatggtttgatcgacctgctatacaagctgaaagcgaaataccgcaagaacgccgtatgggtgatgaactcgaatactgcggccacgcttcagaagctgaaaaacgataacggggactatatctggcgcgatcgtctggtcgctgactctcctgatacgctgctgggccgtccggttcagtatctggaaactatgcccgatgcggctccgggagaagcatttctggcggtaggcgattttaagcgtggttacttcattgtcgatcacaccactggcgtgcgcacccgtcctgacaatatcaccgaaccgggtttctacaaggtgcataccgataaatacctgggcggcggcgtggtggactcctgcgccatcaaggtgcttgagctttccggctccggttcctga

SEQ ID NO: 231213 - DNA, 423 bp, Klebsiella pneumoniae
atggaggctgctgccgtttcctctgatggtctgatcgacctgctgtacaagctgaaagccaaataccgcaaaaatgccgtatgggtgatgaactccaacaccgccgctacgttgcaaaagctgaaaaacggcaacggtgattatatctggcgcgatcgtctggttactgattcccctgataccctccttggccgtccggttcagtatctggaaacgatgcctgatgcggctgcgggtgaagcgttcctggcggtcggcgactttaagcgcggttacttcatcgtggatcacactactggcgtgcgtacccgccccgacaacatcaccgaacctggtttctacaaggtgcacaccgataaatacctgggcggtggtgtggtggactccaatgccatcaagattctggagcttgctggttcctga

SEQ ID NO: 231214 - DNA, 135 bp, Klebsiella pneumoniae
atgtccgccggcgtcatctgcatgctgtcgaagaatggacgcgggaagtggctcagatcgtcgctgatgttcaactgctggctttcccagctgaaatgcgacgtgggcagcaccgtcacccgcgacgaatcatga

SEQ ID NO: 231215 - DNA, 192 bp, Klebsiella pneumoniae; identical to SEQ ID NO: 217698

SEQ ID NO: 231216 - DNA, 165 bp, Klebsiella pneumoniae; identical to SEQ ID NO: 231210

SEQ ID NO: 231217 - DNA, 339 bp, Klebsiella pneumoniae
atggctgaatctctgttaagttttgatagtgatggttatgtacgactgttttttgcaatggcaatcattatctgtggttacggctatgtaattatgggtgtttttataagagatgcgctttcctatattttaatgttgtttgggcttacaggtctcagtgctttattttctttcatggtattcatggataaaaacatgtgggccggttctcctgatttgactctgtcagtaatgacgggattttttacagccacagtgatcttttatatgttttatgtcttgatttattcctttgatcggatggggcaggtgaatagtaagaccgatggtcagtattaa

SEQ ID NO: 231218 - DNA, 141 bp, Klebsiella pneumoniae; identical to SEQ ID NO: 36145

SEQ ID NO: 231219 - DNA, 312 bp, Klebsiella pneumoniae; identical to SEQ ID NO: 229496

SEQ ID NO: 231220 - DNA, 135 bp, Klebsiella pneumoniae
atgaaagcgcgccgggaagagggggtcgatatccacgatgcggtgtacggcctcgcgtgtcgtaactttaaagacgaaatggcagagcttgaatcccgaataccggtgaatgacattgaggataaacagagatga

SEQ ID NO: 231221 - DNA, 1422 bp, Klebsiella pneumoniae; identical to SEQ ID NO: 136413

SEQ ID NO: 231222 - DNA, 249 bp, Klebsiella pneumoniae
atgagcaacgacatttcaattcgtgtaccaaaagtgatggcgacaccagctgagttcgcggaatgggaaggccgctctcgcggttcggtatatcaaatgattcataatggtaaactcgctaaattcttggaaagaaaagaaaaaccgaaagacagagtatgtatacgttaccttgagtacaaaaaggaacaagtcaggaaaaacatgggccaatccaatttcaactttaatgtcatcgttggtgactaa

SEQ ID NO: 231223 - DNA, 204 bp, Klebsiella pneumoniae
atgaccatcagaaaacagccgaacggaaagtggttatgtgaatgctacccaaacgggcgagatggcaaacgcgtacgcaaacaatttgcgacgaaaggcgaagccattgcgtttgagaatttcaccatggacgaggtaaacaagaaaccttggctgggagaaaaggaagatcggcgacacctatcagaattaattgagctgtga

SEQ ID NO: 231224 - DNA, 1521 bp, Klebsiella pneumoniae
gtgattcaaaaattagatattcaatctgatgcggttgcaaagttaagaatggatgctattcgttcagaaatccaaggttattcccctgatttatttatcgaattctgtatgcaatataacttacaaaaatttgaagataatatccacatgttacgacacatgccttggattgttaatttatgtctaaagtggtctgcgtcagtaactggcaagaataaaaaattcaaaatcctcgataaaaatcaagcaataaaactcttccaaaaaacttatgaaaccttgaacattattcctatcggtcttgagaggaagaatggcatgcatttcttcattagaaataatctataccaacaaggaatctaccagaaaattgacgttctaaacacaattagcagacaagtctttctattttcagaacttgaaaaaaaccataaaataaagacaagtttttttactatcacgaatgtatctatcgaagactttcttaagctatcttacatattaataactcacataacagaagagcatcccgtgagaaaaatgaatgtagatacatttactatattatttgacatcattcctagaaataccattgagaaatttcttgatgcaatatcaataaattacaatgaactatctacattttgcaaatcaaaaacctatgataaacctttgcttgaatactactcatcatcaccttttcttgaaaaaccattaataaaaaaaggttcagagtattttcagatacacacacaactgacttcaacaagcatacagacgttcatatatgatcttttaagaagaactgatgccgagaagttcatggatagctttggaaatgtatttgaaaatgcactggaattaatactaaaagaaagcgaaattgattttcataacgaaaaataccttaaagaacgactacctaaagataataaagtagttgattatttcattccacatactgaggcaaatattttcattgatgctaaaggcgttgagatacaccaaaaaggcatggtaacattacgccctgaggatattgcaggaaaaataaagaaatcggtattaaaagcaatcgaacaatctcacgaagttaatcgagaaatatactctaatgagcgaataatagctccattcagggctaactcatatatcatttgcattacatataaaaaccttttcttaggcaatggtagtatcctagctaatacttatgctaaagatgagatgaataagatatatgacaagtttaaacataactatcatatccctacagagaatattttttgtctatcatttgaagagtttgaatatctcattgcatcatgcaaaaggtttaaaattccgcctcatgaagtcttgcaatctgcagttgaaaagaacaaaaaaccatcaagtgctgctttcctattttcccaccatatagaagactattttgatagagtagtcaattcagtcatagtcaatgaggcaggcattaaaatggtagattctattatcaataaattaaagcctgaataa

SEQ ID NO: 231225 - DNA, 279 bp, Klebsiella pneumoniae
gtgctggacgcggttcgcgatgtcgccatcagctccagccagcttaacgacctgaatcagcagcgcgcgctgcagcagctgaaagtcaccgcggcgcaaaccaccaccgatagcgctcgcgcccattatcagcgcggcctgctcagccgctacgccgccgaagaagcccgccgggtggtcctcgcccagcagctgttgctgctggacattgaggcccagcggctgagcaccgacattaccctgatcaaagccctgggcggcggctaccgcggccagtaa

SEQ ID NO: 231226 - DNA, 1299 bp, Klebsiella pneumoniae
atgcgtgtcgtcatactgggaagtggggtggttggggtagccagcgcgtggtatttgagtcaggtgggtcatgacgtgacggtcatcgaccgtcagcccggtccggcagaggagaccagcgcggccaacgccgggcagatttctcccggctatgcggcgccctgggcggcgccgggggtgccgctgaaggcgatcaaatggatgtttcagcgccatgcgccgctggcgatcggtcttgacggcacctcgttccagttgaagtggatgtggcagatgctgcgcaactgcgacacccgccactatatggagaacaaaggccgtatggtgcgcctggcggagtacagccgcgactgcctgaaggcgctgcgcgacaccaccggcattcagtatgaagggcgccagggcgggacgctgcagctgttccgtaccgccaaacagtatgaaaatgccacccgcgacatcgcggtgctggaggacgccggcgtgccgtatcagctgctggaagcgaagcggttggcggaggtggagccggcgctggcggaggtaagccacaaactgaccggcggcctgcgtctgccaaatgatgaaaccggcgactgccagctgtttaccacccgtttggcggcgatggcggaacaggccggcgtgaccttccgcttcaacaccgcagtggatgcgctgctgcacgagggcgatcgcattgccggggtgaaatgcggcgatgagattatcaagggcgacgcctatgtgatggccttcggctcctactcgacggcgatgcttaaagggctggtggatataccggtctacccgctgaaaggctactcattgactattccgatcgctcaggaggacggcgcgccggtttcaactatccttgatgagacttacaaaatcgccatcacccgcttcgatcagcgcattcgggtcggcggcatggcggagatcgtcggttttaacaaagcgctgctgcagccgcgtcgcgaaaccctggagatggtggtgcgcgatctgttcccgcgcggcggccacgtggagcaggcgacgttctgggcgggcctgcggccgatgacgccggacggcacgccggtggtcggccgcacagcgtataaaaatctgtggctcaacaccggccacggcacgcttggctggaccatggcctgcggctccgggcagcttatcagcgatctgatctccggccgcacgccggcgatcccttacgacgatctggcggttgcccgctacagccccggttttaccccggcgcgccggcagcacctgcacggcgcacacaactaa

SEQ ID NO: 231227 - DNA, 1059 bp, Klebsiella pneumoniae
atggttaatatcttgacttctggtctttattcaagagttaaaaatacctctaaattatttattaacgatgttctggatgatgattcaggagataaattaaaaaaatatgcttttctcttgattatggctatatttttattattttcaattaatatagttgggacggtgttaggcttagggggggagctaggttcgtttggcgattttattggaggggtggcgaatccaatacttacattcttaacatttatttgtttgattaagactattttcatgcagcgagatgagttagttctctcaagaaaagagcttgagttaacccgcaaagaatatattgaaacgcagcttgttatcagaaggcaaagtgtagaaagtacattttataatggtctgaatctacatcatgagatagcgagaaacttgcaggttgattttaatgatagtgttaatttaatcagtgcaaaagctaaatctggattagccctcaacattaaaaatggccgtcaatgttttaaagctttgttggattgtctggtatatgatgaccctacccaggacgaattgatagagaagtataaatatatcaataaaaatagaaatgaatggtttggacattactttaggaatctttatagaataattaaaataatcgatgatcttcctggtgagtacttttcggttagccaaaaagaggaatattgtcataccctcagagcgcagctatcttcagatgaattggctgtgttaatgttaaattgttatggggatgtctgtgatcgtggtgaattccgtggactgctcagtcgctatcaaatgctggaacatttgccccttaggtatactgaaaaagatgatagggatgaagttaaagttgaggttgctggttcatttatagttacactctcttttttatctacgtttatactaagtaatgaagaaatagagaaagctaaaaatagaatagatcttaaacgtcatcctggtggtgcgtttggaaaaaatttatcaatagattttccaaagagactcagggatgttaataattactcggacgtttaa

SEQ ID NO: 231228 - DNA, 297 bp, Klebsiella pneumoniae
atgaatcttggcgaaaaaataagagctattcgcgaagctgaaggcttaacaagggatgagttcggtgccctgctggaaatccccataggcactcttcgtcgttacgaaactgggcggattgaaaacataggcggtgacgttctaatcaaaattgttaatcacactaactttcataagtacatgaattggttgatgacggacaaaacagatgaaggagccggacaaattgcccctactctctcccctgatgggcaagacggaacatcgagccgccgaagcgcgaagaaggttggctaa

SEQ ID NO: 231229 - DNA, 195 bp, Klebsiella pneumoniae
atggggggtaagtcaatcaagctggaaagcggaataagcgatccagactttgtggaaataagcactaacgcacggaaacacgaacgcgcgcacctgctgggcttactgcgtatttatgtcggccagctgaaaaaggaaagcgccactccggacgagatttatcaatcaatcgagcggtggatcagcagccgctaa

SEQ ID NO: 231230 - DNA, 957 bp, Klebsiella pneumoniae
atgattaaatcacctatcaaatgggcgggtggtaaagcccgcgttatgcctcagttactggagcacttgccgaaggctgattgcctgattgagccatttgttggcagcggtactgtgtttatgaacacggaataccgccgctatgtactttgtgacagtaaccgcgcgctgatcaacttctttcgcatgctgacttccaacaccgagcggctgattgatactgctcgcggaatgttcctgggcggcaacaacgaagagcagtattacaagcgccgcgcgttgtttaactccatgcagtggagcgatacgggcaaagctgataccgctttgctttacgccgctttgtttctgtatctgaatcgtcattgctttaacgggatgtatcgcgtcaatcagatgggtgagcataacgtcccgtttggaaaatataccgcgccttacttccctgctgatgagatgcgtagcttttccgaaaaggcaaatgacacgaaggccgttttcattgatggcgattttagccacaccatccctgacgttatgcaactgacgcatggctcagttatttactgcgatcccccctatatcccgatcagcaaaaccgccaacttcaccgcctacggcaagccttttaccctggacgatcatcgcgtcctggttacaaccttgctcgatgctcatcgccagcacagcacgcgctcgattatctcaaacagcgacaccccagagacccgcgcgatctactcctctttcaagctccacgctttcagcgttcgccgctctatcagcgccaaaagtcgtgatatggccggtgaagtgattggtgttcttcgcgtgtgtgactgctgcggccgttctggtggtggctattgcccggattgcggccctgtgatggggaattccacttactgtgcaatggctgcggcgggtgcattcgatggggtagagggcttccgatga

SEQ ID NO: 231231 - DNA, 246 bp, Klebsiella pneumoniae
atgagtaataagaatgttgagcttaatgctgccaaagaaaagctggtaaagctaattgatgacttgaacgaatctgagatccggcttgaggaagctcttcagtatgctgcaagctatctaggttacgatgagcgtatagagcaagccagggatgacagggctaaggatgcccttgatgagtgctccactatcaagcaagaggtagcgaatcaaattaagttaatgggtgagctggtaaataaataa

SEQ ID NO: 231232 - DNA, 222 bp, Klebsiella pneumoniae
atgcccgataacacattcttttcgttgaaagagattcttagtgatgtatgggatcaaattgaaagcccaaaatcctttggcagactattcaaacagaaatcatctcattacgcagcctacgagggggttaactcatccaacaaagccacttatagaaaatacaccataaatccactgacccacttttcaggatccccctcagaggatttgaatacttggtga

SEQ ID NO: 231233 - DNA, 213 bp, Klebsiella pneumoniae
atgaacaacatcgccaaagaacgacaagcccttggattaactcaggcgcaactcgctagcttgtttggctggcgccagtcccgtatatcgaattatgaaaacggaacacgtaacccgggattgactgagtgcaggcttattgttgagaaactgaatgaattaggtcggacttgcaccattgattctgtttttcctccattaggccggggttaa

SEQ ID NO: 231234 - DNA, 555 bp, Klebsiella pneumoniae
atgcagtcagtcacttatcaacatcataaccagaatctgcctggatcgctgaaaactcaaaatcagtattcaccgcagcgtcgtgaccgcttgaagtgcagaacgatatacaccgcggttcgggagtgggagtccactttacctgggcgagctcaggagcttgtcgcgcagctggtggccgaacagtgggaaaaacaaaacggtcgcggaataagcgttaacaaacagaatctgtaccgctacctgaaaaacgagggcggctcggagaaatacacccgctatgtcatacagctttcgacagcgatcgttgatgcaatgcctattgagattgcgcgcaaacatggcctaaaacatggcttaactgaaaccgagctggtggccaatgcaatcaaagaatgcagcgaagcgcaccaggccaaattacttggcgcacctctgcagaaactagagcgtgaaatacgggaagctgcaattgcactttttaacatgctccctgcagatgcggcgggaccactactggcgagcatcagcgccgtagcgccgcaatttttctaa

SEQ ID NO: 231235 - DNA, 1368 bp, Klebsiella pneumoniae
atgcatcatattatttgtggggtaaacatggataaagtagtgttatcagaatataactgctgttggaaaaataaatttttagaagagtcccaaaaaataaaaaatgctgtaaatttcacaactatttatatcgatcatgttggttcaacttcagtaaaggggcttagcagcaagcctattatagatattttaatatcactatgtgattggagtgcaatcacaaaactcgctgatgtgttagtgagaatgggatatgatatagatgaaaagtgtgatgatacacctaggctttttttgaaaaaatataacgaaattagttctgaaaactaccatgtacatatctgcgagccaaattgtagatgggggagagatatgttggtttttaaaaacgaactgatgaccaacactgtttttgcaaaccaatatgttgacttgaaaaaaaagttgattaaagattattctggtgatattgaaagctatatgaaagggaaaaagacactcattgaaaataaattaattgagatcaatgatgaatttggcgttgatagaatgctgagttatcaaagggccgagtcaaataaagccgagaacctccagatatatatgatgctaactcagtttataatttctttgctggcagtaatatccgtttatcgtagcaagggaagtgagttgttttggttggctattattggtttcatattaattgttgtatggttttttttaagtcaggcccagcaacggcgtcgttcagcaggtgatcaggctcgacgagtagtcttgctgatgagtggtttgaaaatattaccatctgccgggcaaagcctacgtattaatgatagcttcaatggggaaattactagtgacacattacgccgcgaagaagaccattttgctacccgagaaaaaccaggttataaacgactagttgagatgattgaagagtcgtcatattggacatgttatttacaaaaagctagcgcaaagctgatgttggtcattctattttttcttgcgaccattatattcatagtgactggagctgcaattttatcattaaatactaatgagttaatttcattttcgcgttcgatgatcgctctaatgatctttatcatctcaacagatgttcttggtttactgatctcttatagaaatgcaagttcttcaattggtaatatattcaacagagttgagggaatttctgcaaaaggttttttaaaatctgatgcattgcttctgatggctgattataattcggctatcgaaaaagcacccgcaaccttaccttttgtttatatcctctgtcaaaaaaagcttaataaaaaatggaggacatattccgagatgaaattaaaaggtgaatga

SEQ ID NO: 231236 - DNA, 540 bp, Klebsiella pneumoniae
atgagtgaagaggctggcaagcgcacatttaacctacaaccaagtagagcattccacttggttgtggttactttgcttatgtgcacagcctggtttgtcgccagtaagtttatcatactatcttccgtcccttggggcgtactaacaatccttatacttccaattgcaagtagtgccacgctttttcataagctttctgagaccaaaaaaaatgtcgcagaagatttatcgcgcgatgaacaaagaaggttagaaagacttataaaaaataagagcagagctactcttttcatgctcgcgctacaaatttcaatcattgtttttgtagcgttaattagccttggaaatgagtctgagactataaaagaacacatccaaataatcagtaaattagtagtttgcactttaatcttttcgctgtattctttaattcccgttttactaggcgtaaaagaagtcattgattttgaaggcttaataaaaacacgaaaagcattaaacagacgtaaaaaaaatgctttagctaagcttgggaaataa

SEQ ID NO: 231237 - DNA, 1032 bp, Klebsiella pneumoniae
atgagcaagcgtgaaatcaagagcaaaaaaataatctataaagaagttacaatgtctggtgtgtcaaaaacgcttcagtctatgctaacggaactacttgaaaaacatacaaaggctgatgctcgcaaggaaatggttagcccaggagaggaggatttattcaggcttatcaataaacacgaagtttttcaaggcatgcttttttgccaacttgttgcgttcgaaccaggccattcgcaacgatatatacaacttaaaaatgatgcagaatcatatgagattcgatccgtaacctcagatgagctctcaaaaatgactgttgaggaggctgaagaggttcgctccgaaagagagcaggttgtacgtgaatttatagattcaattctttattttggagttttcggaaacagcattgtagttatgcagtctcgttcacttacaacgagagagctagaaacgcatttaaaatggttgttgggttctttaagtaattatttgggcgctcaaaacatccttaaagtttccgataaaccaaaagaagagatcatcgaagaggttttaaaacgaccagtgaaatcggtctcaattggagccccagttactgctgttaacgaccttagcaaaggtagtaataacccaagctgggttccggctggtacagcctcagaactacttaaaacgatgttggcggagaaatgggaaagcttcttacgcagcagtaagcttgaagattgccttgacgacgctaaccttgaagtaacacttaagattacctacaagaggacgacttccgattctggagagcgaatgctaagaaatcttgttgacgcgaccagacactatccggatgatgacgtggttgttgagatggttggcggaacacgcctgacaggaaaagagatccgtctttggaacactgttaaactcacaacttacaatagcttaatcgatgagcatgagctttacagtcaaatgcatgattggatggcagtactcattgacgacggagagatagaagagaacgatgagtga

SEQ ID NO: 231238 - DNA, 699 bp, Klebsiella pneumoniae
atgagctatctgggaagcaaggcggcgagcggtgtttatcaaaaaatcatcgctgaaatgccgccgcacgatacctacattgaaacgcatttgggcagcggcgcggtgatgtttttcaaaccgccagcagggcagacggtaggcattgataagaatgaagacgcctttttgttgacccgggcgcgctggaaagaaaaagggctaattccgcctgatatccattttcatcatggtgatgcagttagctttttagagggcttctttgatttttccaatgctggccgtgtgttgatttatgctgatccgccatatctgccagaaacccgcaccggaaacgcacgctatcgttatgaatattctgttgccgatcatgagcgcttattgtcttgcctgatcagtctgccagataacgtttccgttattctttcgggttatccctcgcagctgtacgacgagaggttagcaggctggcgcagcaaggagtttcaggccatgactcgcggcggcgtacgaacagagaaaatctggatgaactaccaggagggggccgcgtattcgcatgcgttcgccggtaaagactataacgatcgctatcgtattaagcgaaaagcgcagcgctggaaggagaaatttgcagcattaccgccagcagaacgcctggcgatcatggtggcgctcggcgaggtcgatcaggtgtaa

SEQ ID NO: 231239 - DNA, 234 bp, Klebsiella pneumoniae
atgaaacagggctatatcattcactttagagcgcatgacgaagaagggcatccactttttgagggaaaccgcgcgatgcttgtaaattgtggcgagggcggatttgttgatccacataagttgcttcgcaaatgtaactcaatgattttgaacgaatacaaatggtggagaacccctgacggaaaaaacagatccgtagatgtagtcatcattgaaagcgtaatgaaattgtga

SEQ ID NO: 231240 - DNA, 897 bp, Klebsiella pneumoniae
atgaccttacaggattcacgcaatgccatttcttcgccgggatcggcggatggtcgcttgccctgcgtcgcgcaggatggccagacagccgcccggcatggacagcatcatgcccctgccagcctttcagcgcggcaggcaaaggccttgggtttgttgacgagcggcacctatggccctccgcacattggcttgtcggccagcgccgccctgtcgtggtctttggcgagcaatctggcagcgctgacgcgaacgactggatcgaccttgtacaagctgacgtggaagccctgggctatgccttcggggcggttgcgtttccgtctgcgagcgtcggcgcgccgcaccagcgagaccgtgcttactgggtggctgacgccgatcgccagcaatgggagaggtgcggggaatttcaaccgacagggggggggtaaaccttcaggcagcagcgttattggcaggttggccgactccgacggcaacggacggaaagggcggttatcagggcggacggatccgcaacgggaagttatcgacggacaggctggacgtggctgcgcaattagcgggctggccgacgccaaccacgagcaacgaccgttcaccttgtccgcaagaagctatgcggacatatcgcgaaaatggaacaaagattcagaagcggctacaggatgtagcggcgctatgcggcccggcccggttaacggcttctggcgagatgctgactggctctttagccaggatggaaagtggaggccagttagacccggatcattcccgttggttgatgggattcccgccagagtgggaagactgcgcacctacggaaacgccatcaacattgaagcggcgacagcgttcataaaatcctatatggcagcggtagatcatgactga

SEQ ID NO: 231241 - DNA, 954 bp, Klebsiella pneumoniae
atgattaaatcacccatcaaatgggcggggggtaaaacccgcgtcatgccggagctgctgaagcacttaccaaaagctgattgtttaatagagccgttcattggcagcggtaccgtgtttatgaacacggaataccgccgttatgttctttgcgacagcaatcgtgcgctgattaacttctttcgcgtattgacctctgacaccgggagactgatcgacagcgcacgcggaatgtttctgggtggcaacaacgaagagcaatattacaagcgccgcgcgctatttaactccatgcagtggagcgatacgggcaaagctgatgccgctttgctgtacgcagctttgtttttgtacctgaaccgccattgctttaacggggtttatcgcgtcaatcagaagggtgatcataacgtcccgttcgggaaatatgccgcaccttatttccctgaaaacgaaatgcgtctgtttgctgaaaaagcgaatgacacaaaagcgattttcatccatagcgattttcgccactccatccctgacgttatgcaactggcatatgacgctgttatttactgcgaccccccctacatcccgaccagcaaaaccgccaatttcactgcctacggcaagccgtttaccctggacgatcatcgcgctttagttttaacccttctcaatgctcatcgccagcacggcacccgctcggttatctcaaacagcgacacgccggaagcccgcgagatctattcccctttcaggctccatgcgttaagcgttcgccgctctgtcagcgccaaaagccgagatatggccggcgaggtgattggcgtgcttcgcgtttgcgaaggctgtggccgttctggcggcggttgctgccctgactgcggcacggttatgggaaaagccacttacggcgcaatggctgcggcgggtgcattcgacggtgcggagggattctga

SEQ ID NO: 231242 - DNA, 225 bp, Klebsiella pneumoniae
atgtcgatcacgtcaataaaactggatggcggaattagcgatccggagtttgtggaaataagcgccaacgcacgcaaactcgaacgcgcgcacctgctgggcttactgcgtatttatgtcggccaacttaaaaaggaaagcgccaccccggacgagatttatcaatcaatcgagcggtggatcagcagccgcgaacttccaatcagtgagggtattaaacaatga

SEQ ID NO: 231243 - DNA, 651 bp, Klebsiella pneumoniae
atggcggtaaattcgactggtgagcaaaatcgtatctctggccgtgattttaatgaaaataatatccaggtagacaaatttgatggtcgtcacacaattaacatcgcaatcccttcggaaaagcatgatgaacgcccactcgtaaaggcacagcgcaaagaacttaacactctcgttgccacggtatccgctacctgcggcggcgaagcatatgaaatttggcaaaaggtgcatgctgaaataggtgtttccagtattgaggaaatgactgtcaaccagtaccagaccgctattagctttttgcaggccatgatcgggcgaggcaaggataaagatgccagtaaagccttagttagcctcctgctccgcaatagtgaagatagagagttgcgacaaaggttaattcgttactgtcatgtcaacttcgggactggcaggctaaatgatctcacccgatctcagcttcagatagcgctctcgtggctggatcggcagcttatcaatgataccgatcactccgctcaagcatcgataactaaactcggtttaaaccagctattgaggacttacgccaaagagtttgtactcgcctttgcggccggtttagtggctggggtactcctggtctatatcccatcaattcatttctga

SEQ ID NO: 231244 - DNA, 594 bp, Klebsiella pneumoniae
atgaaatacaaatccctgttttgcttatgtctttttgcgatcgcgtcgttctcatcctcggcggaggagctaaaaagaagaaatatcgaacctgagcttagctgtttaaatggcccagtgaaaattaaagatcagtcggagttttatttattgtttggggattacacggaagaggatgaaacgcttaaagtaattagtcgcaagccgttaaagatacacgtttatgcggaggtgttcagtggtgacctccctgaagtaaaggatcacttagttaaaaaagccctcatatcaaatgcttatcgcgtttttgcatttagtgacatagataagataaccgtcacgtcttccgctaaagaaataagcatcaccaatggcgttaaaaatgtaaaacaggtcaaatctccaacatatacaatcaccaaaacaaggagtcaggctctatccgatctgcgcaagttcaccaacgcaaaatcctttgatgacttgttcgagaaggatcaaatttgccaattctcacctgtctttaaacaatttctgtatgacgatcagggtggtaatgggatcacaaaattctttaatcaggtcaaaaaatga

SEQ ID NO: 231245 - DNA, 144 bp, Klebsiella pneumoniae
gtgctaatcaccgacggcgcgtttgaaggcctggaggcgatcttcaccgagcccgacggcgaagcgcgctctatgttgctgttaaacctgctgaataagcaagtcctgcagagcgttaaaaataccgacttccagaaaatctaa

SEQ ID NO: 231246 - DNA, 282 bp, Klebsiella pneumoniae
gtgcttaacgacagaaccaatctgcactatagccgcctggcggaccatctgaataacgccaacctggcaatgagcgattttgttcagcgcagcgcggcaaacttcaccgtccaggggatctcgccggatgccgcgcagacggcggcggtgaaaaatctttccgcgctggcgctacgggaggcgcgaacccaggcattttccgatgctttctacctcatcatgatgggttttttacttgccgcgctgctggctcccttgacgaaaaagccgccggcacactga

SEQ ID NO: 231247 - DNA, 582 bp, Klebsiella pneumoniae
atgcttaaacgtactcagcgccggtgcaaaatctgccgggccaaattcaccccggcattcgaaaaccatcgttggtgctgccctgagcatggcgctgaatttgccatgcaggaactggagaagaagcgcgataagcagactcaggcgaaagcgaagaaagagcgcgcagcctggcgcaaacgcaaagccgcagtgaaacctctccgacactgggaagacatgacccagcgcgtcgttaacgactatatccgcgagcgtgaccacgatctgccgtgcatcagctgcggcacgttcgaaacggttcagtgggaggccgggcattaccgatcccgcggtaaagcatctcacctgcgctacaacgaggacaacattcacaagcagtgccatcactgcaacgtgcagatgtcagggaaccagcagcagtaccgcgtcgctctggtagagaaaatcggcgctgagcgcgtcgaggcgctcgaaaacaacaacacccctcaccgatacaccatcgaagaactggaaggcatcaggcgccattacagcgcgctacgccgtgcgctcataaaacaacgggaggccgcatga

SEQ ID NO: 231248 - DNA, 1077 bp, Klebsiella pneumoniae
atgtttgccctggccgatgtgaacagcttttatgccagctgcgaacgtgttttccgcccggatttgaaaggaaagccggttgtggtgctcagcaataacgatggctgcgtaatcgcgagaagtgccgaggcaaagccctggatcaaaatgggtacgccgtggtttcagatgaaaaacgaaagatacccggaaaaaatatacgcgttctccagcaactatgaactttatgcatccatgtcggcgcgcgtgatgagctgcctggaggaactggctccgggggtggaacagtattcgattgacgagatgttcctcgatctgaccggtgtggagcactgcatggacctggaggacttcggccggcagctgcgacagcacgtgtatgactgtacccgtctgaccatcggtgtgggcgccggaccaacgaaaaccctcgcaaaatcagcccagtgggcctcaaaggagtggaaacagtttcgtggtgtgctcgcactcacccgggggaatccacagcgaacgcggaaactgctttcactgcagccggtcgaagagatctggggcgtgggaaaccgtattgcacgcaagctcaatgttctgggcatcaaaaccgcgctcgatctggccctgacgaacccggcctttatccgcaaaaatttctccgtagtccttgagcgaacggtacgcgaactgaacggggaaagctgcatgtcgcttgaggaagccccgccaacaaagcagcagatcgtctgcagccgcagttttggagagaaaatcacggagtacgattcgctccgccaggctgtctgtcagtacgcagagcgggcctcagaaaagctgcgtaaagagcgccagtattgccggcatatttccgtattcatcaaaacgtctccgttcgccgttaaagagccttactatggcaacgtggccacggagaaactgcttacccccactcaggacacccgggacatcattgcggccgccacaacggctctggagcgtatctggaaggacgggcaccggtatgccaaagccggggtaatccccccatttttaaccgggcagataagtagaatcagataa

SEQ ID NO: 231249 - DNA, 774 bp, Klebsiella pneumoniae
atgacaatagaagttcaaaggtgggaagataaatttgagattaagcccggggtttgggtttatgtcccaagcgttgaggcacgtaaagtcggagggaagatacttcaggctgtcagaaacaagtggattccgccactctatttttaccatctaagaactggtgggcatcttaaagctgccagattacacttaaaaagtgatttttttgccgttgttgatattaaacaattttttcagtcaacgagccgtagtcgtatcacccgtgatctaaagagctacttcacctattctgaagcgcgggaaatctcaacattttcaactgtaagaaacttgtcccatagtccacataagcatgtcctcccttttggttttgttcaatctccaatacttgcaaccctctgcttggataaaagttattttggtagcttactacgccgattgaacaaacatcatgatctcaagctaagtgtgtttatggatgatgtgatcatctcgtcaaacgatttggcccaattacaagcggcttacgacgaagcactagtggcaatgcgtaaatctggttatcaagccaacatgagtaaaactcaggcaccatcgtcaaagattagcgtgtttaatttaactttgagtaagggagttatgaaagtcacatctcagaaaatgagtgacttcctgattgatttctattcaagcaattatgagccgcacagaataggggtcaaaaactacgtcgaagctgttaatccagggcaagcgaaactctttaagttgtaa

SEQ ID NO: 231250 - DNA, 174 bp, Klebsiella pneumoniae; identical to SEQ ID NO: 21092

SEQ ID NO: 231251 - DNA, 219 bp, Klebsiella pneumoniae
atgatgatttgcccactgtgtggaagtgccgcccatactcgcagcagttttcaggtatcttcattgaccaaagagcgttacaaccagtgccagaacattaactgcagccatacttttgttacccatgaaacttttgttcgttcgattgcaacgccaaaagagtcaaatccggttcagccgcatcctcataaatttaaacaggtgggtttgccgatttaa

SEQ ID NO: 231252 - DNA, 3078 bp, Klebsiella pneumoniae
atgagtgataataacctgcgcctgcaggtcattcttaatgcggttgacaaactcacccgcccattccgtgctgcacaggccagttcgaaagagctggctggcgcaatcagaaactcccgtgacgcattaaagcaactcaatcaggcgggtaacagcctggaaaaatttcgcaagctgcaggccgataacaaaaggttaggcgacaggctgaactatgccagacagaaggcaaatttgcttagttctgagctggaagcgatggaacaaccatcacaacggcaccttgtggctttaggtcggcaaacgctggcagtccaacgcctggaagaacaacaaaaatatttgcagaagcaaacggcgcttgtgcgtgcagaactgtatcgggcgggaatttctgcgaaagatgatgcgggagcaactgcccgtttagcccgtgaaacatcacgttataaccaggaattgtcaaaacaggaggcgcggctgaagcgactgggggaagctcagcgcaggatgaatgcggcgcgtgccagttatgcccgttcgctggaggtgcgtgatcgtattgcaggagccggagccaccaccacggctgcagggctggcaatggggacaccagtgatggcggcagtaaaaagctataccagcatggaagatgccatgaaaggtgtggcaaagcaggtcaatggtctgcgtgacgataatggcaaccgcactgcacgtttttatgaaatgcaggatgccatcaaggctgccagcgaacagttgccgatggaaaacggtgcggtggacttcgctgcactggttgaaggtggtgcgcgtatgaacgtcgcaaaccctgacgacagctgggaagaccagaaacgtgacctgctggccttcgccagtacggcggcaaaggcggcaacagcctttgagctgccagcggatgaactgtcagaaagtctggggaaaatcgcccagctctacaaaatacctacccgcaatattgaacagctcggcgatgcgctgaactatctggatgataacgccatgtcaaaaggggcggacatcattgatgtcatgcaacgtctgggcggtgtggctgaccgtctggattatcgtaaagcggcggcactgggttccacctttctgacactgggcgctgcgccggaggttgcagccagtgcagcaaacgcgatggtgcgtgaattgtccattgccaccatgcaaagcaagagtttctttgaagggatgaatctgctgaaactcaatcctgaagtgattgaaaagcagatgacgaaggatgcgatgggaactatccagcgtgtgctggagaaggtgaacgcactgccgcaggacaagcgtctgtctgccatgaccatgttgtttggtaaagagtttggtgatgacgcggcgaaactggcaaacaacctgccggaactgcagcgccagctaaaactgacagcgggcaatgatgcgctcggttccatgcagaaagaatccgacatcaacaaggactcactttctgctcagtggttgctggttaaaaccggagcgcagaacaccttcagcagcctgggcgaaacgctgcgccagccgctgatggatattctgtacacggtgaaaagcattacgggggcgttgcgccgctgggtggaagctaacccggaactgacaggcacactgatgaaagtagcggctgttgtggctgcggttaccgtaggcctcggcaccttagcggtggcgctggctgcagtgctggggccgctggcagtgatccgtctgggattctctgtgctgggtatcaaaacgttaccttccgttacggcagcagtaactcgaaccagcagcgcgttgtcctggctggctggcgctccactggcactgctgcgacgcgggcttgcttcatcgggcaacgcagcgggtttacttactgcgccgttgtcgtctttgcaccgcacggcatcactgacgggaaatgtcctgaaaactgtagcaggtgcgccggttgcactgttgcggtctggattatccggtttacgtgcggttgctgtgatgtttatgaatccactggcagcactacgcggcgggctggctgccacaggcacggtgctgcgagtactggcatctggtccactggcgatgttgcgcgttgccctgtatgccgtatctggtctgttaggtgctctgctcagtccgataggtcttgtggttgctgcactggcgggtgtggcactggttgtctggaaatactggcaacccatcaccgcatttctcggtggcgtggcggaaggattcaaagcggcggcaggtcccatcagtgcagcgttcgaaccgcttaagcctgtgttccagtggattggcgacaaagtgcaggcgctgtggggctggtttactgatctgctgacgcccgttaagtcgacctctgccgaactgcagagtgcagcggcaatggggcggagattcggggaggcactggcggaagggctgaatatggtcatgcatccgctggactccctgaaatctggcgtttcctggttgctggagaaactcggcattgtcagtaaagaggctgcaaaggcgaaactgccggaaagcgtgacgcgtcagcaacctgcgacggtgaatgcagacggtaaagtgatgatgccatcgggtggttttccgtcatggggatatggctttgcggggatgtatgacagcggcggctatatcccgcgcgggcagtttggcatcgtcggtgaaaacgggccggaaattgttaacggcccggcaaatgtgaccagccggagaaatacagctgcactggctgccgttgttgccggaatgatgggtgttgctgccgcgcctgcagagcttccaccgttgcatccgttggcacttcccgcgaaaggcggcgaagcgatgttgagtcgtgcagccactgtgccgcccgttcaacggattgaggcaccgacgcagatcatcattcagacgcagccaggacaaagtgcgcaggatattgcgcgggaggtggcccgccagcttgatgaacgtgaacgcaggctgaaggcaaaagccaggagtaactacagcgatcaggggggatacgacgcatga

SEQ ID NO: 231253 - DNA, 750 bp, Klebsiella pneumoniae
atgctcaaaaacattgctgttcttgcagatgagaaaagcaagattgaggaaaatattcctaaattgaatcaaaagctagaagagtcaagggctgcttcagaggcgttgcaggcgctaattttagaaactcaatcggaaataacgcttcatgatgttattaaatctgctgcataccatgaaattgaatctacttttatttcacagttagatgagttattcgttgagattggtcgaaaagaaggcgagttgacagaattacaagaagaattagaagtatacaatgataagaaaagaactgttaaaataaatgactgtttcaaagagtatttcgctaaagctcttaaagagcttggtgtcgaaaatacaaaggtaggtggccttagtagttataataatattactaagggcaagactggtagtcgaggtcctcgaggtatatttgcatttcactacgcgctgcttagtgttatgaaaagcaacgcttcagttgagaatatgcctatagtaatagactctccaaagcaacaagatttggatccagagcatacgcataagcttataaaactatgcttggatgggttttcccttacaaatcagattattattggaactgttggttatgagagtttcatggatggttttaatagcatcaaacttgaaaataaatatcatcttttaaatgatgaacattatgataatgtttattctcaattaatgccattgtttgaacgggtgatactttcaagatga

SEQ ID NO: 231254 - DNA, 765 bp, Klebsiella pneumoniae
  misc_feature (748)..(757): n is a, c, g, or t
atgaagaataacgttaaatttaaaaatataaaaatactctcattaagagacagaaaagctttttcttatgagttttcagaaggggttaacttcatatatggtacaaatgatgttggtaaatcaagcctgattaaaagtctttattacacattaggtggagatttaaggcttgatgatgcttggaaatcagatgatatagttacactggtggaaattaataacggggaaaatgattttatttttttacgttataaaaagattattggtgtctttgatttgaagaatgatgatctagtcgtgtataacacgatttcgtcattggcatctcgtgtttcaaatatatttggttttaagctggaattacataataaatatacgggtgctacgactcaggcaaaccctgcttgtttgtttgccccattctttattgatcaggatgaaggatggaaagcggtgataaattctttcgaaaacatgactatgtactcagaatggcaaaaaaacattctttactatcactctggaattaagccaaaggaatattatacagttcaagggaaaatcaaagaaattaaagttaaaatttcagagttagatggttttgttaaggttctaaaaagaagcaaaagtaagattgatgaatcttttggcgtggttttatttgatgttgatttagatttttataaatcaaagttggaacgtatattaaatgaatattctaatttgaatttagttcagacagaatatnnnnnnnnnngaatatag

SEQ ID NO: 231255 - DNA, 222 bp, Klebsiella pneumoniae
atgtcctcttatgattcgcgggttcagttgacgtcaaaaagcagcgttatctataagtttctggttcatgcggatagcccgcagggggcaagagtcaaagtccaaaatcatctgagaaagctgggagattttgatttcagtgaaatttgcatttcgtctatggaggtgaggggggatgtcttgcttctaaaccctgacggtacaaagtgcctgattatttaa

SEQ ID NO: 231256 - DNA, 222 bp, Klebsiella pneumoniae
atgaacctttacgcattcaacccactgaaacaaaatgataagcaagaggtgattacccccgtagcctttaatttggtcttatcgctacctgaacagctactgaaaaggctggataaggtcggctatgaattggttaagcgttacggtattgcagggtgtagtgataagcagcgacatcacatcgctatagtccatttgctcaaaaaacatacatttcgatga

SEQ ID NO: 231257 - DNA, 2334 bp, Klebsiella pneumoniae
atgaaaatgaacgtaacggacaccgtaaaacaggcgtgcggccactggccgcgcattctcccggcgctgggcatgaaagtgataaaaaaccgccatcaggcctgcccggtgtgtggcggcgctgaccgtttccgctttgacgataaagaggggcgtggcacatggttctgtaaccagtgcggcgccggtgacggcctgaaactggttgagaaggtgttcggcatatcggcatccgaggccgccgggaaggtgaacgccgtcaccgggaatctgccgcaggtagccccgggggtgacagcagccgcagaggctgagactgaagccgaccgcaaagcagcggccgcgctggccgtcagactgctggagaaaacgcgcccggccaccggcaacgcctacctgacccgcaagggctttgccggtcgtgagtgtttgacgctgaccgcgtcgcacaaaaccggcggcgtggcctaccgcgccggtgatgtggtggtgccgctgtatgacgagtccggcgtgctggttaacctccagtttattaatgctgaggggctcaagcgcaccctgaagggcggcgcggtaaaaggagcgagccacactatcgaagggaaaaaacaggccgggaaacgcctgtggatagcggagggttatgcaacggcccttaccgtgcatcacctgaccggggaaaccgtcatggtggcgctgtcgtcggtgaaccttctttctctggcgagcctggcccgtcagaaacacccggcctgtcagattatcctcgccgctgaccgtgaccttaacggcgacggccagacaaaagccgccgcggccgcagcagcctgcgagggcattgtcgccctgccgccggtatttggtgactggaatgatgcgatgatgctgaagggggaagacgccacgcggaaagccatttatgccgtcatccggccagcggcacaaagccccttcgacaccatgagcgaggcggaatttaccgccatgagcgccagtgataaggcgatgcgggtgcatgagcattacggtgaagcgctggccgtggatgccaacggccagctcctgtcccgctatgaaaacggcatctggaaggtgataacgccgtctgattttgcccgcgacgtggccgggctgttccagcgcctgcgtgccccgttctcgtcggggagaattgcgtcggtggtggagaccctgaaactgattattccgcagcaggatgcaccggcacgccgtctgattggttttcgcaacggggtgctcgatacaagctcaggtatattcagcccgcacagcaaatcgcactggctgcgcaccctgtgcgatgtggatttcaccccgccggtggagggggaaacactggaaacccacgcgccgaatttctggcgctggctcgaccgggcggccagtggcaacccgacaaaacgcgacgtgatactcgctgcgctgtttatggtgctggcgaaccgctacgactggcagctctttctcgaagtcaccggccccggcggcagcgggaaaagtattctcgccgaaatcgccacaatgctggccggagaggataacgccacgtcggcggatatcgacacgctggaagacccccgtaagcgtgcctccctgattggcttctcgctcattcgtctgcctgaccaggagaaatggagcggtgacggtgccgggctcaaggccatcaccggcggcgatgcggtctccgttgacccgaaataccagaatccgtactcgacgcacattccggcggtcattctggcggtcaacaataatccgatgcgcttcaccgaccgcagcggcggcgtgtcacgtcgccgggtgattatccacttccctgagcagatagccccggaagaacgcgacccgcagctcagggataaaatcgctcgcgagctggccgtcatcgtgcgccagctgatgcagcagttcagcgacccgatgagtgcccgcgcgctgctccagtcgcagcagaactccgacgaggcgctcagcatcaaacgcgatgctgacccgacgtttgatttttgcggctatctggaggcgctgccgcagaccaacgggatgtttatgggtaatgccagtatcatcccgcgtaattaccgtaaatatctctatcacgcgtatctggcctatatggaggccaacggctacaggaatgtgctcagcctgaaaatgttcgggctggggctgcccatgatgctgaaagagtacgggatgaattatgagaagcggcacacaaagcaaggtatgcagaccaacctgtcgctgaaagaagaaagctacggcgactggctgccgaagtgcgacgaacccaccgcgacttaa

SEQ ID NO: 231258 - DNA, 195 bp, Klebsiella pneumoniae
atggctacgaccctcaccccgtcacacccgcagtttgtctttgtatttgccgccgttcgtcgcgcagaccgtcagcaccgtatctgtatgctccgcgccgtcgccggggatgaacacgccgcacgcctttccctcgtccgcgattacgtcctctcgtttgccgggcgtctgccggtggcggaggtgcgcgcatga

SEQ ID NO: 231259 - DNA, 2754 bp, Klebsiella pneumoniae
atgcagcagaaaggttcgaaatggtggaagtttgatttccatacgcatacccccgcgtcaatggactacggtaaagctgaccaccaaataaagcacacgatgactcctaggcagtggcttttagactatatagctcaaggtatcgagtgtattgctgtaacggatcacaataccggatcatggatcgatactttaaagtctgaagctgaaatactaagaagcgaaggtcactccatttatatatttcctggcatagaaatcacatctcatgggaatatacatatcttaggaatattcgatctagacagaacatcaagttatatatcgcagataattggtgctaccaattactcaggaacggaaggagatagtgatgaagtaacccaaagcagcccacaggaagttattgatattattatagaccgtggtggagttgctattccagcacatatcgacaagcctagcgggctatgtagggtgcatccatcaggcgctaccttaaagcaaatattaacaaaagcatcagccgttgaaataattaaaacacatgctgaatatgaagctatccaaccaaactcaagcccattaagtgggtttgtttctctcaatacaggtctccctgaagtacttggttctgactcccatcatccaaacacagttggtagagcattcacgtggataaaaatggggacgccatctatagaaggcctaaaattagccttatttgatggtggcgactcattaaaacgatctgatcaattcccagattcacctaatatttttgctgaaaatagaatcacctcaataaaagttaataaaaccaaatattgcggaagaagcaaagaatttcaaatagaatttcatccatggctaaactgtatcattggtggtagaggaagtggcaaatcaaccatcttagagtttatcagaacagcattggggagagaaaatgagcttgagcgactctcatctaatagagaaatgtataactcgtatattaatcttacgaaaaagcccaagaacagagaagatgatggcgtcttcctggacgatagcagcattcaaattgaatatctgaaaggagaaaacagatacatattagattggaaatatcctgtatcaaaagtactcataaatagaatagacggaaataacatcatctcagaagaaggagaggtgacatctagatttcctgttaaaatattcagtcaaaagcaaatatacgaaatatcacgttctccaaactatcttttaaacattatcgatgaatctcacattgttaatataaatgattggaaatataaatgggacattgaatgcaatacgctttcgcaattaagaaaagatgttaaagatctcagaaccaatatattaactaaaacaaatttaactggacagttaaatgatgttaatcaaaaaatagcctctattgaaagatccagccatgcatctattttagcaatatatcaaaaaacattaaaccaagtaaatgcgttcaaccatttcgcttcaaaaaatatagcattcctcgaagatttattagagcacattcaattaacaaaacctgaatcgtttattactgacgacgagctctttaacacccaaaatgaaatggaagctaaaaataaaatcaccgttctccagcagaaaattgacagctctattacagagttcaatggaagtattgatgcaacaataatagaaatcagagaattaattcaatggtttgattcatcatctctgaaacaagatatatcaaaccaccaaactcaatatactaacttaatatccaccttacaagccaatggtgtaaataaccccaatgaatatgaagcacttatcaactcaagaaagcaaattaaggaaaggctagataaaatagaaatcgatgaaaaaacgattaaagcaaaaaaaacctcaataactgaaagctacaataaattagtggaattacgaaaggagctcacctctcggaggagacaattcttagttgacataaataatgataacactaactttaaagtcagcgttgatttttgcggtgataaacaattcttagaaagcagtttcagaaacgctattgataaaaaagactccactttcagcaacgaaatttacaatgaagatggcaatgggttcttgaatgtctttaacgcacagataaaagaaatctctgaggacatggatgcaataaaccaaaaaattcgagttctaaagaatgaatttcttaacaaggaatcaaatactatacttgatgttagattaagcaagaggttttccgattttaaaaatgatctaactgatgaagtaataacctctcttatttgctggttcccaagtgatgctattactgtcaaatataatgatggtagaaggtttaaagatttgtcacaaggctctgcaggacaaaaagcagcgactgttctagcatttttgctttcttatggtgatgatccaataatacttgatcaacctgaagatgacttagataatcaattggtttatgagctcattgttaagaaaattaaggaaagtaaaaataaaaggcaaataataatcgtcactcacaatccaaatattgttgtaaatggtgactctgaattagttatttccctaagtcagcaatcaggaacaacagatttcctttccttaggcggtctccaggaacgtgaagtgagacaaactatttgtgatattatggagggaggtaaagacgcatttagtcagcgttacagaagaattgtcactgcctaa

SEQ ID NO: 231260 - DNA, 909 bp, Klebsiella pneumoniae
atggcagttatcgacctgagccagcttcccgctccggaagtaattgaggtgctggactatgaaactatttttgaagaacgcaaagcaacgctcatctcgctctatccggaagatgaacaggaggctattgccagaactttaagccttgagtccgatccaatagtgaaaatcctccaggaaaatgcttatcgagaagtaattttacgccagcgtgtcaatgaggcagcacaggccggaatggtagcctatgccattaaaaacgacctggaccagcttgcagcaaataacaatgttgaacgtctgaccatcactccagctgatgactcacaaatccccccagctgcggcagaaatggagtcagatagtgacttacgtcagcggatccccgcggcttttgaaggaatgagtgttgccgggccaaccggcgcatatgaatttcatgccatgagcgctgatggtcgtgtggctgactcctcagcaatcagtccggcaccggctgaagtcattgtcgcggtgctggcacgccagggcgatggcactgcatcagaagatttactccaggctgtcagccttgctctgaacgatgaagccgtgcggccggtcggcgaccgactgactgtcgtctcagcagatatcgtctattactcggtcgatgcggtgttgttcgtgtatccggggccagcgactgagcccattcttgcagcagcaaaagcacagcttgcaacctatatcaacgcccaacggcgactcgggcgagatattcggcggtccgcaatctacgccgcattgcacgtacaaggggtacagcgggtcgaactgagtcaaccgctggctgatgtcgtcctggataagactcaggccgcttactgcactgactataacgtcattatcgggggctctgatgaataa

SEQ ID NO: 231261 - DNA, 348 bp, Klebsiella pneumoniae
atgacagcgcgttatctcggcatgaaccgcacgaccggtgaaagcatttcagacgttgaccatatcagccagagcatcggggatattctgcgcacgcccgtcggctcccgcgttatgcgtcgtgaatacggctcgctcctgtcacagatgattgaccagcctcagactccggcgcttgagctgcaaattatggcggcgtgctacatggcgatcctgaagtgggagccgcgcgtcaggctgaccagcatcactacagagcggcagtttaacgggcaaatggtcgtcgacgtgaccggacaaatcaccgataccggcgagagcctttacttaaccattcctgtgagttga

SEQ ID NO: 231262 - DNA, 669 bp, Klebsiella pneumoniae; identical to SEQ ID NO: 206408

SEQ ID NO: 231263 - DNA, 1071 bp, Klebsiella pneumoniae
atgcgcacgaaaactcgctttaaatttaacgccttcatggcccgtctggctgatctgaatggtgtagacaccggcgatatgaataaaaaattcacagtggaaccatcggtgacgcaaacgctgatgaaccgcgtgcaggagtcgtccgcgtttctgaacctgattaatatcgtgccggtcgaagagatgaagggcgcgaaaattggcatcggcgtgtccagctccatcgccagcaccgccgacactgccggtggtgacgaacgtgagactgcagacttctccgcgcttgactcagaaggctatgagtgcgtgcagattaactacgacttccatatccgctacaaccagcttgacctgtgggcgcgttacgaagatttccaggcgcgtatgcgtgacgccattattaagcgccagtcgctcgatcgcctgatgattgggtttaacggcgagaagcgcgccaaaacgtcaaaccgtgtgcagtatccgatgctgcaggatgtggctgtgggatggctgcagaaataccgcaacaacgcaccgacccgagtgatgagtaaaatcaccgatgaagacggtgccgtaatctctgatgttatccgcgtaggtaaaaaaggcgattacgccaaccttgacgcgttggtaatggatgccaccaacactctgatcgcgccgtggttccaggaagacccggagctggtcgtgctctgcggtcgccaactgctggccgataaatatttcccgctggttaaccaagagcaggccaacactgagcaactggccgcggacatgattatcagccagaagcgcatcggcaacctgcctgcggtgcgcgtgccgtacttcccgactgacgcgctgatggtcacccgcctagataacctgtccatctactggcaggagggcacccaccgccgcctgatcgatgaagtggcaaagcgcgaccgcatcgaaaactacgagtccatcaatgaggactacgtgatcgaggattacgcggcaggctgcctgatcgaaaacataaagctgggcgacttcaccccgctggtagaaacgccaccggcaggagagtaa

SEQ ID NO: 231264 - DNA, 852 bp, Klebsiella pneumoniae
atggcagcaatcaaagcaaagcgttttcgcatcgcagttgaaggcacaacaaccgacggccgcgtgatttcccgcgactggatcgcccagatggcggcaagctataacccgaacgtatacggtgcccgcatcaatatggagcacatcaagggctacagccctgacacgccattccgtcgctatggtgacgttaccgcgctgacggcggaggaaattaccgagggggcgctaaaaggtaagctggctctttatggcgatattgacccgacgccggaactggtggagctgaccaaaacgcgccagaaaatctacacctcaattgaggtcaacccggaatttgctgacaccggcaaagcctacctagttggcctagccgttaccgatgacccggccagcctcggcaccgaatacctcagctttagtgccacggcaaaagcgaacccactggcatcgcgcaaacagaatgaaggcaacctgtttaccgccgctgaagaaaccctgatcgaatttgccgaagagaccgaaccgggcccgtcgctgctggatcgcgtcaccgcactgttctctgccaaaaagaaaaccgatgacgagcgtttcaacgacgttaacgcggcggttactgctgtagctaaacaggtacagaaagacggcgacacccagcagaaggcgctggctgagctggaaacaaagctgactaaacgacttgcgcagcttgaaacgcaggcgggcaatgactcacagacgctcagcgcactgaaagagaaattgcagggaaatgatggtgatttttctgctcgtcggccacgcgccaagggcggtgatgccagtgcggtgctgcaaaccgactgctga

SEQ ID NO: 231265 - DNA, 1770 bp, Klebsiella pneumoniae
atgaacatgacacccggaactatcatcaccgatccccgccgtcaggcggctctgctgtattggcagggcttctctgtgcgccagattgcggagacgctgaaccagaaaacaccaaccgtgcagagctggaagctgcgcgacgcatgggaggacgttgcgcccatcagtcgcgttgaggccagcatggaagcccggttgattcagctcatcatgaaagaggtaaagggcaatggtgattacaaggagatagacgcgctgggccgtcagattgagcgtctggcgcgggttgaacggtatcgcggctccggcaatgaggcagatctcaatccgaacgtgcgcaatcgcaaccgcaaccgaggcgaacgccagccggtgattaaaaaccttttcagcgacgaacagacagagaagctgaccggcctgtttatggacggttgctttgagtaccagcggcactggcacaaagccggactggcgcaccgtatccgcaacatcctcaaatcccgccagatcggtgcgacgttctattttgcccgcgaggcgctgattgacgccctgaccactgggcgtaaccagattttcctgtcggccagcaaagcgcaggctcacgttttcaaaaattacatcatcgactttgccaggcaggtagacgtcgacctgaaaggcgagccgattgtgctgccgaacggcgcgcgcctgatgttccttggcacaaacgtccgcacagcgcagagctacaccggcaacctgtatctggacgaatatttctggataccgaaattccaggagctgcgcaaagttgccagcggcatgtcgctacacaaaaagtggcgtacaacctacttttcaacgccctcgtcgctgtcacacagcgcctatccgttctggtcgggggagttgttcaacaaaggccgccgcaaccgggccgaccgcgtagagctggatctcagtcacagccacttggccgcaggggctttatgcgctgatggtcagtggcggcagattgtcaccgttgaggacgcgctgaccggcggctgtaacctgttcgacctggatcagctttcgctggaatacagcccatcggaataccagaacctgctgatgtgtgagtttgtcgatgatgaggccagcgtgttcccgtttgccgagctgcaaacctgcatgatcgacagcctggaagagtggaccgacttcaacccctactcgctgcgcccgtttgattatcgcactgtctggatcggctatgacccctcacacaccggcgacagcgccgggtgtgcagtgattgcgcctccactggtcgccggtggcaagttccgcgtgctggagcgtcaccagtggcgcggcatggactttgccgcgcaggctcagtcaatcaaagagttgacggaaaaatatgtcgtggaatatatcggcgtcgatgcgaccggtatcggccagggcgtttttcagctcgtccgccaattcttcccagcggcgcgggaaattaagtacaccccggaaatcaaaacctccatggtgctgaaagcaaaagacaccatcaccagcggccgcctggagtacgacgccgggcacaccgacatcacccagtcgtttatggcgatccgcaaaaccatgacggccagtggtaatcgctctacttacgaggccagccgcagcgaagaagccagccacgcagacgtggcttgggcaattatgcacgcgctgctcaacgaaccgcttaccgctgctagcggcgggattaacccttctttcatggagttttactga

SEQ ID NO: 231266 - DNA, 1047 bp, Klebsiella pneumoniae; identical to SEQ ID NO: 206412

SEQ ID NO: 231267 - DNA, 819 bp, Klebsiella pneumoniae
gtgataatatacgatgtgactaaacccggcagcctcataatcggaccagatgaagaatggatgattgaggtcagagacatcatctccggactagaaaattctttctatgatgcaactgtttgccttcacttgttcaatgagtcaaaatcccttgtaagatgggtatccactactgacagagaacgcagtgaatattatgaggcatccaataaatttgcgaaggagttagagcaaaaatacagaagcgaaggtaaagaaattgaccatgctgaaatttattttcagtcatcagtcctagccaaaaaagagcaatggggaaaaggaaatctaccgagagctttacaacataaccaacctaaaatacatgctcgttcttttttatattctcttgatatgtttggcaagtttttacaaactctttttgaatttttaaaaccccataaaggtattgaggacgcctataatgaattcaaaaatgctttcccgacaatcataaaaataagaaataccattcagcacatggatgaacgttcgagaggtttagggagggggtttagaggaaacccaccaccacaattacctctgcgggaagttagaaatccaatgatttcttatgaaggagggttcgatccgcaaagatcccctagaattataatcactgattccctacgtggcgacacctttggatgcacaatagatgatggaacctatcaagaaatagatataaatgatgcatcaatgaaaacacttcaaaaaatactgcagaaagtatttttatctttccattgggatggcggaaagagtaacataccttactaa

SEQ ID NO: 231268 - DNA, 231 bp, Klebsiella pneumoniae
atgagaatcaatatcacgctggataaagaacaaaaaataggtcagcagatagtcgatgctttccagaatgaattaacacgtaaggtgagatgtgcttttccaaccacacggattactgttaagaaagggtcaatgagaggcgtagagctggttgggttctaccaggagtcagaccgtgaagcgttggacggtatacttcaggaagtatgggaagacgaaagctggcgttaa

SEQ ID NO: 231269 - DNA, 186 bp, Klebsiella pneumoniae
atgattgatgaatatttcagccaaagacaaaaaaaatgggcttgtgtgcaattcatcgccgaagtgtctctgattgcaaactgcaaaccgtcagaactcaagctcgccctgtctctcattgctgaccttgcaaacagtgaaaataaagaacccgaagaagaagaagttttctataaggctgaatag

SEQ ID NO: 231270 - DNA, 372 bp, Klebsiella pneumoniae
atgtcagatgcaaaatcaatctcgacgcacgactcgcaaaactcacaaaatcaaactgtgctgttagatccaatgcagtttgatgccatcgttaccgccatgcttccagctctgcagacaatgattcgctccgcaatgtccgacaccatgacagtgaaagacttcgccgctactcgcggtgttagcgagcgtctggtctggcaatggctcgatgagggcatccttctcaaagctccgaccaaagacttttccaacaaagaggaagctgctaaacgaagccgaaccctcgtaaacgtaaaagcatggcgcgataagctgactcaacaagcgattgattgtcgctacatcgaccagcgcaccgctcttaactga

SEQ ID NO: 231271 - DNA, 405 bp, Klebsiella pneumoniae; identical to SEQ ID NO: 206415

SEQ ID NO: 231272 - DNA, 1050 bp, Klebsiella pneumoniae
atgactgttagtaagcagaaaaatggcaaatggctctgtgagctttatccaaatggccgggaagggcggcgtatacgtcgacagtttaataccaaaggcgaggctgaggcattcgaggcattcacgaaaaatgagagtgaggataagccgtggctcggtaagaaagaagaccgccgacggttaagtgagattatccagctttggcataatttacatggacaggcgttggtcgccagtaagtcgcggttagctaagcttcaaattgtatgtaatgggttgggcgaccctattgcatctcgtcttaccgctaaagattgggctcattaccgtgaccgtcgattacgtggcgaaatagacaacggctatcacaaagacccgacgaagtggatcgccaaacctataactgtcaatcgcgagcagcaatacctcgaagcggtgttcaatgaactgcgacgattaggggagtggagtttacccaatccactagacgggattcgcgtattcaaagaagctgagaaagaaatgtcctggctaactttgtctcagctcccggagctgttccgagcctgtgaacaatatggcaaagaaaatcttacgatgattgttaaggtttgcttggctaccggcgcacgatggggagaagccgagagacttacacgtccccaactttccccctgcaagctgactttcaccaaaaccaaaggtaagaagaatcgcacggttccgattcctaaatggctctacgacgagttgtctgaacgtcagggtagaatgttcaaaccctgctatcaagactttaagaagatgcttaagcttacgaacattgagctgacggaagggcagaagactcatgttttgcgtcatacctttggtgcgcattttatgatgaacggcggaaatatactggtgctgcagaaaatactcggacatgccaacattcgagaaacaatgaagtatgcacactttgcgcctgaccatcttgagcaagctgttacccttaatccgttgtcgctatatgttggcgacgatatggcggcagagcttgcataa

SEQ ID NO: 231273 - DNA, 201 bp, Klebsiella pneumoniae
atgacaaagaagcgctttatctatgttattgtatttattttgtttgttgtttttattttgttctctgcatttacctcaaacccatcactagaaggggatagggaaagcatcaaagcctgcatctcaagccatggcgttgatgacagtatttgtaaaaaaatggttaacactttcaaggaaaaatatggagtcaacccttga

SEQ ID NO: 231274 - DNA, 246 bp, Klebsiella pneumoniae
atgaaagagtggctttcaaagagaaccgtatttgatgttcgttgtcgttcttgtgatttcaatgggccagtgcctatggttggcgagtatgtatcaatagatgcccccatggagattaactttaatggtgaaaaatgtcctgggtgtggcaatgtggatgtcctctatgcccccactggtcactatgagtttgacaaggagcaaaacaaaatgaccagaacaggtgatcccaaggttaagctataa

SEQ ID NO: 231275 - DNA, 573 bp, Klebsiella pneumoniae
atggtcgaggcgggcataaaagttggcggtctccgtctgcgggtcgattttatcgccacgctcccggtggcgaagcttatagtggtatacctcaccgtaagtgaggccttcaccatttccccgggtcatatccgctgttgccgactggagaacgctctgcgcatcgcgggggttataatcccgggtagtgacgttcgcctctacgacattgtgggtgatgctcagaccccatatcgattccgtaccgctgtcgctcatcccggacgggctgtttacaggaagtgttttatcgaacatcagcgcccgctgcgcgtcggcgaaatggaccacttcgctctgggcctcttcctgcagggtgaagaaataaaatatccccacctctgccagcaggcgctggataaacgccaggtcgctctcctgatactgattaatttgctcgcgccgtggatagtgttgcttgagattaaactcatactcccagtcatgcaggtgatgttcctgcaatacctgctccaccacctccggtaccgatttgttgacgaaaaaacgatggctgcgaaactgtttatctag

SEQ ID NO: 231276 - DNA, 1044 bp, Klebsiella pneumoniae
  misc_feature (1021)..(1030): n is a, c, g, or t
atgtgcgcgttgctttcagactctaggctatatgacttgttcggagatgatcaaaatctcactgtaagccaaatctggttattggagatcgagtgggaagattcaagtgaactacgttttctgtatggtcggtcactatcaggaaactaccaatcaaacagttggagcgggagcgttagttccaaaatgccacttactgagaattgctcagtcagaactcacgccttgacacttcatacctctaccgagagactgaggactttccttgagcacttcatctgcggagagacgtttcagaaatcttgccaattctccgggctgaatatcagcgacaaattggctaaggtgataggaacaagtacattttgtgtgaatcctatcactcgccctgtaatgcatttgccgacacgcgattattatagatttcaaactaatcggctaagcccgaccagctattccagtgttgacagcggcgcaatttctccaagagaaaaatcaaaattattcagtgtgttggaaggatatgacatgaagatcgccaaatttgcatgccaagtattggatgcagatactggcttagatttttccacaattgactcttggcgaattggagactttgagttcatctgtgctcctgggctcaatgcttcagagcgcagcaagtatgacgtatctttgaaggggcagcagtcatctctgacgctattcgaaccactaacccgggaaccttccgatctgttggttattgtcaaggcgtacagtgacggtggccttcagtcctcttatatcgccaacctcagcaagaatgcttcataccctctccatcacacatttgaactcaaagtgtttcaggaccaagctagcacagcttatacaatggaggtttatgcgcttggaataaatggtgagcaatcattcctcctgcttcaaaccggcgcagaatttgtgcgcgaaatgaatctcaacatgcaattagtcgaaccttcagcgctttggtcaggttcagcgcctcctgtgccannnnnnnnnncaacatgcaattag

SEQ ID NO: 231277 - DNA, 369 bp, Klebsiella pneumoniae
atgaaaaccaagctactagatgaagattttgaagaggctaaaaaactcatagataatttagactcgaaatatgacataacatgtgtattctggtatttggatgtaacagcatggcggctattcataacaataaaaaatcacaacaaacaaatggacgccaaaataaaagaagacatcataaataatatatcagaattgggaataaatggtttttcatattctgactgcgttccttgccaggagaatgcattaacacaagggttaaagtcgatgttcttcttcccaccaaagaaatatatacacagcacttttgaaaacacaacaataaacaacatgcgtataaacaaactaatattaatgagaatgtaa

SEQ ID NO: 231278 - DNA, 537 bp, Klebsiella pneumoniae
atgttcaagaaaaccatactggctttattaacagcctcactttttatttccaccagcgcgctagccatatctaataatactattacctttcgcggtgaagtttccgatgaaacctgttctgtggcgattaacggcaatcaggcaaaaccggtagttattctgccgacggtgagtgccaaggaattggcgaaaggcggagatgtcgcagggcaggtgacatttgatattggtctcaccggctgcacgggtaataccgatagagcgaccaaaatctctaccgtcttcgttggtaaccaggtgaccagcaacggtaatcttgggaatacgggagacgcgaccaacgttgaagtacaactccttgataccgcaaataaagttatcaatttgaccaacggcttcaaaggtgaaggcgatctacaactgaagcctggagagacggaagccagcgccacctacactgcgcagtattacgccacaggagcagcatcggctggtacggtcgaagccactctccagtacgccgtttcctacctgtaa

SEQ ID NO: 231279 - DNA, 861 bp, Klebsiella pneumoniae
atgttagtgactgtgttttgtgaaaagattgcgaatgttaaggtgggtgaaatcatttcaccctgtgttaatatgacaggcgacagagtaagtgtattgaagatcggattttccatggatgaagagttgttgttaatcgctaaaaaggtgatatttgatagtgccagaatgacattggctaatggtaataagattattaaaatctctgagtcggagacaaacctacttcttgccttccatcgcggtatatataaaaaagaagatatcattgatttcgtctggaagaatcgtgcgggttgtgtttcagaatcgagttattacaagcttattaatcaaatgcggaataatttttcgctcgttggtttgaaagcggacgatattgttacccgtccacgaattggtgtttcgttgtcactgccattagaaccgttaaaaaaacaacgttcggaagtcggcgaacagaccagcgatacagcgcggggtaaagacagtcgtcagactcatctcgcggagggtaaaaaatttaccgccaaaatacgtcttctggtgctgacaatgttgttgatgctgttaacggctatagcgatgctatttcaacatgcacctgtgcaaaataaacacaaaagcaccttcaggatgcttggtgataaggatggctatatcttcttcaaaatggcgagcgataaagtgacatttaaggaggtggtttcagcctataacaccctgacgctaccgctatgtcgccagaacggacattatctttattacctccgggagccgaacatgaatctttttttgcagtgcctgaatcctgttgaaacggcggtaccaaaatgcattaccatcaaagagcgttactaa

SEQ ID NO: 231280 - DNA, 228 bp, Klebsiella pneumoniae
atgacgaaagtaatttattcagcgctagctgcgatcattgcactttcagctctgacaggatgcacaaggacaagctatgcaattcatacgaatgatggccgtaccattgtgagcgatggcaaacccaaagaatcggatgctgggttgattggctataccgatgctaacggcgtgaagcagcaaattaataaacaggaagtcaaagaagtctcagagattcctaactga

SEQ ID NO: 231281 - DNA, 915 bp, Klebsiella pneumoniae
atgcctaacaccgttaattatccgcaaataatcccgttcatatcgaaagggaaaatggatgctataaaaaacactttcggtaataccttaacagacagggaatgctacgggatatatatatggtcgcaaaaagcgtcagctgcaatataccctctcctacagcagttagaggtaacgcttaggaactcaatagataaagaagcaacaaatgttatgggtctgaactggtgggatggagtctatacagataaaaccaaacctaaatgggatgattttattttcaacataaacaaaggccgagatagatataagaagaattataaaaaaaacaacccatctgtactcagctctttgattgtcgttccgcatgatgacgctatagctcatactgacttttacacatggcaagcggtcctaagtgacacatttcacacgcaaaatagaaaacacgtaaataaatctctctggccaaggcttacttacaaggtgctaaaaggtctagacagaaaaaaaacagagaaagcagcaaggcttgattttatcaacgaactaaatgagataagaaattacagaaacagattatcgcacaatgactgtatatggataaaaatgaactccaataacttacagtccgcagtggaaacagttagagaaaaaataaataaaattgaagacttaataaaaacaattaaccctcaaatacattcaaccctggttaaatggggagttttctaccatgcgagaagaatttgctctcaaagagaggttgagcatcatatggggaaaaacatagtaaactgcaccaacccaactatgagctctattttagcaaccatttactcatggacggacgatggaaagctaaccagcgtcgtgaatgacggtaaaaacgaccttgcgatacataagttctag

SEQ ID NO: 231282 - DNA, 126 bp, Klebsiella pneumoniae
atgaaaacgttctttaaggttaaaaatcttttaaaatcaatgagatacttaaagcgtttcctgtcactgaatgcgacagcggtggtgtgtaacaccttcgctgtcgcattcagtgacaggcactag

SEQ ID NO: 231283 - DNA, 300 bp, Klebsiella pneumoniae
atgtccattattctcagtaagccgattaagcgcggcgatcaggaaattactactatcaccatcaacgagaatatcaaacaggccggctccctgcgcggcctgcgtctggttgatgtactgaacttcgatttcgatgcggtctctacgctgctgactcgcgtcaccacaccatcactgaccaccgctgatgttggcgctatggcaaccggtgactttaccgccatctgcgaagagattacgccttttttgacgaaaccggcgccgtccgtaccgaacgcggcggagacggagagcgaataa

SEQ ID NO: 231284 - DNA, 1404 bp, Klebsiella pneumoniae
atggatcttagtattcgcgttgcgttcagtgccattgataaactcacccgcccagtcagtgccgccagtaaagctattggcggcctttccgactccctcaaaaaaacacagtcttccattaaagatctggaaaaaagcgcatcgtctttcgacaggctgcgctctcaggctaacgacacagccctgaagctcaggaatacccagcgcgcgtttgatggcctcaaccagaagcagcgcgaaggtgggcagcttaccgaagcgcagacagcgcggcttgaaacgctgcgcaacaagctctcgcggctgacggacacctacaacaagcagactacccaactacgtgcagccggacaggcggtgcgccagcacggcgttaacctcaacgccggtagtggcgcagtgcaatctgctattcggcgaaccgagcagtacgcactgtctcttgagcgcgaacggcagcgcctggcggcggtaacacgcgcgcaggcaagctatgaaaaggcgaaggaaaccggtgcgagacttcgcggcggcggcaccatggcaattgctggcgcagctgctgccggatataccggcgggcgctttctggctcctgctgttggctttgacgaggaaatgtcgcgcgttcaggcactgacgcgacttgataaaggtgactctcaactcgcagcattgcgtgcgcaggcgaaaaagcttggcgcggaaacggcatttaccacccgcgacgcagcgagcggtcaggcgtttcttgccatggctggcttcacgccgcaatcaatccaggcggccttacctggcgtgctgaatatggcgctggccggtgggatggatctgggtgaaagtgctgatattggatcaaacatcctttctcaatttaccctcccggcaggagagatggatcgcgtcagtgacgtgctgacagcggcatttacccgcacgaatactgatttacgaagccttggcgatacaatgaaatacgccgggccagtagcatcaaagctaggtatcagcctggaagaggctgccgggatggcgggtattctggctaataacggccttcgtggtagtgatgccggtactgccatgcgttcttcgctggcccgtctcgcctcccccactgcgggagcagcaaaagcactaaaacaactcggcgtatcggtatcggacgccagcgacaaaatgcgaccagtagaaactattcttcttgacctctacaaggcgactaaaaaatacgggcaggttgaccaggtcggtttttttaaagatatcgctggggaggaggcttttgttggcctgcaaacactggttgctggcgctggaagtggcgagctacaaaagctcattgatgccctaaaggcagcctccggtgaggcgtctgctgttgcaaaaaaaaatggctga

SEQ ID NO: 231285 - DNA, 285 bp, Klebsiella pneumoniae; identical to SEQ ID NO: 203703

SEQ ID NO: 231286 - DNA, 471 bp, Klebsiella pneumoniae; identical to SEQ ID NO: 203704

SEQ ID NO: 231287 - DNA, 660 bp, Klebsiella pneumoniae; identical to SEQ ID NO: 203705

SEQ ID NO: 231288 - DNA, 888 bp, Klebsiella pneumoniae; identical to SEQ ID NO: 203706

SEQ ID NO: 231289 - DNA, 636 bp, Klebsiella pneumoniae; identical to SEQ ID NO: 203707

SEQ ID NO: 231290 - DNA, 585 bp, Klebsiella pneumoniae
atgggaatcgcagagctgcttcgcctgctggagaacatcgcccgcaccggcacggtggtggagatcgacgaggagaagtggcgcgttcgcgtgcagagcggtgggctggaaactgcctggctgcgctggaatgcacagcgagccggggcgtttaaggtctgggtgccaccatctgtcggtgagcaggtctggttcctgtgtctgggtggcaataccgacgtcgcatttatcggcggcagtctgtacagcgacgacaatccggcaccgggcgcatcacgtaatgagatggtgatgacagcgccggacggcgcgacgtttcgctacagcgcggaggcgggcgcattgcaggtgaagggcatcaaatctgctgtggttgaggcgtcagtcaaaatcacactggataccccggaggtggaatgcaccaacctgctgaccaccaaaagtctcaatgtcaccgaaggtggcgagatgcgcggcgatatcacccacaccggcggagcgtttacgtccaacggtgtgcaggtggatgaccacaatcacggcgctgttgagcgcggaggcagctggacggagggggtgcgatga

SEQ ID NO: 231291 - DNA, 900 bp, Klebsiella pneumoniae
atgccgacaattgacctgtcacaactacccgtgccgaccatcatcgaggcgctggactttgaaaccattcttaccgacgtgaaagcggtaatggtcgctgcttttccggaggatcagcgggcatctgttgcggcagcgctgacgctggaatctgagccgttgaacatcatcgctcaggcgatagcgtaccgcgaattactgctgcgtcagcgcattaacgagggcgtcgcggcatgcatgttgagtcatgcaaccggtgacgatctggataatattgccgccaatcttgatacgcagcgactcgttacgacagaggccactgatacgacggacgccgtgacagagagtgatgaggcgtttcgcctgcgagcgcaatcggcatttgaagggatgagcgtcgccgggccgtctgcggcttatgaatattttgcgcgcagcgccagtggaaaagtggcggatgcgcgcgcatccagcccatcacctgcagaggtcatcattgccgtgctgtcaacagagggggacgggtcagcatctcctgagttaatcaccgccgtcaccaccgccgtaaacgatgaagaggtgcgacctcttggcgatcgcgtgaccgttcgcagcgctgaaattgtggattacgagattgatgcgaccctttatctgtaccccggaccggagtctgaacccatcattaacgcagcagacgcatcactacagcgctttctcaaggctaatgatcgaaaaattagccgggacgtcgcccgctccgccatttccgccgcactgcacgttcagggggtgcagcgcgttgtactgaactctcctaccgaggatctgaggattagcgatacgcaagctgcgcgcaacactaattatcacctggagaacgggggaactgatgagtaa

SEQ ID NO: 231292 - DNA, 3708 bp, Klebsiella pneumoniae
atggcgactatttccgaacaacctgtatgggaagatgatgtttacctgattgcccgtggcgaccgggtggagggcgggcgggatggcgtcgcaaaccgccaggcgtcacaactgtctaaccggacggcgtttctgcgtgagcagataaagagcctgattgatgacggggtgatgttttcccgcgattaccggaaagaaatcatcacgctcacccgccacggtcaggcgattatcaaggatgattttctctactatctcagggacagcgccccgctgccgtatgtgacgaccggcaccacggatgcatcatgggcggtggactccccgtttttcacctcagtcagcgacccgaacctgcgtaaaaatctgggctctgagggtggttcgcagctgattttcggcctcggcaatatcattggcaccacctcgcaaattctctcttccactgatacgcctgacgcttaccagtctaacggcttctatgcgcagaacgacggcggtgagggcgtatggcgatttaccgggaaaacagccccggccagggcggggacgcacgtaataacccagggcaaggtttataacgcgaaggggaatgagtatgcgctggaaatatgccggggctctatcatcgttctggcaaacggcgcgaaggcgtacacctatgatgagtgtacagaccagacaacggatgattttgtgtgcctgggacaggccagcaacggcattctttcccgtctgacgcttggggtgtccacaggaaataacgtagcgacctatgatggcggcgctcgtctggacctcatttatccaaccaatatgtaccgcatcggtaaagagcctgttaagggctattccggggtcaattatcgctttggctcctcttatctcatggtttatgccggtcagtcttacacttatgccatgaccgggaagcgtctcgacggctggcggcatggtgtaccggagattgaggaaaaatggcgtgcggttaacaaacaggagtactgggggtcgctgagtcttcagaactgtcatatatacggcggcacatgggacggtgatcacaccatccgaaaaatgccggaacagtgctctgccggagtggcgattctggcgctgaacccggaaggctttttcacccacggtgtcaccatcaaaagcacctttaactgggcgcaggttgaaatgcccgcgatgctggagccgacaaaattcaatcgtgacggccacgcctttgataacaacgagctggattatgagtacatcaccagcgcgattgcggcatcgggagcgacccgccgtgccggcaactttaaccgtgtcgtacacgatggcagtaagtttgaaggcgggcgtcgcggtacgtaccgtaacgcctgtgactggaccgcgctctataatactgaagtgactatgcgccaggcgtggcgcagtgcgaataacgtttccgggacgctgccggagtatatcgcggtgatgaccggtaccgggctgcacgtttctggcggatactgggggcctgcggccgcaaaagactacaacgcgaaaaatggcgtggtgtacggtaccgcccagaaccatgtgttcactggcgtgtataacgagtggacgtacaacttttacactgtctcccgctggggctttatcggtaaagccagccgtctgctgggcctgcattttgactgcgttagcatgtacaaagacaatttcaccgagtacagcaacgtgcgctttgaagggggctgtttcccgtcggtcgatgatggcggcaatgctaaatatcatgatgatttctggcattacgacacccccaacggtgtgtccacctttatctggggcaacccggtgcgtgacctcggggctttccggcatacgggctttgatttcaggtacggcacgaacaatatgtatattcctgccggaaccgactgggattcaattcgtaaccgcccctacgcaaaagaaatgttcaacccgaacggattacagttaaatgccgggccagcgatggcaccctggcagcagccgtccatcaagtcggaaatctgcatctggataaaggaccataccgggaatttcaacccgagaaatatttacgcatgggtgaccgccgccagccaggacggcccgaacgcggatgaagcgttgtacaagtcgtttgcagagccgtttattgatttcggtaacggctacaggatgctgaaaatcaccaacaagcggctgacggcatgggacgggctgtacacctacgcgcgaaacaccggtatttattttgatgttccggcagacggcagcacgcccatcacgattaaagcgattgaggcctatacgggcggggtgccgatgttcccggggggttgcggcaactacatcccggaggcaaacggtaattcagtattaagcccggccaccaaccctgtggggctggatagctccctgggtggggggctgtttttccccggtgatattatcggcccgtggtcgcatgtgcggcgtacgcaaagtggttacatcatctccccgacgctgacccctggatatacgctcgatcggaaaatggtgacgggcggctgcacgctggaagctgcgtttaaggtggcattcagtgcgaccgttgaaacagttaacagcaacggcaccactatcatcaccgtgccagcggcattcctgccatatatcgcagtgggaataccgctgtatatcaccggtggttcatcaaccagcgtgaccgggcaggtgcaactgattaaacgtctgctgaacagcgacggcacatcatcgccgcgttatctggtgcagggtaccgtcggagctgtgggtgacacgctgaccatcgatcaggcgaaagtcccggcgtacacgttctacaacgaccgcaatttcaatgcggttaccgcgaactcagtgaccgttaacggggtatcggttgccacagcgcaccgctccaccgtctcaatggggattggatacggcggcgcgtcgggtgttaaggcagcagaatggtatttcaacggcggcatcacgccgtcgcacaggctggttgcatcatcagcatccgggatgaccctggaggcgggcggtaatttttcagtggtcggaaatacgttccccgctgccgatggcacctattcgctgggcaccccatccggtcgctggtcgcaggtttttgcatcgaatagcgttatcggaacgtcagacgagacacataaaacccgcccccgggcagacaccccggcggaaaccgacgcctattatgaaatcgggcagctccccggcgtctggcagtggctggaaaaatatatggtcgaaggggatgacgcccgcctgcactccgggccgaccgtacaggcggcgattgccgtgatggataagtacggtctggactggcgggaatattccgcattctgctatgacgagtgggacgcacaggatgcgattatcgagacctgggatgacgagtgggaggtgatacccggtaccccagccgaactggatgaagccggaaacgttcttgttgaggcggtaccggaaacgcgcaccctcatcagagcggcggggagcaatgttatccaggaggcgcgagaagccgggagcgtctacgcatttcgcaaggaggaactgctcttctggatttcccgcgcgaccatcgcaaagcagcaggccctgcatgaccggctgacagcgcttgaaatgaaactggcgtcctga

SEQ ID NO: 231293 - DNA, 738 bp, Klebsiella pneumoniae
atggtgacgagaaggtacttactaggtggtgaatatccctccgaggaatttgttcaagcttctttagaaaaatatttttttcgacaagggttcgatatagatacgggttcttatattgaccttatttgtcgtgataaagaatctagggatgttgtgtggcatattgaagtaaaaggaaaaacatcacagccggggttggattttcgaacttgtcttggacaattagtgcagagaatgacaaaagataatattaattatgctattgctgttccaagaataaaacagtatgaaagattaatagaagaaacgagcattcttgctgttagtaaattgaatttacactggatatttgttgggcctgatggcagtgtgacaattaaggaacctgatagctctacgatgaaaaatggtaatggtaatggtaatggtaatggtaatggtaatggaagagaagtttctcttgtgaatggggggtttaaaagatttattacgggggattttatgccaacttgctcatatgggaaagctcctgttgtatttaaatcatctcggcgagaaatgtgggattggttggacgattttgttatttcaaatggggtgatcccaagtattgctgatattaaaaaagaggctgaatcgcggagtgggaaatggacgctttctaatgttaaaatagagtatcagttttggaaaatatatcacttgtataaggggcattttttctatcaatctgagtag

SEQ ID NO: 231294 - DNA, 135 bp, Klebsiella pneumoniae
atgatgattagagctcacgacccaagcatcaccccgaccaccctcaacacactgatacaaccccatatcacttacattctgaacggaatcataaagagccataacctcctcataatcgccatcaacatcatctaa

SEQ ID NO: 231295 - DNA, 300 bp, Klebsiella pneumoniae; identical to SEQ ID NO: 231283

SEQ ID NO: 231296 - DNA, 516 bp, Klebsiella pneumoniae
gtggctattccgaaaaaactccggctgttcaccgtctttgtggacggcgtgaaccatatcggcaaagtccccagcgtgacgctaccgaaagtgacccgtaagaccgaagattaccagggcggcggtatggtcggctcggtggctgtcgatctgggtctggattccggggcgctcgatgcgtcaatggttgttggcggtgtggtcgaagagctaattctgaaatacggcggtgatatcgacgaaatgcgcctgcgctttgtcggcgagatttacagcggcggtaccagctcactgctggaagttgagatgcgcgggcgtatcaccgaaatcgatccaggtgatgccaagcagggtgatgacaccaaccacacctacgccatcaaaaacacctactacaagctgtcggtggacgataagccattgctggaaatcgacctgctgaactttatctacaagcggaacggtcagaatctctatccggatcgcattatgtcggcgctgggcctcggcagctga

SEQ ID NO: 231297 - DNA, 1182 bp, Klebsiella pneumoniae
atgaccgacaacttttttcacggggcgcgcgtcaaggaaaataccgacctccagaccgcgatcaatgacattgattcaacggtcattggtctggtcgcggtagctgaagacgccgaccccgccaccttcccacttaacactccggtgcttgtgacgcgggttatcagcgtactcggtaaagcaggtaaaaccggctcgctctacaaatcgctgaaagctatttccgaccaggtcagcacccgcgtgatcgtagtgcgcgttgccgaagctgagaccggtgaaggcaagccaacgcagtcacagctgattatcggcggcacgcaggcggacggcagttacacgggtatgtttgcctttctgacggcggagcagaaaaccggctatcgtccgcgcattctcggcattccggagtacgataccgccgaagtgaccgcacagttgcgggttatcgcgaagcagttgcgggcgttctcatacagctactgcgacggctgcgacaccattgcggaggcgaaaacctaccgcgagacgtttgcggaacgcgaaggcatgctgatctggccgaacttcatcgcctataacccgctgaccggtgtgaatgaagaattccctgccgtggcttatgcgctgggtctgcgggcgctaatcgacagcgagcagggatggcataaatcactgtcaaacgtgccggtcaaaaacgtgctggggatttcgaaggatgtgttctggacgttgcaagcggaagattccgacgccaacgagctgaacgccaacgagatcaccacgctcattaagcgcgatggcttccgcttctggggaaaccgcaccaccgacaccgaagaattcattttcgaggtgtacacgcgaaccgcgcagattctggcagacagcatcgcggaagcgcagttcactaccgtggataccccgctgacccctgcgaacgtgaaagacgtggtgagcgggattaacgccaagcttcaggcgctggtcacggcaggtaagctgattggtgcggcctgctggtatgacgtcgttgataacccggtaacaggcattcgccagggtaaagctatcgttcgctacaactacagcccggtgccaccgctggaagatctgacgatgatccagacattcaccgatcagtattacgaatccgcttttgcatcgctgggaggtgaatag

SEQ ID NO: 231298 - DNA, 1461 bp, Klebsiella pneumoniae
atgaactggcagcgcttcaacaaagtaagtagtttttcaggagaaaccagtggcatagtaaagaaaaattttattattaccgcggcgttgctgagcagtctctttctggcggcaatagtgaatcttttatatatcgcggataatcttaataataaagcagacgcgcgcagcagtttacttttgcaaaaagccctcactaaccggcaggaaaagatacgcgcaaatttaatggataatgccgactggggcgaagcgtataataatttgcacaagcaggtgaatgttaaatgggcatgggacagccagaaccttggtgaatcgctttacacgaattaccagtatgaaggcgtatttgttttgtctcccgccggggagacgcgttatagcgtcattgaaggaaatcttgtcagccagcctttcgagaaatggctcaaccggaacatcaccaaagaactttttaacgacctctcacaaagccagggtaaagccgtctcacgccttatgatgaccaacgggcaactcaccttactggcggcggcccggatcacgtcggaagacgatgaaagcatcacgccggtggcggaagatgcctcggtactgattttcgccgacgtgttaacgcccgttaaactggagaaaatgggcaacgaatacggcattcataatgcgcatacgttcggcagaatggagccacacctgaaagccgactaccgggaagctcagcttattttacccattgataatggcgatgttctgattgagtggcgaagcgacgatccgggcagagcgctgatgaaccgggagctgccgttaatcatcattctgatgttatcgaccattgcatttacctggttgatgcggcgtggtgcgttaatcaaagcgcaaattaatgacgaaaatgttttcctgcttgagcaaagccgacaagcgcttacggcaagtgaacgacgctttcgcgacgtcattgaagccaccaccgactggatttgggaagcggacagcgaggcacggctaacgtggttatccgaccgtttttccggcgttaccggtcatcattctgacgactggcttgggcggaacatgttggatttcatccacagcgacaaaatcctttttcatcactggctgctgaatccgcagacgagcagtaattacacgctcaaaaaggcccgctatttctcagctcagggccatcagcgttactgcaatgtggtggcgaagcgcgccattatggatgatggttctatgggctttcgcggtacggtgaccgatgtcactctggaagtggaggcgcaggagcgtgccgagtatttatcgcggcatgatgaattaaccggcctgccaaaccgggtcagaatgaaagagtttctggaaggtgagctgcgttctttacccgatccggatcatcccctggccatgatcagcctcgacctggataaattcaaaccggtaaatgattaa

SEQ ID NO: 231299 - DNA, 1077 bp, Klebsiella pneumoniae
ttgcggtcctgtacccgtaaaatcgatctggttgcccggcagggcggagatgagtttatccttattctgccggatatttatgtgcgtaaagacatagagacgctctgccagcgcattgccagtgaaataagccggccttttatcgttaacggcaatgaagtgtatatcagcgtgagtatggggattgcactggcgcctcaggatgcaatgaacgcctgcgatctgattcggttatccgatatcgcattgtataaagcgaaaaataccggtcgcaataactgggtgttttacgaacccaacatgggcgagtacttaattcagcgccgggaaatggaaaaagagtttcgtgaagcgttatgcacagaccagtttcagctggtttatcagccccgttacgacattaaaacctcgcgtatcgctgctgtcgaagcactggttcgctggcagcatccgcgtctcggtttactgatgccggatcagttcatcccgcttgcggaagagacgggcctgatcgttgccatgagtgatgtggtgctggagaaagcctgtaaagatatggtgcatctctcgcccgatttggttatttcggtcaatatttcggcggtggagtttaatacccgtggcctggcgaaacgggtaaaggctgcgctgcaaaaatcggggcttaaaccgtcccggctggagttagaaattaccgaaaacgtgacgatttccaatccggatatcacgctggaaaccatgaagcagctgaaggatatcggcgtacgctttttgattgatgactttggaaccggctactcggcattaagctatctgaaacgcttcccgttcgacggaataaagctggataaatcttatgtgttcgccatggaggaatcggaaaacgccaaaatcatcgttgagaatattatcggccttggcaaagcctattcgctggctgtcaccgctgaaggcgtggaaacggcggagcagttgaaaaggcttaaacaatatcactgtgacgaggcgcaagggtatttcatcgggaagcctgtcgcgcttgatgcgttaaatttagacgtggcatttagtgtgtga

SEQ ID NO: 231300 - DNA, 378 bp, Klebsiella pneumoniae
atgaaagtaaaaccaactggctatttcctaatccatcagtatattgacattagcgcactggctcaactgatgcgcttcagtcatggagcgggagcatcagcggaatataatccgtcagaaaaaaaactggagggaaaaattgaaggtcatgccagttttgcactgggggaggcgaaggccgaaacggccctgtacctgccggacaggttaggtgtcagccttttatttccggcgaaaaaagtgacgccacagacaccggatggtgtctgtaatatgggagcgctgcgttttgccatgaaactggtattgtcaggtagcgttggtgccagtgctgcaattgaattaggggtgacagcagactggagtggagaaatgtga

SEQ ID NO: 231301 - DNA, 468 bp, Klebsiella pneumoniae
  misc_feature (152)..(161): n is a, c, g, or t
atgaatattgatgtcgaaacacttgtgaagcaattaggtaaaccttatcaggatatttatgatcaaggtttaatgccctacaaaacaaaaccaacgggtactattagtgatgatatttccaggttgaatatgaggcgagaaggaatattttnnnnnnnnnngttagaagatgaaaataaaatggattggttatttcctaatccgctgccatttggtcttgaaccagtaatgacccagaaatgggtaagggccaaacttggtcatccaatgatttacactgatgcgcagataatcatgactatttatgttggtgtgaaggaattttatactttgcctgtccctcatcaatatatcgttgctgcatttacctataacaaagatttttttgtacaaaaagtcacattttactcaattgagcgagccaaagaaatacaagccgcgttagagataaaaaggttgggtgggtaa

SEQ ID NO: 231302 - DNA, 501 bp, Klebsiella pneumoniae
atgtattatacgacccgagaatggcagtataaaaacataccacccgtgatcctatgcgaaatgtatctggatctattttccagtaaacaccggaatataactccggaaatgataagaatacattgctttcacggtgtggcatgttttatcgaggccgactttactgacagcgatggaaacgaattcattaacgtttatgacagagcgtggaatttacaaccctttaagatggaatacccaaacacgccattgccggttgatgaaccagaatcatttcataaatccgttattgccgcccaggacttagcaaaagaaatagactactgccgcgtcgatcttatgctaaaaggagatgatatctatttcagcgaaataacattaagccccaaaagaggcaaacttaaaatcaccccatcaatttgggacgcaaaactcggcagtatgtgggatctgtctcttgctaaaacaggttcgatcgagcctgtgtattcatgcccttaa

SEQ ID NO: 231303 - DNA, 495 bp, Klebsiella pneumoniae
  misc_feature (414)..(423): n is a, c, g, or t
gtgacattcaatcggctcggtaaactgaaaaaaaccgttgaagagaccctcaaacttgaattcactaatattgttattgtcaataacgggtccacggatgggacccaagcctggctttcgtcaattgttgatacacgagtcattgtattaaccctcaccgagaataccggtggggcggggggctttaaaaccggtagtcagtatatctgtgaacagctggcaagtgattgggtatttttctacgatgacgatgcttacccctatccagacacgttgaagtccttttcacagatggaaaagcggggatgtcgggtatttagtggactggtgaaagatccgcaaggaaaaccgtgtccgatgaatatgccgttctcgcgtgtaccaacctcccttggcgacactgtacgctatttnnnnnnnnnngtcttgaccacattcatgaacagctctttatctactttgatgatctttactttggctatcagctatcattag

SEQ ID NO: 231304 - DNA, 273 bp, Klebsiella pneumoniae
atgtatagcccggagttgcttttttatcatgatgtgagtattcagggcaaacttattgcacctgaatggaaggtttactatctatgccgtaatttgatcctgtcgaagaaaatattccagaaaaatgccgtgtatagcaattcagcgatagcgatacgcatcctaaaatatatattaatcctgccatggcaacgtcaaaaatattcctatatgaaatttattcttcgtggaatttcacatggcataaaaggtattagtggtaagtatcattaa

SEQ ID NO: 231305 - DNA, 957 bp, Klebsiella pneumoniae
atggcctggatcaccgcctggcgcatcgaccgctatgccagaggctcgatgctgaaaacgcccttctatcagcgcgccaagaataccgaagcgctgcctgccgcgcgtaaggcggcagaagaggttcgtgatgaaaaacaggcggcggtgctcagggctcgccagaaccagatagcaaaccagccccctgacaggatggatgagctggttttgcagccgggcgtgaaggattttgacccaaagatggatcaaacccagctgttcgacgcggcgaaggagttcggtaaggattaccacgacggttaccgtattccggataacctggcgcagctggtgctggataccgtgctgcagccggtgattttcgttctcaataccgatgatgaagcgcaggaataccggcgcatgaagcgtgacggagaggcccgggtggccgtcctgttcccagaggccggggaggccagcaacgcggaacagcctgccgggctggtgagggcgctgtttgatgaccagatacatgactcacgcgcctggtttatgtatgccgcgctcggcacgcgcgagatgtggaccggttacttccgctaccggatgatttacttcagcgagcgctgcagtaaactgctctcgccgctggtgctcgccggagacctggtgggttttgcgaccgtgaccgcgggtgtcgtgctcagtttccggcaaaagcgcctgaccggcaagctggccgggctggctgcgacaggcgccgtgcgctcgctggaggtggcggtgctggacaagataaccggggaagcgctgccggagctgcccggaggggcgcagctgcgggcatttacccacgagccgggaaccgttgtcgcacagcaaaaggcgcggaaagcggaagagcagctggcgcgggggcaagccgcgctgccggccagctggctggaggacgttctgacgacaacggtctga

SEQ ID NO: 231306 - DNA, 144 bp, Klebsiella pneumoniae
atgccggggtgggagctgaaaagctgggggttagcgttgaggaagccgctgcgctggttggagttcttgcggcccaaggtattaggggtagcatggcaggtacgggccttcgagcctctctttcgcgccttgcatcacctgtag

SEQ ID NO: 231307 - DNA, 138 bp, Klebsiella pneumoniae
atgatgagattcatgatttttgaccatatcataaatgacgtctcttctgatgtggccctgcagtttccctccatccagataactaccgctgaccgcaacagtgcccttgctttcatcaagcgaatacatgaaatttaa

SEQ ID NO: 231308 - DNA, 918 bp, Klebsiella pneumoniae
ttggaaaagatccaggcgactgctgttaaatatatcaagctgggagagggaggcgaatgggaacatgagtgcctgacatctggcattattaagtttgggtaccacaaaacgccccatcagatgtgccttgagggaaagtgggaggatgtgaataaagtctggttagaagaaaggaaaaataaccagtccactgccaccagtgatgtcagacagataaggacgttttacaccgccacccccgatatactcttcattacgttcagccagggattattgcattggtgccagccttccggagaggtcatcgaactggatgatggcagtaggacccgccccacggtgagcggatggcacagccatagtctggccgggaaccttctatcccacagcgtcctgagcggtgctttactcgctacacagaattaccgggggaccatctgcgatgtgcgtttggccgattacgccctgcgaaaaatcaatgatgagcaatcgccggaaatcatcagcgctgatattgctaaagctcagtacctgaaggctattaccaggctgtgtagtttgcttacctggcaggactttgagttgctcgtagatctgattttctccgccagcggatggagaagaaccgggagccttggcaggacacagaagactgtcgatattgagcttgaactgcccaccaccggagaacgggcatttgtgcaagtgaagtctgttgctgagcagtctgtattctctgactatctgtcacggttccaaaccagtgacagctatgatcggatgttctttgtctggcatcatgggacattgagtgaggatctccgtgctgaaggcgtcactatgattgggcccacgaggcttgcagaactcatactggacaccgggctggcacgatggcttagaaataaggtttcgtaa

SEQ ID NO: 231309 - DNA, 537 bp, Klebsiella pneumoniae
atgaaaatggtggaatgtttgggaaataaaaaagcatcttcgggcgtaatgccactttctctttgctcgtatgccattccaaaatcagaagtggatgacagtcaatataattttgtggcgggcatggcgggcgccattgacgtttatttaaataacgaccttatggattaccagatagctgggaccggaaaaagttttatcggaaaatacttggacgtgtggaactacgatagcgcggaatatcagcaacgttgccaacaggctgtcaaaacgtttacgaataaaccgatcacaaaaggagattgtaatcatctgagtgctgatatttacaggcagaatcaggcactggccagcgtcgaccaacagcgccagctggagcaacaggaacgccagacccagtctctcaatgatgtcttgaaagcacctgtgcagaccaactgcacccggtacgggaattccgtttactgtacgtcctattatctctttatgacgcgtattgtcaccaccatctggcgccacgctgatttatcccggtaa

SEQ ID NO: 231310 - DNA, 597 bp, Klebsiella pneumoniae
atggataaaaatgagccatcaatatggcctccgtaccatgtcttctatatccaatcgatgttgttcaatacaacatcggctctacaggccgtggatagagcatctaagtacatccaagctatcagtgaagggaagctagggccacaagatcggaaagatgagcttctagactgtctacaaaacttcatcaatcatagtgctgctatagctcggtacttctttccatcaatgattggtggaaaaggtgagaaggttttacataagaaccgtgctgagtttctgaggcaaatttttgatgtgacagaaagcagccctttgcatgataagaaacttaggaatgcaatagagcactttgatgaacgactggatatgtatcttgaaggtggaattgtaggaaatatcttcccaagtctaatcttgaacaaaccagaagaaacagatgtgccgcatcacatcttcagagcctactatctaaatgatggaatttatcaagtattgggggaaagacataatgttcaacctattcttgatgaagtcatgagagttcatgaactgttggagatatttgatgaaaatggtggaatgtttgggaaataa

SEQ ID NO: 231311 - DNA, 1032 bp, Klebsiella pneumoniae
atgggtggtgacataattatagatcgttactatggcggacctctagccagttcggatcttgccacacgaattcacaaaaataattttaccgagtggtatcagatagcaaagtccggtaagaccttctgtaaagatatttttttaaacacagcaaaatcatatgacgaattaacgaggcaggttaacaaaatccaagaatctctagggcaaaaactattgttccgtgggcagattatgcattacgagattactcgcccaataagaaatccatactttcttatcgaagggcttggcgagacttcttttattccttctatttggcgaaatctcctccagaatcatccgcgatcatttcaccatttcaatggtattaacttgtatgagtggtcgaagattatctattcacaattcgacatcgaggaagtggatcgacgaataaacgaactcataaaacgaggtgagtcgatatattcagcacaagatatggaggattcagatgatcctttagtgagtctctttggccgcgttcgattggatttgagtatgggccataattacaatctggctgacctacttaatactctactgcagcactatggactgttttcgccgtatttggatttaagcagtgatttgcgagtggcaatgttttttgcgagtcatcgttttgttcccaatgctggcaatgatcattaccagttcgtcggaagtaacggttcgaagtccatcctgtacttgtttaagcataaacaaaatgaaatggcggtgtatgcacacgatcgagttcttcatggtttacagccacttagaccggagaggcaatcatgtgtaatctgccgatcaggtccgtacgcacttaatcttgcgggcttatatcttgttggagcgattcgaatcgatttcgaactgccggagtctgaacgtttatcgtcgcatgtgctctttcctgatgaacatgaggataattttctcgcggccctaatagaaaattgcaggcatccagaaagagtgaccacttttcgacatcgatag

SEQ ID NO: 231312 - DNA, 1377 bp, Klebsiella pneumoniae
atggaacattgtcattgcgagacgctcgaagaactcaaaatagttattaaacaatatgggccaggagttctctacagaggacaaactaaacattacctatcttcagatggctcgccctcaatgcccacgtcatttcagcgtcaagggtgcgtaccagatttgatgattatgtggacctattatgcaaagagagccttgcaacacttagtacgcggttggaatgataccggcgataatgcaaccaaccaagcaatccttcagcattatgggtttcgttcctttttccttgatgttagtggcgatccgcgtgttgctgcttggtttgcatgtaataaatttgattctaagtatgtggtcaatttggtagaggattgctttgaagatccagtttggttgcgtactctaaatgcttgtttcgctccatccgaagatattggccacatttatttaataagccagaagttactacgacaatacaatcttcaagctgttcatctatccgaaattgcgacagatcatggcgctccaagatatgtgcgacaggatgcgtacatggtggggcctttaattcgtgaagggttagatggagactgtattatttgtcatatcagcgctccagcagaggttctgcgtaaatatgcggagggatatagtgttggctggctatttccagaaccatgtgaggatcctgtttatcgcgaacttttggcaatgccatgggtgaagatgcgacacctttcggatgaaggtcttgaggcgttcaagaggtcattggagttaccagagtattcctgtcaccttcaaaaacgcatgccttctagaagtgcaatgtatagacccttttggactagggaccttccgcctccggacggtttggccattatctcttcacaaatagttcagattctatgtggaagcgccctgtatcatggtgtaagtgacccttgttttgttcttcctgaaatcaacaagctattagaaaagtataatgagatatcaattgaacttgatggacttgtttaccatggtatggacacaagatatgggaagggcgttggaatagtaaaaatgcctgaaaatattgtatgtgtatttgaatatggtatcgatcatccagggttgcgtatcatgagtattggtcgcttctgtgggatgcactatctaatcgatagtaacggctgttgggaacgtgttattcatgaggaagactgcaagtgtggttcagaacatattgacaatatatccttacttggccgggttgatgtttccttgaggaacaagttactagaagatatcggttcagattcatatgttcagaaaggtattgacccgacatctgacaaattggctacatgggggggaaccttactagcgtga

SEQ ID NO: 231313 - DNA, 801 bp, Klebsiella pneumoniae
atgggcgatgtatcaattattactaatgctcttgggcgttttgccaacaatatgcgactctatggggaagcatttttaagataccgagaattggtagcaatcgaccgtgaagaggctatccacaacctagatcgagcatttgagcaaaatcttgagggttttcatacgttatatgatgtatcacaagcgatatttgacttccatgagcatcctgagactagcctcttaatttcaattcgaaatgctcttcatcaccgcgatcatcctctattccatagccttctccagactatttggttggatgggaaacctgagcgtctacttggggctgaatatttaattgctaggcatcgaacgacaggtggcaatcctccgttgatgatgcatttgataaagttagaagatgtttatagtcgcttagatccacgcagcgaatcggactacttaaacccaatgggtaaagcaaatgctttatccagattcgtctctctggaaaatggcttggcctttgaaaaagtgtgggaaaaaacgaaagtagatcgataccccgcaaagcaagtgtatttggacttgttgccgatattcaattctgctgtttctagagtttttactgcattggataatgctggagtgttattccaagggtttgatgcaaatgcttataaatccgtatttattgaagaattaaaaaccgatcttcagcattttgatttttttggtcttagaataaatgcgctacagattgagttgggtccaaaatttacaatccaagaagcttctatccgacgaggttgtacctaa

SEQ ID NO: 231314 - DNA, 288 bp, Klebsiella pneumoniae
atgaaaatgatttcgtactggaaaaattctaagccattccatgaagacgacggaatggtattaatttatggttactatgaccataaacacgaatacaacgggggcactaaagaacttggagttcattgggatggatacccacagtcgcgtggaatactcagtccctgcgtcataccagctgaaacacgtaatgctatgctctctggccttttgcatcaggcggtaacaagcggtaataagcagatgatgaataatattacagaagcaattgagttctttagcatttga

SEQ ID NO: 231315 - DNA, 1521 bp, Klebsiella pneumoniae
atgaaaatcacaaaaataacagaattgattaaagaggctcctcaggttttgaaaggctctgaagatgataagttttctacgaaacctttagaagaaatggtaattgggttagtttgctctgttggtacagacctggaagcgatcacaaaaaaaataagagatagattgtccttatatcaatttgaatgttctgaggtccggatttcatcggatgtgattgctcagctttctggttttgggaattacatagataactatcaaagaattgatgatttaatgaccaaggggaataagctaagagaagatagtgaatgtaattatgtgttagccctcggagcaataactaaaattaatgaaataagggcaaggaatgaatgtttaaagataaagaaaaaagggattgcgtatattattaattcaatcaagcatcctgaagaagtttataaatttagagaggtctatggctctggatttttacttttcggaattttttcagatgaaaatcgtagattggataatttgactcgtaataaaggaattccagaggataaagcaagtttattgattgccagggatgaggatgaggaatctggacatgggcagcataccagagatacattccacttagccgatttcttcttaaaccaagatggaagagatgataagcttaataatgatataaaaagagtctttgacttgctcttcggtaatccttttattactccaacgtttgatgaatatgcaatgtatatggctttttcttcagctttgaggtctgccgacttatctagacaagttggagctgtattagctaaaaactacgctattatgtcaactggggctaatgatgttcctaagtttggtggggggttatattggccatactttaatacagaaaacgaaagttacgaggattattcagatggaagggactatgtaagaggttttgattcaaatgcaaaacaaaaaaaagaaattatggatgatattcttaagcaaataaatggaaaatcgcgtgataaattagaaagaatcctcaagaacagccttattcaagatatcacggaatatggtcgtgtagtccatgcagaaatggaagcgattttagcatgtgccagaacaaatattagcactcaagatgcatatatatattgcacaacttttccatgccacaattgtgctaagcatattatagcttcgggaattaaaagggtggtttacatagagccatatcccaaaagtaaggcttatgaatttcattcagagtcaataactaatgatgagagagaacatgaaaaagtgcttttcgaaccgtttattggaatagggcctagagtttattttaacctattttccattgttaatgggagtggaaataaaattaaaaggaaagatagttatgggaatgttatgaaatggagcgagtctaatgcaacattgagaacattaatgttacctatttcttacttggaaagagaacagatttctgttaatttgttcgcaaggatcataggagtttaa

SEQ ID NO: 231316 - DNA, 168 bp, Klebsiella pneumoniae; identical to SEQ ID NO: 194255

SEQ ID NO: 231317 - DNA, 663 bp, Klebsiella pneumoniae
atgtccacattgcgcctcctgctctctgactcttacgatccgtggttcaacctggcggtcgaggagtgcattttccgccagatgcccgccacccagcgggtgctgttcctgtggcgcaatgccgataccgtggtcatcggccgcgcgcagaacccgtggaaggagtgtaatacccgccgcatggaggaagaccatgtgcggctggcccgtcgcagcagcggcggcggcgcggtgttccacgacctcggcaatacctgctttacctttatggcaggcaaaccggagtacgacaaaaccgtctccaccgctattgtgctggcggcgcttaattcactcggcgtaaccgccgaagcctccgggcgcaacgatctggtggtcaaaaccgacagcggcgaccgcaaagtctccggctccgcctatcgtgaaaccatggaccgcggttttcatcacggcaccctgctgctcaacgccgatttaagccgtctcgccaactacctcaacccggaccagaaaaagctgcaggctaaagaggcattacctcggtgcgcggacgggtggcgaacctggttgagctgctgccgggcattacccatcagcaagtttgcgaggcgatccaggaagcattcttcagccattacggcgaacgggtggacgccgaggtga

SEQ ID NO: 231318 - DNA, 1224 bp, Klebsiella pneumoniae
atgaaacgtgcatttatcatggtgctggactcctttgggattggcgcaacggaagacgcagaccgctttggcgacgtcggcgccgatacgctgggccacattgcagaagcctgcgccaaaggcgaggctgaccacggccgcaaaggcccgctgaatttaccgaacctgacccgtctgggtctggtgaaagcgcatgaaggctccaccggtaaaattgccgcgggtatggatggcaatgccgaagtgattggcgcctatgcctgggcgcatgaactttcttccggtaaagataccccgtccggccactgggaaatcgccggcgtgccggtgctgtttgactggggctacttcagcgaccaggaaaacagcttcccgcaggagctgctggataagctggtgaaacgcgccaacctgccgggctatctcggcaactgccactcctccgggacggtgatcctcgatcagctcggcgaagagcatatgaaaaccgggaaaccgatcttctatacctccgctgactcggtgttccagatcgcctgccacgaagagacctttggcctcgacaagctgtatgagctgtgcgaaatcgcgcgtgaagagctgaccgaaggcggctataacattggtcgcgtgattgctcgtcctttcgtgggcgacaaagccggtaacttccagcgtaccggtaaccgtcacgacctggcggtagagccgccggcgccgaccgtgctgcagaagctggtcgatgagaaaaacggccacgtggtgtccgtgggtaaaatcgccgatatctacgccaactgcggtatcactaagaaagtgaaagccaccgggctggacgcgctgttcgacgcgaccatcaaagagatgaaggaagcgggcgacgagactatcgtcttcactaacttcgtcgattttgactcctcctggggccaccgtcgtgacgtcgctggctacgcggcgggtctggagctgttcgaccgccgtctgccggagctgatggagctggttggtgaggacgacatcctgatcctcaccgccgaccacggctgcgacccgacctggaccggtaccgaccacacccgcgagcatatcccggtgctggtgtacggcccgaaagtgaaaccgggttcgctcggtcaccgtgaaaccttcgcggacatcggccagactattgcgaaatactttggtacgtctgacatggaatatggcaaagccatgttctga

SEQ ID NO: 231319 - DNA, 243 bp, Klebsiella pneumoniae
atgaaatccttccatgagaaaatactaaacctgctgattctatttatcgcctgtattcttgggattattgttagtttcctatgtataactttgtctatagacgttttagtttggatgctaacaggaactttcgatttgacaaaagccgatatactcaaaaccattaaaattggttgtgtgattggaaccttcactggtgcggtttttgttattgccagactatttaaactaaaaggattttag

SEQ ID NO: 231320 - DNA, 7833 bp, Klebsiella pneumoniae
atgctgatggtggtggcggaaacgacccgctctcatcgggctggcgtatcgccgcaatccggcgccgacgcgcgaaccgggtcgacgttaatctcctccctggcgccgctggcctttagctttctgctcgctttttcctgtcttacctcggctcaggcggcgattgtcgccgataaccatgcgccaggcggccagcaaccgcagatcgccaagagcgccaatggcacgccgcaggtcaatattcagacaccgagcggcgcaggcgtttcacgcaacgtttacagccagtttgacgtcgatgggcgcggcgtggtgctgaataacagccgtgctaacacttcaacccaactggccgggatggtcgccgggaacccgaatctggcgaaaggggaagccagagtgatcctcaacgaggtgaatacccgcgatccgagccggctgaatggctatatcgaggttgccggacaaaaagcgcaggtggttatcgctaaccctgccggaattagctgcgacggctgcgggttcatcaatgccaaccgcgcgacgctgacgacaggccaggtacagtacggtaacgggcagattagcggttatgatgtcaatcgcggcgaaattctcgtacagggcggcggccttgatgcgagctcggtagacagcaccgacctgctcgcccgcgcggtgaaaatcaacgccggggtttgggcgcaggagctaaaggtcaccgcagggcgtaatcagatcgatgcggcgcacagccggacgacggcaaaatcagccgacggcagtgcgctgcctgcggtggcgatcgacgtcagcgcgctgggcgggatgtacgcccataaaattcgtcttgtcggtaccgagcgcggcgtaggcgttcacaatgccggcaatatcggcgcggcggcgggggacgtagcaatcagcgctgatggcgcgctcagcaaccgcggcgtgattcagtccgcgcagaatctgcaactgtccgttaagggcgatcttcacaaccagggccagctgtacgccggaaaagatagcgtggtgacggccagcgcgacgctaaccaatgacggcatgattgccgcgcaaggcgatacgcggattgccgccaacgctttgcgtagcgcgcaaaacagtacgctcgccgccggattaaatagcgatggttctaccgccagcagcggcgcgctgacgctgaatagccagagctcgctggcgctgaatggccgcaatatggcggcaggaacgctgacggcgcagggcaggacggtggatcttgataacagtcgaacctcgggggcgcggatcgtggtcagcgccgcgtccggcgatatcaccacccgagatgcggtggtggcggccagcgaaaaactccagttggccgccagcggcaaactcaacaaccacagtggcctgttgacggccagcaagcttgagctgaaagcaatggcgctggataaccaacagggcgtaatccagcagacgggcgaggacgatctacgccttgattttcgtgcgggattggataaccgcggcggtgagattgccagcaacagccatgctttgacgctcagcaccagccagttgctcaatcaaaacggaacgctgctgcataccggcagcggcggcatgtctattaccagcgaaggcgcgctggacaacggcgaaggcactattgccgctaacggcaatatcgttttgcactccgataacattaataatcgcagcggtaaaatcagcacgacgcagggcaatgctcagctcactacgcgtcacgagctggaaaattcgcaagggaatatcgttgctggcggcagcctttctctacaagtggccagccttcggaaccagcaggggcaattgattgcggcgcagggcgacctggccatgagcgctgaagaagggctggataaccgcgaaggcgtgcttaccgcaaatggcaatatcaagcttgacgccgacaatctgaccaaccatggcggaaaaatcagcgcggcgcagggcgacgttcagctcactgcgcgccatggggtgaataactcgcaggggaatatcatcgccagcggcgacatccggctacaggctgaaaatcttaataatcgtcacgggcaggtaggcacggcgcagcggggcagcgtcaacctgacgacgagcggtttgctggataatcagcagggcacaattaccgcctttgatgccctgggtattcagagcgccaccgttgataaccggcagggagaactgcagtccggcggtaatctcaatatcaccatccacaaccgggggctggataaccgacaggggcagatcgtctccgccgccgctctggaaatagcaggcgtcaacctggcgctggctaatacgggcgggacgttacttgccgcgagcaaacttagcctcgatgccgattccctcagcggcgatggcgaggtgctctctcagagcgatatgtcgctcacgttgcgtcaggcgtttcataacgccgggaggatcatcgccaacggcaacctgcagtggaatctctccggactggggctgattaatcagggggttatcagcgccggccgggcgctcaatctctatgcggcaaagctggataaccgtcaggaaggcgaaatcagcgctggcgagaaccatttgacggtcaacggcgagctggtcaatcgggggctgattgacggtggcttaacccatattgtcgccacgacgttaaccaatatcggcagcgggcgcctgtacggcgacgccgtcgcgctgcaggcggcaacgctgactaacgccgcggagaacggcgtggcggcgacgattgccgcacgggcatcgctggcaatgggcgtcggcacgctcaataaccaggatcacgcgctgatctacagcgacggtacgctcgccattggcggccagcttgccgaagacggttcgctcagcggccgggcgggagtgtttaataaccacagcgcaacgcttgagtccgccggtgatatggcgctcgatatccaacaaatcaataactacaacgaccatctagtgacgaaagatgtgatggtcgagcagtcatggcgccatgaggcggcgctgaaaggatcggtacagcgcttcgactggtcgctggtcgataccagctataaaaacaaatacggcgttcacgacgccatcatgccggacggaagccgcggcgatgagttctatgaataccagtaccagcgtaccgttgtggaaacgcaggtggtggaaagcgatcctggcaaaatcctctccggcgcccggctcatcatcaacagcgataagctgaataactacgatagccagattatcgccgaaggagcgctcggtggcgtgattggcgaactaaacaacgtcgccacgaccggcaaacgggtgaccaccgacgtcggcacccagacccgttggtatgagaaaaagaccagccgcccgtttggcggcaccaaaaccagccaggggaaaaaaagcagcgaatatgaaccgacgccgacggttcagaccatcgatttgcaaaccatgaagtggcagggcaatacccaaattgatggccatagcggcgtgattaatccgcgcgatcgcgccgatgaaacaggcgaactacccgccggacggctggtggaagtgacgccggttaacgctgacggaacggttattcgcgtcgtcacaccggatacccggcttcctgtcagcagcctgtatcagatcgacccgcaggctaaagcaggctatctggtggaaaccgatccgcgttttaccaacggtaaagcgtggctcgccagcgactacatgcaaaatcagctgggcgttgatcaggcgatgaagcggcttggcgacggctattacgaacagcggctggtgcgtgagcagatcgttaagctgagcggcgggcgctacctgcagggctacagtaacgatgaagagcagtatcgggcgctgatggacgcgggcgtcgccttcgccaaacagtacaacctgacggtcggggtggcgctgacgccagcgcagatggcgctgctgaccagcgatatggtctggctggtcgccagagaggtcacgctaacggatggctccgtgcagcaggtgctggtgccgcaggtttatgcgcgggttaaagcgggcgatctcgatggcagcggcgcgttgctcggcggtgaaaacgtggcgttcagcgtgagccgtgatgtgaccaacagcgggcacatccacagccgcggcgtgacccagctaaccgcggaaaacattcataacagcggctatatcggcggcaaccagctcacgctaaacgcgcgtactgatatcaacaatattggcggaacgctgcagggcggcgatagcctgatcgcgcaagccgggcgtgatatcaacagcgccagcaccctcggcggcggcccgggtaacatcagcctcgatcggccggcggggatttatgtccagaatgaaaacggccagttggggctgcaggcgttacataacattaatctgacggcaagcatggtgagtaacagcgcggcgggcagccagacgcagattatcgccggcaacgatctcaacctgcagacgctcgccaccacccatagcgaaagcggaaactgggggaaaggcaacgatcgttccttgactcagcgtagtgatatcggcatgcaaattaacggcggcgcggtggcactgtccgccggccacgatatgattgcccgcgccgccagcgtgacggcgaccagcagcctgacggttgccgccggcaatgatattaacctcagcagcggcgagtcctcatggcacctgacggaaaatagccatcaaagcagcagcggcctgctggctcgccgctcgctcaccactcacgatgaagtgtgggcgcagaacgccatcggcagcaattttagcggtgaccgtattgtgatgcaggccgggcgcgacctgctggtatccggcagcagtgttgccggcacccaggacgtcaaccttgtggcggggcgtaacctgaccattaccaccgccgaggagagtcgccaggaaaaccatctacgtaaagagaaacatagcggcttttccggcaccggcggtgtcggcttcagcgtcggcagttcgtcgctgaaagccaacgatgtgacgacggcgctgagtagcgccgccagtaccgtcggaagctcacagggcaaccttagcctgagcgccggtaatgtattgacggttcagggatctgacctggtggccggcaacaatatggcgttgaccggtaaaaccgtgaatattctggcagcggaaaaccagagcacccagacccataccgtggagcagaaaaccagcggcctgacgctggcgttatccgggatggtgggcagcgccattaataccgcggtttccagcgccaaccaggccagcaccgagagcaatggccgtctcgccgcgctgagcgggctgcagtcggcattatcgggcgtacaggcgtatcaggcatcgcagatgcagactgcggattccagtccggagagcatgataggggtcaacctttcctggggtagacagtcctcgaaatccactcagcgacaaacgcagaacaccagccgcggcagcagcctgatggccggcaacaatctcagcattatcgccacggagacggatatcaacgttgagggcagccagctgcaggccagcggcagcgcattgctcaatgccgcgcgcgatgtgaatttattctctgcggagaacgccagcaccctgagcggtaaaaacgagagccatgggagttcgtttggcgtcggtattaacttcggtcagggcgcgaacgggctgacggtcagcgccagcgccaacgccgcgaagggccacgagaagggcaacagcctgacgcataacgaaacgaccctcagcgccggtgagcgggtgactatcgtcagcggtcgcgatacgacgctgaccggggcgcaggtgagcggtcatcaggtgacaatggacgtcgggcgtaacctgacgctgaccagcgagcaggacagcgataactacgattcgaagcagcgtagcggcagcgtgggggcgagcggcagcatgggcggcggttcggggtctcttaacctgagccagagcaaaatgcacagcacctgggcgtcggtggaggcgcagacggggatttttgccggtgagggtggttttgatgtgaaggtgggcgggcatacgcagctgaatggcagcgtgctggcgagcacggaggcggcggagctgaaccggctggataccgggacgctgggtttccgggatattaaaaactatgccgagtacagcgtggagcagcagagcgcgggagtgagcacgagcggtagcgtggcagggcagttcctcgggaatgcggccagcggtctgctgatgggggcgaacgggagcggcagcgacagttcgctgacgcgggcggcggtgagcgagggcagtatcgttatccgcgacggcgcgaatcagcagcaggacgtgacggggttaagccgggatgcggcgcatgcgaaccagacgctgagtccgatatttgataaggagaaagagcagaaccggctggcgacagcgcagaagacaggtgaaatcgggcgccaggtgagtgatgtgctggtgacgcagggcaagctgaacgcgcaggcggcgcagagcgacccggcggcgcgggcgaagctggtagcgggagggaatggcagcccgagcgaggagcaaatcagcgcgcaggtgagccggacggcgacggcggactacgatacgggcggaaagtaccagaaggtggcgcaggcggtaacggcggcgatgcagggtctggcgggcggcaacctggcgcaggcggcgagcggggcagtgagtccgtatgtggcggaaatcattcacagccagacgacggacagcgcgacgggtaaggtgaatgtggaagccaatgcgatggcgcacgcggtgtggggagcgatagcggcggcatcgggaaataacagcgcgctggcgggagcggcaggcgcagtgagtggcgagctgctggggcgctggatagcggcggaatattatccgggtgttaagacagaagagctgtcggaagagcagaagtcgacgataagcgcgctgagtacgctggcggcgggactgatgggggtgcttagcggaggcagcagcgcggatgcggtggcgggtgcgcaggccgggaagaacgcggtggagaataatttactgagtggaagtgaagatgctcaggccatatggatacgtcagcatggtgtcgatatggcgagttgttctgataatcctggcgggagcgcatgtcagaaagcgataaatgagcgggatgctgttggacttgcgctagctacaggtagtgttaccttgttaccgggtggcgttcaggctatgtggggtcttggagccggtgcgaatgcaggcatcagttatctggcggatggcacgatagatccggcaaatgcggctatagcaggttgggtgaacgttatcagcatgggtaacggtctcgcaggtaccgttggctggaatgctgcgggtggtgcattaggaaactggatagacaataaagatccgctaactggggcaataacaaatggtattggtgctggcattggttacggtataggcaaaggaatttcttggggtacaaatgcaggggtaaactggtggaaagacggttgggatccgaagtttaatcctgttctgcaaaagtatactgagattaaaggtgactttggtatcttaaaagaagttacaccgagtaacattccaggcagttttggcgacataggagcatctttctcttcagaatatgggggaaaaaactcgaaccaatcattgaggagaaattga

SEQ ID NO: 231321 - DNA, 1572 bp, Klebsiella pneumoniae
atggttgctcgctccaatcttgtgaatttagatgcgctgattaagcgtgctgatttggctttaaagatccaagatcattcatcatatgaaacgcttaacagcattcctgcaagagaattgaaatcgggaagtggaatcgctgccttacttcgaaaacctgatttccaacgagaaaccaatcattgggggccagaacaagttgtatcgctactcgaatgttatatcaacggagatttaataccctctgtcattttgtggcgatcttctaccaatctcttcgtgattgatggggggcatcggctgagtgctttacgtgcatgggtcgaagatgattatggggatggtcatgtatcccaccagctgtttgggcacgatattcctcgtgaacagcgccgagcagctgagagaactagaaaacttgtaaaggatcgggtcggtagctgggaatattatcagaaactacttgcagacgatgcttctttaactgaagagcagcagagaagaattagtgtattaacttctcgtggaatctctgttcagtgggttgtaggtgatgttgataaagctgaaacatcattcttcaatatcaacatgaaggggacaccactagatgctattgaggaaatgctcctcaaaaatcgtaaaaagagcataccaatagcaacacgtgcgattatccgtgcgggcagaggccatcggtattggtcggaatttgatcaaagcattgcgcagcaacttgaggaaaaatctgcaaagttacatcgaatgctttttgaacctgaagttgatcgtccgatcaaaacacttgatcttccattgggaggatcaagaggtgttaggactgcaatccaagtattaaaagatttcttactgattactgattgcagtcagaatggagtgctgaagaagattgaggattatcccgatgatgtatcaggcgcagatacattaagaattctttctaaagctacaacattgagcaacaggattactggtaacggtgatggtagtttggggcttcatcctgcgatctatttttatggtccaacaggaatacattccacaccgatgtttttgggtacagttttactagttgcaaaacaactttctaacaataataaccaatttttcagagactttatatcaatcaggtccaagcttgaaaaaataatgattgaattcaaggacttgatagcgatgattgtgcaaaaacctgggagtaatgttcgagtgactcgttactctgattttttgaactcagtaattaaatcgctaaagcttggggatagcattgatgagagtaagctcatcgaactagctgaattggagggcaggatcatctctggcgattttaagagaacatctgcaaaaatcagcgatgaacaaaaaagtaaggtgttcattgatgtggctctgcgcaatgctttgaaatgtccgatttgccaaggttaccttgatactgaaaaatcagtttcttatgatcatatcgtacgtgtccgtgaaggtggtgatggtaattctgacaatgtacagttgacacatccttactgtaaccagtcggtgaagtgttaa

SEQ ID NO: 231322 - DNA, 210 bp, Klebsiella pneumoniae
atgaagaaatttttactttgtgtgctggctctgttgccgctggcggctcatgcaggaaaaatcaccatgagcccccccgacgaacaagtgtttaagggcgggaggaggctttgcacttacgaaaacagcatttatctgtttacgctggtgactcgctcgcaatcctgccctttctcaaaaacgttcgatacaaatgataatgcaaagtga

SEQ ID NO: 231323 - DNA, 627 bp, Klebsiella pneumoniae
atggttgtggagtcagttcttccaacagaaccaaaatcactcaaacatgtatcaaacatatgccacagacagagcctactcacagctcctcatatgcagccgttaacagcgtatgtcgaaagcctacgtgaaaggcttggtgataaagtgttcatccctgactttgatcctctagacggtgggatcaatgccgaatttattttcctcttcgagaaaccaggtccccaaacagactttagaaacggtggttctggttttatttcacgtgataataacgatgacacggccaaagcaatcttttgctttatgcaaagtataggcttagatagaaaacgaacgctgctgtggaataccattcctgcatgggataacgcaagagcatttaagggatttcatgtcctagatggcatcaagtttttagatgagctactaccgttactacctaacctgaaaaccataattttggtaggaaaacaggcccaaaaagcgagaaaaggactaaaggctcgtggttatgatgttgcagaatcctaccatccctcaccacttgtcaaagcgcggtatcgtcagagatgggaacaaatcccggcagcgtgggaagatgcgatttcagctaacaagagataa

SEQ ID NO: 231324 - DNA, 222 bp, Klebsiella pneumoniae
atgaaattacaacttgtaggtaaaggcaatttgccgctactgacgtttattctggatggctgttctgataacagcattcttaacctggcgagtcttgcacgaaggcttgagtgtagtcgctccagcttgcttgaccgcattcaaaaccacgggttagacagcgctatccggttctgcttgaagttgagcgaacagcgacaacgaaaaatcaaaaccaaatga

SEQ ID NO: 231325 - DNA, 1128 bp, Klebsiella pneumoniae
atgttaacatattttggggttttcccaaaacggttaaactatatatatacaatcttaggtttgaaatgcttattagatacattctctcttctcccggttgctcttttagccaggcaaatggaatttaaggcgattggtatacgtacattatactcatcaattatttctgcattagttgcacttcctgttttttactattttggttctatatctgctttaattgtaaattatttaacttcttctattttaggttttatcattgcttggatctcatcaccgtatcctctaattataaaatttgatagggaaagctacaaagatttaagacatattggtgttacgacaactgccgcaaagttaatatcaagcgttagctttgataacatatttattggcttttttggttctggagtaactttaggattatactcttttagtaaaagagtattcggtatatttactgatatattatcaggtggtatctcttctgttacttatccattatatgcttcattacaagatgataaaaataagcttaaagaatcatttctcaaagcaaccttcctttcagcacttgtcggtattccagcttacactggcttaattctattatctccttcattaattccattattttttggttcacaatggaatgaagcagtgcccgtattacaaataagttgtttattaggattcataacatgcattggttctctgcaaacatctttaattaaaggtgtcggtaaatcaatgtggattctaaaatatcaatgcgcacagcagatccttaccatacttatagctatcttattttctccacagggaccaactgttgtaatggcgatgataacaataaaaacatttttagtttggcccttcactatcttttatataacaaaactgctatcaatttcagttttctcttatcttagaaatctattcaaaccatttgtgagtggtgctgttcttgtatgcgtcttttatcttttgaaagttttattaggatccatcaatccatatttgtttgtggtgcttgaaatttttatatgtgctgttttctatatattgtctattctcatacttgcaaggcgcgagatcattattatgctttctgggctaaagaaataa

SEQ ID NO: 231326 - DNA, 801 bp, Klebsiella pneumoniae
atgttaaactttttgatacctgtaaaaaatcatatcgatattaagaattgggatattataaagaaaaatattcaatcaactctgatatctattaataaccaaagcgataataattggcattgctatattgtatgtaatactggctgcgatctacctgcattacctgatgaaaataagttcactatcttatctgtagatctaaataaaatgaatgtccaaaagtctgctggattacattcttattatgacgctataagagaagataaaggacagcgtttatatacagcttttaaaaaatgtaacaatgacgatttttttatggttgttgattatgatgactttattcataaagatatctccttatatgttaacaaacaccagaatgaaaatggatggtatattgataaaggttatttttactctggtggtaacgtcttaattaagacaaaaaaattcgatacaaaatgtgggacttcaaatattctgaaagtttcattggtttacgaatttaataatggagaaaaggaattgtcaatttcattgatcaaagaacttcttggcagccatcgatttttaaagaaatacatggttgataaaaagaaagaatttaaaagtattccgttttatgcagccctatataatatcggtatccctggctcaactagcggaacttcaggggtcatgagtaatttcttttcgttaaatgttttgattagaagacctgatcgttttgtcagaaatttttttaatataagatggttttcttcaaaaaagaaaaaattctttggtcttgttaattaa

SEQ ID NO: 231327 - DNA, 1008 bp, Klebsiella pneumoniae
ttgaaagtattttattataagtctaaaaatggaaattttggtgatgatattaatggttggttgtgggatagattactgcccaatttttttgataacgatgaaaatacaagactttcaggtataggtactattattgattcttatatgccacacgcaagaaagtggtacgtattatcaagtggtgtaggatatggttttcctccctcacattttggaaaggataattggaatatactatgtgtacgtggcccattgtcagctaatatacttaatctacctccggaaaaatttataactgatggagcagcctttttaaataaaatccctgagttttcacccctaactgagaaggaaaggaaagggataatttttatcccacatcattatgctgttcatgcaggggaatgggaagaagtttgtaaacttgctggtgttgaatttgtaaaccctgaaagtgattctaaatatgttttagataagattagaaatgctaaattagtattggctgatgctatgcatgcagctattattgctgatgcttttcgcgtcccttgggttccgatggtaacatctcctcaaattaatacatttaaatggcttgactggacctcaactattgaacaaagatatactcctatagtattagggagcagttccttaaaagaaatggtaaggagcaaaggtttatttttatatggcgaaaaatattacaataataattgtgatgtagagtcctcgatcaaacaatttaaaattcaaagaaaaataaaatcccacactctttggcctttatatcgcaaacctgccagttttctagctaatcgagtggcaataaatgcagcttctttagtcgagaaaattgatagatcgttaaatcaaaagtttatagatgaaagcgttaaaataatgattagcgcctcacagcaacatggtttcctaagtgatgacaaaatctttgaaagtaatttagggcgtttatacgattgtctctatttactaaagaaataa

SEQ ID NO: 231328 - DNA, 900 bp, Klebsiella pneumoniae
atgagtttaaaagttagcgttattatacccacttatgggagagcttccttaataggacgagccattgagagcgttatttctcagaagcatgaggatattgaagtaattattatagatgataattcagatgaaaatatttctctcgaaacaaaaaaaatagttgacagtttttcatatcatccagcagtcaaatattataaaaatgaaagtaatattggcggctctctatctagaaatgcgggtatttcaaaatcagaaggtgactttattgcattccttgatgatgacgattattttttggaggataaaatcagccgacaattaaagtttttagttgatggtggatatgatgtaacgttatctgacatgtttgttgaagatgaaaatggtaagcggcttgagaaaatacattctgcgcaatgtgctggaataggggattttattgtaagaggtgtggcattaactccaatgataatagctcgaagggattgtgtattagatgtagggatgtttgatgataccccaagattccaagatcatatttttatgctaaagttattaaagcatcaagctagagttggagttttgaatgaacctttggcagtacattatgaacattcgggacatcgtataacaaattcggataaaagcttcagcggctatatgttacgaatgaaaatggaagaaactttattcccttttttatcaacgaatgaattgtcaagtgcgaaatttaagcacgccactttgaaatcaaaaattattacagatcaaaaaaacacctttgctggtgttatatatcttttaaaaaaaatacatttaattaggacctgttatgattttaatctttttttcagaaatcttgtgagaaatattttttttcgaaattataggttctaa

SEQ ID NO: 231329 - DNA, 2007 bp, Klebsiella pneumoniae
atgaaacaatttactgggctctggcccaatattgtcgaacgtgccgcagcccataacgggctgctcgaacggctcgtgaaggatgcacagccggtactacatgccgcattacgcattccgcagaccgggattgccagctggaatctctactacttttgcccgcaccacggcgtacgattaacgtggcgagcggacatgccccaccagcatgcctgcccggtcgataatgaaatttttcgcggcgaaccgtgggacagcgcgtggtggcgcgaaatgaacgggcgtaatgccagcgcatgccagcagctcggcctgctatggcaactgaccggtgagagagcctggcgcgataaagtacgcgccttactgatgggctacgcggatgtttatccgggctatgaagtccacggtgatattcccaacaacgggccgggtaaaatgaatgcccagaccctgtgcgaagccaactgcattctggacatggcgctgggttacgattttattagcgacagcctgacgcctggcgaacagcagcacatcagggaaaacttgttgcgctgtgcggccacgtttttgcggcagcatcgcacgccgcagatccataaccatgaagtcaaaatcaatgcggcgctggctgtacttggcttcatcctcgaagatgaggatctactggagtttgccgtttttcagccgtacggcttgcgctggcaactggaaaatggcctgctggcagaggggctatggtttgagggttcgattcactaccactactacgcgctgcagggctttttcgcctttgagaagctggcgcgcggcacccgctggagcctgctggatggcccctggtatcagccgatgctgaaattcccgctgtcgctgctgctgccggatggcacatacccgcggctgaatgactgtcttgccgggcaggaaaagctacagcaccgggatctgtacgagttcgcctggtttatctggcgcgatccgctgtatgccgccgtgctgcaattcaccgaaacggagcctgacgaggatgagacgttattgtggcgccaccatccgctgcctgagtcaccgctaacgccgatcccccagcagtcattttttgcaccgggcgcggggttgaccctgtggcgacgtccgaagcaacagctggcggtgctgattaaacacagtccctggggcggggaacacgaccactacgacagacaaagcctgatgctatggcagcgcgacggctggttgttgccggatcctggcaccaccggctacggggcggaaatgcattatgactattataaaaacagcgccacgcataatacgctgtcagttaaccagagcaatcaaccccctgccatcccgacggtgctgggctggcatatggctgacgacgttttctggctggattgtgagaccgactggggtaaaccgccgcctgcgctcgacagtcatagtcgagtcgaatgggacctggagtcctggcgtgacgtacgctttcgccgccgcctgttgtggcttgaagaggttttgatcgatctctcaacggtggaaaacccgcatcgccagcagctcgactggacgctgcatctggctgccgaggcgctggatcagaacggtacaccgcagcctttttcgctcagcggaccgctgcggcatatgaagaaggcaacgatgacgtcgctgaatggctgtcagccgcgccactttgtgcgggacggcagcactatcgcgctttggctggcgggcgacggcgagctttggcaagggcaggcccctgataacccggcaataaccgaccttagctatctggttatccgcaatcatcttccacaggcgcgttttgtcggtctgtgggatctggccaacggtaacccgcttaccgaagctcatgtggatcccacgccaaagggaacccgagtgaccttctggcgcagtcatcacatgacgcaggtgatgctatatgacgaacccggacgggcccctgatgtgatcctgcagaggaggtaa

SEQ ID NO: 231330 - DNA, 1239 bp, Klebsiella pneumoniae
atgaacgcaatacctcgccgaggttggttatgcgttgcgctattttgttccagccttagcgcttctctgcatgccgccgagccgtacacgctggacgaaaaggatttagcctttagccgccagcagattgccgccaaagatccgttgtttgttctggcgcaggcggccttgctaaaaaaagccgatctggcgctcacgcatccgctgcgctcagtgatggacaaaacgcttgttgccgccagcggcaacaagcacgactactatagtttccccccttactggtggccgaatcccgataccaaagacgggctgccgtatatccgcaaagatgggcaaaccaacccggacgccaatagcgatgccaccgataaaaaccgcctggtgaagatgagtcaggatgtatcaaccctggcgctggcatggtacttctcccacgacgctcgctacgctcaaaaagcggcagcccagttgaagacctggtttctcgacccacagacgcgtatgaaccccaatctgcaatacgcccaagccattcccggcattaacaacgggcgcggtatcggcattattgatagccgggcgctggttgaggtggtggatgctatcgccctgctgcaatcctctgcggtgcttagcgagaaggacgtgagtgcgttgaagcagtggtttggcgagtattatcactggatgaccaccagccagaacggtttcgaagaagataactggcacaacaaccacggcagctattttgacatgcaggccgtcaccttcgccctgtttagcggcaaaaccgacgaggcgaaacagcgcctgtatctcacccagctacggcgcattgccggtcaatttgatatcgaaggccgtcagatggccgagctggagcgtacgcggccctggcactacagtaatttcaaccttgaagcctacaaccgcctcgggcgactgggcgagaaagcgggcgtcgatatctggaacttcacccttgatgaccatagtctgcgcaaaggctatcagtacatcgccggatttattaacagcgataccccatggccatggaaagacatcgataacatggatgaccaaaaagcactgcgcaatatcgccactgccgcccacgcctggccggaagatccgctgttccgtaacaaagcgcagtggctacgggcgaaataccccgacgatatcaccactcttatcgccccgcttttaccatcctcagaggtcagggaaaaccgctaa

SEQ ID NO: 231331 - DNA, 228 bp, Klebsiella pneumoniae
atgaaagttacaccgaaaaaatatacattaaaatcaattaattataaatttaccatttttattgaaacaatcaaaaaatatagaaaaacgctgaattccgtgatgtgcataacattaaaaaggtcattatcaatcgatagcgataaatttgatgtgcgtcacacaaaaaataactttgtcttttacactgctcgccactgtatattcaaatatattctttttaattaa

SEQ ID NO: 231332 - DNA, 1290 bp, Klebsiella pneumoniae
atgtctgcgaataaattccgctcattattactactcaccgcgcttggactcggcgtgagccaaagctatgccgccacgaccctcaacgtctggatccgcgccagcaacgactcgaaaaatatatacaagcaagaggcggagaaatttgaagcaaaaaccggtatcaaaattgagtacttcaacgccactactgactttgaacagcgcctggcgcgcgccacggcgggtaacgctttgcccgatctgatttttaacgacgcggcttcgctggggcagtttatccagttgggtattgctgaggaaatagatccgcagtcgatctccggcggcgaccagctcttcccaaccgcatggaagagtacccgctatatcgacggtaagtactacggtgtgccgacctccgcccaaaccttcgccctgtttatacgcaaagactggcgggaaaagctggggctgccacagcctaaaagctgggaagatattcagaccctggcgaaagcctttaccacccaggatcctgacggcaacggtaaaaacgatacctacggctttatcgtccccgcctccacgacgcgcggctacgccagctggtttatgagcagctttatctggcaggcgggaggggatttcgtcaaagaagagggcggcaaattccgcgcggcgctcaatacgccagaagtggttcaggcgatgacctttatacgcaccatgatgtgcgaaaaagtcacccagccgggggcgatcaatgccaccaccgccgacgtcatcccgtctttccgctccgggcaaagcggcatgttctttagcggcccgtaccatatcgcgctgtttgataaagacccgggtaaagacaattttgaagtggttccggtagcagggccaaaaggtgaggccacgctcgcggagggcaccacggtctttatgatgaagagcagcaaacaaaaagacgccgcgcgtaaatttatcgaatttatgatctcggcggaaggtcaggaaatcggcatgggtaaaggcagccagcatattccggtggtgcgcctgccggtgaataagaacgtcgacgtcaaagccgtctatcaggacgcccgctgggagactttcgccaggctttacaatcaacagggacgctatgtgccgcaaattcccaactggacgccggtgcgtcaggtggccgccgagggctttaaccgtatttttgccgactgcaacagcccgatcgccggcgagctggagagtatcgacggcaaggtgaacgctgagctgaaaaaacaaaatgtgctggctaactga

SEQ ID NO: 231333 - DNA, 942 bp, Klebsiella pneumoniae
atgacgctgcatgagacgaagtcctctccgatgaagcaggccgcgtcgcctgactcgatcggatggctgagcgcaaagcgtaagcgggcgctgatcccgtggttgtttttagcgcctgcgttaattatttttagctggtttaagttcatcccgatgattcagggtctggtgatgagcttttacaaggtcaactttaatcagccgaacgaatgggtaggactcgataactttacccgtgcgtttgccgacgtcgagctgcacgcggcggtggtgaatacgctgctgtatgtggtagtcacgatgttcgctgcggctatcctggcgttcttcctcgcgatgctgctggaaggcccggcgcgccacctgcgttttattcgcaccgccatctttttacccgccgtcaccagcgcggcgatcgtcgccgaaatgtggcgtattttattcaacccgacgcccaacggcgtggttaaccacattctcagctggtttggcgtcgccgaccagggctttcttgccagttccgaccaggcgctgtgggtcatcatgctgctgcacatctggaaagcggtgccttacaacatggtgatctttattgccggtctggcggggatcagccgcgatttatacgatgcggcgaacgtcgacggcgctaactggtggaaccgtctgcgctacgtcacgctgcccggcatgatcccggcgctctcggtggtgctgatgctctcctttatccgcggtttccgcgtgtttgccgaggtgtacgccaccaccggcggcgggccatctaacgcgacggaaatggtcatgacccatatctacaaactggggtttgagcagtttgactatggctacgcgtcggcggtgtcgtttctgctgttcgccttcacggttttcttaaccatctgtcatctgacgctgaaaaaacgtattgcacgttactaa

SEQ ID NO: 231334 - DNA, 840 bp, Klebsiella pneumoniae
atgttaagtcaacgttgggataccgcagggcgctggtgcatctacgcgctgctgctgatcgtttttgtcggaccgttctggggcatcgtcgccacggcattcagcggtgcgccggtgaaaccgggtgagctgctggcctggccgaatcagttctcgtttgaaaatttcatcttcgcctggcgggatatcggtgtctggcagtatctgttgaactccatcctggtggtgttcttcggcaccgttttgcaggtgtcggtcagcgcgctggcggcgtatgccctggcccgtaagaagtttcgcggcgtggcgctggtcagtctggttattttgtcgaccatgatgctgccggaagaggtgattgcgatcccgctgtacatgatcatcaactggcggctgccgctgatcgatgcctcactctacaacagctatctcgggatgatactgccggtcgttggctgggcgttttccatctttgtgctcacggaatttatgtcggcgatcccgaaagagctggaagaggcggcgcgcattgatggcgccaacgaatggcagattttctttcacgtgatcctgccgctggtgaaaccggcgcttggcacggtagtcaccttcggcttcattatgatttgggaccagtacctgctgccgctgattgtggtcaaccacgacagcctgaacaccattccggtgatcctcggcacgctgcgtaccgacgagagcatcacgccaaacatttttatcgccattacgctgctggcgatgctgcccagcatcatcgtctatctcggtctgcaaaaacatttcaatcgcgggattatgtccggcgcggtcaaaggataa

SEQ ID NO: 231335 - DNA, 1095 bp, Klebsiella pneumoniae
atgggatctgttgtactgaatagcgtacgtaaatcgtatggtgatgcgcacgtgataaaggatgtgtcgctgaccattccggacggcgagttctgcgtgcttgtcgggcccagcggctgcggcaagtcgacgctgctgcgcatgattgccggcctggaggagatttccggcggggaagtacatatcaatgaacgcaatgttaccgacgtcgagccgaagctgcgcgacattgccatggtgttccagagctacgccctctatccgcagatgacggtgcgggaaaatatgggctttgcgctcaagatggctaagttgccgaaagcggagattaaccagaaggtgaatgaagccgctgcgctgctggggctggatcccctgctggagcgcttaccaaaggatctctccggcggccagcggcagcgcgtggcgatgggacgtgccatcgtgcgtaaaccgcaggtgtttttgtttgatgaaccgctatccaacctcgacgccaagctgcgcacccaggtgcggggagagatccgcgaactgcatcgccggctgaaaaccacctcggtatacgtcacccacgatcagatcgaagccatgaccatggggcagatgattgtggtcctgcgcgatgggcgcatcgagcaggcgggtaccccactggagctgtacgaccagccggcgaacctgttcgttgccgggtttattggttcgccggagattaaccagctgcccggcgaggtcgtattgaacggagacgcgaccagtctgcggctgaaagatggttcgcttctggcattacctgcggggttagcggtcaccaatggtcaacaggtggtgtatgccattcgccctgagcaggtcaacgtggtgcatgaggcccacgatgatgcgctggcggcgaaggtcacggcggtagagaacaccggttcggatatgcagttgttctgcgataccggcggcggggcgtttacttcggtatttaaacagcgactggcggtgaaagagggcgacagcatctggctgcagccgaagctttctggtgtgcatctgttcgatgcgcaaagcggtcaacgtatagcctgccgggagggcgtctga

SEQ ID NO: 231336 - DNA, 1149 bp, Klebsiella pneumoniae
gtggcgatgaagctgtacacccttgacgaaagctgtctggaaaacgcgcgtgcgggattaaaacagccgttctcgccgctgcagctggcgctgagcaagctggtttcgcaggccgatattctgcgtcgtgaagcgccggaaagcgttgtgcataaaaaactgcggccggcgagcggcgacgcgcacgattactacagcctggggacctactggtggccgaaccctcggcgtcccaacgggctgccgtatattcgccgcgacggacatatcaatccgcagtgtgaaaataacgataccgacacctcgcgcattatccgcatgtgcgaacgctgcctgaccctggggctggcgtggtacttcactggtcagcgccactatgcccaggcggcggccgcgcagatccgctgttggttcctggatccagagacgcgaatgaacccgcatctgaactatggtcaggcaatcccggggattgtctccggtcgcggcaccgggctgatagatacccgattaatgtggatggtggtcgataccatcggcttgattagcccggcgaacgtgctggataccgacgatattatcggcctgcaccagtggttccgggattttaaccactggatgtactacagcgaaatcggccattcagagtatgtctggcacaacaaccacggcacctggtacgacgcccagcggacggttaacgcgctattctacggcgataaaggactggcggcgcggatcattgcgcaggggatcacccagcgaatggcggcgcagattgaccaggatggcaagcagaccatggagcttgagcgcaccattcctttccattactcgctgtttaatctggaggcgcatctgctgctgaatcgctatgccgagcatgtcgaattcgatcgctggaacaccatccgcgacgggcgaggagtgaagcaggggatagattacctggtgccgtttatccgtgaacccgatctctggccgtacagtgacctgcagggcattgtgtgggatagtgcgctgcgggtgctgctgcagtcagcccgtggttatgcaaaacaatccgccagctatcgcgatgtgctgaaatgcctgccgcaggagacgctgcagttgaaggaacagctgatgtggtgtccgggtttgtag

SEQ ID NO: 231337 - DNA, 312 bp, Klebsiella pneumoniae
atggagacgggaaaaaacggggggataagcgcggcctccccggcgtcatcccccggtcgcgctgcgcttaccgtggctagcaaccggataccagaccgtaacccggataaagcgctggcgaactccgccgccaacgtgcggatgacggcgcgtaacgtagccgcagtgttgccgatgggcgacaagctgtcattgaactctcccccggtcgcgctgcgcttaccggggctagcaaccggataccagaccgtagcccggataaggcgctacgcgccgctatccggggaggctgggaaattgtcagccggatga

SEQ ID NO: 231338 - DNA, 3978 bp, Klebsiella pneumoniae
atgaaaaagacggtggctcaaccccagttgcccaattccgttcaacctgaaaaaaatgatgaacaaaacagtaaaaagtcagcagtcggaggaagcgcggctgaaaggggattagattaccaggctcgtgttgcagctattgctatgacgtctctccttctggaacagaaagtcagctggattgaggatgttttcaatggtgtaccggttttgattgatgctgagacgggggggcccggtgatgatatttcattaaaaacgaacacgggaaaatcggtggaggttcaggtcaagcgaggcctgaagcgtggcagtgatttatgggatgcactttgcgcgctggcaacaggcattaacgacaagagcattgcttgtggaattttggttgtttgccccaacagcagtacgaccatccgctcgaatctggctgataatattgttcgtattgggaccgggagaattgatggcctccacgaaataggtgatgatttcatcaagaacgttggccttgaattcccggagttatcccgggtgtgtcgttcccttcgaattgtcacggtagatgctgtagacggaaatgatagtgctgaggtcaatgccattagcctgctggggcgtttattcaatgaaccacgtcgagcgtggtcagttctggttgaacgcgcgcgaaaactcatcagaataagaggtcgcgcaacagtaacctcgttgcttcatgacttcagaaacgttggtatcggcatcaaaatggataccacagaaagcggtattcaactaagagcagccgtttgtgattggcttgagaaaagttattctcagtttacaatcccggggcaggcaaaaccggtttcactacagaaatgttggatcccactcaaagcctctgtcattaaagatctagagcagtttcctgatgacttatccaaagcgcttaacagctatcaccaatattcagcaaagcgcaggagtgacatcaacaagtttgatgctcatacccttggcagatatgttaccaggggcattatcattggtgggccagggattggaaaatcattactgcttcgccgcatagcattaacatatgcagctgaaggccatttggtattgctggcacgactgcgtcaggttgtctcgcttatcaatcataaaggcatccgttttgaagaggcccttatcgatgtagcgcttagcagctctggattgaaatacaaatcacctgacctgcaggatgcagtcattttatgtgatggcctcgatgaatgtggggtcagccaaaacctcgttactgatgccattcacaaatttgcagttgcccatcctgacgcgagggtattactcaccagtcggcctgtaggctaccgaccaggtcagctgggaaactggaaacattatgagcttcttcctctggaggagtctcaggctgacgacgcactaatacaagtgatggaagccttacctttcgaaagcccggaggttcgacggcacactttcgatgtcgcaaaagagcaactgaaatccttgcatctcaagggtgttgcatcgagaagtccattgattttaaccatgctcgcatccttatcttccagaggtattgagccagaaagctctcgaatttctctttatcgacagttattcagattgctggaaacggcatacccctctgtacgttctgaagtgattggaccaagtgaaccagagcgaaagtggttcatctctttgttaggctggatactgtttgagcacggtactgaaccctttgaagaaacattccgacactgtgtatctgaatggcaaaaagaaatgccaggcagctatcttgcttgcagtaataaggttaaggcatgttttgatttctgggaaagcgtaggcgtcatcgagcgcatacacacgcttaatcaagaagcagtaaccttcattcataaaacctttgcagagtatagcgccgctgtctttatcgaacagcaaccgcaaaacctaaaacgaaacttgctcattaacgtgattcaaagagatgccagtagcgaactgctctcttttgcaagccaccttgggctgatagaagacattctggatgcttggcgcgaattaatgctccagggaaaaacgacatcaacgaaagagctggtaaaggttctggacttgattattgaagcaggaaggcctgttacggatgactcattatgcatctttgccgactgctgctggaatgccttatcgtcatcctcaagcatgtattcggcaggagacgccctttgccaggtgtcaacgtatagctgggatgttgtaagggaaaaggtgagagcgaaccttcattctcatgatggctggctttggctggtttcctgggcatgtattctctctggtagcccctcagaggttagctaccaggatgcaataattgcattgaatagtattaagtcaaagtggccaaagcagctaagggaaaaacattctctgtttgatttcataggcgggaggaaagtgcaggattgtatcattcttggcgctgcaaaaattatcctccaaaaccctgaggaggtcgggcttagtacacttgacgccatcgtagataaaggacgaggggtgtccgccagctgttttgttgggttaatggaatgctatgcaaaagcaggtattgagttaccggatgaagtcactcgctatccgggaagagagaaagatttttatagcgtttacgctgaaattgatgtgaattgcatcggtctcctctctgtgctggctggaaacgataaccatcaggttttggatgagattttacctgaacacatgcttgagctcggcgcgtttttgaatataagtcgctttcatcacctcagcctggaagacctgctacatcttgaaacaacggataaagatattgatagaagcaagtttttgtaccagatagctaaagcttcaggccttgaaccagataaactcagacagcaggctgccagtttaaaaaggcagtgcgagggaaaaacgcttgtactggtttcagcctttggcaggcttcctgctgtcgatgcagacatgtctccagaaagggtcgatatcgatccagacgatttcgatgatttaatttcaacaattctgcacgccagtcagttctacagtgttttagccgccactgttctttatcagcacaaaacacatccaaaagtcatagacggaattaaacgcatccttatgcaaggagagggaacagctttgtttataggtacccggtttattacggatatgccggaccaggattggcagcaattactcctgcaacgactggaaacctctatgcctgagcagggtgcttcacacttgtttgaggcccttaccgaacctttcaattcacgacatgaaagtattgcaaaactggggttacggagtgaaatgctggatgtagcacttccggcggcctcatttgcagccaggcttccccagtctgatgaattatctcaggatattcgtctcatatatgaagactggaagctgcgggagaaaccctatccagagaatggtggtgttatcccggacagccctcgtgatgccttgtctggtattttggtcaaggataagggcgacgctaatctggcacttattcttgagatggtgcaggaaaaacgaacaaaaattcgtgggaatggtgagaaggcactcaagaatatgctcgatggatctgccgaattacagagaaacatttccaaatggatcagggatggcgtttgcaaacccacgctgttacgacagattattactgaagttaccttgcacccagaagctgttatgacgcttatacctttcctcaaagatgagtcatccggtattcgatatgctgctacagcacttcttaacacgcggttcatgacactcgagcaaatcgaattgcttgcccgcgatctttcaaatgacactgaaattgagattagagaaatcgcatctgcaacactctcttcacttatgcccggaaagggggtgatgtaa

SEQ ID NO: 231339 - DNA, 1080 bp, Klebsiella pneumoniae
atggataatattgacgatatcataaaggacgctattcaaaaggccaccacggagcggggcaatatttcgatactgattgctggccgttctggggtagggaagagcacattaatcaacgcggtattccagcagaaaatggccgaaacgggccagggaaaaccagtgactcaaaatacgcgtgagattacgaaagagggtgtaccactcactatttttgatacccgtggtctggaaatgtctcagttcaaggagactcatgctgatcttgaaaaactgataacagaacgctcgtctgacagagattcaaatcgccatattcatgtcgcatggctttgcatacaagaagacgggcgtagggtcgagcaggcagagattgatttacacactatgctggctcgtcatatgccggtgatttgtgtggtcaccaaggcgagaagtgacaatggtttcaaaaacgaagttcagcgcttgcttcctgaatccaaaaatgtaattcgagtccgtgcgattcaggaagagatggatgatggttacgtcctaaaatcaatgggattagaaagcctgatagaactgacatcagaggttatccctgagggaaagcgtagagcgttggctgcagcgcaaagggccaatattaactataggaagacacagtcgcataaaattgtagcggcttccgcgacggccgcagccgcagcgggcgcgagtccgatccctttttctgacgctgtcatccttgcacctattcaggttggtatgattgcgggtattacatccgtatttggccttgagctatcaaagggaacccttaccacgctggtggcatcggcgatcggcgtcgggggcgcgacgtttttaggccgcaccgttgttgttaatattctgaagtttttcccgggagtcggaacggttgctggtggggcaatatcagcagccactgccagcgcaatcaccgttggtctgggggaggcttacatcaccgtgctggctgaaatttttactcaagatcctgatgcagagccaactgcaacggaaattggcgaaaagcttaaagaaaaaatgataaagatgggctcatga

SEQ ID NO: 231340 - DNA, 561 bp, Klebsiella pneumoniae
atggctggcgttagcaaaatacatctgacagaaacggacatcatcacaaaattcattctgcctgcaatcaaagaggcgggttgggatgtaatgacgcagatacgccaggaggtaaaactccgcgatggcaaagtggttgtacgcggcaaactggcggcacgcctgacagtgaagtcagccgatattgtgctttaccacaaaccagggttaccgcttgctgttattgaagcaaaagccaataagcatgagattggcaaagggatgcagcaagggctggattacgcgcgtttgcttgatgtgccgtttgtttttgcctccaacggtgatggctttatcttccatgataaaactaatcctgtgcagcttgaatctgagattaagctagaagatttccctggtcctgaacaactttgggataaatactgttcctggaaaggttttactaccgaacaaatgccagtcatcagccaggattactatgatgataactcaggaaagtcccctcgctactatcagttacaggcaatcaataaaacgatagaagccgtatctgccgggtaa

SEQ ID NO: 231341 - DNA, 297 bp, Klebsiella pneumoniae
atggaagatttctacatttcagcaatcaaaatggacagcaacaatcagcatattgagttcgtaaaaattcatgagaacctaggtaagaagatcggacctggcactgttaattcgcgtgcattcgttggtgaactgatcagaaaagggaaagcagaattcaaaacaattacttacaacaaagaaaaaaaatcatggtctgtaggggcaaaggttgaagttatgactgatgatttcattactaccgatccaaacaagactaaacatgacaatcttggcaaccttcctacatttatctaa

SEQ ID NO: 231342 - DNA, 225 bp, Klebsiella pneumoniae
atgtatgcggcagaaagtgaagtggtttatcagtttcgttacagaggggagagttattcagtacctgaagatgatttgttctgttgctatccgtcattgtcgggcgatggcagttactttttcacgttaaaggatgggacgtttttacggggagagcaggtgaaagagacgatacgaaaaaatgtatctcctcttgagcgttaccgtaagaaaaaagaacgatag

SEQ ID NO: 231343 - DNA, 726 bp, Klebsiella pneumoniae
atgcactcaaccccaactaacctcatgaccaccgccagcctgcctgtagatcgccctttctttgcttaccagcatgaatggaacagcggcgcacgcagcagaaaccgtgtgcttacaaaaatgcgtcaggctggcgctgatttctttttcgcctacgaagccctgaacgatgcactgcataccggacgcaaccagatttttcttggctgcaccccggcatccgccctgacagtcaaaacctatatgtcagcctttatagatcaggccgcaacctggacacaccttgggaaaataaaatcaggtaaagcgcatctggaactacctaacggtgcggtcatttattttatcgggccgaaaagtctcgccgccgcgctccatggaaacgtctatgtgtcagagtatgcctgggcggactccccgaaaaatatgattgcgctcgccaaaagcctgtcgatgcacgcgcgctatcacgctacctactacaccaccccaagccccaccccggaagcatggcgggaatataagaagctgattgcccgcaacagcacaaccagcatgatttttaccgctgatgacgctgcagcatccggggcaacgctcgcaaccggagccgcgctctttgatgatgaatggcttaatgacatgaaaaaagagttatcagcagaggactggaaaatgctgtttatgtgcgaatggccccagactgacaaggagcaggcggcatga

SEQ ID NO: 231344 - DNA, 597 bp, Klebsiella pneumoniae
atgcagagcgcagtgttagaacatggatttgctgtcgtggcaggagaggctacggtgtttaactatgacagtctgacaagggtttatttgtcacaaacaacggagtttattccggtgggtgtcagcattccggcaaatgcctgtacggacaagccactggcagcaaaaaaaggttatgttgtctgccggaacagtcaactgaccggatgggaatatctggcggatcatcgcggtgaaaccgtctggaatatcagaaccggggcggagcagcaaattaccgtgccgggcgattatcctgctgataccactatatacccgccatcgacaccatatgataagtggaacggtgagcgatgggtaacagatgaggcggcgaaagcagctgcagaaattgccgaagcaacagcaacaaaagcagcgcttatcaaaagcgccactgccaaaatcgaacccctgcaggatgcagttgaactggatatggcaacagacgaagaaaagagccgctatgatgcctggcgaaaataccgcgtattgctgatgcgggtggatacatcgctggcacctgatattaactggcctgagccgcccaaagattaa

SEQ ID NO: 231345 - DNA, 882 bp, Klebsiella pneumoniae
atgcgtaacgtgacaatattcctgctgttcaccctggtttgtttaacctggggtaccacctggcttgccatgagagtcgccgtggaaaccatttctcccatattcgccacgggcatgcggtttatatttgcctccccgtttttaatttccattgcgctgcttaccaaaacccctttagtttttccagaaaagcaacgtatatttcagggtgtggtgtgtattttttattttgcgataccgttcactctgatgatttatggtgaaacgtacgtgagttcaggcctcgcctccgtaatattttcaaccatgccagtcgcggtactgatcgcatccattttctttctacacgaaaaaccaaagttattacaaatcttgggcctgcttatcgcgcttatctctttgtctggcattattcttcatgaggcaaagtcaaatgccggtagccagtggcagggaattgtggcgctggtagctgccgtgctcatccacgcggtgatctacacccagagtaagaaaagatgttgcaccgtttcagtgctcacttttaatgcccttccctgcttttttgccggtctcatccttaccgctgctggatattttctggaacatcctcaggtatccacattctcattgccctctgtgctgtccacgctgtatctgggagtgattggtggggttttcggcatcctgtgctactttttgctgcaaaaaaaatcaggcgctttccaggcctcactggtgtttttagtgtttccaatcattgccataagccttgaaaattatatttatggctatgcgatttccttgctttcgcaacttttaacgctgccgctcgccatagggatcttacttatccttgtgtctcagcgggttcgtcgctga

SEQ ID NO: 231346 - DNA, 1365 bp, Klebsiella pneumoniae
atgtctgaactcaataaagttgctataactaaacgtattgttcacatatcgactttagataagccagtcgagattaaatgttgcaataagtaccataatttttgttctaaatatcgtcttttccgaaatataggcagatctgaagtgagaataccacggtattatactaagttgctaaaatgggctttttatgtattaactatatatgggggggcaggagtatcaacgagttctgcggtgaacctgtcttccggttatcagataatccagacaccctcagttaccaacatttcttccagcgttatccctgagccaggtaattactctcgtaatccgccaaccggatgggcttggaatatccaggcatttatgaatgaaaatctttcatcaggactgctaggaagcatatatgcttcggccgcgagcagtcctgatcgttactgtaataacacattaccttatttaacgatcgatggttatacgggttatgaggtttcgccgggagttctgcttattccatatggatctattcgtaccccctttcgcttatctgcagctactcacagtggtacttctcaaatgtattatcaggcgttggttcccaatacgatggcgacgggcatagcaaatggttcatgggatcaaaagggaataatatccggagatgctgtatcttcagccgccagggggagttgtaagtcttttattaaagggaataatcctattaataataatgactggcaagcaattaactatgattatggcacagcgcaatttaatatgggctatggtgtttatgttagtccgacagcggctccttttcagaaaacggtttatatacatcaaacgtattttggtttgctgactaatggaatgaatagcgctgtaaccagaagttttgacctgaacctcccttctgttaattgtactttgaatgttccggcagtagtcgattttggaagtgttacgtcagatgccgaaactgctgcaaaaggcatcagtcaacaatccacttttgctgttaactgcagcagcacaggaggcttgccagtatcaacgactgttggatactcattcacacctaaaagtcaaaaaggggataaaacgagtatacctttaatagccaaatctggcggtgcggctgttggaagcgtacgtggcttcctgggagagaatgcaggctccgaagcaggttgcgtcaacaaaaacacttctattttgatggatggaacacctaaacctctgcggaccattaccaataattcttcttggtccgagccgttattctgggtgctttgtccgaaatccgatgcaaatccgggtttagcatcagctactgcaacacttgagctttactggcaataa

SEQ ID NO: 231347 - DNA, 1395 bp, Klebsiella pneumoniae
atgaaaatgctttatgtcctggcctcaggcagcagcgcagcaagagagatcgatatgaataaaatgaaaagtgttatctgttttctggcactgggtgctatcagcccgcacgcctgggctacgccaaataatgatgacattaaagcgatgctttcccaggcaaagagcggggacgcctctgcccaaacccaacttggcattctttatgctgaaggcagtggtgtcacccgtgattataaaaaagcgcggtcgtggttcgaacaggccggtaaacaaaattatgccgatgcggaatataatctcggcgtgatgtacggcaatggggatggtgtggcgcgtgatagtaaaaaagcgcttacctggtttgaaaaagcggcagagcatggccatatcggcgcccgttataatctgggcatgatctacggccagggaattgggactgccaaagacctggttcgtgcggctttctggtttgagcttgccgggcaagatggttcgcctgaagacaaatacacgcttggcgtgatgtacagcaagggtgaaccgctggagaagaatgatgtaaaagcccggcaatggtttgaacgcgcagccaatgaggggcatgtgcttgcccaatataatttagcggtcatgtacagcgaaggactagggggcgatcgcgatctggagaagtctcgttactgggcggataaagccgccgggcagggtgatccagaggccgccagattgctcagcgtattgaatgaacgaggcaaacagagtcccttcgagatactgatggtggcgagcagtaaccctgctgccgcgccgcatattgtgccaccggttcggctcggatctcacaatgaggatgaacaaactgatactaaatcgggtgacatgccggatgagacgccggttgttgctgttatgagtgagcaaagagggatttcagtggaggataaagctggcaaggatcacgtcagtgttgcgacagatgtaacgtctgaaactgcagtagcaacggaggaagatgttaaaccaacgccggagacagttgaacccgaagctaacgtaaaaagcgtcatcgatacggacgtggcgagtgaagtagcatcaccggacgcactgataatcaacggcacgaagaggattgaagctgacacgctttatagcgaacaggctacgacagcgtcaccgtcatcggatattgaggctgcagatatgaccactaagaatgagattttgacaaccccaacatctcagagcaacgaaagacccagaactgaggatattaatgaaagtgctcagacagaggaagataccgcaccggttgagcatgatgtgactataaagatgcacgagccagccgtaaaagaagaaagctttgtgaagcagacgaataaacagtag

SEQ ID NO: 231348 - DNA, 756 bp, Klebsiella pneumoniae
atgcgtttacctctgacgtcagccgtattgattgctgcattgtcctgtacgccatcctgctttgctgtggcaccggagtcgtccggtatttcgctgagtcagttccggattatctatccgggcgcggacaccaaaggcgttacctggtcgctgacgaataacaccgaccgtgcctggctgatccagtcctggatacgtccggtggactttactaccggcctgccgatgcctgaaacagagagtagtgcttccagcgccaaaatcccttttctggtgacaccgccgttaaagcgagtggacgctggggaagggatgacattgcgtattcgcctcacggaattgtccctgccgaaagatcgtgaatccgtgttttacctgtcggtaaaagcaatcccggcggtaaccgatagcgacagcgctagtaacgggaagctggtggtggccgtagtgaacaatatcaagctgttttatcgccctgaagggttacctgcggggggagtaaagaaagccgccgcgcagctgcgattcagccgccagggagagagcctggtggtcgataacccgacgccattttacatcaatttcagccaggtcacggtgggaggcaagccgatctcagcggatggcttgcgcaagctggttcctccttatggtcaacaacgttatgaccttgtcaagggtatgagcgggccggtggagtggcaggtgctggatgaggaacaccgtcccacaccgcttcagcaccaggctctgtaa

SEQ ID NO: 231349 - DNA, 744 bp, Klebsiella pneumoniae
gtgcatcaacttttccgtctcttgcagcgcactcttctggtgagtggattattgatagctgctgttcagcacgtatatgccgctgatggtgggatcagtcttagccgtacgcgcattatttttacctctgcggataaagcacaaacgctgtctatgaaaaataatgggccgcgcccttatctggttcagtcagcgattatcaccgcaccggatagccgtgagcttgcgccgtttattagtacaccaccgctgttccggcttgaagccgacagccagagcgcaattcgtattttacgccgtggtgatgcggcattaccggccgatcgtgaatccgttttctattttaccgctattgctgtaccggcgaccgataaaccgaatcagggacatgacgcaacaatgtctgcgcgtctttcagtcggcatacaaaatactatcaagctattttatcgccctgtcggactggctatgactgcggaagaagcgggcggcaaattaacctttcagcagcagaacggaaaaattcaggtaaataaccccactccctattacctgacgttttcgcgactggcttttgatggcacggatgtgaatgtgcgtgaaggcgtatcaatgattgcgcctttttcgcaggcgacatatccggcgaagggaatggtacgccaggctcagtggtccgtcattaatgattacggcggtagcagcaagttgtatcagtctgctgtgcagggaggcagaaattaa

SEQ ID NO: 231350 - DNA, 555 bp, Klebsiella pneumoniae
atgaaaaaatattatggatttttaaagcatggtgttgtctcgagagtggcactttgcctgggtctgttgacattcgcgaccagcgccagggccgtggatattacctttaccgccacatttcaggcaccgacctgtgaagtttcagcccctgctactctggattttggatcggtagtttcctccgagattaaacaaggtctaagccaggaattatcgctggacgtcacgctttcacaatgttccggctttattgggacgactcaaaaacccggaattaaagtgaccggcgcgggttctgctgtgtcgggtgactttctgtttcgctcagcgacatctcagtcggtgaattatggcgttcttattaagaatgcatcaaaagcggtggtacaaaataacacttttttaccggcctctctgacgtcgacaaattttgatggtggcagcgacacgatcccactcaccgccacgctctcctgtggcactaaatgtaatgacgcaaccaccaggcctggttccctgaatgccagcgttacctttacttttgcttatcagtaa

SEQ ID NO: 231351 - DNA, 543 bp, Klebsiella pneumoniae
atggggtcattaaataaaagatacataccaggccttgcactcttatgtatcgctctggctgtgaatccagcccgggcggcaactacagagatcacggccgatattatcgacggaatttgtcatatctctttcagtactaccgaaattgtttttgcgacaaaaggctcccagcaatttgcgactggaacggcagaggtgcaaccacttgacgtgaatttgagttgctcgggtatgagcggcttagcgcccacgttcaaagtgagcggcgattcgtcaggcgttagcgaccaacggctttttaggtcggccagttcaacggctaattatgcaggctttatgttgaagcagggaaccgtcaccgatctgggcgatttctataacgcgcctaatacggtcgcccccggcgatgtgattgctatcgataaagatgatggtgattctgttcagcattttaccgtagggctggttcatggggcaggggatccgccgattggtaacgggacggttaacgccaaaatcaatttcgcctttgtctttccgtaa

SEQ ID NO: 231352 - DNA, 717 bp, Klebsiella pneumoniae
atgaaattatatcaaaaactaggcatgctttttaccttgggtatcttatgtgttcagcccgtgctggcagggataagcattggtacctcacggattatctttcatgagaaaaacagtagtcagagtgtcgacattaataacagttcaaccagccaaacctatcttattaatgtcggcatttcggatacgctcaatgccaaaaccgccaatactgcgtttcttccaacgccggcgctttttcgtatcgagcctgattccaggaataccgttcggatcctgaaaaaggcgtataacctgccaagcgaccgcgagtccttgttttattttaacgttatggctattccgacaggtaaagttggcgaggctgatgcggggaattctcttggcggtacccttcaggttgcaacgggtaacaccgtcaagcttttttatcgtccggataatttgcctatgacgcagaaggaagctatgggcaaattagaatttacacgtgctggcaattcagtaaaagtttttaacccgactccctattacatatcgctgaggaatctcgtggttaacggtcgttctgtcaaactcgatgtaattaaagggacgagcatgattgcccctttctctgcgaatacgtatccggtagctgcagggcagggaattacaaaatggactgcgattaatgattttggtgcaggagaaacatttaatggggtcattaaataa

SEQ ID NO: 231353 - DNA, 510 bp, Klebsiella pneumoniae
atgaaaaaaattatcaccctcgcacctgttgcattaatcctgggactggctagcaatgtacaagctgccactcaaggtgatgtaatgctgcgcggtaccattgttgatactacctgtgaaatcactgttaacaacggtgcggcagagctgaatgtgggttcttttggtaaaaccgcatttaacactgctaaaaagcaggttggtcaggagccgctgcaggtttctctgactcagtgtgatgctgatgaacagggcggcctgcaggtaaccggtattgttggtgctgacagcgaaattttcatgagcaataccggcgaatctgctggctttatgctgactgcggaagatggtacgacgcagattaaaaacaacgaggctgtaccggttacggctgatgcagatggtaacctgacttataccttcaatgcaggtatgaccgtaatggatatcgctgatattgttccgggcgaatataacgcgccgatcaagatttcttacgttactaactaa

SEQ ID NO: 231354 - DNA, 675 bp, Klebsiella pneumoniae
atgccagatttaaatgatggaactctaaccgaagagagaaatatcagcgtggtcctgattaatcgttatcctctcgaatctatagccataaaatccattctggagaaaaaaggagtggccgttactggcgagacgataagcggtattgatgctcttagccttgttgaccaattgaggccaaatgcgattattatcgatgtcgatctgccagatattgacgggattgaactggtagagacgttccgtaagcgtcagtataaaggaagcatcattgtgacctcgaataaatacgagtatttttattcccgatgtgctgccaatgctggaggcaatggttttgtgagtaaaaaaggatcgatgaatgtaattccttccgctgttctggctgcgcaggatggttattcttattttccgttttcgcaacataatgcttccggggaggaaacgtttgccaggaataagctacaagccttatccgagcaggaaactatagtattgcgatatttactcgtgggggatagtaattcacatatagccaccaaaatggatataagctcgaaaactgtttctacttataaaagtcgtctgatgaaaaagctaaattgtcaaacgctggtggaacttattgggtttgccaatacatttaaaattgataacgcctatatttatgaatag

SEQ ID NO: 231355 - DNA, 585 bp, Klebsiella pneumoniae
atggctatacatgacgccgggatgttcaacgtgaaagaaatcaaccgcctcaaaatccttcaggatgtcatcgatcgcaatctgcgtcctggccaagctgcggagatgctcggcattacaccacgtcattgcagccgactgctgaaacgctatcgtcaactcggaccgcttggcatgaacaaccagagtcgtggccgcactggtaaccgtctgttgccagcgtcactgacagatcaggctctcagtataatcagggagcaataccgtgattttggccccacgctggcgcgggaaaaactggaggaagttcacggtctggtccttggcaaagaaagcatccgacgtctcatgataaaagccggactctggatcccacgcagacagcgcgcacctaaaattcatcagcctcgttaccggcggccttgtactggcgagctgatacaaattgatggctgtgaccaccactggtttgaaaaccggggtcgaccctgtatcagtttgccagggccatgcgctccctcaatatcacaccgctgtgcgcagaaaccagtcaggcaaaaggccgtgtggaacgtgctcatctaa

SEQ ID NO: 231356 - DNA, 1353 bp, Klebsiella pneumoniae
atggacttctctgaatatcagacagaaataattgaagatatcaaatcatgtcttgaaggtttacaggtacagccaattctctttatgggtgcaggggtatctcaacgctacttgaaagctcctgattgggaaaacctgttaaagtatctcgctgaaacttgcccattaatcactcgcccgtatggttactacagtcaaacaagaaatgacaataaaccattgatagcaagtgatttttctgagtcatacgctgagtgggcttgggatgtggggacatctcgttatcctgaacagtatttcaatggaaaaagctctaaagatatttatatcaagcatgagattgcaacattgttgaataacctttcagactcggttgatttttcagcaatgaagtacactgaagaaattgaaaagttaaaaaaagtaaggccccatgccattattacaacaaactatgacgatctgcttgaaaagatatttgataactaccaaccgatagttggccataatgttgtgactgttaactatactacatacggtgaaatcatgaagattcacggcagtagtaaagaaccagaaagcatcattataacaaatgaagattatgttgagttttataagcgtaaaaagtatatcagtgcaaaacttttaacatatttcgtcgagcatccgttgttcttcattggctatagtattaatgatgagaatattaaagccatcctgtctgatattgatgagataattgcgccgaataacgctttgattccgaatatttatttggtttcctttagtccagaatgtgaaggtacaggttcacaccagaaagagattttgattggtgttggtgaaaataaaagcatccgaatcaaagtgatctatgccaatgatttcggttggatttatgatgccctatcgtcaaatacgccagaaatcagtgttaacccaaaattagtcagggcgctattagccagaacctatacatttgcctctcaatctcttgtaaaacaagagcttccatatgattttgaaatgcttaagaacattgctgagcaagataacgtgttagcgaaactttatggaattgcagagttaaataatgggcaagcacttaacgcaagctatccctacaccatatctgaacttgcaaaattacttgatatgggatcttggcattacgtccataaagtattagaaagaatacacaaggaaactggttttaatattaaatcctcagataataactatcatgtgctagtgaaaacggggaaggaaggtgttcataaatattcccccgctgcattcgagttaatcaaaaaaatcattaatggtcagaagtataaactcaaaccataa

SEQ ID NO: 231357 - DNA, 534 bp, Klebsiella pneumoniae
atgctcgcgctgctgctgctgaccgcatggctgagaccctgtgcggcgcaaagcaatgagctggtgatggcgacgacattttctcccagcgccaccgtgtggattatcgatcgctggcagaaagagccggggtcggtgatgataaggacgctcaaccgcaccagcgcctcgctggaacagttgcttgatacggcaaatgccgaaaatgtcgatctgatcctgacttcgtcgccgatgctgctgcagcatcttcaggagcatcaaaaactggcgccgttcagcggtgcgccggcagtcagccaacatctggtgccggaatccattcgctccacctccgtggccgtggcgatctccgggttcggtttgctgatgaatcgctcagcgctgatgacacggcatctgcctgcgccagcggactgggatgacctgaccgatccccgttatcaggggggcgctgctgatgagcagtccgtcgcgttcggataccaaccatctgatggtggagtcgctgctgcaacaaaaaggctggattaa

SEQ ID NO: 231358 - DNA, 198 bp, Klebsiella pneumoniae
atgaacgatcccgattttaatttgctggcggcctttgatggggtgcgggcggaggagagcgtggcgggcgccgcccggcgtctcggcctcagcacctcggcgatcagccgtacgctcacccggctgcggcatccgtcgccgcaggggatagtgcgttttccgctgccggtcagcactgaggtgattacggtgtcatag

SEQ ID NO: 231359 - DNA, 417 bp, Klebsiella pneumoniae
atgaacaaaagtgaccttgaggttttaactgaactaagattggacgaagcaaagtgcttgctttcaaatggtaagtttcatggtgcctattatctatgcggttatgctattgagtgcgcccttaaggcttgcattgcaaaatcatttcagttgcatgagtttcctaacaaaaggatcgtgaatgattcatattctcacgatcttggccagttactacgcatagctaacttgcatcaagctttaacttcagcctttcaggcagatcctgttctagaaattaattggtcagtggtgaaggattggagtgaacagttccgctacgatacatcgataagtaaagttatggcggaggagttgattgctgcggcggaagacaacaattcaggagttttgaaatgggtaaaaacgcactggtaa

SEQ ID NO: 231360 - DNA, 957 bp, Klebsiella pneumoniae
atgcgcatttttatcgatgatggttcaaccaatatcaaaatgctgtgggagcaagatggcgaaactttcacccatatcagccccaacagttttaaacgcggctggtctgccaccttcggttcggggaagccttttaactacacggtggatgatgaaaagtactcattcgacctgatcactcccgatgcgctcccaaccaataacattgactggcaatatagcccgttgaactccatcgctgtccatcatgcgctgctgaccagcggtcttgagccacaggatgttgaaattgtggtcaccctgccgctgaccgaattttatgatgaagatgcgcaatatcgcctcgacaatattgagcgcaagaaaaagagcctgctgcgcgaagttaaactgaataaaggcgtggtgttcaatatcactaaagttaccgtgcgcccggaatcgattccggcgggcattagcctgtgtgatgagctgaaaccgtcgcattcggtgctgattatcgaccttggcggcaccacgctggatatttcaatggtcgccgggcagatgacctcggtttcgcgcatttacggcgacccgaagctgggcgtatcgctggtgaccgacgccgttaagctggcgctggcccgggcgaataccgacacctccagctataacgtcgaccagataatcatcaaccgccacgacgaagaatacctgaccgacaacatcaacgatccggatgcggtttctgaggtgaagaaggtgatcaataacagtatcgaacgtctgaccacgcgtgtcctgacggccatcgatagctttaaaggctattcgcacgcgatcgtcattggcggcggcgcgccgctggttgccgacgccattcgtgaacggatgggtctgcgcgaggatcgtttcgtggtggctgaagagccgcagtttgccctggtgcgtggtctgaaaattattggttaa

SEQ ID NO: 231361 - DNA, 1404 bp, Klebsiella pneumoniae
atgacaacaaagctcagctacggatttggtgcctttggtaaagatttcgctatcggtatcgtctacatgtacctgatgtattactacaccgatattgttggcttatcggtcggggtggtcggcaccttgttcctggtggcaaggatcctcgatgcgatagccgatccgattatgggatggatcgttaactgtacgcgatcgcgatgggggaagttcaaaccgtggatcctgatcggcacgataaccaactcggtggtgctgtatatgctgttcagcgcccaccacttcagcggcggggcgctgctggcgtgggtgtggctaacctacctgctgtggggcttcacctacaccatcatggatgtgccgttctggtcgttggtgccgaccattaccctcgataaacgcgaacgcgagcagctggtgccttacccgcgctttttcgccagtctggcgggatttgtcacggccggcgtcacgctgccgttcgtcaacgccgtcggcggcgccgatcgcggtttcggttttcagatgttcactctggtgctgatcgccttcttcgtcgtttccaccctcgtcaccctgcgcaacgtgcatgaggtttactcctccgacagtggtgtgagcgaagactccagccacctctcactgcgccagatggtggcgctgatctataaaaacgatcagctggcctgcctgttaggcatggcgctggcctataacacggcggcgaacattatcgctggctttgcgatttactactttacctacgtgattggcagcgcggagatgttcccgtattacatgtcctacgccggggcggcgaatttgctgacgctgatcctgttcccacgactggtaaaagggctgtcgcggcgcattctgtgggcgggtgcttcgatcatgcccgtgctgggctgcggcgtgctgttgctgatggcgctgggcggcgtttacaacatcgcgctgatttcgctggccggggtgctgttgaatatcggcaccgcgctgttctgggtgctgcaggttattatggtggccgataccgtcgactatggcgaatatacgatgaatatccgctgcgaaagcatcgcctattccgttcaaacgctggtagtcaaagccggttcggcgtttgcggcctggtttatcgccatcgtgctgggtatcatcggttacgtgccgaatgttgtgcagtcgtcccacacgctgctggggatgcaggcgattatgattgcgctgccgacgctcttttttgctctgacgctgtttctctatttccgttattacaaactgaatggcgatatgctgcgacggattcagattcacctgctggataaatatcgccgggtaccggaaaatgacgtcgagccggaacggccgattgtggtacccaatcaggtgtaa

SEQ ID NO: 231362 - DNA, 1737 bp, Klebsiella pneumoniae
atgaaaaataatgacaaggctgaagttagcaaagatattttgggaaaactatccaataaggctgatgagctaattctgaatggtagttcccttgaattatcagaatttgtaaaagaattaaatgacagttctatgcattttgaaaataaactagatgaatctaaatttttatatatagtggggaattgttatcaggctctttataagaatagagaaatggaatggtattctgacgatctcagtaaggccgtgatagctttcagaaaatctttgaatattgcaaacaaattaaaacacccaaataaagaaatcctttattttaaaagttgcattgaaacaaaccttgcaaatttattaagtgctcaaggtcgagcattctgctgcattccattatgggataaagccatcagccaaaacaatcctattgcaatgatctgtaaggcacagaacgagctatatttagctaaggttttatatgaccctggtcatcaagaatatcattactttgtcgcttacaaacttatcgttcaggggttgaaatacaaaaattatttatatgaagatcagcaagttgcttttcatgaagatggtgatcttatgagcttcaaacattggtttgaaagtaattttactgaatcctctttttacgagttcgaacaacaaagttacgactttgactcaagaaagaagaagcattatcttgcatggtgtggaaaaaacaagctttttatcaatgatttaaatgacgtgctttgttctgaagttgcttatcaagatataattacgcttcctagcttcagttataaattgaatcaatctttgtccatacatgaaacgttaatgtatcatggtaattttgatgagttaaaaaacgatttttgttatgctcgttatctttactacacagcgttaaacattcctcaggatagaaaccatttttttaacgacacatatcctcatgttgaagacatgtcacactcattaaccaatttaaaagcaaatcattataaaagtgcatttagaactctgtattcgctatttgataaagtgtcttattttcttcataggtttttagagcttaatgatatcaaagatgataacaaaatatcttttgatgcaatatttagagatatttcaaaaaagaaagcttgggtacctcacccacgattaaaagagagtaaaaatcagttcattcatgccttattttatattttaaaggatatcagagatgttaaagatgcaacccctacaacccgttggcttgaccccgatgcaaagtcattttctgatataagaaactctattgagcatagatcattgaaaatcatcgatgattttggatatacattaatgcaatcagaaaaagagagcacctcagctcaattaaaaaagtacatagtcgaaaaggatcaatgtgaatcggaattaaaaaaattgcatcatgagaaaaagaacatcaaaaatgatagcaatttggatgatgtgataactcttgctgagaggaaatcagaattagaaattaagaagaaaaaacttgaatcattaatagatgagaaacatagaatgtccacacattctttgctcataacaattagtgagtttgaatctaggactttaacccttatgaaacttgcaagaaattcaatcatatatttatcattaacacttcacttagaagagcaaagtaaaccacaaacagacggactagttatgccaactgttgtaccgttaaagtaa

SEQ ID NO: 231363 - DNA, 678 bp, Klebsiella pneumoniae
atgaagaaagtagtgatatttttagccacattggcactagcaggatgtgtatcaaactcagaaagacaaaagcagcaagctgaaattgatagaaccacgccatactgttcatcccaaaaacaatgcgatgcggcttgggctgctgcaagacagtgggtgaatcagaattgtggaatgaaaatccagaactatagtagtgattatatagaaacatataattcccctgctaacagtgcagcaattgcatgccaagtaaccaaaaatcctttgcctacaggtgctagctcaataaacgtacgtatatcatgctcaaatatgtttggatgcgttcctgatgtatatcaggctgctattaatttcaataaatatattaatgattatattgagagatttgcaccagtcagaatgggctttatggcacgaatgtctgacaccaaggggaatgaggtacaaaacacgtcctattctgcaggaatgttaataaaaggtgttactcatgacggtcctgcttataaagcaggtttacgtgacgatgatattgtcacagcggtagggaatgatgcggtgcgaaaccagtacgacttgacctctgtgatggaaaaatatcactcaggggataacgtgaaagtcaccattttaagaaatggaaaggaattaattaaagaagtgcatctttaa

SEQ ID NO: 231364 - DNA, 312 bp, Klebsiella pneumoniae
atgaaaactcctttacgcctcgcccttgtcggcgattatcaccccgatattgttgcccatcaggccattcccctggcgatagacgatgccgccgccgtgctggagcagccggtgaaatatgactggctcgccaccccgtcgatcgcctccggcgaggcgctggcggagtacgatgccatctgggtcgttcccggcagcccgtatcgacacccggaaggcgcgtttaccgcgatccgctatgcccgggaaaacagcattcctttcctcggcacctgtgaagaacgaatatatttgatacttccgggaacatga

SEQ ID NO: 231365 - DNA, 636 bp, Klebsiella pneumoniae
atgaataaggcaaaagaaatagaagtttcttttactcaatatggaaaggaaagtattcgcgataggataaagagtctttttaagggaagaagtttaaggcgagtatctctcgattgggacctcccatactccacgctcaataattactttgctcgctcagcgaccccaagcgtggacgtgttagttaaaatttctgatattgagaatgtgagcttaaactggcttgcaacaggtcgcgaggacactctagccctagatgagtccgatagtacccaagactgtcgcatacgaacggatatggctagatatgcagaggataatgaaatcctcgctggggcaacagcaaccccgctgaaagatgacaagtttatgtcccttacatggtcgatgtttttcgaggcattgaaccatgaggaaaaattacatctaattgatatttacgccaaaattggagctaaaggcgttttggcattgcttagtaacgtcaatggttctagcaccgaattacttaacctttcaccagaggagcaaagacgcttaatgcacatgaatgagcaaatcaaaaaagggtcatctgagactggtgaagacgtaaccaagccaggcccgtcaagttccagcaagaaggccagttaa

SEQ ID NO: 231366 - DNA, 288 bp, Klebsiella pneumoniae
atgcaaaagcgccgtaagtggaccaagtccgaaattcagtttgtctgtgagaatgccgggaaaatgacggcagcggagatgggcgagaaacctaaccgcacccgtcaggccattcagtctcaggctaaccgctggggcttgtccgttctggttaaaccatcggatgatcatgatatctacctttgccgtgagctttataaagagggcctgaccattcctgttattgccgaaaaaatggaattaagtcgccgtgttgtttcgaatattgtttattcagattgctattaa

SEQ ID NO: 231367 - DNA, 498 bp, Klebsiella pneumoniae
atgaattcgaaaacaaaaggtatttttgaggctgcattcgccaaatggggatttgaatctcaggtgctggtgctttccgaagaagccagcgaattatcagctgcctgctcgcgttttcttaaccataaaaccgacagcagcaaagtggccgaagaagcagcagatgtcgagatcatgattgagcaactgcgtcataacgggatgggcccgatgattgaccatgaaaagaaccgcaagatggcgcgtctggctcaggtcgttggtgttgagtcacaacctgtcagcccctttggtccgtccgttatggggcttctggaggaagcgaccgaacagatggggctggcagagaccctctatcgcgacaccaaaaccagcaatcgctatgccgccgcccgcgcccgtatggccgtcagtctgctgatgcaggctgctcagaagatgatgcgcgagcagcagtatgccgaacgtatgcgggcggaggataaagctcatgattaa

SEQ ID NO: 231368 - DNA, 549 bp, Klebsiella pneumoniae
atgattaatttagagcagattaaagctgatattgcggcccgcaaggcgatgccagcatgggggcctcagacgtctatcgagcgcataaagactatcaacgccacgcttcccagcttttcgctgaaaacggttgaggcgctggtagagatgctggagtcccgcaccgtcaccgtgaagctgccgccaaaaattgagcgcgacgatgctactggctggtttatgtacaacggcggccgcgtcggcggaggtgcagccgagtggtacaacaaggcgctggatgatgtcagttctgtgatggccaccactggcaccagcgctgaggatagtagcgtcgatgctgatgtgagcgacagaaatcagccggggatggttgtagcggtacatatcgatgtcggcgacttcgtgaaattcagcggtcaggtgtatgaggtgaaggaaacctactttgacgatcacgacgtaactctatggttcgtttgtggcgaagcgctgaaatgcgcagcaggttgccagatagaagtggtttcagcgccaggggaggcagagtaa

SEQ ID NO: 231369 - DNA, 555 bp, Klebsiella pneumoniae
atgacccgctcaaacgcaatccagattatccatatcgccaaaagccagctggcgcttgacgatgacacttaccgctccttgctgggggcggtagttcccggcaagtcgagctgccgcgagatgaccatcgtcgagctgcagaacgttatccaggcgctggaggctaaggggttcaaaagcaaacctcatcgccgttctaagcgccgcatgtctgccccgtcagacgtgagcctgaaaatccgcgcgatatggaaaacgatgtttaaagagggttttatccgggatggtagcgatattgcgctcgaccattttgtccagcgccagactcgcatccgtaatggcggtgctggcgtatccagccttgagtggttacgagccgacgccgaggacaacctgctagagagcctgaagcaatggcatatccgggagatgaaaaaagccatgctggcacaccatgcccgactccccgaaaacccggtcaccggtgacgaaagccgggactatgacacaatctgcagcgcttacgctgacgcagccagaaggtggaaaaaatga

SEQ ID NO: 231370 - DNA, 390 bp, Klebsiella pneumoniae; identical to SEQ ID NO: 207904

SEQ ID NO: 231371 - DNA, 537 bp, Klebsiella pneumoniae; identical to SEQ ID NO: 207903

SEQ ID NO: 231372 - DNA, 582 bp, Klebsiella pneumoniae
atgacaacatcattatcgtcccccgcgtttttacacgcactctctttcattcgcgcccgcgaaggtgattacgttaatgaccccaccgacaaaggcggcgaaaccaaatacggcatttccgacaggcgcgatggtcttgccgatggcaaaaccgacgtcgatggtgacggtaaacccgatacccgaattaaggacctgaccgaagaacaggccgggcagatctatttccgcgattactggtatccctcctactgctcagagtggcctgatggcatctccctttttgtgttcgattccgccgtccaacacaatcctaaaaaagcgatccagctcctgcaggatgcggtaggtgtcaccgctgatggcattatcggcccaaaaacccgcaccgcagtagcctctgcagatgccgaatggctcctgactcgctgcttcctgcgccgctcccgctattacgccgacatcatcaaatcaaatgcctctcagggtaagtacctcaatggctggtttaaccgactggatttactggcgaacgcctgtcaggaggtcattggcggtcaggtctcggttccccggagctga

SEQ ID NO: 231373 - DNA, 405 bp, Klebsiella pneumoniae
atgtttaaattaaataccgacgggccgattcaggcgttgatccgggtatttcagtccggctggtctgtggtcgctctcgtcgggttatcgctgctggtctgttgtttctatggccgtcaggcatttgttgtctggtggctgacgttctccggtgccctgttaatagcggcaagtatctggctcggcaacctgccttatcgtttacgtcagcctgaccgcccggcccgaaaatgggtgagttgtgtctcatggctgatctgggctttcggcgcttttctgctggcctttgcccccgtctttgcaaccagtccgatcgtcatgctgcttaatcctctcgccggtctgaccgtggtcattctgtatgcctggctggttcgtaaggaggtaataaattggatcctgtaa

SEQ ID NO: 231374 - DNA, 612 bp, Klebsiella pneumoniae
ttggatcctgtaacgctttccactattgcctccgtcctgctgaaggccggaccttctctggtccgcaccgtaggtggctggttcggcagcgacagtaccacagcgaaagccgctgactcggtggccagcattgtcgagaccgtcaacggtgcgattaatcccgccgaccagcagcgcgtgctggagcagaagctggcgcagctgccgcccgagcagcttatccagctggagggcctcaaggtacagctgcaacagttccagctggagcgggacaaagcgcagatggccgaccagcaggccgcgcaccacgaacagcaggaaaccatccgtaacggcgataacgctacggacgaatatgtccgccagacccgcccgctgatggcccgtttatccctctacagcagcattgcttacgtgatgatcatgtctctgggccagcaggctggcgcggtggccggggcatttggtcatgccttttccatgcccgcccctgactgggatatttcgctgatgctggcgaccccggcgctgggttatctgggtttcaggacgctggacggtttcgcccggtacagcaaatccagcaaacacaaggtcatggtgggtaaatga

SEQ ID NO: 231375 - DNA, 231 bp, Klebsiella pneumoniae
atgaccaaagcatttgatcgcgccagcgaccttgaaatggaagagcgcgaacgggctttaaacaaccatttaaaccgggttaaagagctgccggagaattacggattttgtaacgactgcggtgcggctattcccgtagcccgacttcaggcgctgccgtatgtcgcgacctgtttcacctgtcagtccatcagagatatcagggggacgcatgggctgggaaattattaa

SEQ ID NO: 231376 - DNA, 321 bp, Klebsiella pneumoniae
atgggctgggaaattattaagggaaactgggcgatcatctgggcgttgtttatgtctgccgtgaacgtcattcagctcctcctggccaaaacctatgtcaaacgcgaggaactggagctgatgcgcacccgactgcagagcattgagaacactatcgccgggctacctagtcagaaagacctgcaccagctgcagctggaaatgagtaatttgcggggtgacctccgcgaactgggaccggcgattcgccaggtaaaacacgtcagcgatctgcttctggaaaacgagctgaaggaaaaaataagaggtgactatgcgtga

SEQ ID NO: 231377 - DNA, 378 bp, Klebsiella pneumoniae
atggataaatcagccctgcagaaattgctgatgacatgccgtgagcaggccgaacagttccgccgcttatcacggcttgctcatcatagcccggcagaggaactcactttgtcgtggcattcactgttaacagcagcaacctcactggaatcgctctgttgttcatgcgacaagctccttgctgaactgggacaactcgaccgttctgaaacgcagcttattgttgagcgcgatgctgctcaagagacactcagcgccatttacgaagcggtgacaggcgcagccccggaatggagcaatgtttttacctacatggacgctattgatgaagttaatgagttgatggccgcaggggagaaaacatcgcatgtccactga

SEQ ID NO: 231378 - DNA, 579 bp, Klebsiella pneumoniae
atgtccactgaacaaaagccgacccgtggtcgcccctccaaaatcgacctgctgccggatggtgtacgcgatcagctgcatcagatgctgcgtgagaaacgccacacccaggaagagatccgcgaagcgattaatgagcttatcgacagccacaacctgccggaggatatgaagctcagtcgcacaggcctgaaccgctacgccagccgtatggaagagttcggggccaaaattcgcgcctcccgcgaaatggcggaaatctgggccgcgaagctgggttccgcgccaacgtctgacgtcggcaaattgttgatggagtttgtgaaaacgctggcattcgaaacgtctatgtcactagctgaagaagaaggtccggttgagccgaaggctctcggccagctggcgctggttgctcagcgtctggaggcggcagcgatggccagccataaacgtgagaaagagatccgccaggccttcgccgaagaagccgccgcgcaggcggagaaaatcaccaaaagtgccgggctgtctgcggaaaccgccgctgatatccgtcgccagattctggggatcgtatga

SEQ ID NO: 231379 - DNA, 1587 bp, Klebsiella pneumoniae
atggccagaccattgtcagcacaggaacagttacgtaatcagtcggccagcgccattctggcgggcgagttcgacgcggatcaggtgctgctgccgtatcagcgccggtggattgcggacacgtcccagctcaagattgccgagaaatcccgtcgtaccggcctgacgtgggcggaagccgccgaggccgcgctcagcgggtcaatgtcaccggaagccgggggaaccgacaccttctatgtcggcaccaccaaagacatggcgcgtgagtttattgacgcctgcgccatgtgggcgaaggcatataacctcgcggcctccgcgattggcgaggaagcgctggaggatgacgacaaggacatactggtttacgtcatcaactttgccagtggcttcaaaatcaaggcgctgtcgtcaaacccttcaaacctgcgcggtatgcagggtaacgtcattatcgacgaagcggcattccagaaagacctcgctgccgtgctgaaagcggcgctggcgctgaccatgtggggctctaaggtccgtttgatctccacccataacggcattgaaaacctgttcaataccatcatcactgacagccgtgcgggcaagaaacggtactccgttcaccgtattgatatcgaactggccatcagcgaagggctgtatcgtcgtatctgtcaggtgacgaaaaaaccgtggtcaccggaagccgaggcggagtggctggcgaacctgctgagcgataccgccaccgaagaagacgcccgtgaagaatactactgcgagcctaagaacggcggcggcacctatctggcccgctccatccgtgaacgtgctgcgcggggctccggtcccgttctgcgctttaccggtacggctgagttcaatgccatgccggaaattatccgggcgctggatatgcaggaatggctggatcaggaggtgctgcccgtgctgaacacgctgccgcaaaaccttcgccactgcctcggcgaagactttgcgcggtcgggccacctgaccgtttttgcgccgatgatcatcaatgacgacaccacccgcacagtacctttcctggtcgagctggccaacgttccctataagcagcaggagcaggcgctgttctttatctgcgatcggttaccccgccgcgacggtatcaagctcgatggccgggggaacggtaactatctggccgaacaggcggcggagaagtacggcgctgaggtggaggtggtgatgccctccgtcgcccactaccgcgagaacatgccgcgcttcaaggccgcgttcgaagacgatgaactggtactgccgaagcatgaggacgttatcagcgacctcgggcagattgtcgttcagcgcggagtgccgggtattgatgaccgcgagaacactggcagcgatggccacaagcgtcacggcgacagtgcgtatgcgatcttcctcgcctttctcgccagcaaagaagactgccagcgctacgaactgcaccgtctcaacaaaccacaacagcagcgcaacagcgacagtcaccgtcagttgcgtattacccgtggtcttaaaaatcagcgaggactgctctga

SEQ ID NO: 231380 - DNA, 1572 bp, Klebsiella pneumoniae
atgctgaagaaactcaccggcgcgatccgacgcctgcttaacccggcaaccgatgaaaccgttgccgttaatgaaaccgacatgacccgacccgaagcgcgggccagaagcgccagcgtcaggcccccctctgcgggtatcagcgtggcgagcaccttatccccggcgagattagccggggtcctgcgcaatgtgaccgagggaaacgcacgagactacttcatcctcgccgaagagatggaagaacgtgacctgcactatgccagcgtattacgtacccgcaagttgaccgtagccggtatacctccggcagtggaagcggcgagcgacgatgagcatgacgtgctgctggctgatgctgttcgcgatctggtcgagcagccgcaaatcccggaattgttatttgatctgctcgatggcctcggtaaaggcgtcggggtctgtgaaatcctctggagtacccgtgatggctggatgccgcgcgattatgagtgggttgacccgcgttttctgaaacccgacagcgacacgttgcgtgagtttcgtttgctgaccgacgaacaaccggtagacggtattcccctgacgccaggcaaatatgtgatgcattacccgcgactgaagtctggactgccgctgcgtaacggtctggcccgtctggtggcggtgatgtacatgctcaagtcgtttaccgtgcgtgactggtgggcttttgctgagaaatttggtattcccatcgtcgtaggaaaatacgggaataatgccagccctgagcagattaaaaccctcatcgatgctatcgcctccatcgcctctgatgccgggtgcgccatcccgcagagcatgcagcttgaaatgcaggaaaccgccagccgcaacggtggcggcgcactgttcaaggaaatggccgaatggtgcgacgcccagaccagtaaggcggtgcttggccagaccatgaccaccgatgacggcagctcgcgatctcaggccgacgtgcatgaccgggtgcgcatggatattgcccgctgggatgcccgtcagctggaaaacaccctcaatgagtttctggtccgtccgtttattcagttcaactacggcccgcaggaaaagtacccgcgtgtgaagctggctatcagcgagccggaggacctcaaagcctttgtcgatgcgcttattcccctggttgatcgtggtctgcgggtgcaggaatctgaggtccgggacaagtttggtctggctgagccggagaccggcgcggtagtgctctcgccgtccaacagcttctctgccttcagcccggcaccggcactcaaccgtgcgcagcttgcgcttaaccgctcgcaggacgatgagattgatgtgatggtcagcgaagcgctgaaggactgggagctgaccggcgacgcctttaccagtccggtgctgcagctggcgaaggacgcggggagctttgaggaatttctggcacgtctgccggacctgcagaagacgctggagcctgccgcgttcgtcgagcagctggcgatgctgagctttaaggcacgtgcactgggagatgcgaacgatggctaa

SEQ ID NO: 231381 - DNA, 189 bp, Klebsiella pneumoniae; identical to SEQ ID NO: 189694

SEQ ID NO: 231382 - DNA, 1797 bp, Klebsiella pneumoniae
atggcaaaccgcctcaccactgaaatactcatcaatctggcaggcaacctgaccgccaaagcccgccagtacggtgccaacatgtccgagttcgcccgtacaaatcagagggcgatgtcagttgttaaagccacctctgctgctgcaggtcgagggcttgatgcattgggtaatcgctacacaacaatgattgccggttttgccgggggggctctgttacgaaattatcaacaattagatagacgtttaactcgaatggggattactgcaggtaaaacacgaaaagagattgctgatattttcgatacctcacaaaacgtagcgattaagtttggagtcgataccagcgaaattcagggggcctttgaggaaatcaatggccggtctggggatctgaatcttgcgctcaagaacaccgacaacataggaatggcgatagccgcttcaggagccgatggcgcgactcttggtggactcatcgctgagtataaaaaacttcagatagaagataaaaagcagacgctacttgctctggatggaatgaaccggctaggtaaggaaggtgctttcgaacttaaggatgccgctgaaaaattacctgcttctctttctatgtacgccgctgttggcgggaaaggtgttaaaggcgcaatggatgtgatgaccgttgcagaatctgctatggatgtaacagccaataaagataaagcagcaacagccgtcgaaaattttattcgtgacctccagaatccaaaggttgttaagacgttgcaaaaaaatggcatcaacgttttcgatgacaatggttcaatgcgaccccttcctgacttacttcaggaaaccgctgcgagatcttcccgtggaggcataaaaaaacaacgcggacgcctcactgaagccgggtttaatcaggacagtatggatttaattgcaggcgttaccggagaggctggcgcaaaaaaattaaaaacgtatatgggcgtagttgccgatggtcagagcattattgaggatgcagcttatgcatcacaagatttcacatcagctatgcaacgcctcgcaacaaccctggaaaaattcgctaataagaatctggctaagcctattcaggaacttgcggatgtcattaataacttagacccaaaagttgtccaggaatggctggagttcggtaagaatgtagccatttcgataggtgggattattgctgcaaggaaggcgttcaagtttggtaaagatatctgggatatgttttcgccaggtaaaggaaagggacttccgagtgatgttgctgatgcttttggttccggtgtggtgccggtttatgtgaccaactggccagctggcgggctgggtggagataaagaagatagcccatttaaaaagatccttaatcttgcttcaaatttaccaggtaatattggtaccgccgccacggcagcactagtgcttaatgagtccttagatttgttagatttcgatcctttctccgataaaggtcgggaggaactcataaagcgggtccaacaaaataactcacgttccactatgtgggatgatttaaagaactggatcgcatcttcgggtcagttgccaactggttatcaggacccgtcaccgtgggcttcaatgcagccccagaaccagtatgcttatccgttcctgccccagcagctgaaaggcagtatcgaggtctccgtaaaagatgatcgggtacaggtgaccagcgttaaggtcaatgcccccggcgtcaccatgagtgcctccagtggtgtccgtaacatggagcagcagtga

SEQ ID NO: 231383 - DNA, 540 bp, Klebsiella pneumoniae; identical to SEQ ID NO: 207902

SEQ ID NO: 231384 - DNA, 876 bp, Klebsiella pneumoniae
atgtcattcgaattttctcaaaacccacaggccatctggctttatcagtacgatgccgatggtgtttatattggctcggtctttatgacaataccggccggaacaggcttacccgcaaataccacccatgttccctgccagccagaaaaagggcagaccggaatttttaaaaatggtgaatgggaatatttgaccgatattcgagggacaccttactggaatatttatggcaatggttttgttatttcctccctgagtgagtccctccctgaatgggccattaccgccgagccgcctgccgcagaagacggatatgtccttttttttgctgatggccagtggactcaaattgaagataagaccggtcagctttattacgacaacgacggtactgcgcatgttgtgtctgatccctggtttgtactacctgaggaatgcacctttacccctccaccagaaagcaaaaccacattcattacccgatggaacgggatggaatgggtgtacatcaaagacctgcgcggtcaggttgtctggaataccacgacacgcgaggcgttgacaatcaccggggttggccccgttcctgatggctacaccctcaaaatgcctgggcaattcgacgagtgggatggctcagcctgggtgaaaaatactgaagctgagcaggcttatctcaccatgcaggctgacagccagaaagctaagttgctctctgctgcatcggaacagattgcattattgagttatgcggtcagcagcggccaggccaaggatgccgagaaaaccctgctcacaatgtgggagcaataccgacttaatgtgaatcgcgtggataccacagcagccagtgttgtctggccggacaaaccttaa

SEQ ID NO: 231385 - DNA, 180 bp, Klebsiella pneumoniae
atgtccagagatgaaatggttgccaaggcatatctcgacaaggattttctgaactggtttgaatgttactttggctatggtccaaaagatgaagtcccatgcaatcaccctgtacttgttgctaccgctctggcctgggtagagtctcgaaaattcataagtgagcagagcaatggctaa

SEQ ID NO: 231386 - DNA, 693 bp, Klebsiella pneumoniae
atgttagaatcacttaaagaattcacgacatcgacattcaacacagcaatgaatcgcgttaaaaaccctgcattcggtgctttcgcaatttcatggtgcgcatttaactggaagcaaatactttatttactttttgctgataacggaatttactacaaaatagaatacatttcacaaaatagcagttggtggaacgtaattgttttccctgcaatttcttcacttgttttatgtattggtttaccatggattaataatgctataacaaaatggcaaagcaagccccttgacaatgcagattcaattgagaacttcaaacaggcgcgcatgattcaacgctccacacggctgcagcgcctgaaggccaagcatgacgtgacttatgataaagttaaaaccggtgctgagaaagacattcagtctatgaaggagcagataaccgaatcacagtctagaatgggtgaattaactaatgagcgagatcagctattagataaactacgaatgacagaaaaagaatataaaagacaaaacaattatataaccaatttaaaaacagagcttgaatcaacacatataaaattaaaaagtcttgagaatgaaaatgaagatttaaagaatcatattgataagctaaaagaaccaagtttgagtgttgggttagaaggttggcctcccaccaaaataagataa

SEQ ID NO: 231387 - DNA, 852 bp, Klebsiella pneumoniae
atgaaaaaaataaaattattttttggccttgtaatttcaatggtcgctgtaaatgctacagcagctagtccatcgcaatgcaataaagataactttaatgcatgcaaaacgtgtgaacaattatcaaaggctatagacttaaaagagcctaatcgcggcgattactataaaggagctttatggaatgggctttacgcctcttatgtaattaattgcccggtggttgctgagaagttactgagcaatggtgctatcccatcatatggaggttacatgggatcaatgggggcggtactaacaggtaaatggcctcataacaatgaatcaataaatcttttatgggctgatttgcttataaaacatgggcttgatgttaatgagcatactggtgattataaatcagccactgaagtatgggctgtaaatgaaaagcagatcgaatataagtcagtgtttgataagctaattaaatctggtgaggtaaaaccactcgaaccttcaagaaatttagaatggtgtgcatctgaaggatatcgctcagttgtcgtttattctcttaactcatgtataaaaaactccataaaacgcttggatgatggcgtttcttcagcgtctgatatttcatcagcagccgtaaactcttgtgctagtgatgtagaaaatttcaagaaacatgtggcatgcaaatccgctgttaaagaacagtctgacaaagagagagtcgacatttaccagctgttaatcagtgatagtaaaatgaacaaaaatattattgatttgttgaaggaaaggaacatcgaaaaagttcttgaattcagagcagaaaataaaacgtcgaaaatttcacagtga

SEQ ID NO: 231388 - DNA, 633 bp, Klebsiella pneumoniae
gtgaaaacgccgattcgtgaggggctgggccgggtgctgcgggacaaacgcttcgtcacctatgtcctgacgctgaccggctattatatgctggcggtacaggtgatgctgatgctgccgatcatggtgaatgatatcgccggctcgccggccgcagtgaaatggatgtacgccatcgaagccaccatttcgctcaccctgctctatcctattgcccgttggagcgaaaaacgcttccgccttgagcaccggctgatggccggtctgctggtgatgaccctggccatgctccccatcgggatgaccagcagtttacagcagctgtttaccctgatttgcctgttttacatcggctctatcattgccgaacccgcccgcgagacgctgggcgcttcgctggcggacgcccgggcgcgtggcagctatatgggtttcagccgtctagggctcgccttcggcggcgcgctgggttacgcgggcggcggctggctgtttgatgccgggaaagccgtcggccagcccgaactgccgtggctgatgctcggcgccatcggggttatcaccttcctggcgctatggtggcaattcagtccgaaacgctctgcctccggtatgctggagccgcgcacctga

SEQ ID NO: 231389 - DNA, 924 bp, Klebsiella pneumoniae
gtggggacaagattgcgcattggggtggtcggcttaggcagcattgcgcagaaagcgtggctgccggtgctgggggcggcggaaagctggacgctgcaggcggcctggtcgccgggtaaagagaaggcgctacggatctgcgaaacctggcggatgccatacgctgattccctcgatgccctggcggcacagtgcgatgcggtctttgtccatacctcgacggcttcacattatgaagtagtgaatcacttactgaatgccggggttcatgtttgtgtggataaaccattggcggacaagctgagtgaggcggagacgctggtcgagctggcggcgcgacgtcgactgacgttgatggtcggtttcaatcgccgcttcgcgccgctctatcgggagctgaaggggcggctgggcgaggcggcctcgctgcggatggataaacaccgtagcgatagcgtcggcaacgatctgcgctttacgctgcttgatgactatctgcatgtggtggataccgcgctatggctggccgacggtcaggcacgtctgcgcggcggcgcgctgaagatcaccccgcagggcgaaatgctctatgccgaacatcagttcagttcgccccggctgcaggtcaccaccagcatgcatcgtcgcgcaggcagccagcgcgagtgggtgcaggcggtcacggatggcgggctatatgccgtcagcgagatgcgcgaatggcaggaggagtgcggtcatggcgtggtccagcgcccggttgccggctggcaaaccacccttgagcagcgcggctttgtcggctgcgcgcgccattttatcgaatgcgtgcaaaatcagacagttcctgaaactgcaggcgaacaggcgctgctggctcagcggatcgttgagaaactgtggcgcgacgccattagcgaataa

SEQ ID NO: 231390 - DNA, 627 bp, Klebsiella pneumoniae
atgtcaagagcggtagaaaatgatatagaagttcacattgctgtagtaacaattaaaggtgagtggcatgtgagaaatggtatctatgttagcagtgaaacgagaaaaaaagaacttacaaacgccatgctcgaagccggggcgactcttcatatcataaataaaattaatgataatgaggattttgatttgtgttcatccagtaaaagtagatgtgtaaatgcgattgacttacttattgaaaatataaaaccagatattattttcatccctgtaccttcattccatcaggagcataaatgggtttatgaatgctcaatcgcagccaccaggaccacaaaaaatgctgattcacccaagtctgtaatagcatatgagtatccacctgctggctggggggattcaggctcatggagtcaatcatctggatctatttatgtagatataagtaaacatcttgagagaaagatatcaatacttggtaagcatgagtctcaaatgtcaaatgtagagaactcactgatatcattggatgcagtaaggagattagcatcctttagggggcttgaatctagtgtgaactacgcagaattattttatctattaagaagcaaaataacatattaa

SEQ ID NO: 231391 - DNA, 591 bp, Klebsiella pneumoniae
atgaaaagcaaaaggattttcgatttgtgcgcatcactacttctaatactaatggtttcacctgtcttaattggtgttgcaataattatttcattaagtggacaccctcctatttataggagtaaaagaattgggctaaatggatgcatgtttaattgttataaatttacatcaatgaaagacatatcaaccttgccaatagagacgcaaaataatatattgaaagaattacataccaagggccacatgaagaatgacccacgtgtaactaaatttggaaaatggataagaaaaacgagcatagatgaattacctcaactatttaatgttttatttggaaacatgtcacttgttggcccaaggcctatatctcaatatgaagcagataagtacggaaaaaaaattgagtattataaaaagtccacgccgggtataactgggatatggcaagtttctggcagggatgaggtaaaatacaagcgaagagttgcaatggatattctttattataaaaaaggatgtttatatttcgacctatttattttattaaaaacaccggcagtggtatttaaaatgagcggggttaattaa

SEQ ID NO: 231392 - DNA, 240 bp, Klebsiella pneumoniae
atggaacgcaaccggtataccatgatcgctaaaagtggggtgcccttcggcaatcaccgtcggaccatggcctttgatcggacaactgacgggatcgcccagccgcgccacgccgataccaccaaatttcatattactggaaccacggagcactttcccgcccccggtatgcgtatcgcctgtacggataattcctttcataactttattaaccttgtagcatttaaggaaaataaatag

SEQ ID NO: 231393 - DNA, 189 bp, Klebsiella pneumoniae; identical to SEQ ID NO: 210634

SEQ ID NO: 231394 - DNA, 2190 bp, Klebsiella pneumoniae
atgactaatgttccctcctggcttcgagcctttttcggcgaaggcaatttgctcagcctcgaaaaattactgactgacggacctggtgcttatccagaagagcaaaaaaatgccctgctacctttggtggatagcgcacgagatggcgaatggcccattattctgccgtggtgtgaccgcaaaaactgggttttctttgcgatggcggaagatgagcgcactctgttagaactcagtaacgtcatcggagcccgactcggttctgctgatgtagaacctgaccgcaggatttacctgagtcccgcttctggtcccacgctcaccgtggaaaccatactgttggagcactgcccaacggggtttattcgtgttgaattgttggccgccaaacgtgatgataaactggcgaaaatgcgggtttttactgcactgacggaagtaattacgttatttcgccaacgtccatcgcttgttcgtacccgcaagcgcccgtttggtcgtatccttagcgatttcatgttggcaacgaatcaaaatgagatagcggccagtgacagctatctacaggaactacgtgacaacggtctgctgtctaaacgcaatttgctgttgctagaacttcaacaggctgggaaatggcagaaatgggactccctgctaaaccatccagatctccccgaactgatcagaggacgcattcctacttcactggttagaatgctgctcactgcttatcagaaccgctatttaggttatgatatgcagagctacgcgcagcaggccccctcagtattgcgccccgctttcctttctctacatccgctctttatgcaggttccgctgctgggatacgaagaggaagagcttaacatctggaaaacttgggcaatcggagtggcgctagccggtgaaccaaccctgctaagtgccctgccaaaagcgctgaaatccaactggctaaaagaattacagcagtgggccgaccttagaggaattaggtacgatatctcgacacaatctccagtctcattctctttgcctcctacatcgctagaatcactggcctcttatctacaaacatcgctgacggcaacaaccgacacgctgaattcatacgccgacacactccgcaacatagatatacaactgctagatcaagcaaagaaagttccactacttataacgctgattgaaagtatcgaacggcttactaccactcatatctccggctgggatagttggttctcacatctgtgcaatcccaacgctgatggaaatgcactgttgcagattgtcgctctggaaagcgaacattggtccacctcctccttccaagaatccacattcattcgcctactgtcacagaatattccgccacaggcatttcccaccctgcgtaatgctatgccggccttcattaactggctgaggaaaaaccaagtgcttttaatgagctcaacttggcttaaatggatggatgttctggcgatggaacaaagtgtcagtccggcagatattcaactggcgacgctagcaacggagcatttccttcaaggttctctcagtcggactgactatcaggaatttgttgcgacactgcaactcattattgaacgctgcggttcgcttaaaaatataacttcacttggcgagatgatcgaactgttcctggatgcaccagaacacgataaagaggttagaaacgctctgtggatgaatattcaagcttgtgctgttggtgtgtggccgcgtctagatcactcaacccgcacgatcatgcgtaatctggccatcgacgtattgggcaggggtgccgattctgcgtttccgccggaaccaccacgaagtgatgacagtgagtttgagacacttccgaatcttgcaggaaaacgcgtcgccatttataccttgactgaaggcgctgcgcgccgagcaagagggatgattgagacgttgttccagggaatcaaagtagatgtgaatcatgatcataccgcgacggacaagttagtcaatttggcaaaacaggcggattactttatttttgctgcctcaagcgcgaaacatcaagctctgtatgcggtaacaccgtatcgacgcgatcttatttaccctgaaggtaaaggagcgggttcaattctgaatgcattcatcgcccgtgttcaacatgccatgaatattacaggataa

SEQ ID NO: 231395 - DNA, 531 bp, Klebsiella pneumoniae
atggaagagcaacgacaaatatttctccacggacctctcggacagcgacaacttagggaagtactgagcgcacagttctgtggactaatcctttatccagaactcatctggttgatctcgccctggataagtgattttgacatcattgataatcgcggcggccaatggagttttcttgacccatcgtggggtgccagaatgatcagtttccaggaattgcttgctacagcggcaaataacggctgtccactcaggattgtcactcgccctgatactcgtaacaaagtgttcgttgaacgactgctggcaaggctctctccggatcatgatgtgcaatacacataccatgagaacttgcatgctaaggatatgttaacaaagcacttcctcttgagaggttcgatgaactacacctggagtggtgcaaacctcaatgatgaacatttgctgttctccaccaataaaaccattatttctgacacactaattgagctcagtggacaatatacattcggagacagagatgactaa

SEQ ID NO: 231396 - DNA, 4431 bp, Klebsiella pneumoniae
atgattgctgaggatttagctcgtctacacgcggcgcttgatgtactcgaagggcgagaagccgaactgctggtctggggagacacggaaggcgcgtttacagatgctgatattctgtctctgtttacccaccattttcccgacgaaaatggcaaaatattgatgcaggatctgcaggatgccgcaatgttgtttagcatcccaaatactaaaggtacgcaactttatcgcacgcgaatggcagaatccgttcatctgtttcgtcaccaacgccagtggtttcgcggtcagcaactgagtcgtacccggacgttggtggcggattatcgttttatccgccgccctcgaagctatccggaaaggaagtatccggctgagaaggttctgagccaattgagcgatgtcgaatggatgaatgacatcaagcgtcaagccttgcgagcactgatcggtgatttctcaattgctggttttcaatcccgggcaactgctcgcatcctgcgagcatgggatttccatagcaatcatacgcgcgtcaaagaagcaacggctacgatcgtatgtgccggcaccggcagcggtaaaaccctggcgttctatctgcctgcactaacttcgctcatcaatgacctgcaacgcgatcgttcagcacgggtccgtacgctggccctgtatccccgtaaggaactactcaaagaccagtttatggaaacttggggaaaatgccgagaagtggacgctcagtcagttgaactatctggacgtaaaatacgcatcggatctttctttggcgataccccccacagcatccagtacattgataaagacaaagatattcctttcgacttactgcgctgtaacacgcctaaatgccaaggcgaaatgcgctggaaagcggaagatatcagccggggcaaagagatcctccgctgtacgcattgcacacatagtgtgggtgaagacgaagtagtgctcactcgtgtatcactaatgaacaatccaccggatattttgttcaccacgaccgaaatgcttaaccaacacctcggcaataacaaggccaaccacttgttcggcgtgggcataaatgtaattgcaccgccgatggtgttgcttgatgaggttcatacttattcaggcaatagcggtgctcaaaccgcatatttgctacgccgctggatgcaactggcacgctgtcgcccgcactttgtcggcctctcagcaacactgagtgacgcagaacgcttcttcgcagacttagtgggcgccaacaaaaaacatgtcatgctaattgagcccacttaccaagagatggaggataaaggggctgaatacctgttagcactgcggggtgaccctgtttcgcaaacggccttgctctctaccaccatccagaccagcatgttggcgcgccgactaatggatacccgcaaagccacatcgcacggcacctggggccgtaaaactttcgtctttaccgacgatctggatatcaataatcgcctctatcaccaactttgcgacgccgagggatggcgtacacgcgggaagcaacttgtgcccaacgagcccccgctggcggctcagcgtaacgaacgcaacggtgtatccaatgcgctgacccttgctggtcaaaactggcgaatagctattgatattggacacccgcttgataattccgatcgggctatcgtagcgcgtacctccagtcaggacaccggggtggaccccaaagccgaagttgtcgtggcaacagcttcgctggaagttggctttaacgatccctcagtcggggttgtgattcagcacaaagcaccgcgtaacgtcgcttcttatcttcagcgcaaaggtcgcgccggacgttcaagaactatgcgcccttggatgatagtagtgttgtcagaattcggccgcgaccgcgtggtgtaccagcgttatgaagagctggtgacaccggaaatcaagggccaatcactaccattagataatatccacatccagaaaatgcaggcggcgatggcaaccctggactggctgagtatgaagatccccggcagtaacatctggtcactgctaaacaagccgcccaaaaacagagagcaacacgggcatctggaacagatgctcaatctgatttctgtcgtgctggaacaaaacgtctggcaacaggggctggaacagtacttgttctacgcgctaaaaattaccgaatcgcagcttcagcacatcatgtggtcaccgccgcgttccattatgatggaactacttccgaccctgaagcgccagttgactacccaatggtcactgatgggcattcccggcgcagacagaacaccaggccgctcaccgctgcctttgtttattccggcagccctcttcagcgagctgaatttgcctgagctgagcatccagcttgagcgcccttttacaaaacatgaatacctaccatttattcaggggctgaaggagtttgcaccgggccgcatctccaaacgctacgccatttattccgatcttgaagccgactggctggtgccacacaattttgttctgttactaaaccaagtttcagaagtcgatttcgagatcaacgaggcatttggtgatacctggctgcctgagtgtttgattacgcttgcggatgcgccaccaatgaaagttattcgtcctctgcaggtacttactcgggcccttgatttcaaacaaaatctgaccgagaaaagcaattctcagctgaagtggcatactcactttgccacaaatgctcaggccgaaacgatggcgattcccgcaggtccatggagcacagtgttgcagtccgccacgttctatacccatcagcatatgacaccacttgagctaacgcgttataccacagccgctagtgcttcgctgcgcagtaaaagcaaacaacaggcttgggttaatttcagatgggttgagaatggtcagccggttgcggtgggtactcgtcagtgggtggatggtctgaagctgagcttcaccctgccttccacgctacatcagcaggtcatgaacgacgccaaattagccagttcgctcaggacgctctatttccatcaccgcattagcagtgaggcgcgtttcgaacatgacagcttcactgcagactggatctacgagtgctatctggcggcactgactaaagagatcgtcagccacaataccgtcgccgatgcaattcatgccctgcgcacgccggacggtagagagtcgctggcaaccattgccgattcactattccaggctgaaaatatctttgaaaacgacgatgatggtaacggtattgcagaacgtcaagagttacagcagcagttgagaagcctgttcaatgagccgcagcttctcgcgatgcttgatacgcatagtgctgtgtttactgaagatctcagccagagttattcattttgtcagtggcttcagaccttgttgatcaataccttctccggagccgtaaaacagaccggccatctactgctaccagatgtggacgacaaaggattgcttgttgacgccgtttttgatggcgagcacctcgatatctggctcacagaatcagagcctgggggctgtggaattatcacccgcctcgaagaagcgttccacagcgatccagtcgccctgctaaatctgtttatacgcagtttcgccgccagcgattacgagcaaatagatgatgatcttttcgaactactctctcgacttccttcaagcactacattacagaatgcgctgaacgatttgcgcatggcggaaagtcatcacgatcgccgaacagcgaacggacaactgcgtgctcagctgaaaaaacaaggatttgctctttctcacagctttatgtccgtgctacatacccgtattcttcgccctggcagccactcctctcacgatcggcgcttgctagagtatctgcgggaatggcaggcactagaggccaaagcgggttatgaagttagcctaaatatattcgcccatacccaagcaactcaggaactgcctgatgcgaacgtcaccaaaattttcgaccgtttttgccagattcagggcatgttatggcagcgtggcagtccccttcgtcagtcagtactcagctactacaatccctttgataatgggccgaaactgacagaaagattgctgctcagcactctcttccagcagcaagcaacacaagttgatgtgaccaatagcgactggcttcagcagatccatatagcaatctctcgcgaaggatttgctgaactgttgatccctcgggaaacccgttatcagatagtacagatcgtgtccacactacaactggagcctatcgattatttcggcctgcatctctatccacgaatgggagccgtagactatcggggtggtaacatcgtgttgcgaatcgaactagctgaagccctgcagtaa

SEQ ID NO: 231397 - DNA, 828 bp, Klebsiella pneumoniae
atgagtacgttacgccaacagcttgcagacatgcagaaacaacttgatttgagtgttcaggcaagtaaggccacgctaattattgaaaaatgcggtgtggtactgtcgaaaaccgatacagtcgctgggcattatagtcgtctgaagtatcagtacccggccctgcaacgtctgccgccagaattaagagttacctggaacgaaaatcagcgtaatgaacttaaaaacgctgcaaatagcgttaataatctgctgtcccagtggagtcgctggctgaaaaatcagactctggctggcgctgccatcagcaccgaaaatcccgatccacagttggacgaagactctactacaaaagagccaacggcttatgacatcattcagaatgactccttaaccaactgcatgaacctgtcacttggcctgtaccgtacacttagtggccaactgaacaacgcatgggaagagtggcagcaagagttgcgtcaacagattcatgttgacaacaaaactctcgaggctcagcagaaagtcggcaaactaaaagaaattgccgatgagtactcaaacttacgcaataaattcgatgtactggttcagtccttacctgagaatggcgacagcattactcagatccgctcgatggcggaacatctgaacaccttacgcggcatgatgaaaaccgactggcctttggcggttcaacacttctttgaccgaatcaacgggccacagaatggcaaaccaaccctcagcacacttacaacagaagtttttgagtggctgcgtgatgaagacatgttggaagactttgtgattacaaggaaatag

SEQ ID NO: 231398 - DNA, 3177 bp, Klebsiella pneumoniae
atgagcattatgaactactggccatcccttgagaacatcgagcaatgcatccgtaaagaagctgaagaattgcaggatgacgtgcttctagctgtgcatgaaaagatggctctcatccgtcgcgacgtcaataacaatcaggagatcctccaagatgaggatctttttgaccaactgcttactaccgagcgtgctatcccactgattggcgactcagggatgggaaaatcacatctggtgcgctggttggactgccgtctcaaaagctacctggagacgaaaggtcagcttacacagtgggaaattgttcgtattccgaaaaacgccagcttgcgccaagtgctgttactgatcctgaaaaacctgcacggaggcctttttgatgacgcgcgcaaacgcgttgacgatgtggcccaagcgcattccgctaaagacctcgccgacctgctattgaccatgatgtcacaccaactacagagcatgtacgacgaatcgatggcacttggtatggaatacgaaaagcaggggaaagagattcctgccgatattgataaacgcattaataccattattgaagaagtcgaaaatggcattggcaacctgataaccgatcctaacttcaagctgaatctgctcaagccggagcattgcatctacaaacgcgccagtcgtatgagcgatgggctaaaggctagtgatgaggatcacgacaagtacgaactggtgcctagcgacctctttttccaagacaacattgatgacctgtcgtcgcttgcccgcgaatatattcgacattctcgtattgatgaacatgataatgaaaaggcgcgagttcaggccgtaaatgttctgaatgaagcgatgcatgcagcactgaaatctttatttgccaagctcttcacctttaacggcggcaattttcaggaactatttcaagagatccgccgtgaattacttgcgcaggatcgccgcctggtaatcctagtggaagatatggctgctatttcagcgatcgaagacgtattgattgatagcctaatcgaagaaggcgttcgtgacggggtgagaacactctgcccggtacattcggtcatagcggtcactaacgagtatccaggttataaacgtcgacaaggcacgctggtaacgagggctggctatgaatggagcattgaaagcacacataaaagcgacagttgtgaagaaagtattatttcactgtgcggtcgctacttgaacgcggcgcgtcatggtgcagcagccctgaagcagtcgcgagcgcaaggtttaaatgactggcctccagtctggcaggacgaagaagtaccagaatggctggatgattttggtagtacagccaaacagggcgttccgctgttcccatttaaccgcaatgctatccgggcactggcaaataaatactgtcgagacggcagcaatcaacttgtttacaatcctcgcgtagtaattagccgtatcctgttggatattctgcgggattgtcgtgttgaagcagaacaaggttcattcccaccgcctaatcttgcaggcattaccacggatgctgaaattcagtacaaaataagccaattaactacccatcgagtttccagcgcggcgacactgaccggactctggggctacaactgtcactcctgggatgaagtcagaaaacaactatcaccgggcgtcgccaaagctttcggtctgaatgaattagccgaacacctgaacggcaaaggcaaaatgcctgaaacttcaaccagaaatggcgacactgataagaaaatagctatagttcctaaaccaccggtatctcctccacagccaaaaccactagtggaaaatacgactctgccttttatcaggcatctcaaagcttgggtaaacgacaaagtcgttttaccccaagatattgcccgaaatctgcgagccggacttaacagttgttatgagctctacgcccaagcggagtttttcggcatggtagaaaagccctcgttgctcgagcgtatcccgttaattagcctgccgctttcagcttccgatccttccaacgccattgtaaagttctacgatcgtaaagatctgaacgacccgttacgtaggatcgaaatctacaacgtgtccctggcaatactgcgtattcaacattatatcgatcttgaacaagggggagactaccctgaagcgctggaagactatgtccattatgaaaactttgtcagttggtgggtcccacaaaccactgaaaaagcaattaatcatgcccgcgcacgaaaattgaaacccgcactgcgcaatcattaccaaaaagcactactgctgggactgatgacaggaaaagagaatccagcggaactgattgatacgctttgcctgacgcagaaaggggttggcagaacccaaggaaaaacccgaggacgtacagcagacactaccccttccgctctctgtttctacgggcttgaagctaatcaaaaacctcacaccagcattaaagtggctgaagcgcggcaagttgcccttcagggctgggacgaggcgcgagacgcgtggctttctcaggtcgcagttcctgagttgagttctgggctcagttcaatccgagccttggaagccgaagttgtcaccctcgcattgaaagagatcctaaaagagccgctgggtgcggagatacaacgcgcggcagagacagccagaaaagagatcgcatcaacgatcgcgaatgcacaactctttgaggatgtgaaaaatcaggatgaattcattgcccttctcgatgactggaaaacgtttatcgaagtggttcgcacccagtactatccagcggaaaccgaacagattagaaattcaacatggctattggatgaaatcggtgcactgaaagtggatgctgaagccagcctacataccctgcaaacacttaattccctcaccagacaacaggatgtcttcatgctatggcacgacatctcccatctggatggcgattatgtcaatcgcatcggcaacctgcttacacagtggcagaatattcaatcgaaaatcagttttaatctgcaacagataaacagtaagggtgatgcgccaaaacttgaaaatgctcgcaagcaggttgaagagcgactgaaaaatctggcggctgatatcagcgcctctggagcgaatgaatga

SEQ ID NO: 231399 - DNA, 870 bp, Klebsiella pneumoniae
atgtcaatcatcaataatgccaaccctggcagcagcctggtgctgctccctttgtttgatcgcattgtacaaaacgcccgtgtttcgctttctcaggatgcgatcatagctcgctatcgcccaaacaatctccccgcgaacgacaatgcctggggaaagattagagagaaccttgccttctggtgtcgtttgggactttggcctatggaaaatgaagcgctactaccgcaaccagaagaaacacgtccgctctatcagcgagtgctgcaatgcaccatcgaagcctgcaaagaaaaaggcatcgccgaagggaatgagtgcgaacctatgtggcgagtgctgtcgtgtttgctaagtttgcaacaacatacattgatgggggcagaacctctttcagtaactgaagttgctaaaaatgtacataaatggttgccagcaggaacgatcaacagtaatagtgaaaaattacctatagaatatggtcgctaccttggcttcctggaattagctccagaccaaaaatattacactgatcctacccgggcaattaaatgctttttaccgcaaatttttggcgaccagaaaaccctgcccatcaaagcctttatggccaatatggcagaagcgatgccaatgatggatggtggcgattttagagtgacagtgcaggaaatgatggccgaacgggggtggtccgcaccggaaggcaaaaacatcagtaccagcacttcgcttgcgctccgtcgtctggagatcagccaacagatccaactgactttcggaagtgatgatgccgaatcgttatccctgcaacttcccactagtgaaatccgccccgtaagcaaggttagtctcagggagatcgcataa

SEQ ID NO: 231400 - DNA, 2481 bp, Klebsiella pneumoniae
atgattgaacaatggtcgcgtctacagttggcgctgacaacctgttttaatgaagatgtgacctttacggaagggattgaaaatccctttcttaaacggttaatgaatattattaccgattcctccgctggtcagaatgatatttttgctggttacgccgatgcccttcgagccgcacaggcgaatggcatcgaagaaccgtggctcccctctccaccaacaataaaggatatgccccatcctctttggggtctggtaaaatcagtcgcagggcagacgttgtcactctctgtagatatgcacctagatagcacaaaagctacttaccaatgcagaacccggcgtaatttactacaaccggagatggatccggcgcttaaaaacctgctggtagatacaccacatacgcactatcgcggctttgggcagcaggcagcaatccgcacgttgctcacctcagacatcaacagtacgttggtgataaatctacctaccagttgcggcaaaagcctgataactcaaatccaggctatcagcgctcctgcctgttccttaactttagtcattgtcccgacagtagcactggcgattgaacaagccgatttgatgcgggatatgctgcgcaaggccgaacaggatcatggcggaagctacgcgtgggttggcgggcaggatcagacgacgcgccagacactgaaagagcggctgaaaaacggcacccagcgagccctgttttgctcaccggaagcagctaaatcatcgctggttccggtgctatttgagctggcaaaaaataatctgattggtgccgtcattatcgacgaagcacatctaattgatcaatggggagccgaattccgccctgactttcagctcattgcgccattgatccgttcactgaaagcccagcctgattgccgtttccgcaccctgctgctctccgccacctggagccagaacactcgtgacgtcattgtggagcaattccgtgcagatgacagtgaactcattgaaatcacggcgaacttcctgcgtcccgaacctgaatacttcgtgcataccgagcctaatccgacctcacataagcaacgtgttgaacagttgttgatgtcactcccacgtccactcattctctattgcacgactcaagaagaagcagaaagctggtatcaacgacttcaactacaacaatatcaccgtgtcggcctgttccatggtgatacggaaacgctgacgcgtagaaagctaatttcacaatgggcgaacgatcaactagatataatgattgccacttctgcgtttggcgttgggatgaataaaagcaacgtccgcacgatcattcatgccgctgttccggaaaatattgatcgctactatcaggagtgcggacgtgcagggcgtgacggcaaagcgtgtcaggcacatctggtctggcatccagcgcagatggagacggcggaaaatctctcagttgaaaaactcatcagcgtcgaaaaaggtttcttacgctggaaagcgatgtttgaacaacgtcagccaagtgatatcgccaactattgtatctctctggataccaaacccgattacatcgactatcagggagatcgcaaccaagcctggaaccgcagaaccctcttactgatgcagcgtacaggactgattgaactggtgtttgctgcacctgaactaccggaaagcttacgagaaggtggagaaaaaaacgatcaggcgatccgtggttggtttgccaattattatagccaagtacatattcgtcactgcaacgattcacacctttcggaagagtactggaataactttgtggaaaaagcccgtagggaagaattgaataagaggcaagcagcttttacgttgttaagagaatggctgaaggatctcgaaccatctttgtgtcaggttttaagaaaattttatatttatcaaaataatgaacctgagctaacctgtggaggctgcccaggttgccgggctcagggcaaggcctcattctctccaaccgttggcaccgatgtaaaaatcttgcaatcgacaccaaagaaaaaagcacgcttcgttggagctgaaaaaaaagtgtattacagcgaagaaatggatattcgaactttgctgtcagaacttcgcgttacccttcgccatctgatcggttccggcaattacgaaaccatccgagcagataaagttaactttattcatctggaacgcgctttagattctgtgtctcgtttctggagcgtacaaaaacttgcagcaccaacgtcaaacggagcagaaattgtgatcgtggcaaataccgccacagtgctaccgacactaccagcctcacgttatgaacgtattattatcgccccgcagcatctggcagatccactgcatccgtacagaaaatggtgggatagcgcagaaaactctctgcccctagacacttttatcaggcaatcacaatatgtcaatcatcaataa

SEQ ID NO: 231401 - DNA, 3111 bp, Klebsiella pneumoniae
atgagtgtattaccaattgggtcgttggttatttcggatagttttgacggcattggcaaagttactaatgttgatattgatgccaaccgcgcaacagttgcattttttgagtcccccttgcaacctttcgcccggcacactgatactcgtctggataagttgattccgacaattcctcacgatgaggcagtgatatattgtatcgaaccagaaagccagcgatgggtacgcgcgcgttttggcggatcccgtcccaatggcgattttctggtaatctttcgagaagacgaatctgcgactctcccgatcgataaagtctacgttctcaataaagcccctgatatcccgattaatccggcccatttccttgcctctcagacgaatgatgctccgtttttcttccctcgccgtcaatcctttatcaatacgtatatccagcagcgagcgtcatgtcggggaatggcttccctttcaagcagcgcagttgaacttgaacctcatcaattagctgttgtacggcgcgtactgcaagataaaacgccgaagtatattctggcagatgaagtagggctcggaaaaacgattgaagcaggcatgatcattcgtgaacacgcgctagaagaagccagtcatgtcagcatgctcattgccgtacccaaccaactcgttaagcagtggcgggaagaattgggtgaacgttttcagctgagacagttgctcgtagatgtgacgacaacactctcttcattaaggcaagatgggatcgcgcaagggatagttatctgcagttatactgaagccagccttctgcttagcagaggattcaaaccatctctggttaccgtcgatgagatccaccaaattgcaaactggccatggtcaatagatgaagacgaacgccataatttcggcctgatttcacaggcgtgccacagagcacattatgtgttgctacttacaggaacaccgcttcatggacatgagcgtaacttcctgtcgatgctgcattgtatcaatccagaggcttatcagattgacgagaaccatctaaaggcgttcaccgaattggtgaaaaaccgtgaaagtcttggtggcgttttctcggcccttgtaccgtcagtgtctaacatcagtctccgccgtaaccttgatgaaattcttgcgcaatttccggatgaccatcagttaacaacgctgtgccaggacttgtttccgttaattggcagattctctcagccaacgcctgagcgtgaagcgggtattaaagcgatacgcctgcaccttggtgaacattatcgaatccatcatcgtttgttgagaaaccgccgccaagtcgcccttagtcaggacgaaagtaagaacctgaatttaaatctgctattccctggactggatggggtgattgagtatcactggcaaaccgaagggctgacgctggacgagttactggaagaatatcgggccatggcagtgctgccgcaaaaccataactggtcgctaaaagaagcgagctatatcgactgggttgacgatctattttccagtccattgtgcgtgatgcagcgtgcaaaagcgactcttgcatcttcaaaccctcttccttccgatgaacaggcattgctggaacacatagtctcaacggccaaaaacgaactacaggccatcgacaatatgttagctgcagcactcaatgactggctgaagcaattcccggagggtaaagcaattgtgttctgcgatcgccctgagttggcgcaacatctgtcggtcaaactaagtatcctgttggactatccggttgaacgttatctaccgggtcaaactttgcaatttacccaaccgcaaagccccattcgggtacttctgtgcgataaaagtggcgaggatgggctgaatctccatggagggcgccgtctggctgttcactacggcttgccgcgttcctgcagtcgtatcgagcagcgacttgggcgcctcaatcgctatagtgccaatctgataaggatcaaaccaattcagagccttttgctaaagaattatgctgcccaaggtttacgtaatctgtgggcagatcttctggtgaacagcattggcgtatttaacaacactatcgccagccttcaatttgtgcttgatgactatattggcgatgcctggagcaggttgttccgagaaggtccacaagtactagaaaaccttgcgacagaattgccaggcgaaaacggcgtgttgttcagagaaactaacaaaatcaacatgcaggaaaaactgctggcgatggatgaagacgtcgtgcaagctgcacttttcgcgcagcagttaagcaatgacgacctaaccgctgtagaacagagcaaagccctgacgctctggatcaccgagggattacgcttccgctcatcgggaaatactgaagagggcatacggttccgtttcgaactggctgaacgcagttcaggtacgctagtcgactttaaaacattcctcacgacctgtatgctcagctttgacaaagaggggggttaccctccttccacacatctgatgagcgcaaagcgtatctcggctattgacgggacagcggtatatcctttgcgctatggtcagccctttgtcgatgcaatttggcaactcctgaatcaagatgcacgtggaagttctgtggcattgctgcgtatgattaacgcgcaactcaacgcccctcgctacttcttcgagatgacttggctcattaccggttgcgaccccctcagcccttacgcctaccttcgtaaaagcgacgagcttgcaccgccacgcatagtgcaggagtgggttgctgctgacagttctcttgtgaccagtccacaactccttaagatactaaacagcgagtacagcaaaaatccttcagcaacgaaaagctatgttgatctcaacctgcgcgcctcaagatggcaggaaatagaagaactgatttccgctgatgcttggaaagaaatggtcgagcaggtttatgataaagctttgcaaaaacagcgtggtttggtcggagacagcgcttatatccagttaatgtcagtaaaagcgatcatcatctgtagcagcaatattttatccggagtcgcctaa

SEQ ID NO: 231402 - DNA, 870 bp, Klebsiella pneumoniae
atgccctccagcacgaccctgcaacacgcgatcgaaaacatcaccatctggcgcaaaggcgaacagcgtgcgccgcataagccactgttgctgctgtacgtcctctcacagtaccagcgcggccatgcgcggatgttcgactacgcctcggagatacgcgatgagctgcatagcctgctggaacgctttggcccgcagcgccgccagtaccggccggatatgcccttctggcgcctgaaaggcgacggcttctgggagctgcacaacagcgaccagtgttcaacccagggcagccgacagccgcccggcaaagagctggagctctgtaacgtcgccggcggcttcgatgagccgcattttgcgttactcaacaaaaataagaggctgatcaataccctcgcccatctgatcctcgaggcgcatttcccggagagtattcaggaagaactggctgaagagatgggatttgatctgcagcagatccgtaaagagcgcgacccgcattttcgccagcaggtgctgcgcgcctataactatgagtgcgcgatctgcggcttcaatatgcgccatgataatacctccgtcgccctggaagcggcccatatcaaatggaagcagcacggcggcccatgtgaaatccctaacggcctggcgctctgcgcgattcaccataaggcttttgataaaggatccattggtctggatgaggatatgcgcatccaggtttcgccggcggtgaacggcgggggcatcgttggcaggctgttctgggattttgatggtaagccgattaccttgccgcaggggaaagaatgctatccgcaggaagggtttgtggcatggcaccggcgggaggtgttcaggggatga

SEQ ID NO: 231403 - DNA, 2448 bp, Klebsiella pneumoniae; identical to SEQ ID NO: 180770

SEQ ID NO: 231404 - DNA, 234 bp, Klebsiella pneumoniae
atgcagcgtcttgcagcacggcggctccacgcgccgtccggcagccaggcacagttcctggtgatagcgccgctcgtcgctgttctgctgatggcagttctgcccaacctgcagcgcccggcccggcagacgtccctgcggcggaaacggcggcgggacccaggcggcatgaatttcggttatttcggacatacggcgggctccttcatcctgacgggctcttttatcggatag

SEQ ID NO: 231405 - DNA, 738 bp, Klebsiella pneumoniae
atgactcagactgctgttattcccgactaccttaaacccgcaatggaacgccttgagactgcccgctcggcgcatctcgccagtgccagccgtatggatgaaaccacgacggccatcagccaggtgcaaacgcaaaaaaatgaactggagcaggaaaacggcactgattccggcgcatggcgtaccgcctttcgtgccggtggtgctgtcattaccgatgagctgagacaacgccatatagagcgcgtgacacggcgtgaactggcgcaggaatgtgacaacatggctgaagtgctttctttcgagctggatagcctccggggagcctgtgaccagacggccagagcgtaccgtcaggcacatcacagcgtcctcagccagtatgcagagcatgagcttaatgctgccctgcgtgatacctgtaatgcgctggtcagggcaatgaaactcaacatactggttctgaataacccgcttgccaataccaccgggcatcagggctatatccagccagaacaggccgttatgcagcaggtgaaagaccggcttgagcaggcggtgaaaggctgcgatatccgtctgaccgatgaaccggtgctgtttaaaacaggactgtcggcctccacgctgccgcatatggagcatgacgttgcggccacgcccgttcagcggaaagtctggcaggaaaaaatgcgggaacgtgaagccgacctgaaagcacgggggttactgtcatga

SEQ ID NO: 231406 - DNA, 246 bp, Klebsiella pneumoniae
atgatgcgttgccctttctgccgtacagcggcccacgtccgcaccagtcgctatatgtctgacagcgtcaaagagagttacctgcagtgccagaatgtgcactgctcggcgacattcaaaacgcatgagtccatatttgaagtgatacgttccccggtcgtcgatgagaaacccgcaccggtgccgacagtccccgtggcaccccgtcgggtaaaaggctgctacagctcgccgttccgccattaa

SEQ ID NO: 231407 - DNA, 567 bp, Klebsiella pneumoniae
gtgaccaccctgaccttacagcaggcctatgaagcctgtcagacgaacaaaaccgcgtggctgaaccgtaaaaccgaactggccgccgcaatgcaggaatatcaggaattattgttggatgacaatgcatcaggtttccgcagattacagacgctgcgtgacctgattgacgtaaaaaagtggggagttaatcaggccgccggtcgctacatcttctcgcacgaggaagtgcagcgcatcagcatccgtaaccggctgcatgattttatgcagcagaacggcgcagagctgaccgccgcacttgcaccggagctgatggggattaagaaccagccagagatgataaaaaaccgtgcgcttgaccgttcagtctcttacctgagagaagctctttccgtctggctgaccgcaggaaatgacattaattattctgcacaggataacgacattttaacggccatcggatacaggcctgacgcgccttcgcgggatgataatcgtgaaaaattcacccctgcacaaaacatgatttacgcccgtcgacgcgccggactggccgcgcagtag

SEQ ID NO: 231408 - DNA, 579 bp, Klebsiella pneumoniae
atgaacaatattgtattaaatgacaaagagttaagggaggcactaaaagattggctttttcgtaagtctatgaaaccaaaaaaaataatagaagagctttccgttaataatggacttgctattgcagatgtggtggctatatataaggacctacattgcttcgaaatcaaaggtgacaacgacaaaatagaaagagccttaaaacaaggtgtgtcatatgatctttcttttagaaaaatcacattactcactacagaaaaacataaattaaaagctctgtctctcgcgcctagtcattggggggttttgatcgctcgaatagataaaggtcagataaaattaacatatgcccggaaaacaaaagcaaatgcaggattcaatccaacggtcgctttgagtacgctatggaaaagtgaaatgctcgaaattttaactaaagaaaacatctctattttaagcaaagacaaaaacagagatactatttcgctgcgaatctctggtcaacttgacaaacttagcgtaagcagcgaaatcagtaaacaattgcttcatcgctcaagaatcatatatgataaatga

SEQ ID NO: 231409 - DNA, 1104 bp, Klebsiella pneumoniae
atgtataactacacaccttttctaaagttaaaagttagtgaaataagtgcacttaaagaacttggtgcaaataaaaagaataattttattcctttttttgattttcctcggaaaaaaccgaaaaaaagccgttactccggtgagcaaaaaagcgataaaaatcagctatttgcgaatgatttggatagacttgaagcaaaatttaatagcaccttgaaatggataaaagaattttatctagataactatgatgtcgaagatgaaatatctttagggcataaatatcactattacgacataattagtaatttttcaaagtttggaatgatccctgtcgttgctctcgacagaagtccacatcacttattatccgttattcatggctttgaacatggcttatttaaatataaaaaagtcgcacttcgattaacaaaagattatttctgcaattattctctttttaaagaagagatagatgaacttattgaaacattagagccttacgttgactcatttgatataatatttgattgtagggtttgtaaggcaggtgatgccgataaactttcaaagcaaatagtaaattttgtttcaaacttaaaatttaattctaattacaataaattacataaaataattacaactggatcaatgattccatcctcaatcagtgagttactggaaactcaggctgaactggatattatccgagaggaaataaaaatttataatgctgtctttgaaagttataaatcagattataaattagtgtttggtgactatggctgcgtaagccctgaatattctgacatagaattatttgatgaagatatgcaaaatgtcactactgcaaaggtaatttatccttaccatgatcgtctttttattaagaggggtgggcgtgtaaaaagtgataagcatcagtacaacgagtttgcagagtatattgtcaccagaagtgggttctatagaggtaaggaatattcttcgggtgatctatatttattccagaaagcaaattatgagggtaagtctgttacggctgcttcaatagttaagcctctagtaaaccttcatttatcatatatgattcttgagcgatga

SEQ ID NO: 231410 - DNA, 876 bp, Klebsiella pneumoniae
gtgaaagataatattgacgatattgacttctctttcggtaaatattcttctacatcgctacaccaggaatacgatgatttcctgcgattcagtgattacgtcgaatcattgccagcagaagtcaaacgctcaaaaaacattacgggcaggcggaaaaattataagaatatttctactcttttttcatcattccgcaattctgatggaaaaaacgcgactttgtttaggagaggaacttcattcgatgaaaacctcattaactcttggttatcatttgtatatgaaaaagaagcatttatttgctcaatgctaaatgtaccgcaatatactccgattacgaacgatgttttaagcgagttcaccaaaaatagtattaatgaaaattttccattagttgcgccaaaagttctacttgaacttggtataattttattatacgaggaatcaattccttcggcaaaggtagatggtgttgtttatgttaacgaccatggaaaccccgttataggtatgagtctccgctttagccgaatcgacaactactggtttactttaatgcatgaattatctcatgtgttattacattacgatcagttaggttctccaatcattgatgatacggaaagagagtttgatcctgaggatttagttgaagctcaagcagacaggatggctttagatttattaataccaagaagtatgtggcgaggatgtgctgctaaacgctcacttagggaagacgatctcttttccttttctaaggaagttggaatacatccagcaatagttgctggtagaataagaaaggaaacagggagctataaaattttctctaagattgttaatcagattaatatcagggagatggtattttaa

SEQ ID NO: 231411 - DNA, 681 bp, Klebsiella pneumoniae
atgaatattgatgtaaatcagctagttaagcttgggattattccacctcctgatgatgaagtcgtgattgaacaaggctgtcttataagtaacaataatactgaagatccctattcagtattatttggctggagccttcccaatgctattatttgcgatcaggcatggaaagagtatcgattaaaaatgctcacctaccttaaagatgaatgcgacgatgaagaacgggatgagtatttatcgaaaattcaaacagaagattttcattggaactggtttaataaatccagatgctataacacagaagaatataaatggttcttcttaaaaactggtgatagcgttgaagcagcttgtttaatatactttccgaaaaaaagtgcattaaatgacgaaaacattttttatgttgagtttattgctgtcgctccatggaatagattaactcctcttgaaaaaaaacgttataatggagtcgggaaaaaattattacaagcagttataaaatattccgcagctacactaggctataaatatggtttctgtttacattctttaccccaagcgcaagggttttacgagcatattggtatgattcatatcgacgcgcttgataaagcaccattgcagtattatgaaattgatgataataactctatgagatttgcgggggttctgtga

SEQ ID NO: 231412 - DNA, 192 bp, Klebsiella pneumoniae
gtggatagagatttaaacgagcaagtcatgattgaacgggtcgagatgattgcgcgtctgacgacagagggtgtttgtcaggaaaaagatcgtgaaattgcactaggattgatagccgaacttgctaaagggaatttgatgaaaaataactcattttcggtagtgttctcaatgaaacctattgaaaattaa

SEQ ID NO: 231413 - DNA, 993 bp, Klebsiella pneumoniae
atgacgacttttgatgtaggagatatgcatccaaatacacctcatcttctagctgacttagtagagttgctatgcatcatcaactataccggcaggaatacattccatcagacagacttagcaagtttgctgaatgtatcaaataccagtgtagatgaagtggatcaggaaaggcgtgaagtaaggagaataagttcagatgcagttttaggcgatagaaccgaagcccagcttgaaaatgtctggattcaactaagctataggtttgcaagcctgaacgatatgtatcctttcattgttgaaggggatgaaattcgtatgcgagatgaacaaaccaataaacatagggtatacatatttacactatgttgttcacgcctacgctctttcattcgcattcgtggggctgcacaacgctgggctagagggtttgctattttgtgtaaatatgcaacacaagcccttttacctgcgcatggagaagtcaaaatttttgacgcgaactcagaagatcgtcgttcctattatggtacagatttacgtcgagctttacgcgttatgggtagtgatttaggtgttaaacgagttgatgaagaggaatgcgaccgggcgggtagttctggtgatgcaggatttgacattattgcgactgttaagtttgacgataatcttaactgcaattttggcattttgggtcaatgtggtgctcaagaagaaggttggcctaagaaaacccttgaagcacactcaataaatttaagcccttatttccatacaactttcgcttacccttctgtgatgtttacacctgttttttatagagactccaacggtcaatgggttacttctcgtcctacttcaggggttattttgctagacagattacgaactttatttctactcgacaaagcaaaccactgggactcgctgacagagtttgcgtggtttgctgaatttgagtcggaattccgcagcgtggtacctgaaccttaa

SEQ ID NO: 231414 - DNA, 1104 bp, Klebsiella pneumoniae
atgtcagatgtaaaaatgattccagtagaccagttggaactcgatgatgcgaacccgcgccttccgaacggtgtagcacgcacgcaagaagccatgattaactatattgcgacatcgacttctctagaagatttaatgagcgcaatatctcaaaacggcttctttagcggtgaaccgctcatcgcgattcctggtgataatggaaaatataaggttgtcgaaggaaacagacgactcacatctgtaaaacttatacttgatccgtacttaagtgaaaaaccaagcttaagggttctcaatatacataaagaaaacgtcagcgtatttgacgaattaccagttattgtcaaaccacggagagaagatgtattaccctatctgggtttccgtcatatcacaggaatcaagcaatgggacccgcttgctaaggcaaggtacatcgagcaaattttcgatggcactgattcaacgaaatcgccttcggatcgttattatgaagtcgcaaaaataatcggcagcagaagagatcatattaagcgaaacttagatgcccttgcagtttataggaaaattgaatcagaagatttttacgggatagatgatttaaatgagcaaagcataaaattctcgatactatcaacagcattagccgatgagagaattggttatttcgtaggtgtagatataactaaagatggggaggtaatgccatcagacccaataatcaacccatcctcacttaaaaatgaatccattaaagagttgactcaatggctttatcttagagacaaagatggaaatactaaagttggtgagtcacgaaatctaagacatctcgctgccattgttaataacacaagagctttacaacaattcagagacggcgcaccactaaacgttgcatatcaacttacatccgatataagtgaagactttttagagattctttaccagatagaaacattaatgattgaagctgctggtatggttgcaaatgttgagttcaatagcagcgcatacgatgtagccaaacgtattaataaaaatattaaaatgattggtaaagagttagctgagaaggaaaaggacgatgacgacttttga

SEQ ID NO: 231415 - DNA, 1623 bp, Klebsiella pneumoniae
atgcacctacccgaacacaataaaaacatgtttataacgtttctctctggcaccacgacacctttcccacacatatatgatgccgtcagcgaacaattgctcctgctcattctcaaagcccggcaactgaatgaagatcctgagtacagcaaatggtttgctgagcagcatcaggtactcacaatgctgcaagcccagagtgaaaaaattaacaaaatttatttaaataatagcttgccgcatagttttaaaaagaccaagcaagacagtctcattaatgcacttacattcatgtatcaaatttatacaggttttgatgagggcaaggtcagccttaagacatggggagagatgaaccggcagcgatcagagcggggatttcgatatgcggagcaaaacagactctgggaagaatttattcatgatgatatgtttgccatcctgacagagggtccgacacattgcccgccgattcctcctcaggcaagaaaaggctactgccatcaggatctttccatcgcacattcatgcagtaacgagcttctttcccgattaaataattttcacaagattgattcgctaccgatactcgctgatgcaatttataacttaattactttttttcgtcatgcgggggctgctgttcccgtctgcctgtccgaatttgaaaaagtgcacagtgaaatcctggtagcagaaatgcgggaaagctatgttttcaaaaacattatcaaattaatcaacgatgaagggcgtaatcagttcattgaaaggctcgctgaacagctcgaatctcagcacgcctactacttgttcgaccagtttataggcatctatgcctcagagatcgcacagtggattgctgagcttaacgtttattttaaagatgagcagtcaacgccatttgcctggaaattcacaaccattgcggctgatgcccccgacctctcagaagagaaagaacagaaaccgaccgtggcatgggagagcgactattgccagatttcaattaagcgagaaaccctactgaaactcatccagatcaatgctttgcatgatgcagccgactctttggctgactgcctcttgcgtatttatggtaagtctgccgaagtaatgttcagagagaaaggtgctgctccgccaatctccgacaccgaacattacgtctacaattcgaacagctaccattttaaaaaaacttttcaaggcaattatcagaagttcataggtattttgcagtcttttgaaaaatggcatgaaaataataaagtgcttctgattagccacaaaaaaaaacgtattgagcgtattgatgtccaagtccggctggctgggctgagatgctatgaccttaaaatgggcgttccagacggcaatagattgaaagtaaaagacggtgtttatgatctggtaaaacatgacaccagtcttcgctttaaaaactccatcagtgatatctcacttcagcggtaccattctcaagtaaaaacaatcatcaataaagacatagatgatttgctgctgaaccaacaaaacaataattctaaaagcccattcagtggcgcgtatcacgctataaagcctctatggagcaagtgtgaaatccttgagggagaatga

SEQ ID NO: 231416 - DNA, 360 bp, Klebsiella pneumoniae
atggacattgctgatgatatcaataacgccgcgtgtatcagaatggaggatgagcgtggcacgtgtaagatacctcttgatgacatcccactgggtgaggaagcgttgcgagtgaaagaggatatgcccggcgttgataccgcaatccagatactggaagacttggccgaaggcaaaattcctgctactgaagtgagtgaaaaactcaaagaggcaatggaagacctagacactctcgatagcacgcttcaggatgttggtgctgaagatgtcatcaaggcctctcagtcgtctgacgacgactacgactttcagggggatcaggatgacgaaacatacgatgatgaggagtatgattaa

SEQ ID NO: 231417 - DNA, 2340 bp, Klebsiella pneumoniae
atgccttcaatcactgaaaattcgcaatgggaaaatattattcccttaattacccgcgcggataaagtagagggcggaagcgcgggcctgattaatgttcagacccgtatactggccgaccgcaccacgtacctgaaagagcagctcgacgcctataatggcctgctgagatcaggtgacctgccatttaccgataaaatagcggctcagagcgccatcactgccggaaagatacctgatggcgggattttctccgtgcgctcagataaccctctctactgggcggaagagtgcaaaaacgtatcgggatccgttatttcaaccgggaagtatttacccgctgaccaggcgctgcgccggtctaatattctgttcgatgcgtttaatgagcaatcagcctcagatcttaagtttgggggatgggactggtatcgcggggcagcagttacattcagctcgtcagatactgatatcccgctgccgaccccggtggctcagtattctggcgtatggtctgctgacaaatactacgacctggctcgtttacccgtcagggctggtgatcggctcactttttccgtgcttgcgtggtttcagaatgcgggatctaaatttcatattttctggatggccgccaatggtgctgtgatttcgtccagatcacaactggcgttgtctgccggcattaacacccccgtattaaccgacattattcctgctgacgcctcatatgtcaggatccgtgtggaaaataccaccgctggcgtttttaaggtcggtgcctatgctgctgcccgtggcgttatcccaccggagtttgttcgcgccacgccggacaaaacttatctgtcagccgtcatatcatccgggatttcggggttaacatcacgcgttgatgcgctgcagggcgctatctctgtcggctatgcctacgcggcgacctggcaaacagggaagtttatcaaccccaataccggggttgtgactgataacaccgcactgaactgtgccattattccacacggtgacggggatggctggctggttacagcgttggtcacaggctcagccactgccctggctgtgtacatgaatgcggcgggaacggtgctgggagtggaggggcgcgggacgacaacgccgcagcaatttaccagttaccgccttaacgttccgtcgggaaccacgcagatcggtatcacgggccgtaattcggctgagatgtctgttaaaaaactggcggtcgtcgagacggcaaccgttctggaaaatatcgactctctggaactgaggacgcaggcaattgaagactctctggtttacgatttcgtgaaacaggatgtatcaattacgtcgggtgcatatataaaccgggctaccggtagcgttgtggttaacgcagcattcgactgcgctgtgtttgactatacccctggtgatcgctggaaagtcacggcaagggttaacggcagcggggtttcgctggcggtctatatgaacagcgctggaacggttatcggtactgaggttgccggcacgacggaatcggtggactacaccgactatgaactgacgccgccctcaggtacggcaaaaattggcatcaccacccgtattgccgtcccgattattgccaaaaaatatgttgttgttcccggcggcggcagttctgtcagtccgtggtccggtaaaatcattgatgtgatgggtgacagcaacgttgcctataacaaatggcaacctctggttgctgctgagctgggatgttcattcctgaatcacggcataggtggttcgaaaatcgccaaaccggacagctcatcaacgcaaatcagcatgtgtgatgatgtgcgaattaatgccctggacacatcggcggcggcgtggatttgtggcccgtggggaacaaacgactgggcgcaaaatattccgattggaagtatcaccgacacagtgaacaccaccgtttacggcgcactgaacatcatcgctcagaagctgcgggcgcgggccccaacaaaacctgttctgtgggccacgccgttcaacggcgactatgattcgccacgctcatcggcatgggttgacggtgaaacaaatggttatgggcgggtttctgactatgcggcggcgatacgctccgtggcgttgagatatggttttccattaatcgacctgaatgccgattgcggctggacgaagttcaacagcaccagttttttgctgacggaaggggattcaaacctgtcccgaatccacctcaatgcaggtgcggggccggcacgaatatcggcgctggttattgaccgtcttaattcccttgagcagtttgccgtctga

SEQ ID NO: 231418 - DNA, 1617 bp, Klebsiella pneumoniae; identical to SEQ ID NO: 106545

SEQ ID NO: 231419 - DNA, 207 bp, Klebsiella pneumoniae
atgaagaaaattatactttgtgtgctggccctgctgccgctggcgggtcatgcaggaaaaatcaccatgagcaaccccgacgaacaagagttacagggcgggaaaaggctttgcacttacgaaaacagcatctacctatttacctacgtcactaaaggagagtgtaaatatacgaaaacgttcgacacctcgggcaacgaaaagtaa

SEQ ID NO: 231420 - DNA, 561 bp, Klebsiella pneumoniae
atgaagagagtcgagccagtcagagacaaagagaagatcgcagagattgaagccctgctacgcaaacataacacaagcccaatctacggtgacttgtgggttttcctgaaccagacagccgcgcgtgtcactgacgccctcacactccggtttgcagattttgacaagatagaggggaatgtgttgaatctcagggagaagaaaacagggaagacacgctccatcatgctgacagcgcgagcattggaacttgtagcccatcgccgggctgataatccgggtcacgaatatctcttcgaggtggacagcaaccgggccaagggcaagccgatcagccgcgtaactgtctcagccaaatttaaagaggctggggagatcctaaatctgcatatcgcagcccatagcccacgcaagaatcttggctatcatgccctcaagcggggtgttagcttaccaacactgactaagctgtacggacatagctcacaggccgtcacgctggcgtactgcgggctcatggataaggatgtcgaagatgtttacaatggcattgattattaa

SEQ ID NO: 231421 - DNA, 447 bp, Klebsiella pneumoniae
atgggaaaacctgccaaatttgattatacacaggatgcacagtctatcgcatgggccgtattaaacggcgtcacatctattcaaaatctccacgcttttcgtaatcgcgtacctggcggcgcaaggcaggccgacaggatttatccggagacccgcgaagcacttcgattaattggtgaggagcgtaaaaagacgcgtgattgtaaagccttcaaggatcttctccgtccgttttcccagaaatacgccgcaggggaaacactgacagcgattttagcccccgtgctgaagggctatcgccagatgtatcttgaaaagctgggtctcgaccttactcatgagcagatcataatgttgttggtcgctactgatggtgtggaacgacttgaaaagtacggttatagcgtaatcggtgattttccaaccgctacaactacccgccactaa

SEQ ID NO: 231422 - DNA, 177 bp, Klebsiella pneumoniae
atgaacatttcgttcccggatgagacctaccgcatattgctgaaagaggcgaaccgtcgcgacatgccaatggcgaaattatgcagcgaattgctgcaaacggcagcaaaaataattgaaaagagcaagacagataaccagcgaggatataatgacgaccgagaacgtagaaactaa

SEQ ID NO: 231423 - DNA, 669 bp, Klebsiella pneumoniae
atgacgaccgagaacgtagaaactaaaatttacaaatcactaccgcagccgaacgaagacaaaccaatcacggttgatacattttccccctgtccggttctgatttctcgaatccgtaaatttaatggggtgaaaatcgatctcaatgttatcgcagtatacggttaccttctggggtggaagaaaaccactgggcgagtaacggtatcaatcccccggatcagtgatgattgcgcggggatctcagaatctacggtgaaacgtgctcgtaaagcacttaaaaaaatgggatggatagattggaaaacaatccctgacgagggcaaaagcaacacttctcactgtatctataccgtcaaagatcccgaggacatactagctgaactcaacgctggattgtcacagcagggtgatgcagtagttaccatcgcaaaaaaacagaaagttacaaccgaagagtgcggtaaagatgaacaaaaacgtgatggcgtggaatctgccgcgcctgctgctggaaaaccagacggcgtacctgttatggatattcctgtcgatgctgatgtacctgccaatgatgatgcggtgatcagcgactttaataatccttacctggatgctgtagtaaaagattggcagaaacaaaaacatagtggaggaataattgtgtga

SEQ ID NO: 231424 - DNA, 345 bp, Klebsiella pneumoniae
atgaaaactttagaagaccttcgcgccagcctcctggaggcgatgagcacagcagccgatcccgtagaattaaacaaaagtgctgaagacgtgctagctgacgctgtccaggaatacctgtcagcaccgagtgtcgccactagtgaaccagctccggggcgtggcagaccagggatcgcaatcactcacaaattacagggttatagtgcaaacaaccgcccggtgtcactcctaatgaaatcaggcattagcattcaaattaataaagccgctcttgataatgccgctcctgagattctcgccgcactcaagcgtctgggctatgacgttaatcaggaggtgtaa

SEQ ID NO: 231425 - DNA, 2166 bp, Klebsiella pneumoniae
atgtctaacggcaacattattgtaacttctacagttaacaaggttacttgggtagttgatgagtcaagttacaaacgggcgctcaagcggattaaatccctaaagagcgctcacgagaagcctgctaaagcgctggaggctgcacagaaacgcgcctcgcagagtgaaggcaaagcagcattagccgcagcgaaagcccagacagcgaagctacgccaggccaaacagatcagcgctgaacagcagaaacaagcacaactttcagccaaggttgcccaacaagagcaggcccacgctaaaaagatggctgctattaacgctcgtggtgcagtccagcaaatcaatcaggccgatcaactggcgaaacagaatgagcgccttgcccgtattagcgcgaaggtcagagcggcggcacggtcaagatcgatgacctataaccccagcatgggtggtacagctcccgaaccaggattattagcagcgcaaacagcagcaatgaatcgcggccatgcttctatcaccaacgatattatccagacgaaaaaagctatcgcactggaagagaagcgccagcgtgagaaagaagccagcctcaagcgccagagcactgcatacgataccctacgccgggccagcttgacgatcagccatatcgaaggtgccagcctggctgacaaaatgaaagcggtgcaggcaatcaaagaagctacaaaaggctacgccgagcagcgttataccattgcagagatgagacacgagctagcgaaagcgactctggaaaccagacgccaggcacgattaaaccgccagattgttaaggataaagcgaaagctgagcgtgctggtcgcattaatgccgaacgtttgacccgtgagcgcaaagagcgcggttatggtggactgacgacggcaggcgttattgcaggtggttccctgattggctcaatgggtgttgctcgtgttggtcagaccctacaagggagcctcgaacgttcacgcgatgtgaaaaagctgcaacagtatggaatctcacaattggagtttaccgcacttcaggatctggctatgagccgtgtcggttactcactgagtgctgacaaactcgctgacctcaacaaggacacgactgaaaaggccggggaattgctgaataccggctctttcaaacgtaacaagaaaacaggacaggtgaacttcagcggcggaggtgagttcgcagatatcatcaataatgtgcttgcttccaccaacggcaaccaaaaggtagcccagaaagtgattggggaactgcaaaagctgaattttccaactttcattacatacttgaagcagttgcagaaaacttttaaatggacggataaccagacccggcacctggctgaagccgtaaacgatggttctgtcttccttgaggttttcaacgatgaaggccagggcttgataaatcgtatgcagaaactttctgctgaaggttggacattatcagaagctcagcaagccaacctcgataagttggcagcattaggagctgagtacaaccgagtgcaaaccagtctctctgaccacttttcaagcgcctttgtgaatgggcttcaggattacgccaccaatacggatacactccgtcagtcaataacaggattaatcccgattgctgacaacctgggccaatcactgggtgaactcacaactaacgttatcgcgtgggcctcgcaaattggcggagaacttcaaaatggtgcaactctaccgaccgctatctataacaccaccgttgatgaaggcagcaatgccgcagcgcagtggattaaagataagacaggttttgatcctcgtgtcatcggtcagacgcttaaacagatttacccgtggctggatagttctgcacagaacaacatcggcagtggacaggcctggacaaatccggggttaacccgtggggttgctggatttagccaaccacaactaacctttaccccacctgagccgttcggttctactggttggaaaccagacagctccaggtttaatctgactggtgaggcgacggttaaagtcgaggttgagcagactctgaatgctggcgttttagatggtcttattgatacaaagatcaacgataacaacgtcagacagcagaatatgatactgggtatagctgattaa

SEQ ID NO: 231426 - DNA, 249 bp, Klebsiella pneumoniae
atgccgaataaaatttgcccgattacaaatcggcctatcaagttgaatagttgcggtaaacacatgccacgttattgcgtggtagatggcaaccgttacgagagtttccaccagtttgctacccaaattctaaaactatctgttagtgaaattattggattacgtaatcagcatttcatcgagagacataaatcagttgttaacggctatagtgtagagatgttctataaatgtgatgaaaaaaagtaa

SEQ ID NO: 231427 - DNA, 579 bp, Klebsiella pneumoniae
atgaaaaacgatactgtgattcagttaagtaaaaaaccgctgtggaaaaggaatatagccatccatgaggcaggccatgcactggctgcgtggttaagtggatcacggcagattcaaatagcactagctgatgagttcagaatagccaggttaagccacgggcaagaggtggaggactgcgcggccgtatgtaattacacacgcggtacatccgcagttattccgcgactggttatctgtttttccggcgtgatggcggagcacgtgtattcaggcgatgacccggaggaattacttaaaaagggcggcagaggtgatgccagcgatataagcgaaatactgaaggaatgccgggcgagaggatcgacacaggacgagtgcgatagtctttacaacagagcttacgacatatctttaaagatggtgaagcgttactggtgggaaataatcgcgctcgccaagatgacagaacatgtgagccatgttcccaataataaaataggtatgcttctgaatttattttattcaacaagcggacgtaatttctcctttgatgagaaagaatttaccggtgattaa

SEQ ID NO: 231428 - DNA, 384 bp, Klebsiella pneumoniae
atggctatggcccgcctggcggtagctctgccctgtaatgcggcagataacggagaggctactttctggttgggcgtgattgcctttggtaagcaggctgacgcgctggccaaacaccagaaaggcgatctcatgagtgtggcgggcaatatgcagatcaatcagtggacgggccaggatggcggcacccagcagggttaccaggtactggccgacagcgtgatcagcgccagaacggtacgctccggcgggaagcgggccgagtcagtcaaagcaagcggagccagcaggggccacgaaacgcaatccgcgccgggatgggagctatataacacccctgatgattttgaccagcgcccgccgtttgatgatgttcagttttga

SEQ ID NO: 231429 - DNA, 1446 bp, Klebsiella pneumoniae
atgtttattaaaagtctaaaaatagaaaactttaaagggtattatggtgaagataatagccttcaatttaatataccagatggaaataccgaaggtagtggcctaaatatatttgttggtgaaaataattctgggaaatcaactatatttgaaataatggattttatcaaggatggaacaaagaaaaatatagaagaccttcttagtaaatctgtccctgatgatatcccagagtacctttcggcggaagttatatttacaggtaacttgtcagaaattattgctgctcatgttcagggtaataaggttgcatccttcaatagtcatatatatgaagataatggaattcagtgtttcagagtaaaaagaagtagtgaagtaggtgagaaaaaaatattattctggaatggaacggattttactaacccaagcgggatcgatgccccgttcaaaaaattttatgataacaactttatctgggctgatacaaatccaagtaacgaagcaaaatttggttcaacaacgatatgcggttctctcttgaaagaaattgcacttggacatgcggacacagaggagtataaagggtttagtgctatgtttcagcatgtttttaataaccctgactctcagttgagaagaaagttatcaaccgttgaacaacaagttaaacagatattctctgagcaatttggtcatgcagatatatcatttttatttgaagagctacaggtcgaaaatttctttaagactatatctataatggttgatgatggtgttaatgtccctatgggtgagaaggggcatggtatgcaaagagccttggctttatcattactccaggtgtatgctgagattgcctgtaatgctcatggtgctgggatcagtaagccattttatttattcatcgacgaacccgagatttgtttacatccatcagggcaacaaaagctcttggatgccttgatgattatctccaagagcaaacagatatttgtaaccactcactctccttttttgctttcatccccacatttaaaaaatgtgggactttttatctttaagaaagacaacaataagtcttatatcgaaagagccgatacttcgcctctgtttgcatggagtccatcgtggggtgagataagttataaagcctataatttaccgacggttgatttacataatgaattatatggggtattacaagaaaaaagtgaaaagttttttgaaaatgaatttgaccaatggctcgtttctcaaggtttaaaccaatcgaaaaagtgggtcagagaaaaaaagggtgttgcgcagcagcctaataacgtaacattgcaaacatttatacgaaaccatatacaccatccggaaaatgaaactatgcgtaccaatctatataatcaaagtgaattggatcaatctatttcggaaatgatacgtctcctctga

SEQ ID NO: 231430 - DNA, 429 bp, Klebsiella pneumoniae
atggcaaaacctgcacatctggattttaccagcgcaaccgcaaacgagatcgtcgaggccatcgacgcaggaattacaaccgctcaaaatttacacgcattccgctcccgcatgggtggagctgcaaaagccgataaacattatccagagactcgccaggcgctgaacatcctgaaacgtctgaaatcacagaatcgcggcgctaaaaacatcaagaaaatcctctctccgtataacgccgaactggcgaaacagcgtgacgttctggacatcattcagcccgtgctcaccgcgtggcgtctgttttacgcgaagcagggaatcgggctgatgaatgatcaggtgctgctgctgaaaatggtggaggcggctggcgagcttgagaagctgacaggcgaacccgtcccggatatggcaacgacggattaa

SEQ ID NO: 231431 - DNA, 222 bp, Klebsiella pneumoniae
atgaaactttcgcttgatgacgaaacctacgcgattctacgcgaggagtcggatcgcttggggatgccggttcccagaatgctccgcatcatgtgccaggacatggcgcggaatattaaaaaaagagacgccgtgaacggtgaacgcctgataacgggccagccactacccgaatcactaacgaacccacagggaatgaacaatgagagtaaaaaaaactaa

SEQ ID NO: 231432 - DNA, 951 bp, Klebsiella pneumoniae
atgagagtaaaaaaaactaaactgccgcagacaccaccgccagacgaaccattcaccaacattgaaatgcgtttggtttgcgctgacagcatccgcatccgcaatacaggagaggtcataacatggaaaccggacatgttccgcgtttatctgtacatgttcaatcagataaagggattcgaggccagcggcggtaagttttttcaaaaacgggaaaaaatctggaaatgctgcggtgtgtcccgtgaccgactggataagatcctaaaatcccttttaaagatagggttaataaaggatacaggagagagacggacagccccaggcgctccacgtgggatggtggtttataccgctttccgccttatggaggtgattggaaacctggagatcatcttcgcagaagatgacggcgagcctgtttggaatcacgaacgtgccagcgggaacgcggccaaaaaatccgaggagaagcagggacatggtaatggtcatgaagaagctacagaagctacagaagctacagaaccgcagacagaatccgccaaccagcccgcagacacatcctctggtcagagtgctgacgtggcccctaagtcttccccgtttgttgctggacagcgctatagcgtggaatctgacgatgatcgcaccgagggtaataattcggggaatctggaagtccaaatctttgatgtgcacggcgtcattactgaggcgtttattaacagcctgactggtgatgtggctcctaaccgcaacgctgacggcacattgcagagtttccgttacgtctattgggtggctcgtcacacacaggatgcgcttgacggaatttcgacttgtaccaaagatgaatacatggcagaggcccggccctggcacattccaccgcacctgttatcgacaccgacaacagagccggaatacgacgaagatcctaagttttaa

SEQ ID NO: 231433 - DNA, 399 bp, Klebsiella pneumoniae
atgaaaaacttgctcaaaaccgttcgcgattccatagccgcagacatgaacgggcgcaccatcgaacagatggaaaccgaacagctcaaacagaatgtaaaaaacgccgtggatgactatttaatccgccatcccgattggcaaccatcaacgaagccagcgccagcagtcgcgccagttgccaacactaaacaaaaggccaaacgtatcatgaagacgctgggcgctggggcaggtgtctttactccccctgttgtggacgaagcggcgttagctcgtgctcgctccaaatgccgggagatcgtcgccgccgatccggctgcgtactcctacgtgatcccgtcagagccactgcctgaccaagataaaccgggcggggcgggtataatacagggctaa

SEQ ID NO: 231434 - DNA, 393 bp, Klebsiella pneumoniae
atgagccaaccgctacccaataaaaatctgccgatgccctctttacgcaatatccaggcttttattgaagtcgccgctaccggcagccttaatctggccgcagagaatctcaatattaccgcctcggcggtcagccatcagatagccagcctggagcactttctggggaaaaaactgttctcccgcagcagcaaaggcgtcacgttaacggcggtgggagaaaaatatctcaaagaggtctccggggcgctgaatatgattggccaggccaccagccaggtgatcaacgatatccatcaggattatttacgcattcattcggcgccgagcttcggcctgctatggctgatgccccgtctggataaattccgccaggcgtggccatcagcctga

SEQ ID NO: 231435 - DNA, 2202 bp, Klebsiella pneumoniae
atggaaaaaatagttcctcaatcggatacggattttattcctggggttgttacagaatattcaaccctttcactggctcaacaagatatagcaaatattcctgatggttacacgtgttgggtaaaaaacactgcagatactgtgctttcagatgaatatgtcaacaatgcaggcacactggtccctacagggcgaaaaacacctgaatattcatttcttcgcaggggtaatattttattcgatgccttcaatgagtatacctctaccagtttaagactaggtggatgggactggtacagaggggcatcagtatcattttcgtctgtagataccgatttaccgctgcctacgccagttattcaggcctcaggggtatattcctttgacaaatattatgatctgaaaaggttacccctgagacccggcgatgatttaacctgttctgttctcgcatggttccaacagcctgggggtagatttcagatcagttggctcaacagtgcaggtgaaatcttatctaccataactaaaacaggccttaccacagggattgtatcaccggccctgaaaacacagatgccggttggtgcggtttctttgcgttttcgggtagaaaacaccatttctggcagttttaaaattggtgcttatgcagcagcggtcggacttgttcaacctgaatttattcggggagtgcctgataaagagcaagttaaacagcaggtagagatgacgacaatctctctgtcttcacgtattgataatctgaaagtatctgtgtcagatgctgtaacagagggtataactgttcagtctggatattatatcaacagaaccactggcgtagtcgctgcaaaccccgctcttgattgcgcctttattgatcatgttgatggtgacgtctggaaggtaagcgccagggtatttggtacggctgtttcactagctgtatattataatgccagcggagaggttgttggccgcgagtatgatggcacaaatgatattgttaaccttaccgattatcttttgagtgtgcctcctggtacggcaaaaatcgggatcaccacccgtactgcagttcctatttccgtgaaaaagatgcagccgattgcatcctctgatttattggcgtcagttaggtctctggaatctaaactctcgaaaattgaggaatcacttccgcacgattttaaaaagcaaaatgtagttattcaaaccagctattacattaacagaacgacgggagcagtctctccatcctcagcatttgaatgtgccattttcgattatgacgatggagatagatggaaggttactgcaagggtaaatggcgccagcgtaagtctggctgtttactacggcgctaatggtaccgtcatcggtactgagggtgatggcacgacggaatcggtggactacaccgattacgagctgacacccccttccggcaccgcaagtattgggatcaccacccgtatcgccgtccccattattgccaaaaaatatgttgttgttcccggtggtagcacggtcagtccgtggtctggaaaagtcatcgatgtgatgggtgacagcaacgttgcctataacaaatggcaaccgctggttgctagtgaacttggttgttctttcctgaaccatggtgttggaggttcaaaaatatccaaacccgatagttcaccgacacaaatcagcatgtgtgacgacgccaggattaatgccctcgacacgactgccaccgcctggatttgtggaccgtgggggacaaatgactgggcgcaaaatatacccattggaactattagtgacactgtaaatacaaccgtttacggtgcgctaaatatcatcgcacagaagttacgtgcgcgcgcgccaacgaaaccaattttttggtgtaccccatttaacggcgactatgattccccacgctcgtcgtcatggatagatggagaaactaaccagtatgggcgggtgtctgactactcaatagcaattcgcgctgtcgctttgcgatacggtttcccattgattgacctgaacgccgattgcggatggacgaagtttaacagcaacaacttcctgatgacggaaggtgacaccaacccttcccgtatccacctcaatgcggacacggggcctgcgcgtatttcctcactgataatcgatcggcttactgctctccagaaactggtagactag

SEQ ID NO: 231436 - DNA, 465 bp, Klebsiella pneumoniae
atgtttgaagtaaaagtatcagtcattactaagaatgctttcacttatgaagcaataattaacatttttaaaaaaatagcaatcccgcacattcaattcataattaagaaaaatggtgactacctgctcggtaaagatgttgtgttttatgagaccctgtcgggtgaattattcttacctaatgccaaatttatgaaatgtaaaccagccaggattttgtttatattgcatgattatactgatggcttttgttttgatgatgtaaaacgatttgagaataacacttttactttctcaatgaaaaataatactcttgagcaactaatgattactatcaaacatggtttggtaaattacacacattcgcaatcttgttcaattcaggaagaaaagattgaaaaacgtgtacgcattaatttatctaaaaaacagtcaaaattactattcaactggcgaatggactag

SEQ ID NO: 231437 - DNA, 543 bp, Klebsiella pneumoniae
atggcagcacgtggcgttaacaaagtcattctggttggacatctgggacaggacccggaagtgcgttacatgcccaacgggggcgcagtggccaatctgacgctggccacgtctgaaacatggcgtgacaagcagacgggagagatgcgcgaaaacaccgagtggcaccgtgttgtcatgttcggcaagctcgcggaagtggcgggcgaatacctgcgtaaaggcgcacaggtctacatcgagggccagctgcgcacccgcaactggcaggacgatgccggagtcacgcgctacgtcaccgaggtgctggtcgggcagaacggcaccatgcagatgctcggcggccgccgtgaatccggagtgcctgagagcgccgcgcagccgcagaatcctgccaccccggcacaacctgctcaggccgcagccaaatccccgaaagcgaagggcggtaagaaaggccgtcaggatgccgccccgtctcagcaaccgcctcagcctctcccggatgatttcccaccaatggatgatgacgcgcccttttaa

SEQ ID NO: 231438 - DNA, 1392 bp, Klebsiella pneumoniae; identical to SEQ ID NO: 111055

SEQ ID NO: 231439 - DNA, 300 bp, Klebsiella pneumoniae; identical to SEQ ID NO: 111056

SEQ ID NO: 231440 - DNA, 1128 bp, Klebsiella pneumoniae; identical to SEQ ID NO: 111057

SEQ ID NO: 231441 - DNA, 831 bp, Klebsiella pneumoniae; identical to SEQ ID NO: 111058

SEQ ID NO: 231442 - DNA, 912 bp, Klebsiella pneumoniae; identical to SEQ ID NO: 111059

SEQ ID NO: 231443 - DNA, 720 bp, Klebsiella pneumoniae; identical to SEQ ID NO: 111060

SEQ ID NO: 231444 - DNA, 720 bp, Klebsiella pneumoniae
atgctaaacgaagccacgttcatctatgaaatgtttattcgcatgctgcccggtattcctctgacactgcagcttgcagcaacgtctattgcatgcggtggttgccttgggctggtgctggccctgatgcgaacctcagactgggcattgctggatgcatttgcgcgtgcctacatcgcccttttccgtggaaccccacttcttgtccagatttacctgatttattacggtctgagccagtaccctgagctgcggtccagtgtgctttggccgctcctgcgccagccatggtggtgtgctgttctggcgatgtcactgaatacggcagcgtacgtcgcggagattattcgcggctcaattatcaccgtgccaagagggcaggttgaagccgccatggcttgtggcatgagcaccgtactgatgtaccgccgcatcattatcccacaggctctggttcgcatgctcccagcatatggcaatgaaatcatcctgatggtgaaagccaccgccctggcctcaacaatcacgctgatggaggtcacggggcttgcagcacaggcgatttcagaaacctatcgcccggtcgaagtttttgccgctgccggtgttatttatctgggactgaatttcctgatggtcagcattattcggttgcttgagaaaaagacctcaacggaggcatcgtccgggaaacaaacgctcaaacgaagctatttctga

SEQ ID NO: 231445 - DNA, 837 bp, Klebsiella pneumoniae; identical to SEQ ID NO: 111062

SEQ ID NO: 231446 - DNA, 1230 bp, Klebsiella pneumoniae; identical to SEQ ID NO: 111063

SEQ ID NO: 231447 - DNA, 1029 bp, Klebsiella pneumoniae; identical to SEQ ID NO: 111064

SEQ ID NO: 231448 - DNA, 1479 bp, Klebsiella pneumoniae; identical to SEQ ID NO: 111065

SEQ ID NO: 231449 - DNA, 1338 bp, Klebsiella pneumoniae; identical to SEQ ID NO: 111066

SEQ ID NO: 231450 - DNA, 1002 bp, Klebsiella pneumoniae; identical to SEQ ID NO: 111067

SEQ ID NO: 231451 - DNA, 774 bp, Klebsiella pneumoniae; identical to SEQ ID NO: 111068

SEQ ID NO: 231452 - DNA, 357 bp, Klebsiella pneumoniae; identical to SEQ ID NO: 111069

SEQ ID NO: 231453 - DNA, 576 bp, Klebsiella pneumoniae; identical to SEQ ID NO: 210604

SEQ ID NO: 231454 - DNA, 963 bp, Klebsiella pneumoniae
atgcttaatcctctccgcgccctgactctgggcggactgctgctattctctacgctgggtcacgccgccccggcggcgcctgacgctctgcgcatcggctaccagaaaggcagcgtcagcatggtgctggcgaagagccatcagctgctggagcagcgctatccgcaaacccatatctcgtggattgagttcccggccggtccgcagatgctggaggcgctgaacgtcggcagcattgatatcggcagtaccggcgatattccgcctatctttgcccaggcggcaggcgccgatttggtctatatcggcgcggagccgcccaagcccaaggcggaggtgatcctggtggcgcagggcagcccgattcataacgttgctgagttaaaagggaaaaaggtcgcttttcagaaaggctccagctcccacaatctgctgctgcgcgccctgcagctcgcaggtctgaaatttagcgatattcagccggtttaccttgcccccgccgatgcgcgcgccgccttccagcagggcaatgtcgacgcatgggccatctgggatccgtactactccgccgcgctgctgcagggcggcgcccgggtactcactgacggaaccgatctgaaacagacgggatccttctatcttgcttcccggccctacgctgaacgcaatggcgctttcattgaaggcgtactcgacacctttactcaggccgatgccctgacccacagccaacgcgcgcaaagcattacgctgctggcgaaaacgatgggcttaccggaggcggtgatcgccagctatctggaccatcgtccccccaccgcggttaccccggtgagcgccgaaaccgccgctcgccagcagcagacggcagacctgttctacgagaacaagctggtgccaaaaaaagttgatatccgggcccgcatctggcagcccaccgccacacaaggagcgaaatcatga

SEQ ID NO: 231455 - DNA, 774 bp, Klebsiella pneumoniae
atgaacactgcccgtctcaacccaggtatcccgctgctgctgaacggggtgacgaaacgctatggcgacaacaccattcttaacgagctggatctgcatattcccagcggccagtttgtggcggtggtgggccgcagcggcggcggcaaaagtaccctgctgcgcctgctggcaggtctggaaaaaccaaacgccggcgaactgctggctggcgcgacgcccctggcggcgatccaggacgacacccggatgatgtttcaggatgcgcgcctgctgccgtggaaaacagtgattgataacgtggggctggggttaaaaggcgcctggcgcgacgccgccctacaggcgttggccagcgtcggacttgaaagccgcgcacaggagtggccggccgcgctgtcgggtgggcagaagcagcgcgttgcgctggcccgcgcgctgatccatcgcccgcgcctgctgctgctggacgaaccgctgggggcgctggatgccctcacccgtctggagatgcaggagctgatcgtctccctgtggcaggagcatggctttacggtcctgctggtcacgcacgacgtcagtgaagcggtggccatggccgatcgggtactgttaattgaagagaagaagattggcctcgatttaagcgtggatatcccgcgaccgcggcgcaccggttcggcgaagctggccgagctggaggctgaagtactggatcgggtgatgaaacgcggcgacagcgagcgtgcgccgcgtttgtttagtcatggctga

SEQ ID NO: 231456 - DNA, 1290 bp, Klebsiella pneumoniae
atgaatactgaaaatataattatcaataaaggatattccgatcccgcaaagtggcatagcgaagatgccgtttgggtccttggcctgttcggtaccgccattggcgctggggtgctgtttctgccgattaatgccggaattggcggcttctggccgctgctgattgtttttgtcctcgcttttcctattacttatctggctcaccgcggtctggcgagattcatttactcttccaatacgccggaaagcagtattaccgatgttattggcgagcattttggcgcgctggcgggaaaagtatttaccgtcatctatttcttcgccgtctataccattctgattatgtatgcggtggctatcaccaacaccgcgcagagctttatcacccaccagttggcaatggccgagcctccccggtcgctggtggccatcgttctgatcctcgggctgatgtttatcgtccgtttcggacagcgtttgataatgcgggtgatgagcaccctggtttatcccttcatcatctcgcttatttttatggcactttttctgattccgcactggaacggcgcaattttgcaaaccgtaagcttcagcgccacgggcgatgggcaggggatcatgttatccctgtggatgaccttcccggtactggtgatgtcgtttaaccactatcccatcatttcgccgatggtggtgcgccagaagcagcgttacggtctggcgctcgctgagggtaaatgtgcgcagatccagcgctacggtatcctgctcatgacggtggtggtgctattttttgttttcagctgcgtgttaagcctgtcgccgcagcaactggcggaagccaaagcccagaatctgtcgattttgtcctatctggccaatcagtacgatacaccgattattgcctggctatcgccgattatcgcctttgtcgctattactaaatcatttcttggccactacatcggcgcctatgaatcgctgcgcgacctgattctggaggccgccgccgcacgcggtaaaaaaccaggtattcgcctcgtcgacgcggtcatcctggtgtttatggtgcttacctgctggttcgccgcgtacaagaaccccagtatcctcggtattatcgaatgcatcagcggtcccaccggggcggcaattctgctgctgttgcctatgtacgccattcataaattaccggtgcttgccccctggcgcggtaaagcgagcaacgttttcgtcaccctgatcggtcttatcaccgtatctgccattttttacggcatgttccaataa

SEQ ID NO: 231457 - DNA, 144 bp, Klebsiella pneumoniae
atgaaggtccaccagattatcgtccacattacggcgctgatttttatagtgcttacgtacgcgaccctgacaaaaacaaaatcgcttttgttttttatgacgcgtctaaaagatagaatacctaaaacggtttcctgcggataa

SEQ ID NO: 231458 - DNA, 1353 bp, Klebsiella pneumoniae
atgtttattggttttgactacggcaccgccaactgttcggtggccgtgatgcgggaaaacacccctcagctgttgacactggaaaacggcagcgcgctgctgccctcgatgctctgcgcgccaacgcgcgaagcggtcagcgagtggctctatcgccatcatgacgtccccacccacagcgatgaaaaccaggcgctgctgcgccgggccattgccgccaaccgcgacgaagacatcgaggtgctgcgcaacagcgtgcagttcggtctcgcctcgctgcagcagtatgttgaagatccgcaagaggtctacttcgttaaatcgcccaaatccttcctcggcgccagcgggctgaagccgcagcaggtggccctgtttgaagacctggtctgcgccatgatgctccacattaaactgcaggccggaagccagctgcccgagcagatcgaccaggcggtgattggccgaccgattaacttccagggcctcggcggcgatgaggcgaacgcccaggcgcagggtatccttgagcgggccgcccaccgcgccggtttccgcgatgtggtctttcagtttgaaccggtggccgccgggctcgatttcgaagcgaccctcagtgaagaaaagcgggtgctggtcgtcgatatcggcggcgggaccaccgactgctccctgctgctgatgggcccgcagtggcgggagcgcgccgaccgccagcagagcctgctcggccacagcggctgccgcatcggcggtaacgatctcgacattgccctggccttcaaatgcctgatgcccctcctcggcatgggcggcgaaacggagaaaggcaccgcgctgccgatccttccgtggtggaacgcggtggccatcaacgacgtgccggcgcagagcgatttctacagcaccgccaacggccgtctgcttaacgatctgctgcgcagcgcccgggatgccgacaaggtggctctgctgctaaaggtctggcgccagcgtctcagctatcgtctggtgcgcagcgccgaagagagcaaaatcgccctctccagcgccgccagcgtcgaaaccgcgctgccgtttattcaggacgagctggccaccgccatcgcccagcagggtctggaagccgcgctggatcaaccgttgacccgcattatggaacaggtgcagctcgcgctcgacagcagccagaccaccccggacgtgatctatcttaccggcggcagcgcccgttcgccgctgatcaaaaaggcgctggccgctcagctgccgggtattccgctggccggcggcgatgattttggctcggtgaccgccggactggcccgctgggcgcaggtggttttccgctag

SEQ ID NO: 231459 - DNA, 582 bp, Klebsiella pneumoniae
atgcgtctgtgtgaccgagatatcgaagcctggttggatgaagggcgactcgccatcaatccgcgtccgcccgttgagcgtattaatggcgcgacggttgatgtacggctgggtaataaattccgcaccttccgtggtcacacggcgccgtttatcgatttaagcggcccgaaggccgaggtcagcgccgcgctggaccgcgtgatgagcgaagagatcgtcctgccggaaggggaagcctttttcctgcatccgggcgaactggcgctggcggtgacctacgagtctgtcaccctgcctgccgacctggtaggctggctggacggacgctcctcgctggcgcgcctggggctgatggtgcacgttaccgcgcaccgtatcgacccaggctggtccggctgcatcgtgcttgagttttacaactccggcaagctgccgctggcgctacgcccggggatgcccatcggcgcgctgagctttgaaccgttatcgggcccggcggcccggccgtataaccgccgtgaagacgccaaatatcgcgaccagcagggcgcggtggcgagccgaatcgacaaggattga

SEQ ID NO: 231460 - DNA, 840 bp, Klebsiella pneumoniae
atgtttaacattaatatattaaaggttttgattactataacaacgactttttatggaggtattgtttcctacgcctcaagcaatgaggtcaatttctgttctgataaaacgccccccagacaagcctatcaaaacggtcaaactaacgccattattgcgttttgccctactgtaaaagatatatctataggaagggactctacacataaactttactctggtcaatggtatatgagatcttctcctgatatgagtcattattcccaatcatctgagggtttaaacattgcgttaggaggatcattatcaacagttaatgcgcactcacaaccaggctcattacctttaatttcaggcgctaatggcttttatatcgaattcatagcaaagatagataataactctaaagatcactggccagctctatggctcaatcctgtagaacataacgctaatgaaaacgatagacacatcacatttggacaaaactaccaacattggatggaattggacgttgatgaaggcggttttcaggatggtatgtttggaactgttatagaatggtatgggaatcatcccaattatcataagaaacaaaacgcacatcctaagcaatctttagttatagatcggacacaatttcatactttctctgctttttatgatcctgagacgcatagtgtaacttggtggttagataataatttgtataacaaaacaacagccccccaaattggttccaaattaaattactatatcattatgagtgctcaatctcatggtcgaaatattccgtataagttaactgttaaaagagtcagagttttcacttccaagtaa

SEQ ID NO: 231461 - DNA, 1239 bp, Klebsiella pneumoniae
atgatggaacctaggcaagtttctgctccaattgagacaggtaaaaatgcaagtttaagcgtctattttgtattgactatagcgcttgcatcttgctatggcaaccttaacacgcttacgcaagtcgctcaatatgtcccttcgcttgcaataatatttttggctttttttttattgtttacaggtaaagtaaaaggcttatcgaagtatgctggagtatctgtagcttcaggagcattaattactttgttggctttgatagggtcaacattatcacaagacatgcaaagttcattgtatgcgttagtttttttactaacttggatatcaatagtaattatccttcaaaaatattcaatggctgaattgctgcgtagttttgcatatggaggtagcatttccgtattgatttatattgttgcatcaggatttaaaataggtggggctttaactgcaactggagattctattactattgatgatagatcaacaggtccatttatgacccatccaaatttaatagctcacacaatggctgtcttcgttatattgtctatttttcaggcttcatcagaaaaaataattggaaaattaatattttattttaccgcagctttgggtacgttgattatactttctacctcatcgcgaggtggattggtagcattagtattggctttggttatcggctacttattagtatatagagcaaattttaaactgattttattgtttgttttgggcgttgttttagcatgtttatatgtggttttttttaatcctgaatttattgaacgcttatctatgataatggatctcaacagtgctcaaagaggaataggtagcggtttttcaggacgtcaagacctttggctaatggttatttctcaattttttacaatgaacataccattcgtttggggtggcgggtttcgtaatgaatggcttagcgagtttatttcagcggtagataatggttatatcgtatcaatagctgaagttggttttatatcattgcttattgttttgattcgactaatactggctatgaaagaatctatccgtagggttcgttttaagccaaactcaattgatgcgactataattagtttggtcttgtttattttagcagagtcaatagttgcaagatatctattagctatcggtaatgctgcatctgtgataatactctttataataattgctggcgcaaaaggatatatccacggtaaaaattga

SEQ ID NO: 231462 - DNA, 126 bp, Klebsiella pneumoniae
atgcgctttaacgtgcgtgtgctcggggctggaaagtgggggggcgaactaatcgaccgcctaaaacagactgccatcccgttgcgcatctacggcgacaggaagtctctgagttacagccagtag

SEQ ID NO: 231463 - DNA, 303 bp, Klebsiella pneumoniae
atgaaaaaaagaaatttcagcgcagagtttaaacgcgaatccgctcaactggtcgttgaccagaactacaccgtggcagatgcagccagcgctatggatgtcggcctttccacaatgacgcgatgggtgaaacaattacgtgatgaacggcagggcaaaacaccaaaagcctcccccattaccccggaacaaattgaaatccgtgagctcaggaaaaagctacaatgtattgaaatggaaaatgaaatattaaaaaaggctaccgcgctcttgatgtcagactccctgaacagttctcgataa

SEQ ID NO: 231464 - DNA, 276 bp, Klebsiella pneumoniae
gtggcttacatctccatcagttgtccctcctgctcagctactgaaggcgtggtgcgtaacggtaaaagtactgccggacatcagcgctatctctgctcccactgccgtaaaacatggcagctacagttcacttacaccgcctctcagcccggtacacaccagaaaattattgatatggccatgaatggcgtcggatgtcgcgccagtgcacgcattatgggcgttggcctcaacacgattttacgacacttaaaaaactcaggccgcagtcggtaa

SEQ ID NO: 231465 - DNA, 213 bp, Klebsiella pneumoniae; identical to SEQ ID NO: 189772

SEQ ID NO: 231466 - DNA, 858 bp, Klebsiella pneumoniae
atggcgcaaacaccgcaggacccctctctgaatctgtttatggcggatacccttcccagcgacagtcgtcaggctcgtcaactggcgcgccgtcagctgattgttgaagcggtaatggcggaaggtgcaatccgtattgaggacattaccgagcgttttgatatcagcctgatgactgcccaccgggatattgacgagttggtggagcgcgggctattgcataaatctcgcggcgtggtctcggcgacggccacgagccttgtggaatccagtgacatttaccgcgccacccgtcagcttgaagagaagcaggcgattgccgaagtggcggcaggttacctagagccggggcaggccatcttcctggatgattccaccactgtctttcagatagcgcgctttctgcccgccagagcgccgctgacggtaatcaccaattcactcacgttgatgaacgagctacgcaatattcgcgatattaccctgctcggcctgggtggccagtactacaactggtgcaacgcgtttatgggccactccacgcgtcaggaaatcgccggactgcgcgccgacgtcttttttgtcagtatgtcggcggtgatggatgggatcgttttccaccagtcggcggagaccatagagaccaagcgggcgatgtttgattcggcgaagcagcgcatcctgatgatggatcacactaaatttgagcgccgggcgctctaccattttgcccacctgaacgagtttgatgcggtgattgttgaccggggaattccggtaccgacgctgcgtcaaattatggatatgggggggaatgtggtggtcgcggatatgaagggaaaagcgggggagcgctga

SEQ ID NO: 231467 - DNA, 951 bp, Klebsiella pneumoniae; identical to SEQ ID NO: 130214

SEQ ID NO: 231468 - DNA, 1062 bp, Klebsiella pneumoniae
atgactgacagaactcagcagctggccgtgccagcccgtgccgtaaaaagtcgtactggcaccactaagagcatgagcctggcgcgtattctgcttgaggggcgtgcgttctttgccctgctggtgattatcgcggtgttctcactgatgtcgccgaactacttcagcggcgcgaacttcctgacgatggcctcgcacgtggcgatctttggcctaccggctattggtatgctgctggttatccttaacggcggcatcgatctttccgtgggttcaaccctcgggcttgccggggtgtgcgccggctacatgatgcagggcatcaatctggaagcgctgggcgtggtgctctatctgccggtctgggcggtggcgattctgacgctggcggtgggtgcgctggtggggctggtcaacggcgtgctgattgcctggtgccgggttcctgcctttgtggccacgcttggctcgctgtatgtcgcgcgcggtatcgcgctgctgatgaccaacggcctgacctacaacaagctttccggcagcgacgccctgggcaataccggttttgactggctgggcttcaaccgcattttcaatgtcccggtcggggtgctgattctgggcgttaccgcgctgatttgcggctatctgttgagccgcaccgcctttggccgctggctgtatgcctccggcgggaatgagcgggcggctgagctctccggcgtgccggtgaagcgcgtcaaaatcagcgtctatgtgctctccgggatctgtgcggcgatggcgggactggtgctctcatcccagctgacctccgcgggccccacggcgggcaccacctacgaactgacggcgattgccgcagtggtgattggcggcgcggcgctgaccggtgggcgcggcaacgtgcgcggtacgttgctgggcgcgttcgttatcggttttctctctgatggcctggtgatcattggcgtttctgcttactggcagaccgtctttaccggggcggtcatcgtgcttgccgtactgcttaacactctgcagtacggacggagtcgacgttaa

SEQ ID NO: 231469 - DNA, 1539 bp, Klebsiella pneumoniae; identical to SEQ ID NO: 130216

SEQ ID NO: 231470 - DNA, 654 bp, Klebsiella pneumoniae
atgtccggtgtttccgcactctctaccctacattcccgccgccgtatgaggcgttatctgctgtgtggcctggccgcatcggcagtggtggcgtccatggccattgataccaaggtggtcaaaatcggttccgggcaggatgcacaggagcaggggttctccgccagcacctacggtgagaaaaccttcccagggattaaaagctacgtcgaatctcatgcggtggaggctgttgagcttgccaacgcgctgaaggtcaaccagcaggaggcggtgaagaagtacgccaccggcaccacgctgccggtattgccggttcgcttctccggcacggtgggtgaggggaaatcgggcatctttgcgcttcacgtggaaggtctgccggaagggatgaaggcgcggctgcagaccggcccggtcctcaccggcaccgagctgcgcgacgtgaccggcaagatccagttcggtgacttcaccaaccagattgagtatcagaacgcgggttcggcgattaaccaggcgctgaaggcctcgttgctcgacaagctcgaccgtaccgccctgtccggcaagcttgtcgaaggcgtgggggtattccgcttactcacccctaataactggctggtgaccccggtcagcctggaggtcaaatga

SEQ ID NO: 231471 - DNA, 1566 bp, Klebsiella pneumoniae
atggataaccgcgatattattctcggtctggactcaggcacttccgtggtcaaagcggtggcgttcgatctggaaggccagcagctcggatgtgcatcggcgcgcaaccgctactctcgcagcgagggccacggcgcggcgctgcagtcaatgagccagacctggcaggatgccgttgccgctattcgtaagctcgccgagcgcgtcgataatcttgccgcccgtgtggtggcgattgctgtcaccgcccagggcgacggcacctggctggtcggggccgggaaccgcccggtctctgatgcctggatctggctcgacgcgcgcgcggctcgcaccgtcgaatcgctctcccgctcgcccctgtcgcggatgcgctttgaagcgacgggtaccggtctgaacacctgccagcagagcgcacagatggcgcacatggattgctatcacccggaattgctcaacggcagcgaagttgccctgcactgcaaagactggctgtacctgaatctgaccggcgtgcgcgcgaccgacccttcggaagccagctttacctttggcaacttccgcacccggcgctatgacgacaacgtcattgccgccctggggctggagcaccgccgccacctgctgcctgacatcgtcgacggcgtcgaaaccacgcatcccctcaccgctgaagcggccgcactgaccgggctgagagccggcaccccggtcagtctgggctacgtcgacatggtcatgaccgcgctgggtgccggtgtccacaccggcgaggccaataccgcctgttcggtggtgggctctacgggtgtgcatctgcgcgccgtccctacggaaagcgtctggctgaacgatgagcagaccgggtacgtcatccccctgccgtggccaggctacgtcacccaggtgcagaccaacatggcctcgacgctcaacctcgactggctgctgcatgtcgccagcgacctgttgaacagcttcggctgcgaggtcgatcatgcccgactggtgcagcacatcgaccgctggctcagcgaggccaaacccggcgcgctgctctatcacccctatatctccgaagcgggcgaacgcgggccgttcgtcaacgccgaagcccgcgccagctttgttggcctgagctaccgtcatggctttggcgacatggtgcgcgccgttattgaagggatcggctttgccgcccgcgactgctatcaggcgatgggtggggcgatgcccgccgagcttcgcctcaccggcggagccattcgttcgccacagctgcggcagatcctctctgcctgcgtcgacgtaccggtacgcagcaacagccgcgaggagaccggtgccgcaggggccgcaatgatggcggccgtcgccattggggcttatccgtcaatggcccgctgtgtggaaacctgggtcaagccgttactggatacgccggaagcgccgccgcctgaactcgtcgcgcgctaccagcatctctttggcacttaccagcatcttcgcagcgagctaccttccgtgtggcacaccttacaccagcctgatgcaggcctttaa

SEQ ID NO: 231472 - DNA, 1524 bp, Klebsiella pneumoniae
atgagcaaaaaaatcgtggatctgtttattatcggcggcggcattaatggcgcggggatcgctcgcgatgcgaccggacgcggtctgtcggtgatgatgtgtgaaaaagacgacctcgccgaggggacctcctcccgttccgggaaactggtacatggcgggttacgctatctcgagtattacgagtttcgcctggtgcgcgaggcgctgattgagcgtgaaatcctgctcaacgccgcgccgcatatcatctggccgatgcgcttcgtgctgccgcataacccgagcgatcgcccggcgtggtttattcgcctggggctgttcctctatgaccaccttggcgggcgcaaaaaactgcctggcacccgtacgctggatctgctgcgtgatccggaaggcgcgccgatcctcgatagcttccataaaggctttgagtactcagactgctgggttgacgatgcgcgcctggtcaccctgaatgccgtggacgccgccgagcgcggcgccaccattctgacccgcacccgctgcgtggccgccgagcgtaaagccggtgcctgggaaattaccctgcaaaatacgcagaccggcgaacagcaccgggtacgggcaaaagcgctggtgaatgcctccggcccgtgggtgctggacatcatcaatgatgtgacccgctcccacagcaaacgcagcgtgcgcctggtaaaaggctcacacctgatcgtgccaaaattctgggagggtcagcaggcctacctgatgcaaaaccacgacaagcgcgtgatttttatcaacccgtacgaaggcgataaagcgcttatcggcaccacggatattccgtgggaaggcgatgccgactccgtcgaggcggacgaccgcgagcaacaatatctgattgatgcggttaaccgctacttcaaagtgaagctgaccgccgctgacgtgattacccgtttctccggcgttcgcccactgtttgacgatggcaaaggcaacccgtcggcggtcacgcgggattacgtgtttgagctggatgaccagcagcaacttccgctgctgcacgtctttggcggtaaaatcaccaccttccgtaagcttgccgaacacgcgttacaaaaactcggaccgttcttcccgcaaatgggcgcagactggacgctcagcgccccgctgcctggtggtgaaattcccggggccgactttgagtcctatctgcaaaccctgaaagagcagtatgcctggctgcccgcgccgctgcgcaaacactacgcccggctgtacggcgcgcgtctgccccaggtgctggggggcgcgaagcaggtggccgatttgggtcgtcattttggcggcctgctgtatgaagtcgaagtgcgctatctggttgaaaaagagtgggcccagcagccggaagacgtactctggcgtcgcaccaagcatcgcctgcacctgagcgatgcccagcaacaggcgttcagcgactggttcaccgacaccttcaccgttcagccgtgcgcccaggccagctaa

SEQ ID NO: 231473 - DNA, 933 bp, Klebsiella pneumoniae
atggcactcaccctttcgctcaataccaatccgctggtgaatcgctttgccgaacctgaggagctgattcagaccatcgcccagcgcattcgcatccgcgacgtgcagctgacgcatgagtttatcaatccgggctggccggcagcgaccatcaaccagatgacccgacgaatgaaaaaagcgctgcaggagaccggggtgcgcgtcacctccgggatgaccggcccgtacggtcgccttaaccactttgggcatccggacgccagcgtgcgccgctactatatcgactggtttaaaacctttgccgatatcaccgccgaactgggtggtgattcggtgggctcgcagttcgccatttttaccctgcgagattatcaggatctcgcccgccgcgacgcgctgatagctatcgccattgagtgctgggcggaggtggccgagcacgcgaagtcagccgggctgaagtatctgttctgggagccgatgagcgtcgggcgtgagtttggcgaaaccattcccgcctgtctggcgctgcaaaaacggcttagcgcggagccgatggcgctgccgatgtggatgatggcagatattgaccatggcgatgtcacctccgccgatccgcgggattatgacccctacgcatgggccgaagcggtgccccgctactcgccgattattcatataaaacagagcatggcggacaaaggcggacatcggccatttacattatcgtataatacccacggtcggatccagccggaaccgctgctgagcgccttcgcgcgcggcggtgcagagaacaatgaaatctgtctggagctgagctttaaagagcgcgagccgaccgacagccaggccgttgccggtatcgctgagagcgtcgccttctgggcaccgcatatcgacaccggcgtgcaggacctgaacatttaa

SEQ ID NO: 231474 - DNA, 444 bp, Klebsiella pneumoniae; identical to SEQ ID NO: 130221

SEQ ID NO: 231475 - DNA, 957 bp, Klebsiella pneumoniae
atgaaaaaacctctcgttcccgacagcgaggagtcgctcggcctgcgtgccgcctggctccactacgtaggcggcctgacccaggccgccgtcgccaaacgtcttggcctgccctccgtgaaaacccaccgcctgattgcccgcgccgtggcggaaggggcagtaaaagtcaccatcgatggcgatattgttgcctgcgtggagctggagtcgcgcctctgcgcgcgcttcggcctgaatttttgccgcgtcaccccggaccttgccgaagagggactgccgttgcgcgcgctgggcctcgccggagcggagtacctgcgcaacctgttgagcaataatccggatatcaccatcggcattggccacggccgcacgctttccgccgccatccatcagcttccgcaccttgacgcctcccatgcccgctttgtttcgctgctgggctgtctgacacgcaactacgcgctgaatccgcacgatgtcatgcaccgtattgccgaaaaaaccggggcgcaggcctatatgatgccggtgcctttctttgccaataccgtggaagaccgcgaagtcctgctctcccaacgcggcgtaagcgaagtgttcagcatggcggcgggcagtacggtaaaactggtgggcatcggcaccgtcgaaccggcggcgcaactggtggaagccgggctgatcgcggtgcaggagattaacgatatatccgccgcaggggcgataggcgagatgctgggttacttcttcgacgcacgcgggcagcgcatcaccaacagcctgacggcgagaaccctggcggtgtcccttgacgcgcgtcgtcgggaaaatatcgtcgccctggtgggcggtcagagtaaagtggcggccacaaaggcggcgctggcaagcggcctgctcagcggattaattaccgacgagcaaaccgcgcagaccctactggctgaggcttaa

SEQ ID NO: 231476 - DNA, 963 bp, Klebsiella pneumoniae
atggataaatccactgtgtcgcaggagtacgagttacttaccgaaatcgcggttgcttactattgtgatgaagtgacgcaggaggagattgcgaataagtttggtttttcccgcatcaaggtcgggcggctgctgaagcgtgcgaaggaggaagggatcgttgaaatcaacgtgcgctaccaccctatcttcagcacccaactggaaaagcaactgaccgaacgtttccccgtcagccgggcgcttatcgcccttgactacgccgatgagggtgagcagcgtcgtcaggtggcctcgctggtctcaagctatctcaataacgtgctgaaaaataacgtgacgctggcggttgggcaggggcgcaacgtggcggcggtggccgaaaactcgggtgcgatctcaccgcgtgactgccgctttatctgcggcattggcggtacacatcgccctggggacgtgataaacgccgaccatattagccgtctgctggcccgcaagtttggtggcagcagcgagtcgttatacgcgccagcctatgtagaaaacccgcagctgaaggatctgctgctgcaaaacggcaccatcaaagataccctcgaccgggcgcggaaagcggatattgcgctggtgggcattggcgatatgaatgaagacagctacatggtgaagctgggctggtttaccccgcaggagatcagcaatgctggtctgcatcagggcgtgattggcgacattgcgggctatgacttcttcaacgcccgcggtgagcatgtgaatacggtgatggataaccgggtgattggtctgagcattgatgagctacggcagatcccctgcgtcattgcgattgcctcggagaacaccaaggcgatggcgattatgggcgcgctgcgtaccggggcgattgatattatcgccaccagcgcccgaaacattcgtacggtattaagcctcagccagtag

SEQ ID NO: 231477 - DNA, 771 bp, Klebsiella pneumoniae
atgaatggaaatgtgattgtcggtattagccataaggcctactttggctatcagcaaacgcagcagtggtgcgaggcggtggcgacagcgctccgtcagcccgcgctggccagtgcgccggttgagctgtttactttccccgcgatgcccacccttcctgtcgcgctgcgcgcctttgccgatacccgtatggccaccggggcgcagaacgtctgcgaagcgcctgctggggcatggaccggggaaaccagcgccagtctgctacaggagatgggctgccggtacgtggaaatcggccacgccgagcgccgtcgtcactttggtgaaacggtagcggtgattaatcgcaaaattgacatggccttcgccaacgggctgacgccggttatctgtattggcgaagagcagcggatgagcgctagcgacgcggcggccttcgcactggagcaggcgcaggcgttgctggcacaccgccccctgccgctgccgtcgctgatttttgcctgggaaccgcagtgggccatcggcgcggcggagcccgccagcgacgactttattcgccaagtctgccgcacgctgcgcgatgctctgcatcagcgctttggccagcagtgccgggttatctacggcggcagcgccgggccgggtctgctcacgcgactgtggccggatgccgacggtattttccttggccgtttttcccatcagccgcaggcggtggccgctattctggatgaagcgctcgctctgacaacgcccgcgcgtggttaa

SEQ ID NO: 231478 - DNA, 468 bp, Klebsiella pneumoniae
atgttaaaagttgctatcggagccgatgacgcggctaccaccctgaaaaatcaggtgaaaacttatctgcaggaaaaagggatcgaggtcgtggatttcagccacgacgttgccggcaacgatcaaatgtaccccgacatcgcctttaacctcgcctcgtctattcgcgaggggcaatttgaacgcgggatcctgctgtgcggcaccgggatcggaatggcgatcgtcgccaataaagtaccggggatccgcgccgcccagtgccatgatgtctactccgcctcccgcgcccgtaagagcaacaacgcgcagatcatgaccctcggtgcccgcgttatcggcaacgagctggcattaaccatcgttgacagctggctggatgcagaatttgaagcgggccgttcggcgtcaaaagttgagcgtatcgcctactacgaaaacaaggttcacacccacaacgcacagtga

SEQ ID NO: 231479 - DNA, 975 bp, Klebsiella pneumoniae
atgactctgttagagaagcttaaagcagtgacaacggtggtggcggatagcggtgacatgaacgctatccgcgagtatcaccctgaagatgccaccaccaatccgtcgttgattttgaaggcagcggcgcagccgatctaccagccgctgatcgagcaggccgtcgcgctggcccgccagcatggcggctcgcaggaaacgcagttgatcaacgccagcgatcatctggcggtgaacatcggcgtggcgctgctaagccaggttcccggtaagatctccaccgaggtggatgcccgtctctcctacgaccgggggctatgcgtgtcgaaagcgcgcaagcttattcgcctgtacgagcatcagggtgttgaccgttcccgcgtgctgattaagcttgcctctacctggcagggcatcaaggcggcggaagaactggagcgcgaggggatccactgtaacctgacgctgctcttctccttcgctcaggcccgcgcctgcgccgaagcgggcgtgtggctaatatccccgtttgtcgggcgtatttacgactggtatcgcgaccgcaatctgctggccagcgacgcaccccaggatgacccgggtgtcgtctcagtccgtcggatctttgactattacaagcagcaccgttacccgacggtcattatgggggccagcttccgtaaggtggagcaggtgctggcactggcaggctgcgaccgtttaaccatttccccggcgctgctcgacgaactggcaacgcgcgatggcgagctgccaactatgctgaagccgccggtgattgccaacgaagccccttcaccgctctcggagtcggagtttaactggctacataatcaggatcctatggcggtggacaagctcgcagaaggtattcgcctgtttgcccaggatcaggagaagctggaggggctgctgaaggcggcgtttgccagagaggcggttgggcaggtgtaa

SEQ ID NO: 231480 - DNA, 570 bp, Klebsiella pneumoniae
atggccatcgagtgtcaccaggccaccgagtccagaagcggcaacctgtcgatcacccgcgccactcgggcgctgaagtttctgaccgagctggggctgatcacctatcagacggaatatgacccgcaaatcggctgtaacatcccgaccgatatcacgttcaccccggccctgttttccgcgctcgacgtttctgaggttgctgtggtggccgcgcgccgcagccgtgtggagtgggaaaatcagcagcgcaaaaagcagaaactgaaaccgctggagatggacgaaatgatcgcaaaagcgtggcggttcgtgcgtgagcgttttcgcagctaccagtctgaacgcaaaagtcatggccggaagcgggctaccgccaggcgggatgcttcacggcagcgtaaggatatcgagacgcgcgtgcgtcagcaactgacccgggagtacgccaccggccgcttcagtggcgatcatgaagcgctcaagcgtgaggttgagcgtcgtgtgcaggagcgcatgctgatgtcgcgcgggaacaactacacgcgactggcgactgtccccatataa

SEQ ID NO: 231481 - DNA, 891 bp, Klebsiella pneumoniae; identical to SEQ ID NO: 111079

SEQ ID NO: 231482 - DNA, 192 bp, Klebsiella pneumoniae
atgaacggtattgagaagttatttcttgaacttgatgataaagaagcaatggcgttggcacagtttattaagcgcctgacctggagtgagatgagagcctgtgccgtcagtgatgatgagacgtatctaatgaaagacgcgatcgataaattacagaaagcgctgagagaagaaggttacgctccgcgctaa

SEQ ID NO: 231483 - DNA, 522 bp, Klebsiella pneumoniae
atggctaaaccaaagtattcccctgaaacaaaactggctgtggttaatcattatttgtccggtaaagacggagaacagagtacagccgacctttttggtattgaaagaacatctgtccgtcgctgggtcagggcatggcagttccacggtgcagaaggcctgactgcaaaaaataatcattattccgatgaatttaaactcgtggtcgtccgggcggttatcaatgaccgcctgacgatgcgtgaagcggctgcccggtttaatctctccgcagaaatacttgtccggcgctggctcgacgtgtacaacgatgccggagcggaaggtcttttaaacatgcaatgcggacggcccggacaaatgacaaagcccaaaaatatcccaccactgacagataaagagctggaaaaactctcccccgaagaactcagggccgaactgcgttatctgcgggcagagaatgcctatctaaaaaagttgaaagccttggttcagagcgaaaaaaatggcaaaaagccctga

SEQ ID NO: 231484 - DNA, 243 bp, Klebsiella pneumoniae
ttgcagtggatatcgctggcgtctgaatgtgatgtgccgatgatgaaaaacgcagcgaaaaccatcaaaaaacggttgtatggaatactgaatgcgatgcgtcatcgtgtctcgaatggtaatgcagaggcgctgaacagcaagatcagactgctgagaataaaagccagaggatacaggaaccgggagcgctttaagctgggagtgatgttccactatggaaaactgaatatggcgttctga

SEQ ID NO: 231485 - DNA, 486 bp, Klebsiella pneumoniae
atgaatgtggacgaggtcgcttttaaaaaaggacatcgttatataacggtaatctccgatcgtgacgggcaggcgctggctttaacggatgatcgaggtaaggaaagtcttgccggttacctcataaccctgattgacggacagctgcaggccattaaaacgctctcaatggacatgaatgcgggctatataagagccgcgcgcatccacttaccgtgtgcagttgataaaatcgcctttgaccgcttccacgtagcgaaacagctgggtgaggtgatggataaaacccgccagaatgaacatccccgtcttccggttgaaagccgccgtcaagccaaaggtacccgcttcctgtggcagtacagcggcaaatggatgactgagtcccggcaggaaaagctgatgtggctgcgggaacagatgcagcagacaagccagtgctggacactgaaagagctggccaaaaatatctgggatcgcccctag

SEQ ID NO: 231486 - DNA, 453 bp, Klebsiella pneumoniae
gtggacagaaccgataaaaagatcattgctgaactccaggctgacggacgcctgtccctgacagagctggcggataaggtcgggctgagcctttccccctgtcaccgtcgcgttaaaaaccttgaagagacgggcattatcagcggatatcgtgctcagattgataccgccaggctcggactgagcttttcagtgatcgtttttgtatcgcttgaaaaggccgatcgccaggcagtgagcagctttgagaaggcggtggttgacgtcccggaggtgataagcgcgcagcgcctgtttggtaacccggattatatgctgcacgtcctgacgcgggacatggagagctttcagcggctgtatgatctcgacctttcagcgctgccaggcgttcagcgcctgacctcaacactgatcatgaaaacggtggtcaataacagtgaagtggtttactga

SEQ ID NO: 231487 - DNA, 1152 bp, Klebsiella pneumoniae; identical to SEQ ID NO: 145612

SEQ ID NO: 231488 - DNA, 543 bp, Klebsiella pneumoniae
atgaaaaaaaatagtcccttatatttatttttacgaaagattaagtgtagattttctcactttcgctatggattaacgtctgcagatccaacagcaatgatagggccaggatgtgatatatctaaagatataattttaagcgcagaaagttatatcgggccaaattgttcaattggtccaaaagtttatgttggtaaatatacaatgattggtccaaaggtttcaattgttggtcatgatcatgtctataatattgttgggaaaccaattattttttcaggaaggcctgtcggtgattgcaaaaccattctgaataatgatgtatggattggtgccggtgcaattattcttcgaggtgtaaatattggtgcgggagcgattatcgcggcaggatctgttgtaagtaaggatgttccagaatgtacaatttttggtggggttcctgcgaaatttattaaaaatagattccaaactattaaagatgcagaagaacatctcagaattattaatggagatttattttctggagaatattgtgaataa

SEQ ID NO: 231489 - DNA, 849 bp, Klebsiella pneumoniae
atgacatggccttcttctatcatcgctagaataaatcataagaaagttattttttggacacatggatggaccagaacgttgaaagggatgcggtatatcataaaaaaacaatatcacaacttggcggatgcattattgttatatggtcaccgagccaaagaaatttcaataaaatcaggatatcctgaagaacagactcatgtgatttataatagtcttgattacgagaagcaattattatctaggaatgcgttaagaagtttatccatctctgaaaacaaaaagaaatattactctggtggtgatggtgctattgttacagtagcaagattaattcagagttgtcgtttcgaccttttgattgacgccttatatatattaaaaaaagagtataataaaaaaccagaagttattattattggtgaaggtccggaacatgattttttagcagcttatgcaaatcaaaaagcagtagataatcaaatcaattttatgggggcatgctatgatgagaacgtactttctcgcgtgatatatgctgctgatgttactgtttcgccgggtaaggtcggtctactggctatgcatagccttaattatggtacaccagtaataacacatgatagctttgaattccaaatgcctgaatatgaagcaataacggacaatgtaacaggatctttcttcgagtataatagtgctgaatcactggctaaagagattttagtttggacaaaaaaagtaaaagatgaagaaacgatcaaagcatgtcacgatgtgattgatcgtttatataatcctcgtacacaaagtagaattattcatgaggtacttaatgaaaaaaaatag

SEQ ID NO: 231490 - DNA, 786 bp, Klebsiella pneumoniae
atgtcccgtagtacgtggtattacaatatgaatgcactgaagcaaggggacaggtatgcgggtcttaaagagaacatcaggaagatataccactatcacaaaggtcgttatggctaccgcaggatcacgctcgcactgagaaaacaggggctgcggataaaccataaaacagtgcagcggctgatggcagaactgtcactccggtctgtgataagggcaaaaaaatatcgtgcctggaaagggagaacgggcgaggccgcgcccaatatcctgagcctgaacttcggtgcgtcaaaagccaacgaaaaatgggtaacagatgtgacagagttcccggtacagggaaaaaagctttacctgtcgtcagttctcgatctgtttaaccgggaggttatcgcctacagcctgtcggaaaggccggtgatggagatggtgaatacgatgctggacggtgcgttcccgaagctcagaccgggagatgctccgctgctgcactcggatcagggctggcattacaggatgaggagctatcaggaacgtttaaaggcgcatgggatgacgcagagtatgtcgcgtaaaggaaactgcctggataatgcagtgatggaaaacttcttcgggaccctgaaatcggagtgtttttatctgagggagttcaggagtgtcagtgcgctaagaaaagccgtagaggactatatccattactacaacaacgagcggataagcctgaaattaaaaggcctgagtccggtagagtaccgaacccaggctctgagagccgcttaa

SEQ ID NO: 231491 - DNA, 228 bp, Klebsiella pneumoniae
atgagacacaccaccattactgcccgtgacctcgaatgtctggagcatatgcgcaatgtcggccagctcgtcagcgacctgatgcaggtgcaggactgcgccaccgttcgtcgtgaccctgcgcagcagttacagctcacctccgtgatttacctcatgaccgcccagctcgacggcgtggtcgaacgctgcaatcagcactggctgaccggggagggcaacgtatga

SEQ ID NO: 231492 - DNA, 321 bp, Klebsiella pneumoniae
atgaaaaagccattaccgcccgtattacgcgccgcgctctatcgccgcgccgtggcctgtgcatggctgaccctgtgcgaacgccagcaccgctacccgcacctcaccctcgacgcgctggaaagcgccattgccgccgagcttgagggcttctacctgcgccagcacggcgaggaaaaaggccgtcagattgcctgtgcattactggaagatttaatggaagccgggccactgaaaaccgcgccgtcactgtcctttctcggcctcgcggtgatggatgaactttgcgcccgtcatatcaccgcaccggtactgcactga

SEQ ID NO: 231493 - DNA, 195 bp, Klebsiella pneumoniae
atggctacgaccctcaccccgtcacacccgcagtttgtctttgtgtttgctgctgttcgtcgcgcagaccgtaccccccgtatttgtatgctccgcaccgttgccggtgatgagcacgccgcacgtctttctctcgttcgcgattacgttctctcgtttgctggccgtctgccggttgcggaggtgcgcgcatga

SEQ ID NO: 231494 - DNA, 195 bp, Klebsiella pneumoniae
atggctacgacccttaccccgtcacacccacagtttgtctttgtgtttgccgccgtccgtcgcgcagaccgtaaaccccgtatttgtatgctccgcaccgttgccggtaatgagcacgccgcacgcctttcccttattcgtgattacgtcctctcgtttgctggccgcctgccggttgcggaggtgcgcgcatga

SEQ ID NO: 231495 - DNA, 1365 bp, Klebsiella pneumoniae
gtgattgtcatactgttagtacctttatatacattttatttaactactcaggattatggcctggtagacttagttgcatcctctcaagctttgctgatgccatttattacaataacggccgagcaagctttattgagatatattattggtgaaaaagacaaagatataatcaattcggttttctcaactgcattgtttatttctatagtaatgctcgtttttttcttgtttttttgtgtcttattttattattttcatgtttggtccgggaagataatagtatacttctatctactagttttcatggctgctttgcaaatccttttttcaacttatcttagagcaataggaaaaagtaaaaattttgcattaagtggtgttatacaagttttgtcaattttgttttttaacctgatatttttagtttatatgaaattgggagttgatggatacttgatttctttgatttgttcatatttcgtatcaaatttatattgttttgcttattctagatgcctgtcgataaggttttctgaaataactcgggtttcggcaaaaaagatcattgcattttcgctccctttaatcccgaattactcaatgtggtgggtggttaataattcgactagatatgttgttctaagttatctcgggctgtcagcaaatggcttatttgccgttgctagcaaaatccctacgtgtataaatgtttttgtaactgtttttcagcaagcttggcagatttccgcttttgaagagtttgactcgcatgatagatcaaagtattattcaactgtttttcgtgcatattatcagtttttattcatcattgcttcgtttttattggtcttaaataaaattatatttgaaaatttcgtctcacatgaatttatgatggcgtggaaaatggtgccacttcttatattaggtgtgctttatcaaacattttcttcatttttaggaacaatttatacagctaattataagacaaaagatgtttttcttaccagttttgttggagccggtatctcaattggagcaaattttatatttattccaatgtatggggaagtgtatgctgggctaggcgcatcgttagggttctttattatgtggttactccgattgataggtaccagaaaaattgtatatacaaaaatatattatttagaatttatacttttaaatggaatgttcctagttcagacctttttgctatttttactaaatgatatttctggggaggggcagttctttgttcaatttttatgttttctgatgacaatgttcttatcgaagaattttctatcagttttatttttattttttaaaaataaaattcttagtaaatatattaatgtataa

SEQ ID NO: 231496 - DNA, 1095 bp, Klebsiella pneumoniae
atgtacgactatttgattgtcggagcaggcttttttggatctgtatgtgcacatgaattaacaaagaaaggaaagaaagttcttgtgttggaaaagagagggcatatagcaggaaatgcgttcaccgagaatcatgatggcattcaggttcataaatatggtgctcacatattccatacaaatgacaaaaagatctgggattatgttaatcaatttgccgagtttaataattttataaactctcctatagcaaattttaaaggtaaattatttaatcttccctttaacatgaatacattttatcaactttgggggaccaaaactcctcatgaagctaaagctattatagatgcccaaaaaaacgaatcccctgttgaaggggcatcaaatttagaggaaaaagcaatttcattggttgggcgtgatatttataatatcttaataaaaggatacactgaaaaacaatggggaagaaacgcaaaagacctacccccctttattattaatagactccctgttcgtttcacttttaacaataattactttagcgaccgctaccaagggattcctgttggtggttatacagcgttaattgattcaatgttgaatggcattgaggttcggctcggcgtagattttcttgagaataaagatgagtatatgtcattggctgacaaggtaatttatactggacccattgatcaatattatgattattgctttggcgccttagaatatcgttccttacgttttgaaaatgaacgcctctctgaggaaaattatcagggtgttgctgttgttaactatactgagtatgatattccatttaccagaattatagagcataaacatttcgatgatgcaaaaacggaacatacgattattacgaaagaatatccgagtgaatggcaagtaggctctgagccatattatcctataaataatgattcaaatatggaagtttttcgtaaataccgagagcttgctaagaaggagcaacgtgtgatatttggtggtaggcttgcggaatataagtattatgatatgcatcaagtaatttcttctgccttgaaaactatttcagatatctcttga

SEQ ID NO: 231497 - DNA, 891 bp, Klebsiella pneumoniae
atgaagatattactgattggcaagaatggtcaggtgggctgggagctgcagcgctccctgtccacgctcggtgatgtggtcgcggtggattactttgataaagagctgtgcggcgatctgactaatctggacggtatcgcgcagaccgtgcgtactgtccgcccggacgtggtggtgaatgccgccgcgcacacggctgtggacaaggccgaaagcgagcgggagctgtctgacctgctgaacgacaaaggggtggcggtgctggcggcggagtcggcgaagctgggtgccctgatggtgcactattccacggactatgttttcgacggcgccggcagccattatcgccgggaagatgaggcaaccggcccgctgaacgtctacggtgaaaccaaacgtgccggtgaactggcgctggagcagggcaacccgcgtcacctgattttccgtaccagctgggtgtatgccacccgcggcgccaactttgccaaaaccatgctccgcctggcgggtgagaaagagacgctctccatcattgacgaccagcacggggcgcccaccggtgcagagctgctggcagactgcacggcgacggcaatccgtgaaacgctgcgtgatccggcgctggccggtacctatcatctggtggccagcggcgagaccagctggtgtgactacgcccgctatgtgtttgaggtggcgagagcgcacggtgcagagctggcggttcaggaagtgaagggcatcccgacgacggcctatccgacgccggcgaaacgtccgctcaactctcgcctgtcgaatgaaaaattccagcaggcattcggggtgactctcccggactggcgtcagggtgtggctcgcgtggtaacagaagtcctgggtaaataa

SEQ ID NO: 231498 - DNA, 789 bp, Klebsiella pneumoniae
atgctgaagtatttcttgaaaaacaaaaccctcattttgaaactggcgaaaagagatattgattctaaatataagggatcttttatcggtggtttttgggcagttgttaacccagtaattatgttatgtgtttattcatttgtattttcagaagtcttcaaggctaaatggggtagtttagaaggagggaaagggaccttcgcagttgtattatttgcagggttgattatattcaacttcttagcagagtgtttaagtagaggaccgacattatttaccagtaatgtaaattacgttaagaaagttgtttttccacttggctgccttccatttagcatttttctttcggccgtgtttaatttctttataagtttcataattttgctcattgctcagctaattgtcttcaattcagtgccttggacaattttattctttccgttattgttgattcctttgtttcttatcggtttttccttaattgttattttttcaaccattggcgtttattttagagatatagctcaggctgtgccaattatcataacatttctgatgtttttatctccgatattttatccgttaagtgcaattcctaaaagttttcaggatgttatgatgtacaacccgctggcatttttaatagaaaatacacgggatgtattaatctttggcaaaaacatgtcaattgaatcatattcaattctgtatatctcaagtattatattttacattattgcaatgaaaatattccagaaggctaaaaaaggttttgcagatgtcctataa

SEQ ID NO: 231499 - DNA, 1362 bp, Klebsiella pneumoniae
atgtcctataattcagttaaatgcgaagctgtaattcaagtaaaacatattacaaaaatttttcgcatctacaacactccaaaggatcggataaaagaattcctggcaaatttaccacgccgagttgctggggcaaagcgtattaagaaacataaagaattctattcacttaatgatgtctccttaactattaataaaggagagacaattgggatcattggtgccaacggtgcaggtaaatcaaccctattgcaaattatttgtgggactttgtcaccaacgtatggcaatgtaactgtgaacggtagagtagctgctctgttagagcttggtgctgggtttaaccctgatttcaccggtagagaaaatatttttatctcagcatcaataatgggactaactgacgaacaaataaaagaacgtttcgacagtatcgttgagttttccgaaattggagagtttattgagcaaccggtaaaaacatattctagtggtatgtttgtacgattagcgttttcaattatcgctcacgttgatgcagatatcttaatcgtagatgaagcgctttcggttggtgatgcgttctttgttcaaaaatgtatgcgttttctacgggcatttatggaacatggtactgtgcttttcgtgagtcatgataccgcttcaattgtaaacttatgcgatcgtgctatctggattgatcatgggcagaagaagatggaaggttctgcgaaagatgtctcggaagcttatcttgctgcattatttaaacagagtaacagaaatgtatccatcaagcgtcaaaacaaggatgttaccgaggttatagcttataaagatatgcgtactagttttattaatgctagtaatttacgtaatgatatagaactattttcttttaatgatgaaagtaaacagtttggggagaatggcgcagagatctttagtgtaaggctagagaatcaaaacggtgaacctttatcatgggtagttggtggggaagaagttaagcttagaataagtgttaaatgcttgaaaaatatgtttagcccaataataggtttctatataaaagaccgacttggacaaaccttatttggtgataatacatacctttcatatatggatacaccactcagtatgcaacctaatgacaatatggatggcattttcgagtttaacatgcctatacttccagtcggtgaatatagtatttgcgtcgcagtagcagaaggtagccagcaagaacatatccaacatcactggatacatgatgcggtaatttttaaatcgcattcctccagtacggtgactgggttagtcggtattccaatgaaaaatattagtatctcggtgaattaa

SEQ ID NO: 231500 - DNA, 3828 bp, Klebsiella pneumoniae
atgactatgattaataaatcaatgctttccagacctagaaaactgactttcccatttggctggtgcggccatatcccctttgtcagttggcttgttgaggaaatgaaaccgggtactattgttgaattaggtacgcattcaggaaattcatattttgcaatctgccaggctgtcctggaaaataataccggttccaaatgctatgctgttgatacgtggcagggggatgagcatgctggtagctacagtgaagatgttttcagagatgtaagtgcatggaatcagcagtatttctctgcattttcaaatttaatgcgcatgacctttgatcaggcgaacgaatatttttctgcaggtagcgttaatttattgcatatcgacggcttacatacctatgaagctgttaaacatgattttgaatcttggaaatcaaaattagcagatgatgcggttgtcctgttccatgacaccaatgtccgtgaacgaggatttggtgtatggcagctttgggatgaacttcaacaacagtatccatcttttgaatttttgcattcatatggcctgggtgtgctttttgtaggcaaaaaaagccaagctctttatgaaaagttggcttcttttggtgagccagctctcattagagaggcattttcacgtttaggtgaattaattactctgcgcgaagaagcccataatcatatccagcatatcgaatcagctagatccgttcttgagagtcaaaaccaagaacttcagcatcaacttaataaagcaaaagaagaaaatgaactctatataaagagaatccaggaagataaaaatattaaagatgttatggctggcagaatccatgaactggaaaacagtcagcatcatatttccggcaatgtccatgcacttgaaaaggaaattgaacggctgattaatactaactcgtggaaaatcactaagccgctaagattcatgtttcgagtactccgcggccaacaaaaagatgcgatgtggcatattaaaaaagaagtccgtaacattgccaagtcagcttattatcgaaccccttataagtatcgtgaacagctattaaccatggcatttaaggttcgaccaagttggttcactagtcatcctaaatttatggctgctcattctctgatttcaaatgaattagaggtaagtgataagcttattgatattaacttattaagtgacgatattaatacacagcctggaagaattgctgttcaatgtcatattttttatccagacttaattgatgaatttgtggcacaattgtctacaatgccatttatgttcgatgtttacatttcagtaacaagcgaagaagccaaacaacaatgcaatctgcaatttaagaagattaaaaatatcgaaaatctcgatgtgcgagtagtaccaaatcgcggtcgtgatattgctccggtattcgccgagtttggttccgccttaaaacaatatgattttatttgtcatattcaaagtaaaaagtcattatataatgagggaaaaacaaccggttggcgagagtatttactgaatggtttgttcggttcggaatctaatgttaaacggatatttaaagcatttaaagatgataattcgttagggattatctatccacaagttcatcatacattgccttatatggcatttacctggttagccaataaacagcaaggcagtgaactttgtgcaaaaatgggaatcacctgtcctgatggatatttcaatttccccgcaggttcaatgttttgggcccgtgtagatgctttggccccgttgtttaacatggatttatcgtggcaagactttcctgaagaaaagggacagactgatggaacaacagcacatgcaattgaacgtttgttaggtatagtccctcaggctttgaattatggttcattaattataaaagactgcgagaatgagtcaaaatccactttccgctgggatcatcaatattaccctagaacgttagagtcgattcatcaaataatttctgatccaagtaaaaaaattattgcttttgatatttttgatactctcttgattcgtcctttacttcatcctgatcatacaaagcagatcattgccagccaattgtctgctgaggaagcgtccgagtatttgtctaaaaggccttcagcagagcagagtgcaaggcatcgagcggggcgtgatatcagtattgacgatatatatactgaattgcagcaacattatcaggttgaacattcagtcgccaaaaagtttcgtgaactcgaagaacggattgaaattgcttctgtttcggctcggccggatatgttggaaatttttgagtttgttaaaaagagtggtaaaaaaatcgctattgtcagcgatatgtttttaccacttgaaactatcgttaatatgctcgaatctaatggttttaccggatgggataaaatttatttatcatcagataaaggtaaaagaaaggatacgggtgaactgtatgaactccttcttgccgaatatggggtttcaggtaatgaagtcgtaatgattggtgataacgaacgtagtgacttacagttacctaacgatcgatttaatatacatactgtacaccttgtcagggctacagatttagctcttcatacttctgaatatgcaacgttagcaaagcaagcgtttaattcggatcttgacggagaacttacctttggccttctgacgaggaaaaacttaagccaaattggaagtttctcgccggaaaaattaaagcttttctcttcaagtccgtatcagattggttacaatcttgcaggcccattgcttaccgcatttgctgaatggctgagaaagcgcgccgcacaagctgacattcaagacttatattttcttgccagagaagggaaaatcattaaagacgtttatgatctttggtgtgatggggcaaaaactgcacctcaaagtcattacctgattttatctcgccgtgctgttaacgttcctaatgtaacaacactgaatgatgtcttggatatagctaagtcaactttctttgccaatacgcttgagatgtttttacgtgaacgttacggattagtcctacctgaagagaaattatcctctttatactcttctggactttggtccaaaggcaagttagtagaagtccagaatgagaatatttccgaaattaagtcattactggagtatcttatgcctgatattctttctgaagctcatgctgaaaagcaaggtttgttacaataccttaaacaggaaggattcttaacatcagggcataagacggtcgttgatgttggatactcaggaacaatccagaaagcacttataaatattgtagacgacagagtcgatggttattatatggcaacatctgaaactgcaggaaagggcttaaagaacggaagtaaagctcatggttgttttattgataactcgatctcacttcaacatgaaaactcagtgattctacgtcaaagtttcgaacttgaaaaactgttaagctcggatgatactcaaattgttaaatatattctagaaaacgcgatcgttacaccagtatataaacaacagcgtccagaagagcttataacaaaagacatcagaacggagttacaaaaaggctgcatggatttcgttcgtgatgccagagatatacgaaatacactttatccagaattctcgccttcgttaacaatagctgattctttatatagtgaattcatttcaagttgcaatcgaaaagaaaatgacttcgtgaaaaaaatgaccttagatgatgattattgtggtcgtggtttagtaaattaa

SEQ ID NO: 231501 - DNA, 921 bp, Klebsiella pneumoniae
atgaaccgaagtgttgctattttaatggctgtaagaaatggtcaggaataccttcagcctcaacttgattcatttcttaaccaaacatataagaactggtgtttatatgtttctgatgatggctcgaccgattcgacagccgaaattgttaataacttttatctttctcatccagagatttctggttttttaaaaaaaggcccctgtctcggtttttgcctaaattttcaatccatgatcaacgatgaaaaaatcattgctgattattatgctttttctgaccaggacgacatttggttacccgaaaaaatagaaaatgcagttcgctttttggatagggtaccctcagatactcctgctctctattgttcggctaccactcttatcgatcaggctgataatattataggggaatcactttcacccaataaggcactaagttttgccaatgctctgttgcataatgttgctagtggcaatactatggtattcaatcataaagccagagagttattaatggctgcctcctctgaagaaatggtggtacatgattggtcgctctatcagatagtaagcgcatgcaacggacgcatttattttgatcacacccctggagtgttgtatcgtcaacataataataatgtgattggtgatgggcgcaatatttttttacgtgtgcgtaatttcttttcatcttttaaaggaaatcgtgcggactggaataaacggaataaaaccgttctcgataagatcgtggctcactttggtgagaatgaaaagcaggtttattataattataataaaataagtgaaagtgggtttttgaaaaggatttatttttacataaaatctggtgtttaccatcaatataaactcggtacattatcaaccataatttacgtttgtgttgggaaaatgtag

SEQ ID NO: 231502 - DNA, 816 bp, Klebsiella pneumoniae
gtgaatatactagcttcgcttgttctttataaacattcttttcaagaaattgagcttacgcttgattcgttattaaatgaaaagaatatcgataaactagttatagtggataatggttctttttgtacttggttggatgactataagcactataaagttgatgtcataagattacctgataatgaaggttttggcgcagggcataataaagtttttgaacattataaaaaccaatgtagttattttttgatttgtaaccctgacatttactatgctcagggtgaggttgataaactgttttccttttgtaaagaaaatttggtcgacctttcagtccctaaaatcatatatccaaacggtgcattacaatatgcgacaaagctattgccagcaccatttcaacttttcggacgccgttttctctcatcattttttcccaacataaataatcagtatgaattgcgtaacgctaattttaatgctgcgttctacgcgccatcgatgtcaggatgttttatgatggtgagtaataacgccattctacaagttcaaggtttcgaccttcgattcttcatgtatttagaagatgtcgatttttcgcgccgtatcagtgcgggaaattttaatgttgtttattgtcctgattctacagtcgttcatctttcgcaaagaaaatcatatcacagctttaagttcctgttttatcatatgacctctgcgattaaatatttcaataaatggggttggttttttgataaagaaagacagcagcttaataaacgttgtctttcatcattacccaccagaacggaataa

SEQ ID NO: 231503 - DNA, 1218 bp, Klebsiella pneumoniae
atgaagggtatgcagaagatcaaaaggggtaagaacttctcaggtgtggtccagtatgcattgaagccaggttcacatcacaaaagtgatccaatcgtcattggcgggaacatgttaggtgattcagcctttgaactaatagctgaatttaatggcactaaacagcttcgcccagatgttcagaaggccgtttggcataactcgctacgattgcctggcagtgaatcattagcgaatgaccaatgggtaaccatagctgacgactacatgaagaggatggggttcagtgatactcatctccgttgctatgttctacatgacgattctgccggtcagcacatacatatcattgcaagcaggatagacctcaatggagggaagctctaccttggcaggaatgagaaccttataagtacccgcataatcagtgagcttgaaatcactcataatctaacagtgaccaagacagcaccttccattacaccaaagcaaccgaagcggaaaagaatctctcgcaacgaacagatgctatcagaacgaactggtgttccctgccccaagaaatcccttcaacagatcattgataaaagtttggcagatacacctgaccttttaactttgatcaagaggctggaagaggcagaagtcggctggacggctaacattgcctctaccggtaagatgaacggcttctcattcgaataccgcgatatagctttcaaggcttcacagttaggcaagggttactcttgggcaaatcttcaaaagcaacttaactacaaccccgaccacttagaatttctgcgaaagggtatacagacgaaggaagctcctcctgctcctgctcctgctcctgctcctgctcctgctcctgctcctgctcctgctcctgctcctgctcctgctcctgctcctgctcctgctcctgcaatagttttgaaaaccgctgagagaaaggaaagtatcggtaaaaaaattgcagaactggaactacggctcagagaagacaaacggaacgaaatcgtagaaaagatccttcaaaagaatgcagacaaacagcaaaagcatctcaggctcaccggctggattccctttttacaacggctcatagagcttctcagaaaatatggaaagagcatcctccacaaggttcctacaaacttctcagaagtctattcaacacatcatctgaaacctacaagaaaaattcgtttatag

SEQ ID NO: 231504 - DNA, 495 bp, Klebsiella pneumoniae; identical to SEQ ID NO: 202697

SEQ ID NO: 231505 - DNA, 1110 bp, Klebsiella pneumoniae; identical to SEQ ID NO: 202696

SEQ ID NO: 231506 - DNA, 1071 bp, Klebsiella pneumoniae
atgatggctaatagatatgtagatgtaggcgaggatttacaatttggcggatttggagaagttaggttattacatgacaactttcttggaaggaaaatcttatgtaaatcaatgtccaacccagataataatgaccaactttacaatgaaatcatcgctttatctaaggcaagatctcgtcatgtagtagagatatatgatgttttatttgatcaaaataggaatgtcagtggcattattatagagtatcttgatggcagagatttctctaaattctatttagaatatgagaataatccagaagaatttctaaaaattttattccaaatagccagtggtctctatgatcttcaccaagctggaattacccatagggacatgaagttagaaaatattaaagcctccaacgcaggagtcgttaaaatttttgatttcggcatatcagcaataacagatgactatatcactaaaaacaatcgtggaacattgatttatgcggccccagaattatattttgaaaatgcaaggattagtagggaaatggatatctatgcatttgggataattgcctggaatcttgtcaccacccaaaataattttgacagagcattgttagatactcctccacattctaaacataaatatcaatccatagctcatgtttgtaaaaacaaattaccagaagaaataataaatttaattgatgcaacattatgtccaaatccagctaatcgccctacaatagaggaaatagtacctttattggcaaaatacttagtaatacacaagcataaagggattttcaccgaaaacgcaagaaatgtatatgaattatcatctgtccaaaaaggtgttaaattaaaaatagctccgctgggagagatagatatatattatgacggcctcgaatttaaaataacctacgttgatggtgatgttttcatcaataatatgagaccaaatgtaaacaccgtgttacctaattcttgtctattgacatttggtgccccccatttacgcaatagacggtttatgactttttcatcttcacatccagaggtggtattatga

SEQ ID NO: 231507 - DNA, 381 bp, Klebsiella pneumoniae
atgtttaaccctgataaatacctttcagtcgtatggcagaagggcggaagaacgtttccccgactcgactgcttcggtctggttaacgaaattcggcgggatctcagcttgccagaatggcctgatttcgccggggtgaccaaagacgatggaggcctcgaccgggaagccagaaaactgatgttaaaactggaacgctgcgacccctgtgaaggagcgggggtggcttgtttctcaggttcgacagtgacgcatgttgctgttgtggtgaaaatcaatggcgaactgatggtagcagagtgtgggagtgccactaatgtcatgttcctgccgctggctcgctttatgcgtcgctatgtccgagtggagttctggaagtga

SEQ ID NO: 231508 - DNA, 183 bp, Klebsiella pneumoniae
atgtttagcagcggtggtataaatggctactttttcctgttgcttagtatgtggccagtgctaatggttttattcctgggattgtctcctgcattttacggtgtgttaatgcctaaaacggcaattgcttgtctggtgatcgctgcagcctttggcattggtgggtggttctatggattgtga

SEQ ID NO: 231509 - DNA, 1311 bp, Klebsiella pneumoniae
atgcaccttaataacgtatttggagtctcaagggatcctgtagcgagctacatcgagcgtgattcagttgactccacattgtccgaagctcttgcaactacaaagcaaatcgttatttacggatcatctaagcagggaaaaacagctcttcttcaacggcatctcgatgagaaatatcgctgtacatatcattgtgggccggcaagttcggctgaggacatttatcgagcttttcttagacaactaggggtagagattgttacagaaaaagccaacacgtccagcaaggaagctacagcgtctgtaaaaagcacattctctgctttcctcccgttcatatccaaaggggagattgaggctaatgcagaaggaaaagtggggaaagaacttcaaactaccactaaaccaatcgagtttaatttaaatgcagcccaggatgttggtgagttgcttcttgaggttggcggcgcaaacaaattcttcgtattggagaactttcattaccttaccgttgatgttcaaggtcagttcgcgtttgacttacgaacattcgaggaaatgggtatacgttttataatacttggagtttggcgcgagaataacaggttaattcagtttaatggagacttacaggatagagttgctgaagtgccagttgaaccgtgggaaaaagaagatttcgcacgagtagctgatactggagaaaaagcactgaatatttccatttcagaagatttaaaagaacgtatgtttgacgaagctcacggtagtgtcgcggtggttcaagaattgttaaaaaaattctgtgaaatatcaggcgtaaaggaggttcaaagagaagtattagtgcttaatgaccatgaaaatctcaacaaagcgatttccgtaaaagtatctgactatgcatctcgtcatgtaagaagtttggaatcgattgcagcaggaagtcgaagcagaagaccgagtgaagatgctgttgctttgtatttacagtattatctagtacaagttttactaactcgtacttattctgagttaaaagacgggattgagcgaaagacattgcaagagctgattcgagatatccatactcacccagataatgtcagaacatctgatgtgacaggcacgcttaaacgcttgccggttctacaaaccaatcaaaatatagttccgccattactggattatgatcagggtacaaggcgtttgaaggtggtcgactcaactttgtatttcttcattgacaactgtgatgcagaagaggtcatggctgaaatacctcatccagactccttggctgggtcatag

SEQ ID NO: 231510 - DNA, 204 bp, Klebsiella pneumoniae
atgcggtatgaggatgagtttttcgcagagatgcacccgcaaatagcgcaggttatcggggtagcggttatgcagctgctggttgagaagcgcgagccatcaagagaggcgctgatagagatgattcaggtgctgtggctgggggaccagccagatctggctgtggagctggcactggacgtgctgatgctgagggaagagtag

SEQ ID NO: 231511 - DNA, 372 bp, Klebsiella pneumoniae
atgagcgtacgttccagttatacaacccaaacggagggctataacgtgggatttccgtcgccagctgctgactatgttgaacggcgtctgaccgttgattcactttgcggtaccggccccaatactcggatagtacaaacagaaaccggctatgccgtagtggattgctccgtaaaaccaaagcaaggagataccgttttaattcaatacggcggcggcactgattttgcaaaaattatgggccgggcatttattacacgagacggtgaagcgctggaaggtgagtccctggatgatgttacagttgtcggggtagtgacattcgttatcaatcggacagggaaggatgatgatgattgtccagtgttgtga

SEQ ID NO: 231512 - DNA, 903 bp, Klebsiella pneumoniae
atgaaactctcccgacttgctctgctgtccctgttcgcgctgaccagctctccggtttgggcggacggcgtcgtcacggtttactccgccgacggcctgcatgacggcgataacagctggtatcagagccagttcgctgccttcaccaaagcgacgggcatcaaagtgcagtatgtggaaggcggctccggcgcgatcgtcgagcgtctggccaaggagcgcaccaatccgcaggctgatgtgctggtcacggtgccgccgtttatccagcgcgccgcgaaagagcaattgctggcaacctttaccccgcagggaagcgcgcagatccccggcgctaacgaccgctacgcgccgctggtgaacaactatctgaccttcatctataacagccagttgctgaaaagcgcgccggccagctggcaggatctgctggatagccgctacaagaacaagttgcagtactccacgccgggtcaggcgggcgacggtaccgcggtgatgctgcaggcgttccatagcctcggcggtaaaggcgccggttttgcgtatctgggtaagctgcaggccaataacgttggcccatcggcctcgaccggtaagctgacggcgctggtcaacaaaggcgagctgtacgtcgccaacggcgatctgcagatgaacctgtcgcagatggcgcgtaacccgaacgttaaaattttctggccggcggatgacaaaggcgagcgcagcgcgcgctcctggggcctgccggtacgcagcgatgtagcgccggatgatgctaactttaaggcggcgaaagcggcgctcgacggcgtgaagagctgggaacctaactgggacgatgtcgcggtatcgctgtcggctgacattgcccgctggcataaagtgaccgatagcgagtaa

SEQ ID NO: 231513 - DNA, 249 bp, Klebsiella pneumoniae
atgcgtatcttcaaaaccaaatggttcgccagagaggctagctctcatggcatttccgacgacgagctctatcaggcaattcaatctgcgcttcagggcaaggtggttgatttaggaggaggggtttataaaagcgactcaacaagaatcgcgatcgcgcaatcatacttaccaaaagcgcagggtattgattttatacctttctatatgccaaacaggatatggccaatatcaaccatcgcgagttaa

SEQ ID NO: 231514 - DNA, 165 bp, Klebsiella pneumoniae; identical to SEQ ID NO: 39929

SEQ ID NO: 231515 - DNA, 1143 bp, Klebsiella pneumoniae
atggctgaagaagcagggcgcttaacattttttgatgtaacaaaagctggtttttacaatggtaaagatgaagtacaaaaaagtgcggatattgtaaatatattagactccctgtccagttgggtctgttctcgttcttttgaagaaactttaccattagtagatgactctagactgagaaaaaaggtttattgtcgtggtgtacataaagacgaaaaaacaggcgattatttttttgtactttggaaatcagaacttgacggaaatggtaatcttcaaggcgttgcaccagattcaaaggtaaactcatcatccagtgacgttaagatgctttcggatgatatgactgacggagtgaaatatatttggggtaagccatgctattactggtatatccctgagtttaataaacttgctgcaattcgcttccctcactcaaactcagataactacctttttggccgttacattagagattatgctaatttcaggatgccatatcctgggcgtaaaattgctgaagtatgcagagcaaacccaggtgggaaggatataaagtatagtgttgttacatttgaaagtgatgacggacattcacgcgttagatttttatttgaagcacagcagtatatgaagaaagctgggcgtttaaatataaagagaattagagattctattacacatattgtaataagagatacaattggagctaaagttcccgataaaagagcttggtgggtaaaggcttttgacaaatttcctgtattacgtgatgaggttcccaaaactcataaggaacgacaaatcgagttaattattgaagaaaagccaactgaaaaacaaattgacgaacttttcgatttttatgaagaggattatgctttcggttcttcttggaacaatattggctttaaacaggatggtaagaacggacagactaagtggttagacgaatatgtcatgcgtgactatttaaatgctacatataccgtaaatgataatgcacatatctcggctgaaaagttgtctgaactaattaatgaaaaacgaaaagaactagttagtggcctcgaaggtaatcaaactgataaaattgtaatgatgccttcagcaaataacgatggggtcgctataggaggatga

SEQ ID NO: 231516 - DNA, 507 bp, Klebsiella pneumoniae
gtgataataaaaatcctaattgggattctcatggccgtcgttctacttgtcagcggcttttgcatttccgaaagcgtcaagtattcatatgttgttgatttgcttggtgttttgcaaaatacatctgcgatgatttttgctattgctggtatttggttagcttatctatatccaaatgcaatagctggattgatgaagtctgagaaagtggattttttagcaagtaaaaatgaagcgaaacgcatagaagggatgattcttattatcatcatgtctgctgctgtattaatatttattatcgctttctatgcatttaatgcagttcttcgtggtacagatttatatgcgaataatcgattatttattaaagggataagctgttcttatatcttaactgtattattgattcaactatcctgtgtgattgttcttattcgaagaaatatcacatttatcaatagattatatgcagtgataaacgaaaaagaattggaagataaattatag

SEQ ID NO: 231517 - DNA, 732 bp, Klebsiella pneumoniae
gtgatacgcttgccaaagccaaggatattatttaaatatcgtaagtttgataaaagtagcctagaactattattgaatcgagagttatggtttgcaaaagctgatactcttaatgatccctttgaggcaagttcttcattttcaaatgtactcaatgctgtttgggagcactatcccatgccccttcatgttagagttaaatatgaggaagcacttaaacactcattgcagacagttggaatttgctcctttagtaaagcaaggaaaaatcaattgatgtggtcgcattatgccgacgagcataaaggcatttgcatcggttttaaagaggaatatttgagggaaagtggagttaaattttttgggactaatgtagaatatcaggacaattatccctttgatgacattattaaacgcattcattatttcgaaaaaggtaatagctataacggtttggataatattgcaggggatattttactttctattctaacgacaaaatatactagctggaaatatgaaagggaacgacgactgattgttcaaaactttggtgcgagaaagtttgaacctttagcggtcaactctatagcattaggattaagaatgaatgaaagggataaaaaaacgctacagactctattgtctggtccagaatggtcgcatttgaaatggtttcaatcaacgaaatcctccactaaatattcgttagattttatacgaattggttaa

SEQ ID NO: 231518 - DNA, 2823 bp, Klebsiella pneumoniae; identical to SEQ ID NO: 96818

SEQ ID NO: 231519 - DNA, 1374 bp, Klebsiella pneumoniae; identical to SEQ ID NO: 96817

SEQ ID NO: 231520 - DNA, 546 bp, Klebsiella pneumoniae; identical to SEQ ID NO: 96816

SEQ ID NO: 231521 - DNA, 249 bp, Klebsiella pneumoniae; identical to SEQ ID NO: 96815

SEQ ID NO: 231522 - DNA, 750 bp, Klebsiella pneumoniae; identical to SEQ ID NO: 96814

SEQ ID NO: 231523 - DNA, 189 bp, Klebsiella pneumoniae; identical to SEQ ID NO: 96813

SEQ ID NO: 231524 - DNA, 1854 bp, Klebsiella pneumoniae
atgaaaagagcaatactgatgtcgatgctggccattgccaccacgatggcaagcgtgaatgcatttgccgatgctgacgcgcagtacagggcgggggctgattttgcccgtcaggtacaggggcagggtgagagcagcctgaaaaactttaacccctcagcgtctatccccaactataccgcctcacccggtgagaaaaagtactatggcggtgtgacggcgaccggtgatggtgcgctgaaagcggacggtaccacgggctggactactaatgaggctacaaaagccgtcaccgactcgtttgttaacaacccgaaggagcccatttcgcccgacgcgccgtttattaaggccagccaggatgtccagtcccgcgctgataccatcatcggcaaaacggggcagacgcagtgcgaagcgcagaatatcagccgcagtgagttcaccaactatacctgtgagcgcgacctgctggttgagcaggcctgtacgcgcacggccagcattaccggccactatgaagatacatctgaaacaaaacagattgttatccagtctcagaatatttcgtttgcttcctccgaagcgggatacacaggaacatggactgcgccggtgacagggaaggttgttgctgcaacagccacctattcctggaataaacgtctggcgttcagtaatcctaactggtttatgcgagtaaccacgcctttcgggttgatttccatggataacgataccggtagcctggcgctgagtagcggcatgcagctgaagaaaggcgcagggatggtgttttccattcgtaccaggagaaacaatcccactacagattcaatctggaagcacagcaatatgcgctacagcttcaccgttacgctccagattgaaattcccgccaaaaaatgggtaccagacgtggtctggaacgaatcctgcccgttcagcaagagcgaaggtacgctcaaaaagacggaatgtattgagccggggagcacaaaaacggtggtggttgacggcgtgtcatacccggtcacgcaggcttgctggaagtacaaagacacgtatatgacccaggctgctgacaatggcacctgcaaaacctacatgaacaatccgacctgtacgcttgcctcacgcacctgcgccttcacggcagaagacggcagcggctgcctgcatgaatacgcgacgtactcctgtgaaacacgtacttccggccaggtgatgatatgtggcggcgacaccttctgtctcgatggtgactgtgagcgggcgcagaacggtaaaaacaacgattttgcacctgtcgtttcggcactcgccgcgctggccgctgcgggcaaggacgtggcagccattaacagcgttaacgtacgcgcctttaccggcagcgcgaagttctgcaagaagtttgcggcaggcttcagcaactgctgtaaggacggcggctggggccaggacgtcgggcttgccaggtgcagcagcgaggagaaagcgctgggcaaggccaaagagaataagctcacggtcagtatcggtgagttctgttcaaaaaaagtgctcggcgtctgtctcgagaagaagcgcagctactgtcagtttgactcaaagcttgcccagattgtgcagcagcagggacgtaacggtcagcttcacatcggctttggcaaggccagcagcccggactgtcgcggcatcacccagactgagttgcaacaaatcaagttcgacaaactcgacttctcaaactttttcgacgatctgcaaaagaacaagaaaatcccggataacgacaccctgacgaagcgcgtccgcgaggaaatcgccgcgcaactgaagaacaaacagtaa

SEQ ID NO: 231525 - DNA, 630 bp, Klebsiella pneumoniae
atgaaaactctgtccggtctgacggcggcgctgctgctgtcagcatactgttgcactgcgctggcgtcaggggctgatgaggcgaaccgcgagtttattcgtcagcaggagtctttcagccagcagctgagggggcaggacaacgcgccgctgcgccagatgctggagcagcaggtgcgccagaaccctctttcagcagacgacgcccgctttatcggggagctgaaacagcgccagcgcgaggaccagcaggataaacccacgcacggtgccctgtatttcgtctcttttgccatcccgcaggcggggcttaagcgcatgctgaccgaggcccgccgctacgatattcccgccaccctgcggggtatggtcaacaacgacatgaaaacgacggcaaccgccgtgatggcgcttgttcaggacggctcagccagcggcgtcgccatcgacccgacccgctttcgtgagtacgggatcaccagcgtgccgtccctggtggtgtactgcgaggcgggccacgacgtgattcgcggcaatcttcatctgaagcaggcgctggaaaaggtggtggggaagggcgagtgcagggatgaggcgcaacagctgcttaataaaggagatgcccgatga

SEQ ID NO: 231526 - DNA, 993 bp, Klebsiella pneumoniae
gtgaaaatgctgaccgtctctctgttcgggctgcttctgtggggtaacagccacatggcagcggcggacgccgcctgcgaagggcgcttcgtcaatccgatcaccgatatctgctggcgctgcatgttccccctgtcgctcggcagcacaaaagtcacgggcggggatttaccggacacgtccaatcccggtagcccgatacagttttgtcccatgccaccgccggtatttcagcgcgttggcctggcaatagggtactgggagccgatggccatgaccgatgtggcacgttctccgggctgcatggtgaacctcggcggattcaccgttaatctcgggaaaatggggatgggcgccgccaaaaaagatgacaaacaggtcaatggcgcgttctaccacgtgcactggtacaaatatccgctgacgtactggctcaatatcatcacctccctcgggtgtctgcagggcggcgatctggatatcggatacctgtctgaaatcgacccgacatggggggacagcgccctgacctccattctgaatccggaggcggtcatttttgccaaccccatcgcgcagggcgcatgtgcggccgacgcggtggccagtgcagcaaaaacgtcggttgacgcgctgttctggtgtgccggatcgcaggggtcaatgtatccctttaacggctgggtgagcaatgagtccagccccctgcagtcttccgttctggtcagcgagcgcatggcgttcaagctgcaccgtcagggtcagataatggagagcgtcggggaggataaaaaggtctgcttcgagtatccgtcacccattattcccaaaacgcgctggcgctatcagatggtgaatatgtatccggacgtggcgcagtgccatcccttcggccgaacggtcatgcgctgggaaacggggcgtaacccgccgaacacgaagaaaaactacggctatcttctctggcgcaagcgcaactgcgtcttcctctga

SEQ ID NO: 231527 - DNA, 648 bp, Klebsiella pneumoniae; identical to SEQ ID NO: 96809

SEQ ID NO: 231528 - DNA, 348 bp, Klebsiella pneumoniae; identical to SEQ ID NO: 96808

SEQ ID NO: 231529 - DNA, 2631 bp, Klebsiella pneumoniae
atgagtaatccgctggactccgtcacccgcacggtcaactcgctgctgacggccctgaagatgcccgatgcgtcctctgaggcgaacgatgtcctcgggcagatgcgcttcccgcagtttagccgcgtgctgccgtaccgcgactacgatgcggaaaccggcctcttcatgaacgaaaagacgatgggctttatgctcgaggcgcagcccatcaacggcgccaacgaaactatcgtttcgtcgctggaaaacctgatgcgcaccaagctgccccgcgaggtgccggtggccgttcacctggtgtccagccatctggtgggtcaggatatcgagtatggcctgcgcgagctctcatggacgggggaaaaggctgatacgttcaacgccatcacccgcgcctactatctcagggccgcagaagaagggttcccgctgcccgatcacctcaacctgccgctgaccctgcgtaactaccgggtgtacatctcctgctgcgtcccccgtaagcgcggaagtaaggccagcgtgatggagatggaaaaccaggtcaaaatcatccgcgcctcgctgcagggggcgcagatagccacccgcagcgtggatgcggatgcctttatccgcattgcgggcgaaatgattaaccacaacccggatgcgctgtatcccaccgaacgggaactggacccgctcaaggatctgaactaccagtgcgtggacgatacctttgacctgaaggtgaaggccgactacatgacgctggggctgcgcggtaacggtcgcaacagcaccgcgcgcatcatgaacttccagctgaccaaaaatccggagctggccttcctctggaatatggccgacaactacagcaaccttctcaacccggaactgtccgtttcgtgcccgtttatcctgacgctggtccttagcgtggaagaccaggtaaaggcgcagaacgaggccaacctgaagttcatggatcttgagaagaagtccaagaccagctacgccaagttcttcccgggcgtggcgcaggaggcaaaagagtggggcgatctgcgccagcgcctgtcgtccgggcagtcctcgctggtgagctattttctgaacgtgaccctcttctgccgcgatgaccaggaaactgcgctgaaggtcgagcaggacgtactgaacagcttccgtaaaaatggcttcgagctgatttccccgcgctttaaccatatgcgcaattttctcgtgaatctgccgtttatggcgggcggcggcctctttaagcagctgcgcgagtccggcgtgctgcagcgcgccgaaagctttaatgtcgccaatctgatgccggtggtggcggacagcccgctggccacttccggcctgctggcaccgacctaccgcaaccagctggcgtttatcgacctgttcagccgcggcatgggtaacaccaacttcaatatggcggtgtgtggcacctccggcgcggggaaaaccgggcttatccagcccctgatacgcagcgttatcgactccggcggcttcgccgtggtgttcgacatgggcgacggctacaagtccctgtgcgagaacatgggcggggtctacctcgacggcgagacgctgaagtttaatccgttcgctaacgtcaccgacgataccatcgatgagatggccgaacgcctgcgggaccagctgtccgtgatggccagccccaacggcaacctggacgaggtgcacgaaggtctgctgctcaaggcggtgaaggccacctggcttacgaagaaaaaccaggcgcgcattgacgacgtggtggactacctgatgatggcccgcgacagcgaggagtacagcggatcgccaaccatccgcagccgcctcgatgagatggtggtactgctgacccagtacacccgcgacggggtgtacggcagctacttcaactccgacgaaccgtccctgaaggacgaagcccggatggtggtgcttgagctcggcggactggaggacaggccgtccctcctggtggcggtgatgttctcgctcattctctacattgagaaccgcatgtaccgcacgccgcgcagcctgaagaagctcaacgtgatagacgaaggctggcgcctgctggacttcaagaacaacaaggtcggggcgtttatcgagaagggctaccgtaccgcccgccgccatacaggttcgtacatcaccattacgcagaacatcgtcgattttgactcggaaacggcctccagcgccgcccgcgcggcatggggtaactcgtcctacaaaattatcctcaagcagtccgccaaagagttcgccaagtacaaccagctgtacccggaccagtattcgcagctgcagcgcgacatgattaaaggttttggcagcgcgaaggacaactggttcagcagctttatgctgtcggttgagcacctgacgtcctggcaccgcctgttcgtcgatccgctcagccgggcaatgtactcctcggacggtccggactttgagtttctgcagcagcgacgccgggaagggctgagtattcacgaagccgtctgggagctggcgtggaaaaaatccgggccggaaatggccgcgctggagcgctggcttcacgagcatgaagggaagaccatctcatga

SEQ ID NO: 231530 - DNA, 567 bp, Klebsiella pneumoniae; identical to SEQ ID NO: 96806

SEQ ID NO: 231531 - DNA, 402 bp, Klebsiella pneumoniae; identical to SEQ ID NO: 96805

SEQ ID NO: 231532 - DNA, 186 bp, Klebsiella pneumoniae; identical to SEQ ID NO: 96804

SEQ ID NO: 231533 - DNA, 225 bp, Klebsiella pneumoniae
atggcagacgaactcgatctcctgcaggagcaggacgaattgctgaaccagcttcatatacaggccgcgaggcagcgatcctgcctgcagggcaaaagccgcaaccggtgcgaatgctgtggcaatcgcatcctcctcaggcggcagcaggccatcccgggcgtacgtacctgtacggaatgccagcgggttctggaaatacgagaaaaacagtatctgaggtga

SEQ ID NO: 231534 - DNA, 540 bp, Klebsiella pneumoniae
atgaacaagacagtgcctgttgcgctcacgctggccagtctcctgacgctgtcgggatgtgccggtacaacgagcgattttgagtgtaacgcgacgacatccgatacctgcatgaccatcgagcaggccaatgagaaagccaaacgactggaggaggccagcgcggtaaagccgggtgcgacatcgctgccgcgcctggctgagggtaatttccggacccggtccgtgcagcccctgacgctgccggctgaaccggtgcatgccatcgcatccaggaatgcacctctgacgggtacaccgactctcccccgcccgcagccgcactcagcctcacgggcgccgctctccacggtcacgccggttactgtgtcgccgccagggcgcgagtccatcgtggacccgaggccgcttcgcgtcggtgaaaagacggccgggctgtggatcgcgccctatatcgatacgcaggacgtttatcaccagccgacgcgggtgttttttgttgtgaaaccctcagcgtggggaaccccacgcgttaactga

SEQ ID NO: 231535 - DNA, 1395 bp, Klebsiella pneumoniae
atggccagcattaattcagtggtgaagcgcaagcagtttatctggctgggtatcgtgctggcgaccgtgggcgtggtgggcggcggcggctggtatctggcggatgcacgctacgagggcagcagcgatgcggcagccgccggcgagcctgcgcccgatatgaccggcgtggtggacagcacctttgaccagaaggtgcagcagcatgccacgaccgagatgcaggctacggcctccgagatgcagaagcagtatgccgaaatgcgccgcgagcttgagctgctcagcaaggggcaggcaggctatcagcaccagattgacaaactcagtcaggataatgcggcgctttccgctcaggtcagcgcgctgggggcgaaacccgtcaccgcatcgggtgagccggccccgcagccgccagtgcctgcgccggggcctgaaggtgagccgcagccgaccggtttcccgccgcagacgggggccgtcccgccgccaaccgcgttctatcctggtaacggcgtcacgccgccggcgcaggtgcagtaccagcccatccccgtacccaaccagctgcgccggcagtcttttgcccacagcgacgagagtaaaggtccgtccctgccgtacatcccgtcgggcagcttcgccaaatcgatgctgattgagggggctgacgccaatgcctccgtaaccggtaacgagtccacggtgccgatgcagctgcgcattacgggcagggtggaaatgcccaacagcaaaagctacgacctgaccggctgcttcatcgggcttgaagcctggggcgacgtgtccagcgaacgcgccatcgtacgcacccgcaacatcagctgcctgaagcacggcgtcaccatcgaccagcccattgccgggcacgtgagcttccggggaaaaaacggcatcaagggcgaggtggtgatgcgaaacggcaaaatcctcggctgggcatggggcgcgggatttgttgacggcatcggtcagggcgtgcagaccgcgtcccagccttcggtcggcctcggcgccacggcatcactcggcgcgggtgacgtgatgaagatggggattggcggaggcgcctccaaagccgcccagaccctcagcgactactacatcaaacgcgcagagcagtaccaccccgtcattcctattggggcgggtaacgaagtgaccgttgtctttcaggacggttttcagctgaaaaccattgaagagctggcgcacgagaatgacagaagcaaagcggagggcgacgaccgcagcccggttccgccgccgtcagtcccgcagggcggcatgaacgggttcagtaccgaccagatgctcaaccagctgggcaggcttaaccagagccagtttatgccgaaggccgactcacaataa

SEQ ID NO: 231536 - DNA, 744 bp, Klebsiella pneumoniae
atgaacaaaaatagtcgccgtgcactgctggcgttgctgatgctcgcgtccggtcagacggtcgccgcacccgctgcgctttctgccacgattgttccgctgacgaacggcggacaggccagtatcgcggtcagcaacaccgacccgaacctttttacggtcgcaggtgaccgcgtgacggccctgaccagcctcgacggtgagctgacgcggcaggagcagacggcaagcggcggtgtgattgtcagcaccctcaacaaaaagcccttcacgttcattctggaaaccgaacgcggcctcaacttctcggtacaggccgtgccgcgagcgggcgctgggcgaaccatccggctggtcagcgagctgtccggtacgggtgaagcggcgcgcacctgggaagagtcttccccctacgaggccacgctggtttccctgagccagcatctgctgggcgggcagcttccgtccggctggcaggctatccccgttacgcatgaagccctcaacgctcccgccggactttctgcagtccccgagcgcgtctgggtgggtaatcaccttaaggtggtgcgctatcgcgtcaccaacaataccgggatggcccgcaacatcgcggaaagcgacttctggcagagcggcattcgcggcgtgctgtttggtgaagcctcgcgtcagctgatggcgggcggcgccctgcaggtcttcattatcagcagcggaggtgcggctgatggccagcattaa

SEQ ID NO: 231537 - DNA, 567 bp, Klebsiella pneumoniae
atggaacacggagcacgattaagtacacaacgggttattgccatcggctttattgccatgggggtggttattctgggaagcatcaccaccaatgttattcaggccgtcaacaactaccgccttcagaatgagcagaagtctatcgtcacgccaatgcttttcaacgcgccgtttgccgtgtcgcagaaccaggcagatgcctcctacctgcagcagatggccctgtcgcttatcgcccttcgcctgaatgtcaccccggagaccgttgatgcctctcatgagcagctgctggcctatgtcaaacccgcagcgcagaacgagctgaaaatccggcttgctgaggatgcgaagcgcattaaggacaacaacgttaactcgtctttctatatgaccagcgtgaaggtttatccggcaagcagccgcgtggacgtgcggggccaactgaagacctggataggcgactcgaaaccgtatcccgagctgaaacagtacgttctcaagttcgagcgtgaggacggcatcagctggctcagtcacttcggagaaatcaccgatgaacaaaaatag

SEQ ID NO: 231538 - DNA, 306 bp, Klebsiella pneumoniae
atggcagatgaatctctcaaaaaatatcgctttcccgaaaccctgacgaatcagagccgctggtttggccttcctgtggatgaacttattccggccattatctgcctggggtggggattctggacccagcattatattcccggaattatcgctgccgtactggcctatctcggaattaaaaagctcaagaaagggcggggcagttcatggctgcgagacctggtctactggtatatgccgacctcactgctgagggggatttttcatgatgtacccgactcatgttaccgccagtggattaaatag

SEQ ID NO: 231539 - DNA, 351 bp, Klebsiella pneumoniae
atgactgatgtgtctgttattaacgctgtacccgcgacccctgcaaagaaaaaattcagcaaagtcgcgttactcaaagcgctgaagtttgccctgcctgtcgcagcccttgctgcgtttttccctgaaacggttctggcctcggctgcgggtaaagatctgatgtccagcggcgatgcaaccgttaaaggtacatttggtaaagattccagcgtggttaagtgggttattcttgccgaagtcctggtaggggccgtgatgtatatgacgaccaagaacctcaagttcctggcgggctttgcgatcctgtccgtattcgtcacggtaggtatgtctgtcgcaggatactga

SEQ ID NO: 231540 - DNA, 225 bp, Klebsiella pneumoniae
atgattagacgtcacaggcttcgtggcccaacggtaactatgtcgatctaccttgacccacaaaccgatcttcttattttgaaggcgaaggacagaagtggtcgttctaaatcagctgaagcgctgattcggttacgtgaccacctggaaaaattccctgatttctataactctgaaatggcggaggtgatcccaaacaatcttgaacccaagtcacaaaactag

SEQ ID NO: 231541 - DNA, 699 bp, Klebsiella pneumoniae; identical to SEQ ID NO: 147046

SEQ ID NO: 231542 - DNA, 393 bp, Klebsiella pneumoniae
atggccagagttcaggtctatgtaagcgatgaagtgtcagagaaaataagagtaatcgcggaaaaacgtcgcgctgaaggagcgagagataaagatgtaagtttctcgagcattgcatcaatgctggtcgaacttggtcttcgggtctatgaagcgcagatggaaagaaaagagtcttcatttaatcaggcgctctataataaaactatccttgaaaatgtaatgaaaactcaatttattgtcagcaagctgctggcgatggagtcgctgagtccacatcttgctggaaatgaaaaatttgatttcagggatatggttacgtgtatacgtgaagatgtgcaacagattgttgaaaaattcttcccacaggaggaagagtctcaagataattag

SEQ ID NO: 231543 - DNA, 477 bp, Klebsiella pneumoniae
atgaaacggattgctcttacgtttttaatgttggctttttctggaatgttgaacgctgctgattgttttgatctggcaggaagggattatcatatagatccggatctgcttcgggcaatctcctggaatgaatcgaacttccgcacagacgttaaaggctacaatcctgtttcgggctttggctccggacttatgcaggtggactcccagcactttaacgaactggctcgttatggaataaaaccggagcaccttatttccgatccgtgtatgaatatctacaccggggcttactatcttgcaattgcattcaaaaagtggggagtcagctggcaggccgtgggcgcttataatgcaggtttcaggaaaacagaagaacaggcgcagagaagatatgtctatgccagaaaaattgaggcaacatatcgggcgataaagaataataaaaatgcagcgcagactcttgcaaaacagtaa

SEQ ID NO: 231544 - DNA, 531 bp, Klebsiella pneumoniae
atgcacacattaaacgtcaaaaccgccactcgtgaatcagccgaacaatttaaagtcgatgaacgacagcgctattgtgttacagatggcgatgaacgtcttgattttattcctgcgctcttttttacgccttctgctgataatatgattgccagctggttacgtcagcattcagattatgatggcggtttctggaattactggattattccgcagggcaccggaggaaacattgctccgaactgtgttagattcaccacgacgcaaaccggatatatcgcaccggaaggtgaacagcgctataacatggttattcccggtaattactttgaagcagaggtcagtgccgatgctgccggaattattgcgaccctgatgatcatgaactggttgtcctggcaggttgcagatatggggcctgaatattcgaaagtctgtaaacacctcgtcgctcgtcaggatgcactgaaagactacatcagtatcataaaacaccctgaagcagatttaatttatcgggctattgattga

SEQ ID NO: 231545 - DNA, 831 bp, Klebsiella pneumoniae; identical to SEQ ID NO: 139920

SEQ ID NO: 231546 - DNA, 264 bp, Klebsiella pneumoniae; identical to SEQ ID NO: 96792

SEQ ID NO: 231547 - DNA, 345 bp, Klebsiella pneumoniae
atgcacttaaatctgaccgaatcctgcgctgaagcgggtatttatgcgaccagtgaggccgaacgcgcgtactggctgagccgcgaaaagtcatatctgaccgcgtccgtcgaaatcgacgtacacgccttccatgatgcgctggggctgatgtacccgatgaactggcgcagcagtcagaacggcgagtgtgaaaccttcatgctggcggaaatggtctgcggtaatgtgaccgaaatctacgcgcggatcggtatccgttattaccggatgcgcgactacagcaaccttgaccacgcggagattctggcacgcgttaaggagggagtgcagcgccagaaatga

SEQ ID NO: 231548 - DNA, 288 bp, Klebsiella pneumoniae; identical to SEQ ID NO: 96791

SEQ ID NO: 231549 - DNA, 375 bp, Klebsiella pneumoniae; identical to SEQ ID NO: 96790

SEQ ID NO: 231550 - DNA, 360 bp, Klebsiella pneumoniae; identical to SEQ ID NO: 96789

SEQ ID NO: 231551 - DNA, 984 bp, Klebsiella pneumoniae; identical to SEQ ID NO: 151091

SEQ ID NO: 231552 - DNA, 999 bp, Klebsiella pneumoniae
atgacagttttcaaacatccagcgctacagtgggggattccccttgtcgcgcttatcgctatcttctggctgagtctgttttgctactcggccattcctgtttctggcgttgatgccattcacgccctgctgccaggccatacgccgacgcttccacaagcgctggtgcaaaaccttcgtttgccgagaagcctggtcgccattttgatcggcgcaagcctggctctggcgggaacgctgctgcagaccctgacgcataatgcaatggcctccccttcactactcggtattaacagtggcgcagcgctggcgatggcgcttaccagcgctatcagccctgcgcccgttacgggttactccatcgcctttatcgccgcctgcggtggcggcgtaagctggctgatggtgatgaccgcaggtggtggatttcgtcacacccaggacagaaacaaactgatcctcgcgggcatcgcgttctcggctttctgtatggcccttacccgcatcaccctgctgctgacggaagatcacgcttacggcattttttactggctagcgggaggcgtatcccacgcacgttggcaggagttctggcagcttttcccaatggtggcggttgctgtaccggttgtattgctgctggctaatcaactgaacctgcttaacgtcagtgacagcaccgcccgcacgctgggggtgaatctgccgaagctccgtttgatcatcaatattctggtgctgcttctggtcggtacctgcgtcagcgtggcaggcccggtggcgtttatcggtctcctgatgccgcatttggctcgcttctgggtgggattcgatcagcgcaaagtccttccgatgagcatgctgatgggcgccacgctgctgctgctggctgatgttctggcccgagcgctggccttccccggcgaattgcccgcgggggcagtagtggcgctgattggtgcgccctgttttgtctggctggtcaggaggcgtggatga

SEQ ID NO: 231553 - DNA, 768 bp, Klebsiella pneumoniae; identical to SEQ ID NO: 151096

SEQ ID NO: 231554 - DNA, 1290 bp, Klebsiella pneumoniae
atgcttttggcagggagtatatttttactgacgctgatactggtgatctggcaacccagaggcttgagcattggctggagtgcgagtatcggggctgtgctggcgctggtaaccggtgtcatccatatcaatgatattcccgttgtctggaatatcgtctggaacgcgacagcggcatttattgcggtcattatcatcagtctgctactcgatgaggccggtttctttgagtggaccgcactgcacgtctcccgctggggtaacgggcgtggtcgcctgctgttttcctggatagtgttgctcggtgccgctgtcgctgctttgttcgccaatgacggcgccgcgctgattctgacaccaattgtgattgcgatgctgcttgcaatgggattcagcaagggcacaacactggcctttgtgatggccgcaggatttatagcagatacggccagcctgccgctcattgtttctaacctggtgaatatcgtctcggcggactttttcggtctgggctttacgcagtatgcctccgttatgatccccgtagatgtggcagcgattgcggccacgctagtcatgctgcatctcttcttccgcagggacattccggcgacgtatgacgtttcgctgctgaagactcctgccagtgtgataaaagatccggcaacgttcagggtgggctggattgtcctgttattgctgcttgtcggtttctttgttttggagcctatggggatcccggtcagtgcgatagcggctactggcgcagcagtactgtttatagtggcgaaaagaggtcatgccatcaacaccggaaaagtcctgcgcggtgcgccatggcagatcgttattttttcgctgggcatgtacctggttgtctatggcctccgcaatgcagggttaacagagtatctgtctggcgtgctaaacctgctggcagaaaagggattatgggcagcaacgtttggcaccggctttctgaccgcgttcctgtcgtcggtgatgaacaatatgccgacagtgctgattggcgcgctgtcgattgatgggagtacggcgactgacgtcgtcaaagaggcaatgatttatgccaacgtgatcggctgcgatttaggcccgaaaatcaccccgattggcagtctggcaaccctgctttggctgcatgtgcttgcccagaaaaatataacgattacatggggatattacttccgcaccggcattatcatgactctgcccgtgctgtttatcactctggccgcgctggcgttgcggctctccatcactttgtaa

SEQ ID NO: 231555 - DNA, 354 bp, Klebsiella pneumoniae; identical to SEQ ID NO: 151097

SEQ ID NO: 231556 - DNA, 231 bp, Klebsiella pneumoniae
atgaagtggcgttactcgctgcgctggaagcgtcccggtccctgtcccggtgaacctgaactggcgtcagaagtggtggaggccgggaagccagcccctgagtccgtgatgtcactgtgggtggcaggagccggatatgctgtctgcgttgattttctgtatgaacggccgatcaggcgctggagcgatgagcgaaatatagtcattcgcaccctgagaattacactttga

SEQ ID NO: 231557 - DNA, 729 bp, Klebsiella pneumoniae; identical to SEQ ID NO: 139927

SEQ ID NO: 231558 - DNA, 432 bp, Klebsiella pneumoniae
atgcgcactattctgacccccgatgtactgaaaacgatgtcctgtgatgagtttgaggactggcgggacagcggcgaagacttccgccgcgaactgacccacgccgtcatgcgtgacctgtcctgccctgaaaactgggatgtgaacggcgagtaccgcagcgagttcggcggcttcttccccgtacagatacgctttaccccctcgcacggcaattaccatattgcggtgtgcagtcctggtgccatcagtccggcgtggatggtggtgttcgtgcccgccagcggtcgcccgttctccgtcattcgtaccctgagcggctaccagccggagcttgtcagccacaccgtcagcctgacggcgcgtctcgatgcggacggatacagtcaggccagcatcatcagtattctggcagcggagggcgcggcatga

SEQ ID NO: 231559 - DNA, 1299 bp, Klebsiella pneumoniae
atgcgcaccgacaacgccaaatttcgttttatcgggcgcgatgcctacgaggcggcagggggttacgtccgtgaagatctgttcagccaggacgagggcgacggtacggctgacagcgtgctggttgagcgtctggtgcaggaaaagctggagcgtatcgcgcaggacattcagcagcgggagggctgggcatggagtcgcggacgcgcagcccgcatctggtaccacggcgaagacggtaaggagttcgtgcagcctgctgaacccgatccggtgtacacccctgagcagcagcagcgtcttggtgcgctgcgggagcagtacgatacatatgacagcgtttgcgacgagtcagatgcgatcgaagcggacatcctcgccattcaggcggcggcagaagccagcgcgtggactgacgacatgaagtcaggcgcgggagtgatggtcagcctgtacgaagggcaggtgtacgtgcagcgcggtgtgcgcctgaaagcggatatgcctgaagaaaccgtaaccagcagcgtaacggtgccattcacctcacgccagcccgacgccgcagaggggatcagtgttccgctgctcacgaaaatgacctccgaacgtacgctggcagtccaggcggcgctgatgcagcagcccgaaaaggcggtggcgctgatggtctggcgcatgtgtacctgcgtcttctcgggctgcctgaccacgacgcatccgttccgtatcagcctcactgtatctcacggcagcctgacggagaacgccccgtccggtaaggatggcgcagcgtttaacatcctgatgaccgaacgggcaaggctgaaagccctgctgccggaagggtgggagaaggacttcaccaccttctttgcccttgacggcggggtgttgatgtcgctgatggccttctgcacggcctgttccgttgacggggtgcagacccgcgatatggggcacacctcgcgcagtaccctcgatgcggtcgaggcggcaatcggcttccacctgcgcgactggtggcagccgacgaaggacaactacttcggcagcctgaaacatccgcagattgtcgcctccctgaaagaggcggggctgacgggcgcggcgggtgacgcggagaagatgaagaagggcgatgctgcagcgcatgcggagcactttatgcagcacacccgctgggttccggcatggctcaaaggaccggagtcagcgggtgaatccggtgcagacgacgcggcttcagataccgacagccctgacaacgacaccaccaacacggcacacgccgcctga

SEQ ID NO: 231560 - DNA, 663 bp, Klebsiella pneumoniae
atgtcagtaaccgatgttaaagcaaaagcacccaaaaaagcgagcagcaaaaaaattacgaaggcacaggaggctgccctgaagatcgcccttgaggccgctgcggtcgagtacgttccgctgtccgatctcgttaaatccccgctgaacgtgcgctccatcccctattccgtggacagcgttcgcggtctggccgactccatcgagacgctcggactgctgcagaaccttattgttcacaccctcgcggacggacaatccggcgtggccgcaggtggccgccgattaactgccctgcaactgctggcgcaggaagggcgtctcgctgctgaccataccgttatggtgaagcgtgtttccgacgacattgccgcccttgcctccgtcgccgagaacgagcagcgcgccgccatgcatcccgccgagcagattgcaggtttccgtacgctggcagggcagggcaaaacccccgcgcagattggcgacgcgctcggcttcggctcccgtcacgtgcagcgcatgctgaagctggcaaacctcgccccctccctgatggagaagcttgcacaggacgaactgaccgttgagcagtgtcaggcgctctgtctcgaggacgatcctgcccgtcaggtcgaggtattcgaaaacgtgaaggccagctag

SEQ ID NO: 231561 - DNA, 231 bp, Klebsiella pneumoniae; identical to SEQ ID NO: 139928

SEQ ID NO: 231562 - DNA, 192 bp, Klebsiella pneumoniae
atgaaacttgcaccggaaacccgcgagatcctgcgacagtacaaagccctgattaatgcccgccgacgtgatgccggtcagcgggaactgaccaccgcgcaggtgatggatgaaatctgcgaatacatgacctgtcagtgtgccgtgtacatcggcggtcatttcatcttacagggtggaaaaggccagtaa

SEQ ID NO: 231563 - DNA, 507 bp, Klebsiella pneumoniae
atgcgcactacaaccaccacacccgctgtttacgtgggcacgtatcacaaatacaactgcggcagcattttcggcaaatggtttgatctgacggaatttgacggcagggaggatttttacgaggcctgtcaggcgctgcatgccgatgaatgggatgccgagtttatgtttcaggactgggaaggtatcccgtcgcagttcgtctctgaatgctccattgactgggattttatcgccgcttacaaacgcgccgaagaagagggcagggaagccgcttttatcgcctgggcggagtataccggcgaatgtgactatgacgcgtttgatgatgcgtaccgcggcgaggcggaaagcgaggaagactatgcgcgggagatggtggaggacaacggcctgttaaatgaggtgccggagccgttgcgcagctatttcgattttgaagcctgggcgcgtgacctgttcagcagcggttatgtgttccatgacggctatgtcttcagcaactga

SEQ ID NO: 231564 - DNA, 780 bp, Klebsiella pneumoniae
atgcaggaaaccaccacgttaaacgcccttgttatgcgccgtgcgcgcgatttgattgctgattatggatggcctgaccataccgatgttgatcagcgtgatccggtcaataaaccgggctggataagcatttatgtccgtcaggatgcggcaaatattgttcatctgctgcctttgctttgtaccggtgacgtacccgcagatctgcaaagtgccatgacaaaaatatccgggacgccagcgcagattattttatccggcagccgctatgccgacgcgccgcagcttccggaggacggaacacagatagctttcccctgggccggggaatggctgacggagccggagattcaggctgtaacggattgcctgtcccgcgccgtgcgggatgtatcccggcaggtatgggaggatgcgcgccggataaaggcggcactgaacacgcgcggggaaacgctgttttatcgccagacccgaaacttccgtctggttgtgaaggaaaatgatatgccctgctggctggacgatgatgacaatttgccggtggtgctcgatgccatcctgaacaaaggggcacgctacagtagcgtcgagttctttgttatcagcgacaaagtggatcaaatcctggcatgtggccagatgtgcgatgtgctgcgtattccgggcgagcctccgcgccggtggatggatttaaccctgttacatgaggtcatggcagaagcgcgtgcagaaatcagtcttgtccgcaatgccctgtcagcaatccggccagtttag

SEQ ID NO: 231565 - DNA, 420 bp, Klebsiella pneumoniae
atgtacggaacctgtgaaaccctctgccgcttgttgcgtgagcagtatcccgcagaaacccctttgaacctcattgtctggtccccggcggatatcgaagcactggccgacggaatggaatatgccgtttcggagcaggacacaagggcggtactggcgcgtatggacgccattccggaggaacaacggcttgagtcgggcgtgtctgccggtgcggtgatggatctgattgaacaggtgaaagaggccgttccggcggtgatggtgccggcggacctgcttgaaaccctgctgaccactgccgaacaggcgttatggcacagagaatggaccgcccgtgactgcaatcatccggtcccggaaagcgttacccgtcgcctggctgatgcggcgaaagttcgcgccttactgaaaaaatga

SEQ ID NO: 231566 - DNA, 222 bp, Klebsiella pneumoniae
atgaactatgcaggacacgaaaaactccgcgcagaagtggcggaagtcgccaacagcatgtgtgacctgcgggcgacgctgaacgggatggagcaccgctatcgctttgactctgatgtgctggccgaacgcctgacccgtcagaccctttttcgcatcaatgccctgtttatggcggcatacaacgaaatgcttgagctggatgcctgctttaaggactaa

SEQ ID NO: 231567 - DNA, 678 bp, Klebsiella pneumoniae
atgtcccgatttatccagggtaattgcgtccatatcatgtccggctttccggataatgctgtcgatttcattctcaccgacccgccatatctcgtcggttttcgtgaccgtcaggggcgtaccatcgccggcgataaaactgatgaatggctgcaacccgcctgccatgagatgtatcgcgtgctgaaaaaagacgcgctgatggtgagcttctacggctggaaccgcgtcgatcgctttatggccgcctggaaaaatgcgggattcagcgttgtcggccacctggtgtttaccaaaacctacacatcgaaggccgcatatgtgggctatcgccacgaatgcgcctacatccttgcaaaaggccgtccgcccctgccgcaaaacccgttgaatgacgtaattgcgtggaaatattcaggcaaccggcaccacccgaccgaaaaacccgtaaccagcctgcaaccgttgattgagtccttcacacatcccggcgcgattgtgctcgacccctttgccggcagtggctccacctgcgtggccgccctccaggctggccgtcgttacatcggtattgaattgcttgagcagtatcaccgggccggacagcagcgtctggccgccgtccggcgcgccatgcagtacccggccgctaacgacgagttcccggaggccgcgtaa

SEQ ID NO: 231568 - DNA, 672 bp, Klebsiella pneumoniae
atgtgcggtcggtttacgcagtacaactcccgcgaggagtacctggcctttctcggagaagaagcagaacgggacatcccgtatgatccggagcccgtcggccgctacaacgttgcgcccggaacccgtgtattactgctgagtgaacgccgctcgcagctgcatcttgatcctgttcactggggttatgcgccggagtggtggaacaagcccgctctcatcaacgccagaagtgaaactgcggccggcagccggatgttcaggccactctgggagcacggacgggccattgtttttgctgacggctggtttgagtggaaacagcaaaacggcgtgaaacagccgtttttcatttaccgtaaggacggaaatccgctcctgctcgctgccatcgggaaaccaccttttgagaacggcaatgaccaggaaggattcctgatcgtcacggccgctgcggatgaggaactgctggacattcacgaccggcgaccactcgtgtactcaccggatgccgcacgtaaatggctcagcgaaaacacaaccggtaaagaggcggaagacattgcccgtgagggcagtcttcccgccgaagatttcacatggcaccccgtcagccgggctgttggcaatcccgggaaccagggccgggaacttatagagccactgacttag

SEQ ID NO: 231569 - DNA, 423 bp, Klebsiella pneumoniae
atgatcctttttgtcactcccgcatcagagccagcactgtccaccgcaccacttttcacagagcgctgtccggctggttttccgtcaccggccgcggactataccgaagacgaactggatctgaacgcctactgtatccgtcgccccagcgcgacctactttgtccgggccattggcgattcgatgaaagatatgggcctgcactccggcgatctcatggttgtcgacaaagctgaaaaacccatgcagggggatattgtcatcgcggaaacagatggcgaattcaccgttaagcgcctgcagcttaaaccccgtatcgccctgctgccgatgaatcccgcctaccccactctttatccggaagaactgcagatattcggcgtggtgatggcattcatacataagacgcggggtacgaattga

SEQ ID NO: 231570 - DNA, 972 bp, Klebsiella pneumoniae; identical to SEQ ID NO: 147049

SEQ ID NO: 231571 - DNA, 177 bp, Klebsiella pneumoniae
atggaaatcaacctgtgccggtggagtaggggtcagaagcaaatcactcgctgccagaccattcagaaggaacggatcaagatgggggccagtatctatgaagacaaaatcatagtcaccagcgatacggtcaataattgttttcctgaggacttcagaaggtttaagtcctggtaa

SEQ ID NO: 231572 - DNA, 135 bp, Klebsiella pneumoniae
atgggtgtgatccaggaacatagtactggaggcctgtgggtcgaggtctattacaaggatgcgaagatcatgccgcagcaggtcctgatgtacacgcaacgcatgtgcaagagtaactgtactgactgtttttga

SEQ ID NO: 231573 - DNA, 171 bp, Klebsiella pneumoniae
atggatatcgcgatatttaggtatctgtcggtgggcgtagatatcgataacattctttatcgtcagagcatattgttcgacgttaccaatctgctttttattaaatatatagccgtcttcttccatttctttcatggccagttctacgatacgccggctcagctttggtag

SEQ ID NO: 231574 - DNA, 930 bp, Klebsiella pneumoniae
atgaagaagaaaaacagcacacccactcctcacgatgccacgttcaggcagttcctgacgcaaccggatattgcccgggatttcatggaaatccacctgcctgcagagctgcgagcagtctgcgatctcagcacgctgaaactggaatcaggctcgttcgttgaggatgatctccgccagtatttcagcgacgtcctctatagcctgaaaactacagccggcgacagctatattcatgttctggtcgagcaccagtcaacgccggacaaacatatggctttccgcctcatacgctatgcggtagccgccatgcagcgccacctggaggcagggcataaaaaactgccactggtgataccggtgctgttctatacgggtaagcgcagcccgtatccgtactctactcgttggctggatgaatttgacgctcccgagctggcaggcaaactctacagcaacgctttcccgctggtagacgttacgatcattccggatgatgaaatcgctggccatcgcagcatggccgccctgactttactgcaaaagcatattcaccagcgggacctggcagaactggtcgaccggctggcacccatcttgctggcgggatacttgtcttcatcgcaggtgatatcgctggtacactatatagtgcaggcaggcgaaacatccgacgccgaagcctttgtacgcgaactggcacagcgtgtgccgcaacacggagacgcacttatgaccatcgcacaacagcttgaacagaagggcatcgagaaggggattcagctcggtgaacaacgcggcattgaaaaaggcgagcgcgaagccacccttaaaattgcacgaaccatgctccagaacggcattgaccgcaataccgtcataaaaatgaccggtctgactgaagacgacctggcgcagatccgccactaa

SEQ ID NO: 231575 - DNA, 909 bp, Klebsiella pneumoniae
gtgatcaaaaaaatttgccaggtaattgatggggagtacgtctgcgacattgatatcagtgttgaggaatggaaaatattattaatgaatgaaaaagtttttgattctaaaagtattgctgcattaaaaaaatggttcattgaaccaagtcattcttgcacgtgtttcgatataggtaaaaagtacgatctgcacagtatgagtgctaatggtgttattaatggactgggtggaagggttcaaaaagaacttggtagattcgaagttaaagggatcggaaatatagcatctggcacaaaattcattacagtcatgaagagtaaagaaatcggcggaaaaccaaaaagaaacttatggacaattcgtgaagaacttgtccaggcaattaaggagctggatttttttggtacaacagaaaacaccagtaatgaattttactctgacgatgagttggtcaatgccatggagaaaaataataactttgatgacgatcgaacatttgaatataccggaaaagctaaaccaaagaaaaaagcaatagaagtaaaaaatggcctctcatacccaagaaataaagttgtatcaaaaaatgcattgaacaaagcaggatacagatgtgaagtcgataacgatcatccaacattcagaaggcgaaattcacccttgcactacactgaacctcatcacattgtacctatgtccaggcaagatgcttttgatacttctcttgacgtcgaagaaaatataatatctctgtgttgcaattgccataaacaaattcaccttggtcagggatatgaagatatgctggagaaaatatataatgagagaaaagaattattaaaaaaagtagatatagatatatcactggaaaacttgattatttattacaaaatggaaagtaagtga

SEQ ID NO: 231576 - DNA, 351 bp, Klebsiella pneumoniae
atgaaaatcaaaaacaccttttttgtaatattaatgttatccctgccagccatttccgctgagcattcggacatgaaaatgtcagatatgcactcatcggcatcgtcacaggaatatatggctggcatgaaagacatgcatgacaaaatgatggccgccgttaatgagcccgaccccgacaaggcctttgcaaaaggtatgatcgcacaccatgaaggagcaatcgcaatggcggaaactgagctcaaatacggaaaagatccggaaatgagaaagcttgcgcaggacatcattaaagctcaaaaaggtgaaattgagcagatgaataaatggcttggcaatcaaaaataa

SEQ ID NO: 231577 - DNA, 384 bp, Klebsiella pneumoniae
atgaacataaaagagatcgggaacgtgtttcactgtgattgcggattttcctggcatcgcggtaaaaacggtaaccataactgcgctgatggtttgcgtgaaaaggtacggcaactggcggcggagaatatggcgctgaagaacgccattacagaccatagtcattcggttcacttctgcgaggtttgcggaaaggatgatccgtgcagcactgacgatgtttgttatgcgctgaaagatacccccgccaccgagcgcatcgtagccgctcagcgctcagcattcgttgatgaagctgttacgaagattactgaatcaggagcgcttactttcggtgattgcattgtggctttgtgccagctgcgcgagggggccgacaaatga

SEQ ID NO: 231578 - DNA, 147 bp, Klebsiella pneumoniae
atgtggaagctgacgaccatatgcgcaagcaatacttttatcatcaaaaacagctattatctctttaataaaattatcttgaggtatggcatcctgtgtcagaaaaataactatatcatagtattcaatatacttgtaaactgctag

SEQ ID NO: 231579 - DNA, 2163 bp, Klebsiella pneumoniae
atgtcaccagttacaaataaatctgctattaaagatgccgatgagatcgatttaggacgtttgatcggcgagattattgatcatagaaaactgattatttcagttacagcattttttaccttgtgttcattgatttatgcactctttgcaactccaatttatcaagctgatgcattaattcaggtagagcaaaaacaaggtaatgcattacttagtaaccttagccaaatgttaccggatagtcagccaagttcagctcctgaaattactttattgcagtcacgtatggttttagggaaaactgtaagcgacttaaatctccaagctcgtgttgagcaaaactattttccgatatttggtcgaggttgggcccgattgatgggagaacaacccggcggaataacaataagtagattatttctaacagaaaatcaagaagaagtaccagagctgactctaacggttaaagacggctttcattatactatcatatataatggtaaggagtttgaaggtaaggtaggagagttacttgatgagaggggaatatctcttaaagtcgatagtatcgatgctagccctggtacagagtttacggtatcttatgttagtaagttaaaagcaattaccgatttacaaaatatttttacagtagtcgatcaaggtaaggatactgggatgttgacgcttaccttaataggtgacgacccaacgttaattaaaaaaattgttgatagtattagtaataattatctagctcaaaatattgctcgtcaggcagcacaagatgcgaaaagcttggaatttttgagccttcagttacccaaagtacgtagtgatcttgatatagctgaagataaattgaatcaatacagacggcaaaaagattcagtggatttatctctagaggctaaatcagtattagaacagattgtaaatgtagataatcagttaaatgaattaacatttcgtgagtcggaaatttcgcaattatatacaaaagagcatccaacttataaagcgctaatggagaagcgcaaaactttacaggatgaaaaagcaaagctcaatgaacgtgtttctgcaatgccaaaaacacaacaagaaattttgcgattgagcagagatgttgactcaggacaagccgtttatatgcaattgttaaatcggcaacaggagttaagtatagcgaaatcaagcgctattggtaatgtcagaattgtagataatgctgttactcaacctaagccagtaaaacccaaaaagatactaattattctagtaggcattatatttggtggtttggtttctgttatgatagtattccttcgtatctttatgcgacgtggtattgaatctcctgagcaattagaagaggttggaataaatgtttatgcaagtattccagtttctgaaacctttgcaaaaaggatgtcaaaaaaacatgggtggcgaagtgacaatagaggtgagattcaagagttccttgccaaagcaaatcctgcagacttagcaattgaagctattcgtggtttacgaactagtttgcattttgcaatgatggaagctcgtaataatgtgctaatgatttctggcgcaagcccaaatgcaggaaaaacttttgtcagtacgaatcttgccgccgtaatttctcagactggcaaaaaagtgcttctcatagatacagatatgaggaaggggtatacacataaattatttgatgtttcgaatgataatggtctttcagatattctttcgggtaaaattggtatagagtcagctgttaagaacattaaaacaattggtttcgattttatttcgcgcggagcagttccacctaatccagctgagttacttatgcataggcgatttggtgaattgattacgtgggcaagccaaaattatgatattgtaatcttagatactccaccaatattagcggttaccgatcctgcaattattggtcactatgttgggactactttattagtatctcgatttgaacagaatactgttaaagaaattgaagttagctttaagaggtttgaacaaagcggggttatagttaagggatgtatcttgaatggtgtagtgaaaaaagctagtagctattatggctatggttatagccactatggatattcatacactgacgataaataa

SEQ ID NO: 231580 - DNA, 1353 bp, Klebsiella pneumoniae
atggacagtggattcgtagatctcgatatacttcttacacgaattaggcatgcccagtcgaagacatactttcttgatgccgttaaggcctacaaagcgggcgcgttgaggggggcactaacctccgcttgggttgctctcgtctacgatctgatagccaaatatcgtgaacttagtgctatgggcgatgcagcagcgactgcatttcttaacacctgggacaacgcgactaaatcaggtgacatccctaaacttctccaacttgagggaggcattcttgaagacgcaacggccaatactcaggtagtcaaccggttagcccgaactcacctagaccgtcttcgcgaggataggcatctttgcgcgcatccggcattctcagcagaagcagatctattcgaaccttctcatgagttagtgcgacttcatttagtaaatgcagtggaattcgtcctatcgcaagaacctctacagggaaaagcaatattcgagttgtatgacgttgatgttcagtcgcccggctttcctacggacagtaaacgcattcttgattatgtagaacaacgttatcttactcgcgtacgcgctcagaatatcagtaacttcggcatggttctcgcaaaatcacttctcaaaggcgtgccagaacaatgggaaacgctttatcaccagattattacatcattagtcgccgtacgagaccgtgccagcattgcttggccaaacgtttcactgtcaattgttaggcttattgataatctagaaccacgacatcggcctagagcgatcgcatttattgccgcatttaatgagctttggatgcagcttcaggagccaacgcgaacagtcttgctagagactattgaaaatgccaatccagaaaatatcactgattaccgtattttgactggtgtaactttcgtaccgtttcaagcctcgctgcaaaggctaatagctggactaactcaacagcagttggcctcagcgatcatctttaacccacttgctgagctttgggataaggcaatagaatactatgcggaatcaggtagctggcgtggatctgaggggaactttatttctctcgtcataccattttctggtcgccttagtcagcaacagttcgaccaacttctagatgctatcatttccaatgggcagaattgggatgccgctgagacgcctaagcttctcctaggaatgctccgcaatgctttacccgccaacttaccaactatagatgcgcgtgctcgtttttatcatcacctaaatcgccatcacagtattaataggtatagtgatgtactcacaattctacaaaccgacggctggcttctgccaccacctgaataa

SEQ ID NO: 231581 - DNA, 1158 bp, Klebsiella pneumoniae
atgagcgaactgagttatctggaaaaactgctggatggggttaaagttgaatggttaccactgggtaatgtcactaaatatgaacaaccaacaaagtatctggtaaaggctaaggattatcacgatacgtttagcatacctgttcttaccgcagggaagacattcattcttggatataccgatgaaacacatggtatctatgaagcatcgaaaacccctgtaatcatttttgatgatttcactacagccaataaatgggttgattttgacttcaaagcaaagtcatcggctatgaaaatgattacttcaagtgatgatattaaattttcactaaagtatgtttactattggctaaacacattgccaaacgagcttgtagatggtgaccacaagcgtcaatggattagcaattatgctcagaaaaaagtacctgtcccttgcccggacaacccggaaaagtccctcgctatccagtctgaaatcgtccggattctggataaatttactgctcttaccgctgagcttaccgctgagcttaccgctgagcttaccatgcgtaaaaagcagtacaactactatcgcgaccagttgctgagttttaaagagggtgaggttgagtggaagacattgggagaggtggcaacctttcggcgaggtacggcaattactcagaagcaaacaacacctggtgacatacccgtagttgccaatggaccaacgccaacatactttcacagcaagagcaatagacaagatgaaactattgtcatcgctagatcaggtgcctatgcagggtatgtgagtttttggaatcagccaatatttttaactgatgccttcagtgttcaccccaacctaaaaattgtaaagccaaagtttctttactatgttctacagaacaaacaagagcatattcacgcgatgaaaaaaggtgccggtgttcctcatgttcgagtaaaagaatttgagtcatatgatgtacctattcctcctcttgccgaacaagtccgcatcgtaactattcttgataaattcgacacactgacaaactccatcactgaaggccttcctcgtgaaatcgagctgcgccagaaacagtacgaatattatcgggacatgttatttagcttcccgaagccggatgtggtagaggcgtga

SEQ ID NO: 231582 - DNA, 852 bp, Klebsiella pneumoniae
atgcgggtgccaaagttgtcacaattcaaaacccccctccgttaccctggaggtaaggcaaagttctctccacacattgagcaaattcttcgcttcaacaacttagtcggaggctgctacgcggaaccctatgcaggcggagcaggtgtggcattaggtttgctgctcaacggtcttgttgaggacattttcataaatgatatcgaccctgcactttatgctttttggtctgctgttgtaaatcataacgaatcattgtgtgaaatgatttacgaaatccccgtaactattgagaactggcatcaacaaagagacatactgcttaataacgataaatatagtatgctcgaagtcgctttatctactttctttttgaacaggacaaatcgctcaggcattcttaaagctggtgtcattggaggtaaggaacaaaaaggaaagtggaaattagatgcaaggtttaataaacaggatttaatcaaaagaataaagctaataggcacctataaagataaaattcacgtatcgaatcttgatgcagtagattttctgatggctcaaaaaagctcattacctaagaaaagcctaatctatcttgatcctccctactatgttaagggtgccgaactatatcgcaacttttatcagcatgatgatcatgttaaaattgctaaaaccttgcgaaatatcacacttccctggattgtttcttacgataacgttaatgaaataagagaaatctatcggggtcttaacatggctgattattcattaagttatacggctcaggataaaaagaaagggcttgaagttattatttataatgacggggtaaatatccctgagatttga

SEQ ID NO: 231583 - DNA, 927 bp, Klebsiella pneumoniae; identical to SEQ ID NO: 162291

SEQ ID NO: 231584 - DNA, 2169 bp, Klebsiella pneumoniae; identical to SEQ ID NO: 96821

SEQ ID NO: 231585 - DNA, 5241 bp, Klebsiella pneumoniae; identical to SEQ ID NO: 96822

SEQ ID NO: 231586 - DNA, 738 bp, Klebsiella pneumoniae; identical to SEQ ID NO: 96823

SEQ ID NO: 231587 - DNA, 720 bp, Klebsiella pneumoniae; identical to SEQ ID NO: 96824

SEQ ID NO: 231588 - DNA, 792 bp, Klebsiella pneumoniae; identical to SEQ ID NO: 96825

SEQ ID NO: 231589 - DNA, 273 bp, Klebsiella pneumoniae; identical to SEQ ID NO: 96826

SEQ ID NO: 231590 - DNA, 321 bp, Klebsiella pneumoniae; identical to SEQ ID NO: 96827

SEQ ID NO: 231591 - DNA, 609 bp, Klebsiella pneumoniae; identical to SEQ ID NO: 96828

SEQ ID NO: 231592 - DNA, 543 bp, Klebsiella pneumoniae; identical to SEQ ID NO: 96829

SEQ ID NO: 231593 - DNA, 309 bp, Klebsiella pneumoniae; identical to SEQ ID NO: 96830

SEQ ID NO: 231594 - DNA, 237 bp, Klebsiella pneumoniae; identical to SEQ ID NO: 96831

SEQ ID NO: 231595 - DNA, 258 bp, Klebsiella pneumoniae; identical to SEQ ID NO: 96832

SEQ ID NO: 231596 - DNA, 864 bp, Klebsiella pneumoniae; identical to SEQ ID NO: 96833

SEQ ID NO: 231597 - DNA, 147 bp, Klebsiella pneumoniae; identical to SEQ ID NO: 96834

SEQ ID NO: 231598 - DNA, 870 bp, Klebsiella pneumoniae; identical to SEQ ID NO: 96835

SEQ ID NO: 231599 - DNA, 285 bp, Klebsiella pneumoniae; identical to SEQ ID NO: 147065

SEQ ID NO: 231600 - DNA, 294 bp, Klebsiella pneumoniae; identical to SEQ ID NO: 96837

SEQ ID NO: 231601 - DNA, 483 bp, Klebsiella pneumoniae; identical to SEQ ID NO: 96838

SEQ ID NO: 231602 - DNA, 558 bp, Klebsiella pneumoniae
gtggctaagtaccatattgaatctgtgcaggaatgggcgccgtttactcacaacggccagagttactctttgtcacatttgaatgcacatgagattacctacaaaggtaagatgcaagattttaagtttgtcgtaacttatggcatgcactgcttcactaaagacggtacgccttacaacatcccctttaaatatcaagatgcgagagagtcgatctccgtttgtcttgaacggtatgaagcatcaaagcaactgcaacacattctgcccaaccttccatcgttgatgctctatcagaccactgaagaaaagtatttcacgcttcagatgatgaatagtgctacgaaccagcttgagccatacaagatctgcgttgcattcttcaaagagaaccgtttgatgcgtatacacgttctttcggcattttttgctcgtactggacctggtgcaccgggcgagcctatcccgcaaaagccagttagcttatttaaggttgctgtggatacggcaaaaaagccaagaaacagtggacgaccgaaggaagttaacaacaggtga

SEQ ID NO: 231603 - DNA, 561 bp, Klebsiella pneumoniae; identical to SEQ ID NO: 5006

SEQ ID NO: 231604 - DNA, 2967 bp, Klebsiella pneumoniae; identical to SEQ ID NO: 5007

SEQ ID NO: 231605 - DNA, 318 bp, Klebsiella pneumoniae
atgcattcatacgaggaccggatccgggccgtcgaactctattaccggtacggaaagaaagcctccattgtcgtcatggagctgggatatcctcccacaaaacagctgggccgttgggttcggatttatgaagagaagggcgatttacccagggaattaaagccaagagaacgctattcacggacacagaaaattgctgctgttgagcattatcttactcacggtggttgcctgtcgtacactcgccgagccatcggctaccccagtaacgaaattctaaagcgctggattgaagagttttacggctttgttgaataa

SEQ ID NO: 231606 - DNA, 450 bp, Klebsiella pneumoniae
atgaaaacattaattgctgtcactgcgttaacctctttattatccggggcggtttttgcccagtccagtaacattgcgcacgacgcacatcgtttcgtcaataatgcctctgcaatttcccatgtgaacgcggctacgcatgaacagaatactgatgaaaaaaataaagatatagcgactccgttttctgaaatgaatgaacatgaaagagctattattgctcattcatttatgaataatagcgcttcttatccacatcaaaaaatgattgaggaacataaaaaaatgctgaacgaaagtgaagcaaacacaaaaaacttatcctttagcgaactgaatgccggtgagaaagctgcacttatacatgagagtgtcaataatgcaggtgccgaagctcatcaaatacaggcaaaaaaacttcgagaattgtatgaaagcggcaagcagtaa

SEQ ID NO: 231607 - DNA, 1818 bp, Klebsiella pneumoniae
atgcaactcaaaacgtctcgacgaactttcctgaaggggttgaccctctctggtgtagccggaagtcttggcgtatggagcttcaatgcacgttccagtctgagcctgccacctgcagcatccctggagggtactcagtttgacctgaccattggtgaaacgaccgtcaatatcaccggcagtcagcgccaggccaaaaccatcaatggcggcctgccggggcccgtccttcgctggaaagaaggtgaaactattaccctgaaggtcaaaaaccggctcaatgagcagacatccattcactggcacggcattattcttccggccaatatggatggtgtaccgggactgagttttatgggcatcgagcctgatgacacctacgtctacaccttcaaggttaagcagaacgggacttactggtaccacagccattccggtcttcaggaacaggaaggggtatacggtgccattattatcgatgcccaggagcctgaaccttttgcttacgatcgtgagcatgtgatcatgttgtctgactggaccgatgaaaatcctcagcatctgctgaaaaaattaaaaaaacagtcggattactacaatttcaataaaccaaccgttggctcttttttccgtgatgtgaataccagggggctgtcagccaccattgccgatcggaaaatgtgggctgaaatgaaaatgaatccaactgacctcgcggatgtcagcggttacacctacacctatctcatgaacggacaggccccgctgaaaaactggaccggactgttccgtccgggtgaaaaaatacgcttacggtttatcaacggctcggcaatgacctatttcgatatccgcattcccgggctcaaaatgtcggttgtggctgcagatggtcagtatgtcaatccggtcaccgttgacgaattcaggattgcagttgccgaaacctatgatgtcatcgtggagccgcagggtgaggcctataccatcttcgcacaatccatggacagaaccggttacgctcgcgggactctggccacaagagaggggttaagtgctgccgttcccgctctcgatcctcgtcctcttctgaccatggaagatatgggtatgggaggaatgggacatgatatggcaggaatggatcacagccagatgggaggcatggataacagcggacagatgatgtctatggatggcgctgacctgccggaaagcgggacatcctccgcgccagtggaccacagcaacatggccggtatggatcattcccagatggccggaatgccgggaatgcaaagtcatcctgcgtcagaaacggataacccgctggttgatatgcaggcgatgagcgtctctccgaaattaaacgatccgggtattggtcttcgaaataacggaagaaaggttctcacgtacgcggatttgaaaagccgctttgaggatcctgacggacgtgaacccggacgaacgatagaactgcatttaaccgggcacatggaaaagtttgcctggtcatttaatggcattaagttttccgatgccgcacctgtgctgctgaaatacggtgagcgactcagaatcacgctggtcaacgataccatgatgactcaccccattcacctgcatggtatgtggagcgatctggaagatgaaaacggtaatttcatggtgcgtaaacatacaatagatgttcctcctggtaccaaacgcagttacagagtgacagcagatgcgcttggccgctgggcatatcactgccatttgctctatcacatggaaatgggaatgtttcgtgaagttcgggtggaggaatga

SEQ ID NO: 231608 - DNA, 897 bp, Klebsiella pneumoniae
atgcgaatgaagagaaattttaaggccataccggttttgttcgccggtttgtttacctcacaggtttcgatcgcagcgggctcagtgtctgcagacccccacgccgggcacgacatgtcagctatgcagatgtcagcggatgagaacttcactgagatgacgtccatggagcccgttgtgacagagagcagaacgccaattccgccagttaccgatgccgaccgaaaggctgcattcggcaatttacaggggcatgcaattcacgacagtgcaattaattatctggttctgctggatcagcttgaatggcaacggtcggataacagcaacaatttcagctggagcgttaacagctggatcggaggcgacacagaccggctttggctaaagagcgaaggtgaacgaagcgggggaaaaacagagacggcagaagcccagttactctggggacatgcggttggcccatggtgggatttggttgcgggtgtcaggcaggaattcagacctgagtcagcccagacctgggctgctgtcggttttcagggacttgcgctctataattttgagtctgaaattacgggttttgtcagtaatggtggaaaagccgctctgcgtctgggaggagaatacgacgttttacttactaaccggctcatactccagccatcctatgaggtgaatttctacagtcaggatgatgaatcgcgggggcgcggcaggggattagctgacacagagctggggctccggttgcgctatgaaatacgccgcgagtttgcaccctatgtaggcgtctcctggaatcagctttacgggaaaacatccgatatggcgaaaagagagggtgagaaagaccatcaggtagtattcctggcgggagccagaatctggttttaa

SEQ ID NO: 231609 - DNA, 381 bp, Klebsiella pneumoniae
atgtcgattttacataaagccactcttacaggtggcctggttctgggcgtcgctttttctgctatggcccatccggaattaaaaagctcggtgccacaggctgattcagctgtagcggccccggaaaagattcagctaaatttcacggaaaatctgaccgtgaaattctcaggtgcaaaattaacgatgacgggtatgaaaggcatgtcatcacattctccgatgccagtcgcggcaaaagtggcaccaggcgctgaccctaaatcgatggtcattattccgcgagaacctttacccgctggcacttatcgtgttgactggcgcgcggtttcttcagatacgcacccgattaccggtaattacactttcacagtgaagtaa

SEQ ID NO: 231610 - DNA, 930 bp, Klebsiella pneumoniae
atgaacgacctgattatgattgttattcgttttcttctttatcttgatttgatggtaatatttggattgccattttttcagatatatggaataagcggtgtaagacatgaagcgtataacctgactaatttcaggtcgtttataacctttgctgttgttgcaggcatcattcttactggcattaatatgctcctggtatctaatgccatgagcggagtaactgatctcagagaattatccatccatattatcgagatggttatagaagaaactgatgtaggtattagctggattgtcaggctctgtgccctgtttaccacactcggtgctttgttcctttacactaataagagagtattgtcctgcctgctaatgacgatgagtgggggcgtggcgctggctacacttgcctggggaggacacgccgtcatgcatgacggtctgcattactacctccatttactgggcgatctgactcatctcggcgctgcaggtgcctggacaggtgctctggttgcatttgctatcctgctgatgcgcagaaacgcgcataatgcacagagcgtcagtgtgatatctgactctctggcaaaatttgcaaccgcaggaacggtgattgttgtggctctgatcctgagtgcgctggtcaactatctgtatattgctgaaggtaacttaacccccttgttcaacagtgcctgggggggcatattgcttgctaaaacggctctgtttgttctgatgcttctgctggctgcagcaaaccggtttcaccttggcccccgccttgaagttatggtcagggaagggaattatgttcgcagcgttgccatgatgcgaaacagcatcctgacagaattcttcgttgcggtcgccattctgggggctgtatcttggctaggaacgcttgctccgtctcaggcaagctag

SEQ ID NO: 231611 - DNA, 681 bp, Klebsiella pneumoniae
atgcagcgtattttaatcgttgaagacgaacataaaacaggtagttacctgcagcagggactggttgaggagggctatcaggccgatctctttgataatggccgcgatggtctcggggccgcgtcgaaaggacagtatgatttgataatactggacgtgatgctgcctttcctcgacgggtggcaaatcatcagcgcactgagggagtccgggcacgaagaaccggtcctgtttttaaccgcaaaggacaacgtacgggacaaagtgaaagggctggagcttggcgcagatgactatcttatcaagcccttcgattttacagaactggttgcacgggtaagaaccttattgcgccgggcccgttcacagactgccacggtttgcaccatagctgacatgaccgtcgatatggtgcggcggacagtgacacgctcaggtaaaaagatccatctcaccggcaaagaatacgttctgcttgaactgctgctgcaacgcaccggagaagtgttacccagaagtcttatctcgtcactggtctggaatataaattttgacagtgatacgaatgtgatagatgttgccgtgagacggctcagaagcaaaattgacgatgactatgagccaaaactgatccataccgtgcgcggtgccggatatattctggagatcagagaagagtga

SEQ ID NO: 231612 - DNA, 1401 bp, Klebsiella pneumoniae
gtgagattcaaaatttccctgaccacgcgcctgagtctgattttttctgcagttatgctgactgtatggtggttatcaagttttttactgattagcacccttaatggctatttcgataatcaggatcgggattttctgacaggtaaacttcagcttactgaagagtttctgaaagcagaaacgttccaaaataaaactgatattaaatcattatcagaaaaaataaatgatgcgatgatagggcacagtggattattcatatctataaaaaacatggaaaatgaaaaaatcgtggagctgtatgctaaaaattctgcggtccctgagatcctgttaaataagtcaggtgatattctcgactatatgatccagactgaagaaaataatactgtttaccgcagcatctcacgtcgggttgcagtgactccggaacagggtaaaagcaaacatttcatcattacggttgccacggatacagggtatcacaccctgtttatggacaaactcagcacctggctgttctggttcaatataggtctggtctttatttcaatttttctgggctggctgaccacacgtattggtctgaaaccgttacgggaaatgaccagcctggcttcctccatgacggtgcatagcctggatcagcgtcttaatcccgatctggctccgccggaaatctctgagaccatgcaggagttcaataacatgttcgatcgcctggaggggtcattccggaaactgtcagatttctcgtctgacatcgcgcatgaattgcgcacaccggtcagtaatctgatgatgcagacgcagtttgcactggctaaggaaagggaggtttcgcattaccgcgaaattttattcgctaacctggaagaactgaaaaggttgtcacgaatgaccagtgacatgctttttctggcacgttcagagcatggtctgctgcagctggagaaacatgatgtggatctggccgccgaactgaatgaattacgtgagttattcgagcccctggcagacgaaacaggaaagacaatcacggttgaaggagagggcgttgttgccggagacagcgatatgctgcgacgtgctttcagtaacctgctctccaatgctatcaagtattctcccgataacacctgtacagcgatacgccttgagcgtgacagtgactgtgtgaacgtgatgattaccaatacgatgtctggcccggttcccgctaatcttgaacgtttgtttgaccggttctatcgcgcagactcatcaagggtccacaacacggaaggcgcggggctgggattatcaattacaaggtcgatcattcatgctcacggcggcgagctgtcagcagaacagcaggggcgggaaattgtgttcaaagtgcgcctgttaatggattaa

SEQ ID NO: 231613 - DNA, 435 bp, Klebsiella pneumoniae
atgaaaaagattcttgtatcctttattgccatgatggctgtcgcttcatctgccatggcttcagagacaatgaacatgcatgaccaggtaaataatgcccaggcaccggcccatcagatgcagtcttcaactgttaaaagcacagttgagggagagagcatgaaaatgatggatatgaatgaccacgataaggcagcaatgtcccatgaaatgatgcaaaacagtaattctgccgctcaccaggacatggctgaaatgcataaaaaaatgatgaatgctaaaccaggggctaccaacgaaacagcaaagtcattttctgaaatgagcgagcatgagaaggccgcagtagtgcatgagaaggcgaataatggtcagtcttccgttgttcaccagcagcaggctgaaaagcatcgcagtcagatcacccagaattaa

SEQ ID NO: 231614 - DNA, 516 bp, Klebsiella pneumoniae
atgaagccagcccccggagtggaaccggtcagaatgtacaaaagcccttacggcgggaaatacggcgtatggcggctggctgactgcgtcccgatgcgagcgaaacgcccacagacagaaaaacagcggcaggccaacgcacgtctgggcctgcaggcccggatgaagagtgagcgtggcaggttcgccatgctggcacatacctggttagcgctggaccccgtcttcctcgataccgaaacaaccggacttgatgccggcgcgcaggcgctggaaatcggtctggtgaatgcccgcggtgagaggatatttgagacccgccttaaacccactgtcggcatcgatccgacagcagctgcagtacacggtagcggcctattgaagtgggaagccatgcccgacagggcggggagcagtcacctttatctcgttaatcgctacagtgaacaaaaagagtcggcagaagaactttcccggcgggtaatcagaggaacatttgagggctggtatgagtga

SEQ ID NO: 231615 - DNA, 1116 bp, Klebsiella pneumoniae
atgcgtccggcgacatacgaatcagaacagattatcgaagcagggctggccctgcaggctgaaggacggaatatcaccgggttcgcgctgcgtaaccaggtgggcggcggcaatccgacacgtctccgccagatatgggacgaataccaggcatcgcagagcacggtcgtcactgaacccgttgccgagctgcccgtggaagtggctgaagaagtgaaggccgtctccgccgcactgtccgagcgcatcacccagctggcgaccgaacttaatgacaaggcggtccgggctgcagaacgccgggttgcggaagtcacgcgtgccgccggggaacagaccgcgcaggccgaacgggagctggccgacgccgcgcagacggtcgacgacctggaagaaaaactggatgaactgcaggacggatatgaccggctgacgctggcgctggaatcagaacgttcactgcgtcagcaacaggatgtggagatggcccagctgaaagagcgtcttgcggccgctgaagataatgcccggctgcgcgaggaacgtcacctggagcagaagacaagcctgcaggatgcactgagcaaggaacaggcacaacacaaagccacacgggaagacctgcagaaacgactggagcaaatttctgccgaagctaatgcgcgtacagaagaactgaagtctgaacgcgataaagtcaattctctccttacccgtcttgaatcgcaggaaaatgcgctggccgcagaacgtcagcagcatcaggccacccgcgagacactgcagcagcgcctcgagcaggccgtcgctgatgcacaggcgcgcgccggggagcttgcgcttgagcgtgacagagtcagcagcctcaccgcaaggctggaatcgcaggaaaaagcctcctcggagcaactggtgcgaatgggcagtgaaatagccagtctgacagatcgctgcacgcagctggaaaaccagcgtgatgatgcccgtctggagacgatgggggagaaagaaacggtcgcggcactgcgcggtgaggctgaagccctgaagcgtcagaaccagtcactgatggcggcgctttcaggcaataaacagaccggtgaccagaatgcgtga

SEQ ID NO: 231616 - DNA, 507 bp, Klebsiella pneumoniae
atgccgaaggatgaatcagtcgtcgaacgggccagggaatactttttccggcaccaccggtatacagaggaagacctggaatccgactaccaggcagaactgcgtaactacagggatgacacctgggaagcaccacaacgggccgccagactcagtgcggccgtcaagcgctacaaaacgtatgagatgctgtacttcttcttccagatcgctgatgaggccgggctggactatactccgctggttgtaaagcgcctgtgcgctcatcttttcgacaggcagggcagccagaatattattgttgatatctttgtccagaagggacgcatgcaccgcagccatgacagtgatcctgacattattgctgccgttgccgaacgctaccggcagcaggcagacgaccactggcagacagtcctgaagaatatcgggagagtgaagcaggactaccggaaaaatcagaacagacaggggtcgtctcagaaaacggaaaataaagcacgctaa

SEQ ID NO: 231617 - DNA, 354 bp, Klebsiella pneumoniae
atgtcaccattttcaacactacaactcttcaaaaatctgtcagatgaaacccgtctaggcatcgtgttaatgctcaaagagatgggagagctatgcgtatgtgatctctgcacggcgctagagcagtcgcagcctaagatctcccgtcatctggcgatgctacgtgaaagcggattgttgctggatcgcaagaatgggaaatgggttcactaccgcttatctccgcatattccttcatgggctgctcaggttattgagcaggcctggttaagccaacaggacgacgtacaggccatcgcccgtaagctggcatcagctaactgctctggtagcggcaaagctgtttgtatctaa

SEQ ID NO: 231618 - DNA, 363 bp, Klebsiella pneumoniae
atgaaaacgttaacggtgtttgacccggctatgtgttgcagtaccggtgtctgcggtacagatatcgatcaggttctggttgatttttctgcggatgtgcagtggctaaaacagcgtggaattcaggttgatcgttataacctggcacagcaacccatgagctttgtacagaacgaaaaagccaaagcattccttgaggcatccggggctgaagggcttccattgttgttgctggatggagaaatggtgatggcggggcgttatccgaaacgtgcagagctggcccgctggttcggaataccgctggagaaagtaggattagcatctaaaagctgctgcggtggtaatacttcttgttgctga

SEQ ID NO: 231619 - DNA, 1752 bp, Klebsiella pneumoniae
atgaaattcttacagaatatcccaccttacctgttttttaccggtaaagggggcgtcggtaaaacctctatttcctgtgccaccgctatcagcctggcggaacaaggcaagcgggttttgcttgtcagcaccgatccggcttcaaacgtaggccaggtgttcagccagactattggcaataccattctgccggtggcctctgtaccgggtctttcagcgctggaaattgatcctcaggccgccgcccaggaatatcgggccagaatcgttgatcctatcaaaggcattctgccggatgatgtcgttaacagtattaacgaacagctctctggtgcatgtaccaccgaaattgcagcttttgatgaatttaccggtctgttgactgacgcatcattattgacccgctttgaccatattatctttgataccgcgccaaccggtcacactattcgtcttctccagttgcccggtgcgtggagtagcttcattgagagcaatcctgatggtgcttcctgtcttggcccgatggcagggctggagaaacagcgtgagcagtattcacacgccgtccaggcattgtctgatccggatcgtacgaggctggttttagtggctcgactgcaaaaatcaacgcttcaggaagtcgcccgtactcatgatgagcttgcggcgataggtctcaaaaatcagtatctggtcatcaacggcgtgttacctgagacagaagcagtcaacgatactctggcggctgcaatatggggccgggagcaggaggcgctggcaagtcttcccgctggtctggacgctctccctactgacacattattccttcaaccagtgaatatggtcggtgtgtctgctttaaggggacttctcacctcccaacctgagacggcttcatttgctgaagtgtccgccctgcaaaaaccagcgatatcgtcgttgtctgctctggttgatgagattgcccttaatgaacacggcctgattatgctgatgggtaaaggtggcgtgggtaaaacaaccatggctgcggccattgcagtcagactggccgaaatgggatttgatgtgcatctcacgacgtcagatcctgctgcacacctgagcacaaccctcaatggaagcctcaataacctgcaggtcagcagaatcgaccctcatgatgaaacagaacgttatcgccagcatgtccttgaaacgaaaggacgtgacctggatgaagcagggaaacatctgctggaagaggatttacgctctccgtgtaccgaagagattgctgtgttccaggccttctcacgggtgatccgtgaagcgggtaaacggtttgtcgtcatggatacggcaccgacaggacatacattgttgctgcttgatgctaccggggcataccaccgggagatagcaaagaaaatgggagataaaggccatttctctacgccaatgatgcagcttcaggatccggaaagaacaaaagtattactggtcactctgccggaaacgacccccgttcttgaggctgcaaatttacaagccgatcttgaacgtgccgggattcatccatggggctggattatcaataacagtctttccatcgctgaaacccgttcaccgctgcttcgtcagcgctcgcagcaggaactgcctcaaatcgaggctgtaaagaaccagcatgctacccgtgttgcactggttcctgttcttgcggcagagccaaccggtatagacaaactcaaacagctcgcaggttaa

SEQ ID NO: 231620 - DNA, 426 bp, Klebsiella pneumoniae
atgagcaacattaccatttatcacaacccagcctgcggcacctctcgcaacacgcttgagatgatccgtaacagcggtacagagccgaccgttattcattatcttgagacaccaccatcacgcgatgaactggttaaacttattgcggatatggggatcacagtacgagcgctgctgcgtaagaatgtcgaaccttttgaagcgttagggctggcggaagaccgttttactgatgatcagttaatcgactttatgttacagcatcctatcctgattaaccgcccgatcgtggtgacgccactggggacccggctgtgtcgtccttcagaagtggtgctggatattcttccggatgcacagaaacacgcgttcaccaaagaagatggtgaaaaagtcgttgatgatgcaggtaaacgactgaaataa

SEQ ID NO: 231621 - DNA, 957 bp, Klebsiella pneumoniae
atgataagtttatcaccaccgactatttgcaacagtgcctcttttggaacggttgcccgcatcggagttgaatgtaccggttcttacggcgctggcttgctacgccacctgcaaaatgccggcatcaccgtgctggaagtgactgctccggataaaatggaacgccgcaggcgtggaaaaagtgacacaattgatgctgaaagtgccgcccacgcagctttctcattgatacgcactgtcacacctaaaacacgaagcgggatgattgaagcactccgcgttctgaaagtctgccgaaaaacagccgttgcagcacgtcgtattgcgctgcaaatgatccagatgaatatcgtttcatctccggatgaactacgtgatcaattacgtaatctgacccggatgcagctgattcgaaccctggccgcatggcggccggatgtgacggcgtatcgtaatgttcaggatgcttatcgtattgccctgaaatcgctggctcgacgatatcttgaacttcacgatgaaatagcagacctggatatcatgatcgcgtcaatcgttgatgagctggcacctgagctgatcaagcgtaacgctatcggctatgaatccgcttctcagctgctcatcactgcgggtgataaccctcaacggctgcagtctgagcctggcttcgcggccttatgcggagtcagtcccgttcccgtctcatcaggaaaaacaaatcgccacagactgaaccgtggtggagatcgcgcagcaaatagcgccctgcatatcatcgctataggccggttacgtacagatacgaaaacgcaggagtatgtcgcgaaaagagtcgcggaagggcactcaaaaatggaagcgctgcgctgcctgaaacgttatatcgcacgcgaggtcttcacactgcttcgcaatcaaaatcggcagattaacagcactcaaataacgacttga

SEQ ID NO: 231622 - DNA, 351 bp, Klebsiella pneumoniae
atgatatccctcccgtcaggcacccgcatctggctggtcgccggggccacggatatgcgtaaatccttcaacgggctgggcgaacagatacaccacgttctggatgaggatcccttctccggccatctgtttatcttccggggacgccgtggcgataccgtgaaaatactctgggctgatgctgatggtctgtgcctgtttatcaaacgcctggaagagggacagttcgtctggcctgctgtacgcgacggcaaaatcgcgatcacccgctcacaacttgccatgctccttgataagctggactggcgccagccaaaaatatcccgccttaactcactgacaatgttgtaa

SEQ ID NO: 231623 - DNA, 1593 bp, Klebsiella pneumoniae
atgaatcacgactatctcgcccgtatcgctgcgctggaagacgcgcttcgccagaaagacagtcagctcagtctcgttgcagagactgagtcgttcctgcgttctgcactggcccgcgcagaagagaaaatagagaacgaagagcgcgagatagagcatctgcgggcacagatagaaaaactgcgtcgaatgttgttcggtacccgctccgaaaaacttcgccgacaggttgaagaagccgaagccctgctgaaacagcaggagcagcaaagcgatcgctacaacggacgggaagacgatccgcaggtacctcgccagttacgtcagtcccgccatcgtcgcccgttaccggcacaccttccccgcgagatacatcggctggatcctgcggaaaccagctgtccggaatgcggcagcggtatggcgtacctcagcgaagtcagcgtggagcagctggaactggtctccagcgccctgaaagtgatccgcacggtcagggtgaaaaaggcctgcacccgatgtgactgtatcgttgaagcacctgcgccatcacgtcccatcgatcggggtatcgccgggccgggtctgctggcccgcgtgttaacggccaaatactgcgaacacctgccgctgtatcgccagtgcgaaatctttgcccgtcagggcgtggatctgagccgggctctgctctccaactgggtggatgcctgttgccggttaatggccccgctggatgaggccctttaccactacgtgatggactgccacaaactgcatacggatgacactccggttccggtgcttgcaccgggcagaaagaagatgaaaaccgggcgtatctggacgtatgtacgtgacgacagaagcgcaggttcatcagatccgccagcggcatggttcgccttctcgccagaccggcagggaaaacatcctcagcaacaccttcgccactatcatggtgtgctgcaggcggatgccttcgcaggctacgatcggttgttcagtccggaacgtgaaggagggccgctgacagaagccgcatgttgggcccatgcccgtcgaaaaatccatgatgtctatataagcactcacacagcgacagcagaagaagccctgaaacgtatcggtgagctgtacgcgatagaagaagaaatacgcggcctcacgacagaagagcgtctggcagccagacaatcgcaaagtaaaccactgctggcatcgctgcatgaatggctggtagaaaaaaatgagacgctgtcgaaaaagtcccgtctgggcgaagcgttcgcttatgtcctgaaccagtgggatgcgctgtgctactactgtgaagatggcctggcagagcctgataacaacgctgccgaacgagcccttcgtgccgtctgtcttgggaaaaagaattttatcttcttcggcagcgaccacggtggtgagcgcggagccctgctgtacggactgatcgggacgtgcaggctgaatggtatcgatccggaagcctaccttcgccatatcctgagcgtactgccggagtggcccagcaacaaagtggccgaactgctgccatggaacgtggttcttaccgataaataa

SEQ ID NO: 231624 - DNA, 402 bp, Klebsiella pneumoniae
atggccagagtgtctattagtgaggctgcccgactgacgggtaagagtagaacaacactgcacaggttaattaaagcaggtgacctgtccacctgtagcggtgaacgaaatgcaaaaatggtagatacttcagagcttttacgtgtctttggtccctttgaacaaccgaagggtgaacaccattctggacaggtctctgaacagcgtgatacagcctctgctgaccagagtgaacaggtgattcgtcatctgaaacaggagattgaacacctgaacaccttacttttgtccaaggattcgcacattgacagcctgaaacaggccatgctccttcttgaaaatcaccaggcaaaattaactgaatccccggcgccatggtggaaattctggaaaaaatcctga

SEQ ID NO: 231625 - DNA, 1512 bp, Klebsiella pneumoniae
atgaccagaataaaccttgataatattttgaatgaacagggcccttgcctaacctccgaacttgccgaaacattggtaaaaaattttggttttacaccggcagcagcgaggaaaaggatatctagggggactaataaaattagaaaactctcttacataatattcccccacagggctagatttatttatctgaaaaaggactatgcgtcagaaaaatactggaatgctctatactcctcattgaggaaagaaaactcctcttattatatggctatcagatgcataaaaagcagaggaggaatgataaaaagagatgagtttggtattttatgcggctccccttttcggcagaaaaatcatataccttacgaatcaataatatcctcactaataaaatcagaaataatattagaaatatcaagcgctagcggagacagatatttatacttaaaagagtttgagggaagtgaacattttctactagaagggcaaaacaaaaaagaattgatttctgggataatgatagagcaatctaggacctggttaaagcagcttggtttagttagttttggaaaagtaaaggcaatgggtgatgataacaaccatcctcgcgttggcacatttgaatggcatataactggaccatcctatactcaccctctaacaaaaaaatacgataacaaaacgaaaccaggattcgttgtttgcgacttaaacatacagccaatcacaacccttgacgatatatccatttttataaaaaaaatggatatgacgatatcaatgaagaacataggaaactgtatatttgtatacatatcaaatggttacactgaagaagctttgtaccttgcaaaatcaaagggtgtgatggctataacatataataatatttttggaaaaagaaatataaccgcaattgataaaataagcgagatattgggaaatgaatggcatgatgaaaacttatcaggagagttagctagattaaccaaagagctaaatgaaagaaacggcataactcaaaatctaaaaggtagactctttgagttcatttgctcagatatcaaaaggcgcatagagccaacatccagattgatattaggaagggagtacataaccacacagaatgaaagggcagaggcagatatcacatcgataagggatgaagtatcgatatccttcattgaatgcaaaggaataaaaagagaaagtaatcttgatgataaacaagtagatcaatggctagatgtaaggatacctaggcttataaattattgtaaatcacatcctgattacaaaaaactaaaaaaatccttcgaactctggattacagggggtttaacagagcaatctgaaatcagaatagagcattttaaaaaaacgcacccaaaagtggatttaattattaaaaaaccagaagacttgatccgtcatgttaaagaaataaatgatcgctctataaagaaaatgctttttgaatacttcttaaaaatggaaagggctcagtaa

SEQ ID NO: 231626 - DNA, 564 bp, Klebsiella pneumoniae
atgaaagacaatggtacgaatacaaaattcgaatcggtggacgtgaccgacacgccggtggttaaccgtccgctcgacttcttcagcgctatgtcagtgaacagctccacgtcgaaaaactatccgaccaatgccatatcttatggggcggatattattttctcccgggaaggtaacgccctggtcatgggattcccggccacggctaacgtcagtgatgaccagacagtgcaattcccaattcttgatgcagggcaatcactatcgaaatatttctatctgacagtaaaagttaagatgacagccggtacagcaggaaatcactacctgaaattccagatgtgggggacaacgtttaccttcaccgccaatgaaataggcaaaatttatacgctgaatatgcgatttgaaataggaaacagtaccaccctgaacagatttattacacatattggacatagtgaagcaacaaacacagcatgttcattcactatcctcgactttatccctaccgtagatcgactgccgtatctgcgctacaaaaaaacggcacaggccgtttaa

SEQ ID NO: 231627 - DNA, 222 bp, Klebsiella pneumoniae
atgagttatacgtatgaagaggctctggaagtatgcaaaactggcgtggatatgactcgcccggcttggcccgtcgggcaacacattacgtggaacgctgatatttcagagtttcatcctgatccgtcggttgactttgttgatcaagccggaattcagatgacattcattcccgcggacttcgacgagatggcaagtgactggattgaattctcggaatga

SEQ ID NO: 231628 - DNA, 1257 bp, Klebsiella pneumoniae
atgttggcaataaagagaaaacggattttagaaacatcagaaaattctgcaccatccttatggaggacgtcatttagctctgttttggttgggatatatttattcgcgtcaatatttcttccatcgggtaaggtttttgatataaatataaaattacttctgcttatggttgtccttggggcaatggtcatagataagcgtggtacgccaattgttaaattggtgtcattgctaatacttcctattgtgtatctgatactggaaatgtccctttcagttcttacatttccacaaaccgatctcatggtatcacaggcaattcagatagctgttttctatctgattatagcccttccatttgcagtatattcaaaagatgaactaggaacaattgcaaccaatttggttgtgtcatctgtagtttgtgttggtatttttaaaattttaattatcgcgtacgctactctaaaaggggttcctgtaacgactatcgtagttcttgtggcaaggttttttagcgcgaatattatgacctacgatttggatgatgtggcacttgctcgaataaatatgcctgctgatatcgtattgtatggcgtcatgttgtttttagtaaacaaaatattcaaagacgggctaaacattaagctattagcgcaggtttctatcgttgcgttttccgctttgattacgatgtctcgattccagtgggccgggatggcgttggctgtagcgctggctcttatgattaacatcagaaataaaaagtctgttgctattattttttctggattaatactagttatcggtgcgttatcaacacaaacggtgcaggatatcttggcatcccgtttggattctaaagccagctccgcatctgatgtgattcgagatactcaggaaaaggctatagacagacaaattgagatggctccaatgttaggtcatggaatggggtcttatgctccagatttaatccgtagcctgaacacaccatactcgtatgaactacaaataccagctatgattatgcagcttggatatataggcactttcatgtttttcggagtaacattaattccgttaatatactctttttctcatgctaggttgtcttatatcatatgcggcagcataatttacgcatggtggatcttaggtgggttctttaacccatctatatactcatcatctgggggggcgactctattgtttttatgcctaatgccattctctccttactttaggcgtagataa

SEQ ID NO: 231629 - DNA, 924 bp, Klebsiella pneumoniae
atgagaaagatcatcgcactcgctgtggcgctggctgtgttcccggccatctccgcccagcagatttggtttgcaccaaacaacacagacatgctgaacaacaatgcgcgagacgctgagtggtcacaaactcgcgacaacgtggcagtgttcaaattttactaccagatcatcagggacaccccgctaccgatcctgaaggacaaattcaactatctcaggtcccacaacatcaaggtggcgatagaatggcctggcctgacctggcacaaaaacggattgggatacaaaattgaaggttttcaggagcctggcttttcccagaaaatcattaagaaagtaaaagctgcaaatggttacgtagactacctggcgcttgatgagccaattttctttgcgcattttaaagaagggaaaaaccaccctcagattgacatacctaccatcgccagcatgatcgcatataacgttaagccgttttatgatgctttcccagggattgaggttggtgatattgaacctatcaatcagatgccaccagatgtgtataaaaaagtaattcctcagtttttgagtgaatacaagcgcattaccggacatccgatcgcgttcatgcacgcagacgtatactggcaaggtgactggaaaccagcagtggaatataccagtaagcttatgaaagaaaatgattcacgctttggggttattttcaactctgcggttcagtctgcacagccgtacgcatggatgatgagtgccagagaaaatataaaggtttatttatccggtaattcgcccatgccagatgatgtggtcatgcagagctggaacaagagcccaaaatcaccagttggtgacacggacccacactctcactcaagcctgattcagtattttaaaactgaagaaaaacttcggcgctaa

SEQ ID NO: 231630 - DNA, 288 bp, Klebsiella pneumoniae
atgctgatgatcccactcctcaagccgtttatgcgcattttcaatcatcacaatggcggcatccaccatcgcaccgacggcaatcgctatccctcccagcgacatgatattggcgttcagtccctggaagtgcatgacgataaaggcgatacacaggccaagtggcagagaaataatcgccaccagggcagaacgtacgtgccacaggaacagggcgcagacaatagccactacgataaactcttccaggagtttgtagctgaggttatcaatggcccggtcgattaa

SEQ ID NO: 231631 - DNA, 267 bp, Klebsiella pneumoniae
atgaccggtatggaccagcatgaacaggccattattgcccatgaaaccatgacgaacgggtcggcggatgcgcaccagaaaatggtggaaagtcatcagaggatgatgggaagtcagaccgtttcccctaccgggccgtcaaagtcattcgcggcaatgaatgagcatgaaagagctgcagttgcccatgaatttatgaataacggtcagtccggcccacatcaggccatggccgaagcgcatcgtcgtatgctcaatgcaggctga

SEQ ID NO: 231632 - DNA, 564 bp, Klebsiella pneumoniae
atgaaagacaatggtacgaatacaaaattcgaatcggtggacgttactgatacgccggtggttaaccgtccgctcgacttctttagtgccatgtcagtgacgagtggcacgtcaaaaaactacccaaccaacgctgtgcaatatggcgcggatatcattttctcccgtgaaggtaactctttagtcatggggttcccggccacggctaacgtcagtgatgaccagacagtgcagttcccaatccttgatgcagggcaatcgctgtctaaatatctctacctgacagtaagagtgaagatgacagccggtgcagtggggaaccactacctgaaattccagatgtgggggacaacttataccttcaccgccaatgaaatcggcaaggtttttacactgaatatgcgctttgaaatcggcgacagtaccaccctgaacaggtttattacgcatattgggcatagtgcagcaacaaacacagcgtgttctttcactatcttagactttatcccgaccgtagaccgcctcccgtatctgcgctacaaaaaaacggcacaggccgtttaa

SEQ ID NO: 231633 - DNA, 222 bp, Klebsiella pneumoniae
atgagtcttacgtatgaagaagctcttgaagcgtgtaaaaatggtgtgaatatcactcgaccgacctggcccacagggcagtatattacatggaacactgatgtttcagagtttcaccctgcaccgtcgattgattttgttgaccaggccggggaccagatgtcgttcgttccagcggacttcgacgagttggcagatgactgggtggagtacacagcgtag

SEQ ID NO: 231634 - DNA, 177 bp, Klebsiella pneumoniae
atgacccgcgccagtatgtcaggtgatttcattgctatggatgtgtctaaatccggcattatttccggcgttcctctggttatttataagaaggggatgtttgctggtgagtacattgcgacggaagaggacaagacggcgacggactgggcagtttttacggtcgcgcaggactga

SEQ ID NO: 231635 - DNA, 1782 bp, Klebsiella pneumoniae
atgccgtggggcgggggtaagttacggcatatcgccagcctcccggaagcgcttcggattgatgatggcggctgcatatttaaaacggccgccggtaactgttgggtcagggaggagctgctgaccggtcagggagagattcgtgtcgagtggtatctgagcggaggagccacgctcgttgacgatggtagtgattacctgcaggcggcgcttgataccggcaggctgtggtctcagtactcagacagaaataaaacggtcagaattgttatgccgtcgctgttgcggatcacccggaccatcacagcgtatacccgtggcgtgcggattgacggtaatcacggcctattgctgtgcacggcagatgtggaatacacaaaatatgccgatttgagcaccaatgcgaacatcacggcgacaccggatgccgggaaagacccgagactctgtattagcctcacccacggccccggcggagacccggcgcccggttttcctttgccagcctattccgggcagaagctcatcaaagacctgaactttgcctacggggtggcaaccggcgtctcgacatatcagctttcaacacttgccgatacaggaattgccgcaataggacactggggcaccagtaccgttgccgcggcgcaggggtatttcgacaacctgtcatttcaggggtttggcgtgggttatatcaacggcgacaacacctggggttacggttttcacgaatgcaaatggcgtcaatgctggctgcctgtctggcttattccgggagcggataactctgaacggtacacgtttattgactgcgtcatgcaggatggttatcgcgtcatttattccccgtgggggggagatattaaatttatcagtggctccattgttcacaattcggggcccgaactggagttccctacaggaagtaacatcattgaccttagcccgtcacgtatcgagcgtgtggataatgcgcataagttcctcaggttaagcacctcccgggaaacaggggacacggcacagacatacccgatggcgcatctgcatgattcgatgatactgattgacggttcatctgtgctggatgctcacgcactcttcagtgtcggcaaatactgcaaactgcttgttgataaccatacctggtcattaaaaaatatggccgcgctggctaatatgaagttactggatccggcagacactggtgggcaagttattttccgtaataatacctgccgtgtaggtattttttcagaatgcgctcgagataaccggctgctgaccagcaaagtgccagcaggtcgtctgccgtcgtccaatatcactctctcaggatctaacgcggaaaacgcttcaatcagcgtaagcggtgccagcctgacattaaccgtcaatgcgtccgcaggtggtagcatggctttactactacgcgtgcctgtcgatgtcgatatgacagactgggattcgttttcgtggaaatgcgtattcagcgcaatgagtatttctaacgcgtggaatattcaggcgtttgccaacgttgcgggggctgattacgtcaataaccgcgtggatctgggcgtcgcttcgttaaacagcgtggccgatatcagcgacgtctgtagcaataacagctatggctttaagcgcattcagaagcgcgcggatggtggctgggatcgcgtgccgacagaggtctatttttatatttccagtgccggcgcacagacagccggagagacattcacaataacccgcctggggttactggggtactga

SEQ ID NO: 231636 - DNA, 507 bp, Klebsiella pneumoniae
atgatcattgacgtcgaaaaactggtaaaacaactgggtaagccttatcatgaaatttacagtcacgggttgattccttataaaacaaagccttacggtcctattgatgaagatgaagctgaattagatatgaaacgagaaggaattcttttggttttcaccaataattccgagaaaaatcttactgaaattacattaaggttagaagataaaggcaaaacagactgggtattccccaatccgatgccatttggtatggaaccggtgatgacccaattgtgggttagagagcgctttgggttgcccatgatttatgctgatgcggaaatcatcatgactatttatatgagggtgaaagaggtctatgctctacctactcctcatcaatatatcgctgccgcatttacctataacaaagatttatttgcagaaaccgtgactttttacccactggaacgggccaaagagattcaggccgtactggagaaaaaacgattagagagttaa

SEQ ID NO: 231637 - DNA, 522 bp, Klebsiella pneumoniae
atgacgggccctgttcagtatcatcaagtcgcctttgagaagggtgactccggcactttcaattgccacatctgtacccgttcccatggctattcccacgtcagccgctgccagcgccggggcatcattcacaccgtctccggccatcgcaaccacatggccagacgctttcagtcgggttatcactgcttttttgccatccggcagaatcccggcttcaacctcatctattcccagtttccgtgcgactgcttcagcagtaagctggttatccccggtgagcataacaatgcggatccccgcctgacgcaaagctttaagcgcatccggcgtggttgctttcacgggatccgagatagctatcaggcctgcaaggttcccgtctgtggccacatagataacggtagcgccttccatccgcaacgtatccgcaacggccttttgattatcaataacgatactgttttcctgcatagccagttcattaccaataacaacccgttgaccttcgacatcgcctga

SEQ ID NO: 231638 - DNA, 282 bp, Klebsiella pneumoniae; identical to SEQ ID NO: 139167

SEQ ID NO: 231639 - DNA, 177 bp, Klebsiella pneumoniae; identical to SEQ ID NO: 139670

SEQ ID NO: 231640 - DNA, 243 bp, Klebsiella pneumoniae
atgtttctgaacgatgcaggaaaccaggaagggaagacggttgcaatgacgctgtacacccaggctacaccggtccccattgcaacgagagtaaacatattcagggagcggttacgcaacgacattccggcccgggcgaagaatggccagccacaccacaacacgacaggagaggccagaagtaactgcagccacgtgttgtactgtggcggtactgtattcctcaaagcgggaaacagatga

SEQ ID NO: 231641 - DNA, 612 bp, Klebsiella pneumoniae; identical to SEQ ID NO: 139461

SEQ ID NO: 231642 - DNA, 318 bp, Klebsiella pneumoniae
atgtttcagctatatagctctgagtgtgactatcttattttcccttctaagcttgaaacttgggggttgccgttgacagaggcgaaatcttttcagattcccatcttggctgcagatttaccatacgcgcacgaaactattggtacgtatgataatgcctctttttttgatgcggataatgctattatgcttgcaagtaagatcgtaaaaatagtatcgggtcacaatgtttttacccatcattattttgctgaaaagaaatcaagatttcatgtaattaacggttgggacgaattggcaaaacaaattatttcttaa

SEQ ID NO: 231643 - DNA, 888 bp, Klebsiella pneumoniae
atgaggttattagataaaatagttgaatatgcaaagctatataagattcaagttttctttaccacgcatagtttaacacttttggaacatgcattccataagaaatatcatgttatttacttaatcaataattttacaaaatctttattgttagaagatccagatattctaaaaataacaatgcatcttaaaactcaatctaaagatgaaacttataccagaaataaaatccctattttcacagaagatgaggaagcccgcttcttattacgtgaaattttttccttctggatacaaaaaaatgctaagttcgccatcgtcgaaaattattttcatttagttgaatgctcaataggtgctgataatctgaaaacgattttttctgatccgcatcttatggaaacttccttaaaatcaatttgtgtattagatggtgatcatggaccagatttaagaaaaggtataatttctttacctggttctaaatcaccagaagatttaatatttgagcattgtgagaaaatttttaatgatgatgatgcttccttttgggaaaatactgacattatagataatggttttacaaaagattattatattgttgctattcagcctaaaatcaaatcgattgaacaaaaactacaacaaaaaagagataatggcgaatcaacagcaggtctgaaacgagcactgaataaatcagttttcaattcacacattgacttttttaaaatgatcaccagaaattggttgagaaaagatgataataaggaatctttaaaatattttcataatggttttcaacaattgttctttagagtttgctctaccaacggtataaataggaaaatttgggattatccctatgactcatcagttgaagattaa

SEQ ID NO: 231644 - DNA, 444 bp, Klebsiella pneumoniae
atgagtctgccgtttgcactggttggtgggatatggttcctgtactggcagggcttccatatgtctgtggcgacaggaaccgggtttatcgccctggcaggggtggcagcagagtttggcgtggtcatgctgatgtatctgcgtcatgccattgaagctcacccggaattgtcccgtaaagagacgttcacaccggaaggtcttgatgaagccctctatcatggtgccgtactgcgtgtccggccgaaagccatgaccgtggcggtgatcattgcgggtctgctgcccatactctggggaaccggcgcaggttcggaagtcatgagccgtattgcggcccccatgattggtgggatgatcacggctccgctgctgtccctgttcattattcctgccgcctacaaactaatctggctgcgcagacataaaaaaagcgtgtcataa

SEQ ID NO: 231645 - DNA, 270 bp, Klebsiella pneumoniae
atggcgaatgaagaattccagcaggctgaactctttactggtgagtacaatgcggtttccggcgcgactgacttttctggatacgagatcaatagagaggtcagccaccttaaactggctttccgtgatcatcgtgtttccccgcctcagaagggttctcacccgggcgagcagttcggcaaacgcaaagggtttaaccagataatcgtccgcacccagctccagtcctttgaccctgtgttcgatcgtgcccagggccgtcagcagtaa

SEQ ID NO: 231646 - DNA, 303 bp, Klebsiella pneumoniae
atgattgaattagaagatgcggtaatggaaattatcgtcaatgcgggacagtcacgctcattatgttttgaagcgctgcatgcggcccgaaccggaaatatcgacgaagcgcgtttactcttaaatgaggccgacggttacgcccgccgggcgcatcagatgcagacacagctcatcgagcaggatgccggtgaagcgcgtcagcctatgacgcttattatggtacatgcccaggatcatctgatgaattcgctgctggcccgcgagttctcagaagaattaatccatctgtaccagcgttaa

SEQ ID NO: 231647 - DNA, 1323 bp, Klebsiella pneumoniae
atgagttctctgtatcagtccatgattgccgtgatcgagcaatctattactccgctggcaggacgccttgggcagcagaaatatgttatcgctatccgcgatggcttcactgccgcattgccgtttatgatcatcggctctttcatgctggtatttatctttccgccgttttcacccgataccaccaacggctttgcccgcggctggctcgatttctcccagcactaccgcgaacagctgatgctgccgtttaacctcagcatgggcgtaatgaccttctttatctcggtcggcattggcgccagcctcggtcgtcagtttcagctcgatccggtgatgtccggtctgctggcgtttatggccttcctgctggtcgccgcgccctatgccgatggtaaaatttccactcagtatctgtccggccagggcatttttaccgccctgatcaccgccatctactccacccgcgtctacgcgtggctgaagcaaaacaacatcaccatccgtctgccgaaagaggtgccgaccggcgtcgcccgttcatttgaaatcctgatcccggtgctggtggtgattggtactttgcatccgctgaacctgtttatcgaagcgcagaccgggatgatcctgccgcaggcgatcatgcatctgctggagccgctggtttccgcctccgactcgctgccggcgattttgctctccgttctgatgtgccagattttctggttcgccgggatccacggctcgctgattgtcaccggcattatgaacccgttctggatggccaacctgtcggcaaaccaggcggcgctggcggccggcacggtgctgccgcacgtctatctgcagggtttctgggatcactatctgctgattggcggcgtcggttcgaccctgccgctggccttcctgctgctgcgtagccgggccactcatctgcgcaccatcggcaagatgagcatcgtgccgagcttctttaatatcaacgagccgatcctgttcggggcgccgatcatcatgaacccgatgatgtttatccccttcgtctgcgtaccgatggtcaacgcggtgctggcttacggcgcgacgcgtcttggctggctgagccaggtggtgtctctcactccgtggaccacgccggcaccgattggcgcctcgtgggcggctaactggacgctgagcccggtagtgatgtgccttatctgcatggtgatgtcggcggtgatttacctgccgttcctgcgcgcctatgaacgttccttaatgaaaaccgaagttgagaaaaccaaaaatagcgttccggtggcagaaaccgttagctaa

SEQ ID NO: 231648 - DNA, 315 bp, Klebsiella pneumoniae
atgtacaagattatgctgtgctgttctgccggaatgtccaccagtctgctggtcagaaagatggtggaggcggcgaatgaacgtgatctgccggtgcagattgacgcctatggcgtttccgaatttgacatccagtttccgcagtatcaggtggtgttgcttggcccccaggtgaaatacatgttgaaaaccctgtctgacaaagcggcttccctgaacattccggttcagcccatcgatacgatggactacggcatgcagcggggagacaacgtcctgaattatgctctgtcgctgatcccagcggcgcactga

SEQ ID NO: 231649 - DNA, 945 bp, Klebsiella pneumoniae
atgatgtcgacaatcaatgatgtttcacgacttgccggggtttccaaagccacggtgtcgcgagtgttgagcggctcacgtggcgtgaaggaggccagtcgtcaggcggtgctgcaggcggcggaaacgctcaattaccggccaaacatgatagcccagtcgttgcttagccagtccaccggctgcatcggcgtcatctgcgcccaggacaatatcaatcaaaccaccagctatctctacgccctggaaaaacagctcagccagcaccagaagcacctgctgctgcgcttcgccaacaccagcagcggcgtgatgaactcgctggaggagttgacctgcgggctgtgcgataacgtgctgatcatcggcgcgcgttttcctctgaatattaaccgcccggacgtggtgctggtggactgcctcgacagcgagggcgaaaacagcattcagttcgatcacgccttcgccgccgaaaccgcctgtcactatctgataagccagggcagaaggcagattgcgctgatccatccccagagcagcggcttcgccgatcaggtgctgctgggctacaagcacgcgctggaaaaaaactttttgccgtttaatcgcaatctggtgtttttggataacacctcgccgtcggtggcggtgcaggagctggtcaataacgccacgacgctgaactttaatgcgctgctggtgagcgatgaacagcaggcgcagcgcgtggtgccgcagctgcaggcgtttaaccgcgccgttccgcaaaatgtgatggtgtttagcctcgccggatcgttacagctgcccggtatcccgactatcccggcgattgaatattccatggacgcgatggcgtcgcggatcgtcaactggttgaccgcgaaaacggacaacccgggcggcagcccgctgcgcggcgatttaattattccgaagcactaa

SEQ ID NO: 231650 - DNA, 1884 bp, Klebsiella pneumoniae
atgaagaataatgaaattgtcatcttctcagtttccagcactattatccaacgaattatgcatgtccttattgagcgcaaactggaaatccccgtctatgagtttcgttattctgatgtcctcaataaagccaacgaaatgatccaatccggtacccgaatcattattagccggggcggtaccgccgccctgcttcgcaataacattcccattccggtgatcgaaatcgcccatgattttcatggcgtataccgcatcctgcaggaagccaagaataaatcgcagaaaatcgccgccatcggtttcccccagttttgccgggcgctgcggcattaccaaagcatgaccaacgacgagtttaagatttgccaggtctataaccatcatgatattgaaaatgttataaaaaacctgtctgaaaatgattaccatatggtcattggcggtttaacggtcgccgaaatggccaagaaatacaatctcaacgttattgaaggcgatgctgacaataattctattgaacaagcaattaatgaagctcatggcttactaaaatatatcaatcgggaaaatttaaagttagtgatgagccatgcggcgctcaaccaatcccgcgaaggaattatgtgcgttgatcagctgggtgagattattcatattaatgctatcggcatgaccttatttcaatgccaggtgggtgacaaattatttaaaaaagaggtttttaaagatatctatgccagtatgattaatgagtccaacgtcaaagagcaagctatcgaaattaatggcacacttgttagtctctccgtccagcatttttctaatcgccacaacagctatgccgtcatcaccggcttaagccaggaaagtacgctctggcagcagactaccagtaagaaaagtcacttacgcggctatgccaccagctactcttttgacaatattattgcgcaatcgccgatcatgcatcaggtgatacaaaaagccaggctgtgcgctcaacatgagcttccggtccatatcctgggcgacaccggcacggggaaagagctgtttgcccagagtattcatcacgttagcgcccgaagccatggtccttttgtcgcgcttaactgcgcggctataccggagagcctgctggaaagcgaactgttcggttatgccgaaggcgcgtttaccaacgcgcggaagggaggcaagcccggggtctttgaaatggccactaacggaacggtatttatcgatgagatcagcgaagccccgctgtcggtccaggtgaagctgctgcgcgtattgcaggagaagcaattttcccgtcttggtggcgacaccctgctctcagccgattttcgcctgatcaccgccagcaataaagatctgggtcagctcgtcgccagcggggagttccgccaggatctttattaccgaatcaatatccttgaactgcagctcccgtcattacgcgaaagacccgaagatattatggtgctgattcaccatcttctgcagcaacaaaacaagcacctcacctttactgcggatgccgtgaactgcctacagaactatgactggccgggcaatattcgtgaactgcaggcggtcatctatcgtcttatcgtcttgctggacggaaacacggtgaacaaagaggttttacagcagatcagtcacctctcgccggtctgccaccagagcgtgtctcttgtttctgaccacacgctggtcgcggatgagagcgatctgttaaaaaaacaggagaaacagctgattgcgagcgtgattgaaaaaacggatggcgacagaaccagagcctccgccatcctcggcatcagccctaccacgctgtggcgaaaactgaagcagcataacatcagcggataa

SEQ ID NO: 231651 - DNA, 1164 bp, Klebsiella pneumoniae
atgaaactggatatagtcattaaaaacggccagatcgccgatatggaaaaccgaacttatatcaacgccgatattggtattaagggtaaccgcatcgttgatatcacgcatcaggatgaacgacaggcagaaaccgttattgatgcctcaggctgtattgttcttcccgggctcatcgactttcatgggcacgtttttcatggcggaacggcgattagcgtcaaccccgacatcgtctgtttaccaaacggcgtcaccagcatggtcgatgccgggagcagcggatgggtaaactattcgctatttcgtaatagcgtgattcatccggcgatggtgaaaatcaagagctatttaaacgtggtcaacgttggcctttcgacccttggcggtgggccaaccggctatcttgaaaataccaatccagcaaattacaacgaggaaaaaattgcccagacgctgaatgacaataaagccaacattctgggcttgaaattacgctatagccaggatatcgcccggggcaaacagtatgccagcgatccgctgttagctacggtctccctggcgcgaaaactggatacctccatttgcgtgcatgtcaccgactccctgttatgcgccgatgagctgatccgctatttcgaggagggtgacatctacgcgcactgtttccacggtaccggtcattccattctcaatgaacaggggcaggtctatgccgccatcaaagaagcgcagtcccggggggtgatcttcgattgttcaaacggtgtcgcccactttgattttgaggtggcgcaatcggcgatggagcagggattctaccctgatatcatcagtaccgatttaaccctgcgtaatagcttgcgtaccgacaaggtctatagcctgctgcatgtgatgtcgaaatatctcaatatgggcatgtccttctttgacgtcatccgcgccgtcaccgccactccggctcgcctgatgaaaatgcaagggcagattggtactctggcgccaaatgctcttgccgatatttccattgtgaaattacgcaaagataaaattatgtttgaagatacccggggaaaaaccctggagggtgatcgctacctcgataactgcgccactatctgtaacggacagatcgtttatcgccgtctgcgattctaa

SEQ ID NO: 231652 - DNA, 1395 bp, Klebsiella pneumoniae
atgctttatttaaaactcttgccgattatctttttccctgttttattttggataataccgcatccggaaggcgttgccgccccgacatggcatatggttggtatttatctggccatgctctgtggcctggttttacgcccgtttaccgattcggtgattatgctgattattttgggattcgcctctctggtactcgaccccggtccgctattcgctggatttggcagcccaatggtatggtttattatcagcgcttttattatttgcaaagcgtttgtcattaccgggttaggtaaacgcattgcttatctgttactcaaacgctacggcaaaaataccctgacgctcgggtatttgatgatggtcaccgataccgtgctggccccagcgaccggttcaaacatgtcgcgttcgggagggattacctaccccattttcaggaatatcgccgaagcgcttggctcgaagcccgacgacggcagccgcaaaatcggcgcctacctgactattttgatgtacgtcgtctcgatgggcacctccagcctgttcctgaccgggatggccaccaactcgatcaccgtttcattagccaatgagattatgaaggttaatcttgagtggatgacctggtttaaagccgccattgtcccggcgggactggtgctcattctggcgccctggatcctgtataaaatctatgctccggaactgaaagttattacgaacgtcaatgaaattgcggaaaaaggactcaatgaattagggccggtaaaacgcgaagagaagctgttaatcgcgttctttattcttggcgtattaggctggatgacggggtctatcaccggcattgcctttattcccgtgggactcgccttcctcgcttgtctgttgcttttcggcgtactgagctggaatgacgtagtcagcgaaaaatcagcctggcagacttttgtctggtacggcgccttctacggctgcgcggtcgcgctgtcaaaaggcggattctatgtttacctggtcgacgtgattaaaaattatctcgatctctcgcatttgagtgaattcagcgcgattgctgtgctggtgtttatcagcctcgcggtccgctatttcttcgtctcaaacagcgcctttgtcgtctctttctatccggtactctttaccctcggaatgaccacgcaggcacatcctatgtatgtggcgctctctctggccttctccgcaggctatggcgcgttattgacccactatggtaatggggctggcgtatttaccttctccagcggctacgtgccgcaaaaaacgttctggatgctcggcaccattatggttgtggttaacgtattgatatttttcttaatcggtattccttactggaagcttatcggtatctga

SEQ ID NO: 231653 - DNA, 699 bp, Klebsiella pneumoniae
atgactattggtaaccgtgtatttttaaaacgtccggcgggaaatattgcactgctgaaagaatatgagcacctgccggcggcaaatattgctgacaccatgaaccgtattgcggtattaggcaacggcatcaagcgcatttcctcacccaaaaaaccgataatggccggcttcgctattacggtaaaagcacgcgccggcgacaatttgatgctccatgccgccctggatatggcgggggaaaatgacgtcattgtggtctctaacgaaggagatcgctcgcgggcgttgatgggcgaaatcatggtggcgtatgcccatcacatgaagaacattgccggcattgtgctcgacgggccaattcgcgatatcgacgcgctatcggttcttgattttccgctctatgccaccggttcgaacccggcgggcccgttcaaaatgggtccaggggaagtgaatacccctattgccgtgggcggcgtcgcggtctgtcccggcgatctgattgtcggtgatgcggatggcgtcattgtcatcccactgagcgatgcagagactgtgctggataaagcgaaagagtacgccaaactcgactccagcaaagtggatgccgccaaaaacggcaccgccaaccgccaatgggttagaaaatcgctggatgcaaccggcgtcgaatttatcgacgacacatatcgttaa

SEQ ID NO: 231654 - DNA, 954 bp, Klebsiella pneumoniae
atgacgtataaaattctactcccgcaagagatcatggccgaagggagagcgtatctggaaagccgaggttatcagctaattaaaggttcggggatggaagaggaagatatcattcgtgatatcggcgactgtgacggtattatcgtacgcctttcaaaaatgtccgaccgcgtatttgaagccgctaaaaagctgaaagtggtggcccgccatggcgcgggttacgataccgtggatctggagtcagccaaacgtcatggcgttgtggtattaaatgccccgctagccaatagcatgtcggtcgctgaactgacaatattttatatgctgcactgctcacgtaatttcaagctggtcgaagagaaaatgcttgaagattattattgggcaaaattgcgcacgccgaaagttgaacttgacggtaaaaccctgggtttaatcggcgtaggaaatatcggctcgcgcgtcgcgatcaaagcactgcatggctttaatatgaaagtcattgcctatgatccctataaaacacagcagcagatccccgaaggtgtcgaactcactgacgatttcgaccgtattttcaaagagagtgatttcgtttcgctgcactgcccaacaacggcggaaaccaccgactttgtcggcgaaaaacagttctcgatgatgaaacccagcgcctatttcattaataccgcccgcggcaagctcgtcgatgagcgcgcgctttatcacgccttaagccagcaaattatcgcgggcgccggcgttgatgttttaaagaaagaacccttcgatgccaacgatcctattttcgcattgagcaatatcgtcatcggtcctcatatcggtgccgccaccatcgaagcgactgaccgggcttccctgcattccgccatcggcattgacgaagtgttatcgggtaaaaaaccgtcctggccggtcccaggtttttaa

SEQ ID NO: 231655 - DNA, 276 bp, Klebsiella pneumoniae
gtgaataatacccagattgaaatcttcagcatcatggtacaaacggaaaatattcatcatactgcgcaacggcttggcattgatgctgctgctgtcaccaccagtatttgtgcgctggagaacgagattggttttaatctcatcttgcgaggaaaaaatatcaggaaggtgatattaacggaaaagggaagggctttttataagctgacgccgcagatcctcggcatactgcatgctatcgcgactattcgccgcgcaaagcacctggctgaataa

SEQ ID NO: 231656 - DNA, 834 bp, Klebsiella pneumoniae
atgagatggctgcgaaacttccgctggccggtgaaactggccctgctggttattgcgctgctggcggccatcgccatcggcagcggctggtggctaccctgggatccggcggcgattaacctgcagcagcggctgctgccgccaggggcagcgcactggctggggaccgatcatctaggacgggatattttctcgcgcctgctggccgctacccgcgtctcgctgggggcggtaatggcctgcctgctgctggtgctgctgatcggtctggcggttggcggcagcgccgggctgctgggcggccgcgccgaccgcggcctgatgcgcctcgccgaactgtttatgacctttccaacctcgatcctgtcgttctttatggtgggggtgctcggcaccgggctgaccaacgtgatcctcgccattgcgctatcgcactgggcctggtacgccagaatggtgcgtaatctggtggtctccctgcgccagcgcgaatttatcctcgccgcccgcctgagcggcgccagccagtggcggctgttcagcgaccatctggcaggggcggtgatcccctcgctgctggtgctcgcctcactggatatcggccatatgatgcttcacgtggccggcatgtcgttccttggcctcggcgtcagcgcgccgacggcggaatggggggtgatgatcaacgacgcccggcagtatatctggacccagccgctgcagatggtctggccggggctagcgctgttcatcagcgtgatggcctttaacctgctgggcgacgcgctgcgcgatcgcctcgatcctcacctgatcgcggagcatagccactga

SEQ ID NO: 231657 - DNA, 252 bp, Klebsiella pneumoniae
atgactgaagctgtactgctgggtgaaggcttcaccctgatgtgcctcggcatggggttcgtgctggcgtttctgtttctgctgattttcgccatccaggggatgtccgccgccgtcaaccgcttcttccccgaaccggctgcggcgccaaaagcgacgccactgcccgccgttgcgcccgccggcgacttcgcccgcttaacgccggcgattgtcgccgccattcaccaccaccgccgtcttcacccttaa

SEQ ID NO: 231658 - DNA, 1053 bp, Klebsiella pneumoniae
atgaatggcataaagatacttatttttagcttgttgggacttttaataacctgctattccgccggcgcaatggcaaatgtggcatgtggttctgaagccagtctccccgcgggaacgctgaatatcgggtttacaccggcgccttcagtgattcaaaaatcggctggcgtgtatgatgtcagaacagtgtccgatcatggcgtagtcggcgatttggtgtataccgcttccgtgcaatgtatttccgacacggatgggccgatacattatgtgcccctcgtttttaacggtgcctgtatggggatgttcggatttgaattcgaactggaaccgaccttttgtcgcgctattgtgaatcatttcctcaccgatcctcatgctgtgagcagtcaaccgatcaacgcgaaatctggcactcccttcatggtttcagccagggttgcattaccattagcactgaaaaaccaccacggcagcggcagctttacgctcgacctgaatagttcttcagttaaggatggagtcagacaccaagcttcaaacgcgccaatcactgcaggaaaaaacatttttcttggcggacaagtggtctcttacaacgggccacagctcataaaatttgttactgtgccacctacctgtgtatttgaactgaatgatgtcgattttcagaatcagacgcaggaacatgtgatgaaaaatactgtcatgccattgcatactacattgtctgcaaactgcaatgaggctttgagcggcgtaaaagtgaaatttaccagtcccaatggttatatgcagcagccaggggtgattaaatctaatcttaatgatttaggttttctgctggtctgggcagacgatattttggcttctaaaggtacagccgttgaatttaccagggattacacgctcgcggacaggttgtttgccagcgccagcactacgacaattaatttaccaatagatgttaccccctattataatgccagctcaggatccagtatcacggggcaagtcagaagttctatcactgctgaaattaattactggtga

SEQ ID NO: 231659 - DNA, 537 bp, Klebsiella pneumoniae
atgaaaaaaatgtgttgtatattactgccaatgttgatggccccggctctgcaggcgagtaccgttacggcaaataatggcacagccagcgtgagcgcaaatctggcgatgacgatagcgactgataactgtacgattagcaacagcagctcaataagaactaacgttgtatttgatgatatttcagttgaagatctcagacagcatacgactttcactgaggatattccgctagagataacgtgttcacccggcgcgacggccgcgttgatctcggtatcgccagcgcctgggtaccaactcgtcaccgatggctctgatggtcgggtgactaccgacttagcgggggtcggcctggccgtatactggcaatctacggtatccgaggtcaatatgtcccctggttttaacacccgatttaactaccgaggccagccaatcaatgcgagcctccttgttaaacctgtagctattaacgctaatatatctccaggtgactaccattctgctatcgtggtagccgtcacctatatttaa

SEQ ID NO: 231660 - DNA, 597 bp, Klebsiella pneumoniae
atgttcgctattaagaaaaaagcagtgtgtgttgcagttgtatctattatttcttctttatcttttgctgctagcgctgcgcctactgcaacggctaacggtggtactattaatttcaccggtaaagtgactgacgtaacctgtacggttaagctgaacggcgggactaactccggtacggtggcactgcctccggtatccacggcatctcttgccaaaagcggtgatgttgccggaatgaccagtttcactgtctctctcgataactgtaaatctgctggcgcaactctggcggcgggtaaaacagcagcggtcttcttcgaagccggcgcggatgtggattctgccactggcttattgttaaaccataaagcgagcggtgcgggtgccgttgcccttgaattagtggataacagcaacagcagccaccacgcgattatcgccggtgacgctgcacagcaggcgaataccaccaaaattgccattgatcctcagggcaccaccattctgccttacgcggtacgttaccatgcaactggtgctgcgactgccggcgatgtcgaatccagcgttgtttattctgtgatgtacaattaa

SEQ ID NO: 231661 - DNA, 717 bp, Klebsiella pneumoniae
atgagttatccattacaccgcctcatgtcggtattatcgctgacaatgtctattattatggctgcaaacgtttcagcttcatcgattatcaatggtacccggtttatatatccttctgatgaacgtgagataaccgttcaggttgataataaaaacagctatccggtactgttacaaagttggatcgatgatggacattcacaaatagaaccagaaaagatgaatgtgcctttcattttgacccctccgttaaccagagtcgaagctggtaagggacagacgctgcgaattaactatatcggcgccgatctttcacccgaccgtgaacatgttttttggttaaatgtgctggagataccaccaaatgaaaaagatactaaaaatcatttacaggttgccttcagaagtcgattaaagcttttttggcgaccatctcaactttctaacggcgctgcgacagcgcaggaaaagttgtcatggaaggttgctggtgactcaatcattattaaaaacccgacaccctattatattacgctggctgcggtgagtattacccataacggtaagaaaacgattgtcaatggttcaatgattgagccaatgggaacaacatcattaaaaaatgatatcaatgttaacagcacagataaggttgaagcagaatatataaatgatttcggggctcataaaagcatcactattaaatacttgccataa

SEQ ID NO: 231662 - DNA, 2190 bp, Klebsiella pneumoniae
atgttaaagcatcttcatcttaaagaaaatgtgataaaaaataaggtcgatttcgcttcatgtcctgaattatccaatttaatccccggcagtagcgtcaagtttgatgccagtagccaacgactcgatatctctgtaccacaaaaatttattttgcatctttcgcaaggtgaagttcctgagtcggagtgggatagtgggatcgccgcagcgttcgtcggatataattttaatacctatgaaagtagtacccatggctcgcattataactctgactatcttggcctgaatagcggcatgaatatcggtggttggttcttcagacataatggcacctggaccagccaaacgaatcaacaaagccgataccatgccctgaatacctatgtccagcatgacattaatggcattaaagggcgagtggttattggccagtcaaacacctccggtcgactttttgatacattaccgttcaccggcgtctctgtcatgtcggacgatcagatgttaccgcagtcgagacgcggttatgcacctgagattaggggggtggctaacaccagcgcaaaagtgaccgttcgtcagggtgatcaggttatctacgaaactacggtttcaccgggggaattcatcctcgacgatctttatccttctggttatggcggcgatctggttgtttcagtcagagaggcagatggtcagacaaaaaccttcagagttccctattcttcggtggccgatcttctgaggccaggcgttcaacgctacgagatcgtggcgggtaaataccgtaatgactatagctcaggcgacggcaattcgctctatcagtttacctggcagcgcggtatctcaaactacctgacattttatacgggctcgcagaaaagtaatgactatttttccggtctccttggggttgctattgatacgccaattggcgcgttcggtacggatattacgcactccattactgatttagatgatagtaataagaaaggggaaagttaccgcataagctataataagctcattcaggagtctggcagtaatatcgctttagcggcatacagattttctactcgtgggtattttgactttaccgaggcgatgcattatcaggacttatacaatcatcatctgtgggcgggggatgtatttttacccaaaagcaaatttatcattagcgttcagcaaaagctgggtgaagagttgggtcaactgtatgtcagtaatatctggttgaactcatggggaaatcagggttctgaaaaacaatatcaattggggtattctaattactggaaaaaggttagttattcgttttccttaaaccgaagccggcttgataacggacagtatgaaaataactggttattgtccgcaagtattcccttgggtgaagagagcaatacatcgttatccaccagcttaggccgggactcatccgggcactatactgaacaggtgggattaagcggctcggaaggtgaatctggtcagttaagctggaatgcgcagggatcgcatacgagctatggcgacaatatgggaagcttatcagggcagtatcgttctccggtcacaaacattggtgtcggggccagtgctggcgaaaatacccatactcttagcggcaatttaagtggtgccatcgtcggccatcgtcgcggcgtgacgctgaccccctatctggctgattcctatgttgtggtatcggcgcctggcgctaccggcgcgaaattacccggttattctgatgtccggatcgatcgctggggaaatgcagtagtccctgtctggtctccttattcagtgaatgagatcagaattgatccgaaaggcattccaacgaacatcgagctggatgaaaccagtcaggctactatcccaagagcgggggcggtgacacaaactattttctcaacgcataaaggttatcccctgttatttagtccgcaagatcatcacgcgcttccttttggtagtaatgtgacagatgagcatggtcaggccatgggattggtcagtcagggcggccaaatctatctgcgagccaccgaagaaagtgggaaactctatgcgacatggaatgataacggttcgcctaaaacatgcatcatttcctatgctttgcatgagaatgaattaaccttgccaatgatcaaaagaagttatcagtgccagtag

SEQ ID NO: 231663 - DNA, 174 bp, Klebsiella pneumoniae
atgtgttgtttggccgtggatgatagcggccttttttttatcaatggagatgggaactttaatggtttgttcaagagtatgcagatgaaagtgatagataaagggcgtcaacgcgccgaaaaaagcgaggggaacctggaccaaaaagccctctttgtgcagaagacattataa

SEQ ID NO: 231664 - DNA, 558 bp, Klebsiella pneumoniae
atgaaagatgataataattcttttttcttacaaaataaaaaaaatcaacgtcttgattttaagaaaagcaaccatgtcgcctatctggaaaatggttgtatcactatgcacagaatagatgatggattgttaacaattaccattagagctcccgcgattattggccttgggcagttcagaggagagtcattcactcactacatccgctgtacaacagaatgcggaatgtgggtaatgacggcggaggacacctttaagttactgtccagattcgatctttggcagcatgcatttgatattttgactaagcatttatatatgtacttcaccagagacaatatgatgcaaaaatcaacagtgcgggatatcgtgatagaccatattaaaatgatatgttcctttgaagagtcgatacgaacgtctacctcaatatatacctatatactctcacggaatgctatttcaagaagtgcagtacataaagtcgttcaggagttagtcaaagatggctctttagtattgaatcggggaaaaataattagctttagagaagagtaa

SEQ ID NO: 231665 - DNA, 636 bp, Klebsiella pneumoniae
atgacagataaaccagatgattattatgattacgtgctcggggtgaatactatttatgatgtcgatgacaggtatcttaaagagggcgtgcatgctttaatcactattgccctgcattcaattagcatgcactactttgaagcattactctccatggggttgaaaatcattgtttctgaaaaatgtttcgaagacgaattactctgccagcgcagattagtaacagactcagcagagcatatacaactcgtatttatagataagaattatattgcgtttttcaataattcgaaactatgtcctgatggcaagatgttttttagtaaaaaaatcgagaaaaatcaattcctgcacgaactgcagcgtatttttatccaaagagtcgaaccgcgatatcaagagcataagcgaggggactgcaaatcatatccatgcagtaaacaattaactgaactgcagaggaagatcctgctaaagctcagcagcggtttaagctatgagaggctctcgcaagagctgaatatggagtaccgtaagctaatgaaacataaggaaagtattattcagaaattcagtctggggggcgcttgcgatttaactgcttttgccagagccttaagaaaaacgagcaattga

SEQ ID NO: 231666 - DNA, 915 bp, Klebsiella pneumoniae
atgccttaccagttggtagtgcttagcccagttgctaacgatctagagcagttaggaaccaaagaaaagttttggttttattactctcatgacactgtaaatttacagttgttcaagtactctaggcccggaacaggtgagcattggtctgaaaaatgcgctgcagagctgtgtcatcttttgaacattccgcatgcaagctatgatttagctaagtgcaatgatagattcggtgtggtttgccagaacctcatcccagttggttttcgaatggtcatggggaatgaggtcttacacagctcaacggcagattatcctcaacctcttcagcccggggaaaagcctgtaagggttcgagagcatactgtaacaagggttttaggttgccttgataaagagtcaatccagccgcccccaagttcctatgtgcttgatggattgaatgcagctgatgtgttctgtggatacttgatgcttgatgctttaatcagcaaccaagaccgccatcatgaaaattgggcgattatgctcaataatgaaactggtgagcagtttttatgttcaacgtacgatcatgctgccagtttgggaagggagatgttagatgatgaacgtgatgaaagacttacgaccaaagataaaaatcgccaaattccatgctttgtaagtaaagctcgttcagagcttttcaaagcaaaaaccgataaaaaaccgttgtttacagttgaagcatttcagcatgctgttgagggtagacttacagctagcaaccattggctgggtaagctgagagctttaacagaagattccattacggatgtgtttaatcaggtgccgtcatcgtgtatctccgatagcgcacgcaaatttgcaacactcatggtactggaaaatcgtagaaggctattagaatga

SEQ ID NO: 231667 - DNA, 741 bp, Klebsiella pneumoniae; identical to SEQ ID NO: 154443

SEQ ID NO: 231668 - DNA, 447 bp, Klebsiella pneumoniae
gtggctgaactgcaggaagttgacgcctggttagatgcgttgctggcggaactggagcctgccgcacgtaagcgcatgatgcgggatctggcacagcagctgcgccgcagccagcagaaaaatatcaggatgcagcgcaacccggacgggacggcttacgagccgcgtcgcgtgacggccagaacgaaacagggccgcatccgtcggcagatgtttgcaaaactccgcacaacaaaatacctgaaagccgtcgccagccaggacgcggcaagcgtcgagtttgacaatagagtgcaacggatcgcgcgtgttcatcattatgggctgagagaccgagtgagtaaaaaaggccccaatgtacaatacgataagcgtcgtttactggggctgaatgatttaacactctctctaaccagagatatattaattcagtgggttagtagttaa

SEQ ID NO: 231669 - DNA, 654 bp, Klebsiella pneumoniae
atgaatttgaatgaagagcaatattccgcagcattggctaccttgaataaaagagccagtcgctcaaaaatgacgacaatcctttttatatacgcccttttaatatcattagtttcaatgtccacatctcttttttacataaaaataaagagcaacgatagagaagatttattatcttccctaacgagagcagcaacagagactcattcaaccctgactgccataacaggtttaaacaatgcaactcgtgaattaattcaaagcctagataatttcaagtcatcttcaaacatcggaaacattttaaattcacaactcaccaccaccgcccctgtcaccaaacaagaaaacacactaacaaaaatattagaaatcgctgggccgattcttttaatactatcaagcctactatttattgtatatattttgcgcttattcattgtattcattaaatacaacatgcaaatgagtaatgattatgacaaccaaaagatatccctcttactttcaggaggaaataccgaagagttcagtaaaatactaaacaacctaaggtcccacaatattaccttcgagaaaacaccttaccttccgcaagaaaaaataattctcaaattaattgatttagcacgagtatcaagagataagatttaa

SEQ ID NO: 231670 - DNA, 909 bp, Klebsiella pneumoniae
atggccgttattgacctttcccagctgccgccgccgcaaattgtggatgtgccggattttgaaaccctgctgtctgagcgcaaggctgaatttgtcgcgttatttccggcagaagaacaggaggccgtggcccgcaccttaacgcttgaatctgagccggtggtgaaaatgctgcaggaaaatgtgtaccgggagttgctgctgcgccagcggattaacgaggcggcgaaagccgtgatggtggcctattccggcggggatgacctggacaatttaggcgcgaataacaacgtacagcgccgggtgattacggctgcggacgacaccacaacgccgcccacggaggcggtcatggaatctgatgcggattatcgccagcgcatcccggcggcctttgaggggatgagcgttgccgggccagtcggagcctatgaatatcacgcgcttagctcggatggtcgggtggcggacgcgtcggcgttcagcccgtcaccggcggaagtcgtggtgactattctggcccgcgacggcgatggtactgcgccggaagacttactgcaggtcgtcggtgaggccctgaatgatgaggctgtgcggccggtggcggatcgggtgagtgtccgatctgctgagattgtcccctacgaaattgatgcggttctttatgtctatcccggcccggcaaaggaacccatcctggcggccgcgaaagcgcagggtacggcatatatcaacgagcagcgtcgcctggggcgtgacgtgcggctgtctgcgatctatgccgctctgcatgttcagggcgtccagcgcgttgagctgatgaagcccctggcggacatggtgttagataaaacgcaggcgtcctattgcaccgattttaaagcagaaattggtggctctgatgagtag

SEQ ID NO: 231671 - DNA, 3348 bp, Klebsiella pneumoniae
atgaatataaatgaagatattcgatggtctgactctatttatcagatcatgcgtaatgacagggttgaaggtggcaagggtggtattgccaacattcaggcagaacaacttgccgcccgtacgcaatatcttaaaacgatgatagaaggatactcagattatcatgagtatactttttatacttctgtggatgatcctgatggaaccattgccggactggaaaaaacaccgacaggcaaactctttcgtgtggcccgcggtccgggtggaaagattgctttttcttattaccttaatgattctggtgtggcaaaaaaaatcgctgatacaacatcgcgcggcgcgttaacaaataatattcgcgaatactcttcagcggaagatgcgcaaagtgatgtggaagatgctctgattcttgagggtgcgaaatgttacatctctgatagtgagacggcgctgtcagtcgagtatgttaataataacggtatcctgatagctacgggcagggctataccgttaaaaagtcaggtagatgaacttgatgtaataatttcaggaaaagaacttgaccgtgttgatttatctccagaatcttttgaggatggaaaatactatcggattgataccggtgaagttggtatcacatcagatcagaactggagcgcatgcgcaccagtaaatattgctggttttaaaagattgattcttaccgggacatttttacacagggaaaaggctgctccaatattatttatcgatgaaaataacactattatttctgttgagtctatggggcttccattgtccgaagacaataattttacgtctttagctgaatatcaggtaagcattccggcaaaagccgttagcgcactgatctcaacctacgccgagaagtccgtaatggtttatggaacaaacacggatttcaaacagtctgctgttgcaatgtctgcgggtcgcgtcagaagccgtcttgttaactggataaaaaatacttatatgagcgcgactacgggcgcgcttgtgacaaactcagacgattactacaccactcagattccggtttcacctggcgacacgtttattctttcatgcaaactgaaagggcaatcaagtacggtaagactggtggggtttcttgatgcagcagataacttgatagggtctttttaccctggccccggtagcgcagccgttgcaaccattagcaatatgtcattcagggtgccagccaatgcggtgtctatgattattacagcctatgctgtggatgactcaacggtattacaacaggcaactcttttcgaccgttccatgacagatactcagacggcgatcgacgcggcaagtagcatcgcaaagcacacttcattgccatattacccaggccggtactggagaaaaatggacggggcactgatatctatcgatgatgctccgtattgcgcattccatcctattaaggtcaatcctggtgaaaaatatagaataaagacaaatacttttacgggcaatccttcactagttgcgttagtcgttttcaaaggcgcaaatggtgagtatattggaaattccgaagttgcaccggggtcatctatatttgtttccgtggatatcacggtaattgtacctgctggggcagcgcttatgcttttgactgcctacagcccttatattgacattttcgcgcaaggcagtgagatcgaaaatctggcctcatcagtcacaggaattgcatcggctatcgaagagcaactcaatatcggttatacgaagggatattactggaatccgacaagcggagcgctatccagcacagtcgatcctaactggcgcgcgtttgatgcgatcgcggttagttccggggagatttaccggattactgcaactgaattcacaggcagtatttatctcgctattttcaaagatgcagacggtgctgtagttggtaaatcgcaattgggtcctggtgggacgaagattgtttccgttgacgttccggtcactgtgccagcaggcgctgtatccatgtgcattagcgcttataccgataaagtaataatcagcaaaaacgtcaaccataaagccgatttgagaaacgagaccatcagaaatgactttgaaagttgtcttgacctgctttcaccaaaaggtctcgacggtttttactggcgtcaggaaaccggtataagaacactaattaccgcagactggtcatatttttcggcagacccgttgaacgttaaagaaggtgaaacataccggattatatgcgataaattttcggggaatccttcgcttgtatatcttgtactctttaaagacgcggcgggatctgtaattggcaggagcaatgccgggccagggtctggcgtggtacggtcagtcgacgtcaacgtaaccgtgccatctggcgcggtaacaatgtgcataactagttacagcagaaatctccaggtaatcaagtctggcagcattctaagcaaaataccgggtaatagcccggcacaagacaacagcccgctggattactggaaagggaagaaaatagtctggctgggaacgtccattcctgcgggaagcggttcgaatgcctacccgtatatgttggctcagcgcctgggggcgaacatagttaaccggtctgtcggttcatctccgattcgtggcgggctggatgccttcgtgaccactgatgacccctatggatggacaggaagtctgtatacgcgcgtcactcgagcgctgtcccactccaacgctataaagcaggagttcatagataattacgattcaaaatggaaaagtcgggttaatggcgggccagctaccttatctgattcagataaagcagccattttgagcaattcgtatgaaaaccgcttagcgggtaatcttgatgctgatttgttcgtaatagatcacggcattaatgattatctctggcttgaggagcgcggaggcgatctctccagcttgctgacgccgccagtcgaaacgcgggatatcaataccttctacggtggaatgaatgtagttattgactacattcttagccagaatccacgcgcaagaattttgctgattggtttttatgagaataatctgcgcaaggaaattgcagaagtacagcaaaggtctgcggcactctggcaatatcctcttgtgagaatgtgggaaaaaacagggtggagccagcaagttttaaggggtgctaatggtgcaggtaaaaccattacagaattttggttgccggataatttgcacccgcataaagattccaccggtcaggcaaattcgttactggcttcgattatcgaatcagcaatcagagaggtgagataa

SEQ ID NO: 231672 - DNA, 231 bp, Klebsiella pneumoniae
atgccgttctatgtaccgggcggcggcaacgccttgcccggcctacaatacccgatcattgcgcagccaactcgcccccttgcaggcccgcgcaagcgcagcgccatcgggcgcgatatcaggctccacgctctgtttttacggacggcgactggccaggcaaacaccgcgagttactgctgggcggccggtggcgtagcgttctgtttatccttcgcgatactgtcctga

SEQ ID NO: 231673 - DNA, 945 bp, Klebsiella pneumoniae
atgagaacatccggcgcggtgttaacgctgctgttagcggcctggggcacgtcggctgcggagccggacgagaacgacagctattttccgatctggggcgatgaggctcgcgccagaggatattccattccgttaccctacggcgtcaacctgagctatatgaatatccgccaggatatcatggtcgacagtattaccttttccgggcttaagctcggcaatcatcccattcccagcgatatgttcgccatcgatgccggacacacccgcgagaagagcaaaaccgaaaacctgcgcctggatatgtgggtctttccgttccttaacgtatacggactggtggggcatacccgcgggtcgtccgtctcccaggtttcagtggattcagacccatcgcagtttcgcggcctggatcgggccatcgccggcgcggttcaccagctttatcagagcgggaagttgcaggatattgattttaagcttgattttaaaggcaccacctggggggccggctttacgctcgccggcggctacggcaactggtttgggttagtggatactaactacacccgcaccgacttcgatatcctcgacggcagcatttcggcggtcaccgtctcgccgcgcgtcggctaccgtttcagttttcaggggatcgacgggccgtcccatctcagcctgtgggtcgggagcatgtatcaggacgtgcagcaggagtttaagggcgatctcgccgacctgcacatgccgccagagctgcagccccttattgccgcggtgaataaagacggcgagggcaaattcgacgttaagcagaagctgacctcgccgtggaatatgctgattggcgcccagtatgaggtcaccaaaaactttaacgtgctgactgaattcggttttaacgaccgcaacagcttctttgtctccggtgaataccgtttttaa

SEQ ID NO: 231674 - DNA, 1122 bp, Klebsiella pneumoniae
atgaaattcccgctgtccgcgctggcgcttctgttcctgttgtgcccgcctggcgatgccgccgatctcttcgatgcggaagatagcatgctcgacatgagtcagtatctggcggaaaaccgttacggttttctgccggtgccgctggcgataaccgagccggcgatcggctatggcggcggactgtttggcctgtttttacacggtaaaggcagccgggagggcgggcagtttattcctccgccgctcaccgctttcggcggggccgccacgcagaatggcacctggtttattggcggcggccatcgtcacacctggcggcatgatcgcattcgttacctggcgggagccggctacgctaacgtcaatctggatatctattccggcgacatcggcggcttcagccatgctaaaccggtgcagacgcagaccaaaggggtcgccgcgctgcaaaagctgctgtttcgcgtgggcgatacgccggtgttcctcggggcctcccaggtgtatgcccgggcggatgtcgctttcgataatccgcgggtcaaccgggtctggcagcaggtgctcgggcaaaacagcacctcttcggcgctgggggtggtggcggaatatgacactaccgataatattttctatcctcagagtgggttagcgctgaagggcgaatatcggtttttccgttcgctgctcgggggcgattatcactacaacacgttttcgctggacgggaaggtgtttattccgctcagccagacgctgaccctggcgatcgcgggcaattatcagtccttaacccaccatgataagcacctgatgccgatggcgcgtccttacatcgcgctgcgtgggatttcgcgctaccgctatcagggcgactacgtggccacggcgcaaacccagctggcctgggccgtcactccgcgctggatcctgcagggattcgttggcgccgggagcgcggcggacgcggcggaaacgctatgggaacagtcagaggtggcatggggggccggttttcgttacctgatcgcgcgacagtacggtttgcgtaccgggattgacgtggcgttcagcgagcatgagcaggcggtctatttcaatgtcggttcgggtttataa

SEQ ID NO: 231675 - DNA, 1281 bp, Klebsiella pneumoniae
atgtcatctcacacccatattctacaagaaaaggctttgcagatgatgcaaagcattggtcaaaatatttatcttaagtccattatgagcggtatgatgctcatattgcctgtcacgattatgagttctgtggcgactttgattaaagtttttcccttcgcaccgtatcaggattttttgttacaccacaatttaactcgcttcttcgacatcccgatcacttttacgaataattttttagccgtcattgtcgctttctccgtcgcctatacgctagcgaagcatttcgatgttgatggctttatgtcaggcctgatttccatgatctctttctttattctaacgccttatgatgtcggggagacagggccgttaggacaatccttttcaattcctggtcaatggttagggcccatggggctttttaccgccattctggtggcgataatttcaacacgaatatttgtggtgataacccgcaaagggttaattatcaaaatgcctgaaaacgtgccagaatttatatccaaatcgttctcttcattggttcctggtatcgccatcctgacgctgtttacaattatttccgcagtcattaccagcgttggttatggtagcattcatgaaattatttataaattaatccaggttcctctaacatccctcggatccggtatttggtcagttatctttgttgctgttgtcgcacaattgctatggttttttggtctacatggccatgcgattacgctcggtgtcgtcgcgccgatctggttcgccatggatgcccagcagcttgctgcgtatgctgcaggcgtagacttacccaacattactggcttcgcgttttttatgacctatggcgttgctggagatttattaccgctggctattatgctcgctttttttgcaaagagcgcacgctataaaacgctcgggaaaatcgccttgccaccggccatcttcacaattggtgaaccgatggcttatggcgtgccgctggtaatgaattttactctggcgatcccttatatttttatcaatggcatcatgctcggcattgcctggtatttgacggtcattggcgtattgccgcgtgtcgccggtgtcagtacgccagccggtatgccgattattatttctggttttatgcagggaagttggaaaatagccgctttccagtttataggactttttgtgcggtttgcaggatggtatttcttcttcaaggctgccgaccttatcgcttgccgggaagaaaatcagacggatatcatttga

SEQ ID NO: 231676 - DNA, 618 bp, Klebsiella pneumoniae
atgcaaacctgttttcgttatcgtactcatctgtctgccgggtggcggctttcgccttacccggcctacgaagaattgcaatatcaaacagttacgcaaatatctgtaggcacgcgtaagcgcagcgccgccgggcaattcctgaagattgcacttggccagcaagatgaagccctcttttcagagggcttccgggtgatacaaacctgttttcgttatcgtactcatatgtctgccgggtggcggctttcgccttacccggcctacgaaaaattgcaatatcaaacagttacgcagatatatgtaggcccgcgcaagcgcagcgccgccgggcaattcctgaagattgcactttgccagcacgatgaagccctattttcagagggcttccgggtgatacaaacctgttttcgttatcgtactcatatgtctgccgggtggcggctttcgcctttcccggcctacgaaaagttgaaatatcaaacagttacgcaaatatctgtaggcccgcgcaagcgcagcgccgccgggcaattcctgaagattgcgcttggccagcaagaggaagccctctttacagagggcttttatcgcacaatagcgaagattaacgcttaa

SEQ ID NO: 231677 - DNA, 771 bp, Klebsiella pneumoniae
gtgatctactattccgcgcagctatttaacagaggaaaggtttttcgtgacgacaccgggggctggcaatcagaaactccatcagttatctatgattcggcgacaaacaaagtcctgatgtattatcagcaagctgaggttcccggctctatcggtcagcaacaaacttgtctcgcaattgcggatccagcagacctcactatttggacgcgcgttggtgttgtgctggataaggagtttgccgaacagcccggagacgggcactgcggttattttcgtccgtttaaatttaatggtcgcatgctgggttatagcctttacggtggcactctcttttcgaatgcatctctctgggtgtcagacgatggtggttatacgtggcagcgtgacggtagactaattggttggatgcaagataagtgtcgacacctggcggatatactgaaggtcgaacagcatcttgtcgttttaactatgtatgaaggcgatgtaatcaactggaaaggtgagccatggtgggtgggagttgtcgggaaagcgcaatctggtagtgtgagtatacgcaactatcgtcttgtaacagctccgcttgcatctgattttggctctctattaactagagttaacgatattacacctgcgccggcccattacgaaatacaaactgatattgattatccggggaactgtgtcgtttctcatgggagattgtacatggtttaccgtactggcggtcagaaaggggatattgcactgatgaggttgaaataa

SEQ ID NO: 231678 - DNA, 579 bp, Klebsiella pneumoniae
atgcagggattattttcgaaatgctgggctactaattttgacggtggagatattccctcctggctgacaattagctcaggggtgattagcagcgcagcaacggccccgtggggcggcctgactctgacgagaccagaaacgacggggagtaaacttgttttcgggggcgcgattgctgacaacaaagaaactggtgtcgagctggattgtgttgttaacggttttacggcaggaaaggggacatttatagctggttttttctctgatacagatggctggtttttgcgaacaagtggtgatatttgctatctggtatttcgcaagggcggagttgaaactacaaaaaatgtgtaccttcaatttacagggtggtcaaaaatatatcctctaaaactggaatgggatattaaaaataagcgcctcagtgtattcagaggggctggcgcggcatatatttctttagatcatcttgatgttggcaatgccatcggtacccgtccaacggtgggttggatctccagtgttgcgggcgagcaaaacacaattgtatccctttcaattacaaaacattttatgtga

SEQ ID NO: 231679 - DNA, 894 bp, Klebsiella pneumoniae
atgacattccgaattgcagcaaacgtatttccgacagcatcaaacttgccaactctggggcagtcattttctgatttgcttgttgatggctctctgtctctgcttgataaggggaactttccggctatgctggggctggttccaggcgctaatctgggaaacctggcatcggtatatgcgtcaaaacaaacgagcaaccccgtgaacgcctatttaaaaaatattcttcctaataacttcccgacatccacaacagattttacgcagtattttaaggcgtcactgaccgctcgtggcgggctgcatgttttgccgacaatagggctgaactcatcaaaagcgattggtcttgctattcgcactttgccagacgcagcgacgactgcaatcctgtcaacgacaaaaaacatttatattgacgtctgggcgaggattacgcgattacctgttgttaatacgggaggttccgcatcgtggaaaaaaattaatattcacgcgttcgcaattgatgacgacaccaacacatcacgggcaaaattggcatcgatgcaattcgacctgacagacccggcattgccagcagcgcaggttccgatcggggcagagcagctgctatcagcagaatatctgcacagtggcctcgggttgaatgaggtcaggatgctggcatctgccatgagttgcaatccatctgacgcgacgcagtatcgcccgacgattccgttctcaattctggaggggaactacaacggctatgggatcataatttacggcagttatatggaggacctgacaacatcggggcgtactgctgacgaggttgccgccatccgtaagcaggactttgatgcggcgtttgcgcttggtggaagattttataatgatatttggtaa

SEQ ID NO: 231680 - DNA, 387 bp, Klebsiella pneumoniae
atgatgaagaaaatcccccccaccgcgctgctgttagcttgcgcactggttggttgcaccgtaaaccaaataaacgatcaggaaaagcacgtcgcgaagtttcgcgaaaccaggagcctttacaacaaagcgctactgcgctgcgaggagatcgctaacaagaaatatcatggccagttgtatggctctgtccgggttgaaggtgaagcgcgtgtcgcggtctcccgcgggtatgagaaagagcgccgtgtctgcgctgacaattatgcccggaaaatgagagcattgtgggatgctcaacctgccgatgttcatgcgttttatgagcaacgccgcgctgaattgcatcaagaaaacaacgccgttaatgaagaggcaaaaagatga

SEQ ID NO: 231681 - DNA, 339 bp, Klebsiella pneumoniae
atgaacatcctgaagacgctttctggcgtagcactgacgacggcgctggccgggtgtgccgttccccctccaatgggcgtcactaacccgagccgcgctgacgctaccgttaaattttcgtacctgctaaacggtagccagcctgctaacttcacgccgacctttaacggcgcgcaggagaaggcggcggcaatctgcaaaaaatgggggtacaccggcgcggaggctgtcgatgaactcgccaaaactgaatgctccgagacgaatatattcatccgcggttgcctgaaaggcgaagtgtcaaaactgtacatgtgtagtggcaagatccaacaatag

SEQ ID NO: 231682 - DNA, 432 bp, Klebsiella pneumoniae
atgaaaaaattgatgatagcaatcaccctggcgaccgtcgctgcagcaccggcacacgccattaacgctaaatatcgcgaacagctggagcgctccggatgcaatgagatgaacgccgggcagggctgcgacatccacaaaactaaagcgcaaaacgccgcagaagcgaagaagagccagaacttttcgaaattcgctggtacctactccgttttccttcggaatggtcagcgcattggcaacaaaatcattgtggtgaagccccatgaggtgcgttacaacggccacctggcggagcgcccgcgggtcgtcaacggcgtgctgctgttttccgtgcaggaggcacaattctccatcaccagcacgcacggtaatgagctaggaacttggttcaacgatgcgaacgataccggcggcactatcggccgatag

SEQ ID NO: 231683 - DNA, 3066 bp, Klebsiella pneumoniae
gtggccgcaaaagacgaaggtgcagcaatcagtgataaagtgataaatgctggggaaagagtatttaatttattatggagttctaacggtgaacatgatttatggcattggattttattgatttttatagttttaagtgtgtttggagtagggcttttttttattttgaagacaatttgcgctttaattgagcaacttgcaaaatttcttgagtcatataagtctagcggatttccaatttggttaaataaagataataaaatccgcgttagaaaaagaaaacaattttgcgcagtgctggatgccgatttgtcatatttggcaaaggcagagaactggaatgatcaatactttactgatcttgaggcagaagtcgaaactgaaggtgggtactatgcttctgcattagataagttacgaaggaaaaaatcttttggattacgcaaagaacgttctctcatacgtgctatttcatctagtacagagcgtgctatgcaactcgttggcgagcctgggtcaggtaaaagtgttgctttacggcatttggctaagcaatttgcaatacagggaaagaagtccaatgataaaaaagcaacggtgccactttatatcaatctccgagagatggaggtcagtaatatagatgaaataaatgcagatagcgtacgtaattttgtattagagaacataagacgaggagatgcagatactgctgcatttgtaagagagaattgggaggattattgcaatagaggtgtgtggttgttcttgtttgattcttttgatgaaataccttcagttctacattcagccacaggcagtaatattattcaaacatactcacaagctcttagacagtttctggagggaatgggagagtgtcgaggtattttagcgtcgcgagaatttaaagggcctgaggcattgccgtggaaaaaaatacgtattttacctttaagtggtgaaaaacaagatgagttaattcgtaattcattccttaatgaaagtaatctaaacttggtacggcaacacctggcaagccctcatacaaccataggtactacgcctcttttcttaacgcttctatgtcgttatgtcagggacgaacaacgcgctcctagtaatgaccatgatattctttttcagcatattgaaagattagcgaaaagagaacctgaatacttggagcgaaaatataaattgagccctgaaaatttaatgataggagccgagcgtttagctagactatttgcagaaaatgatactttaagtcttgctcctactttggatcagataatgaatcaattgcctgaggaagacattcctggtggttcaattgagcgtttaatctctgcgttagtagattgtaagattggaagagcagatgtacctaatgcagcgccaggagatagacgtttcgcatttgcccatcgccggtatcaagaagctttatttgttcgctatttaactgtcaatcctgggatagtttccgaaaaggaacttttaaccgaagctcgttggcgggaatatacagttactctgttgcaaactagtgaattagtagatatcagtaagctgttagactatgcatgtacaatcctcaaagaacgtgctttaaaacaaaagtttataacttgtaaaaactcatgcagtctcactggcttagcatattatgaatggtcttccgaaatagctatacagctaattagtttgttacaggatggtttaagtcatagaataaatgatgtcccgagcagtctttcatccgctgtatttgattttttgaagccccgctgggaaaaaggcgactctttagatcgtagagaggtgttacgattaggagggttgttaccagaaaatatacttattgaatacgttgttgaatcttttaaacatggaactaaatctgagagaatgaacgcattcagacaggctacctatacatcccatctcccaaaggaagcacaatctgttgttttgaaaatgctttttaataaagttatttcagctaaaaatcgtgctgaacagctaacagtcgaggctatggcagcaagactacctccgaatattggtgccaatattgtagtttctcgggcgaaaaaatttagacgtaatttggcgttggtaaaaaaatttgttccccagtttttagtgcttggccattttatgttgtttaatgttgttgttaatcgttcaaactctattataagacggttcacttctattccgttagactttcataatacagatgaagatggagttaaagaagagatatatttgatttcattgtttatgagtttaactgttatgtgcggtgtgtttttttcattaatttcaaaaataacgtcgagtctagttgttcttgggtgtgtgacatcctctcttctctttttatattcagcaattatgcttgctccatttttagtacgctatcaagctcaggaatttaatatattcaaatttttatgctgggcttcaaagttttttataaatcaggcttttataaaaaaagtgttattggcgattattgtttttatttcttttgtgttggtgagttctgctttaggatattgcatgtcgtggtttataactaaatttatacctgttaatattattaatctcggggatgtgaattttattgttaatgtttttttaggttttgttcttataacaatattattttatattgtcgtttgtattaagttcttggttagatggaaaaacatggggctacaaataaaacatcatatgatgaaattggattgggttaaaaaaatgggttattctgatgttgaagtgttatgttccgctgaggactatagacaactagtgttctggttggagcgagatgaccaattgttaacagaaactcataccatccgttctttttctagttttgtattaagtgttttacgcattaaaataaaaaaggatgagcttggcattgaaaagatcccttcgtgcttgaagcatagtaaagaagttgtagtagatgggaataaagaaggtttttattttgaaatgttgcgtcaaattttagaagaccgcttagaattttgtaaataa

SEQ ID NO: 231684 - DNA, 813 bp, Klebsiella pneumoniae
atgagcgatttacgcgataacatggtgttgattaccggcggcggttccggcctgggtctggcgctggttgagcgctttattgacgagggggcgaaggtcgcgaccctcgaactgtccggcgcgaaagtcgccagcctgcgccagcgctttggcgatcgggtgctggcggtggaaggtagcgtaacccgctacggtgattatcagcgcgcagtggatcagatcctcaccacctatggccgtctggactgttttatcggcaacgccggcatctgggatcataacgcctccctgatggacaccccggcggaggcgctggagaatggcttccatgagctgttcaacgtcaacgtgctgggctatctgctcggcgccaaggcctgcgccccggcattaatcgccagcgaaggcagcattattctgaccctctccaacgcggcctggtatccgggcggcggcggcccgctctacaccgccagcaaacatgcggcgaccggcttaattcgccagctggcctacgagctggcgccgaaggtgcgggtcaacggcgttggcccctgcgggatggcgaccgatctgcgcggcccgcaggcgctggggcaaagcgacaccacgataatgcactccctgacggcggagaagatcgccgccatcctgccactgcagtttttccccgaaccggtcgatttcaccggcccgtacgtcatgctggcttcccgacgtaataatcggacgctgagcggggttatgatcaatgccgatggcgggctggggatccgcgggatccgccatgtcgccgccggactaaacctgtaa

SEQ ID NO: 231685 - DNA, 177 bp, Klebsiella pneumoniae
atgaacttcacgattttaacgcaaactttcagggttatgtctgtcagcctgtctggcctgtcatcctacgccatggctaactccaacgcctcgggcactgcgtttcagccgcggtatccgccggaatgccattttttccgccaggggcatcgcccggagaacgaggcaccgtggtga

SEQ ID NO: 231686 - DNA, 363 bp, Klebsiella pneumoniae
atgaatattgaatggagtggcataggcttaccatccgtgggtagtgtgtgcgaagtgagaacaggcgaaatcttcccggattacggctgggtaaagataaaagtcgtctacattcatgaaggtgaagttattggagttgtagatatgcctggggaggctatacacaacgatattgaaaaattatctgcagggtactgtaacgcagttttccgccctatcaactatgaagccgatagagcgcgcgattcagcgataatcgccatcgaagcagttttcttatgtgtgagagatgaaagcgagacagcggaggaactttacgacgctatagctgcaggtgaaattcctggcattaagattgaatag

SEQ ID NO: 231687 - DNA, 708 bp, Klebsiella pneumoniae
atgaaagaacgcggaatgatttttaacggggagatggtgcgggccattctcgacggccggaagacgcagacccggcggcctatcaaatggaaacagactcggttcactgaaattggtgagcgcgaagacggtagcaaatggccgtggagcgaagatgcagagcattcttgcgacttctggcacccatgcccgtttggcgccgtcggtgaccgcatctgggtgcgtgaaacttggggcgttgccagtcacgcctttagtgacgatggcttgatgattgactgggttcctgatcgccccgcgactgccattcacgaaatgccgtttggcaatggctattactctggctacgccatttatgcagctgatggtgattttacttggggtgatgacgatggttatgaagatggccgttcgtgctggaaaccttccattcatatgccgagagcagccagccgcattcttctggaaatcaccaacgtgcgagttgagcggctgaacgctattagccaagaagatgctcaagctgaaggcatggagcttgctgggtggcggccaacatactctgacccggatagcggcggcgaggttatgacgccatacgacaactttgctgagttgtggtcatccatctacggcgaagaaagctggaatgctaacccgtgggtttgggttatcgagttcaagcgcgttgaaggcggtgcggcatga

SEQ ID NO: 231688 - DNA, 882 bp, Klebsiella pneumoniae
atgagcaacgacatcgcaatcacttctcagcctggtgctaccgtcggcaccgccgcggcaatcttcagcccggaagggatggatcgcctggtgcgatttgccaccctgatggctgacagcaaagccaccgttcctgcgcacctggctggaaagccagctgactgcctggcggtgactatgcaagcggcgcagtggggaatgaacccgttcgcggtagcgcagaaaactcatgtggtaaacggcacgctgggctatgaagcgcaactggttaatgcggttgtctcttcatcaaaccttcttgccactcgcctgaactacaaatgggatggcgactggtcaaaggtaagcgggaaaaccgacaaatctccgagcctgacagtgacagtgtgggcaacccttaaaggcgaatctgagcctcgcaccctgaccatcagcatggcgcaagccggcgtgcgcaactcccctctctgggagcaggatccgcgccagcaactggcttacctgtgcgttaagcgctgggcacgcctacacgcccctgatgttctacttggcgtctacacgcctgatgagcttcaggaaacggcgccgcgtgttgagcgcgatattacgccaccggctagcaccgctgcggggatgaatcagctgatcaattcgcaccctgatcagcaccatgaagagaaggcgaaaaagactgacgaccgcgccccagaagacattctctctggcttctcttctgcggctatggcggctcgtaacgttgcagaactggacaaggcctacaaatacgcggcccaccgtctggctggtaaccaggagttactggacgccgccaccgatgtatacggcatccgcaaagacgaactgaacgaagtccctatgtaa

SEQ ID NO: 231689 - DNA, 471 bp, Klebsiella pneumoniae
atgactgatatcaccgaactggcgcagcgtatgaaggctgcagctgtaagagccaaaacggcaacagaagaatatgcatccggacacatgtctgtttcagtctgcttttccgaatgcgaagagtttaacaggctcaccgatgggccagacaacatcctcgcgctggtagaggcgctggagaaggcgcaggtcaaaaacgcactcgtttccggcggcactgaggcaacagcaaagctgcatgagcgcatcactgagctggagagcgaagtcgagaagtggaagcaagaatctgaatcatgggagcgggtggcagagaagcaacttgccaccgctatcgaattggagtcccgtaccgtgaagctaccagagccattcaagttggctaaatcatcgagcggattaacgtactactacgccgacgaggtcgatgctgcgcttaccgccgctggcatcaaggtggaggctgagtga

SEQ ID NO: 231690 - DNA, 516 bp, Klebsiella pneumoniae
atgatcaaccgcgacaaactggagcacattctcgaatacgccaggcagcagaggcacatcggccagtcctgcaaggttccgccagaagatatggtcgaaatcatggaacgattgctcagcgcttgcaactctccggcaattccggatggttggacatgcaacgataaagcaaacgcagcgctgatgatgcttgatcggattgaaacggcagaccctgttgatgatgaccgtatcgacggcattaagcgcattgttagtgagctagtagccgccacgcaaccccaaaacgcaccacaaaatattcctgagattatttcgggatggattccggtaagcgaccggatgccggaagaccgcacgcaggtaatcctatgggatgctgaaattggagaagtaacaagcggtcactacagtcataaaacacatactttttatcattgtggcgatgatatcgaaaacgagataacccactggatggcgcctccagctgccccgcaggaggttagtgatgcctaa

SEQ ID NO: 231691 - DNA, 237 bp, Klebsiella pneumoniae
atgaaagaaatatcagagaaagaaatgataagcatggccaactcagagatagttaatatggacggctatattaaaggcatgcttgtgataagcgcccagcaggaaggagagagggtcgtaattcgtggcgaaatatttactgatgaagtaggactaccaactgaaaaaaccaaactatcttttttgatttattcgaaaatttcagataaatattcgaaagaattcactattgtttaa

SEQ ID NO: 231692 - DNA, 144 bp, Klebsiella pneumoniae
atgtattgtcacttctgctggaacaatctgttcaatgagatagcggaggaagggataatgtgtacatccgagaacgatttggtccactccggcatcaatcagaggctgaacaacgcggttaaccattttacgcacttcaaatag

SEQ ID NO: 231693 - DNA, 576 bp, Klebsiella pneumoniae
atgaaagatttagcccatgctgtaaaaattgaatcacccgttgcaagtatcagtcatctgttaccgttcgaacagaagctgcacctagagcgtttgtactttccaaaggttcaacacgccactgacaagatgtctaaagctgaatctgaatatcaggatgctgtagaatctcgttcagtgttgattaatcagaagaccgctgaatatctggctaatccttcagaacgtcacggattcattgtgaaacaggtttacccgactaaccaacagcaggtaattgagagcatggctgatgctggctttatggtacaccgtgtatctgttggaatggttacctttatccgtatgccaaagaacgctaaagataatcctcttcaggaaatcacagataaagctaaagcagaagctgaatcaaccattgacaaaatgattgagcgtttgaaggtaaaagcctctgaagctgtccaccagcgaaacaaaattgttattgaagctcgtaaagctctggatgctgtaaaagactttactgattacctgaacgtgattgtaactgactctgaagaggtgaccaaataa

SEQ ID NO: 231694 - DNA, 147 bp, Klebsiella pneumoniae
atgaacaagacaaaagcagtccgaattaagaagacagataatcaacttgtgaagctgaccgctgtcaattctggaacaacaatcagaaagactctggaagggatggttctgaaatcctatgtgaaacacattgaggtgactaaatga

SEQ ID NO: 231695 - DNA, 924 bp, Klebsiella pneumoniae
atgaaagaaaccatttataacatcttctgcttttgtcctgatggtgttcacatcacgcattgcggaatcgttgcgcatgaaagagatggtgacgataatcaaaaactggaatttttacgcaagcagttagacactgatttagcttcttgtaggtcatttcatgacattcacccttctgtgcttgatggtgacaaacaactaactctcgcaagatataattcaaatatgagggtaggaaacaatttatccccttttgaattagctctacaggccatgaatgccccccttcaccctttatctattgttacgccagtagtagaaggtaaacttcattatcacatccaactatcattgtctgaacaactaaggcataagcacatgccccatcaccacatagaaggtgttaaaaacttccctgattaccttgatgattacatgaaagaagatggttttcatattaagaaattactcaatgacgaccatatgaagcccatcagaatgctttttaatgaaaaacattatctgtctagtttcaaactgttaatgtccttcattgacaccattgcttacattgaatatggtaattccaaaagggttttccaaaactggcttgatacttactcagaaattaaaaaacttgaaataacatctgatgaattatatgagttaagaaactcactcttacacatgactaacctgaattcacataaggtgacacaaggtaaagagcgccgccttagtattgctgtttgcaaaagaggccacccaactcagtgtcacgctgacattgtttatttgaactttacagactttctatttttatttgatgaagctatagataaatggcttgacacttatcgtgacagcaacaaacagttaacgtttatagaaaggtatgatgaagtagtgagggataactattaa

SEQ ID NO: 231696 - DNA, 327 bp, Klebsiella pneumoniae
atggaaagcttgtttgtctacggaaccttgggtcctggccgacctaatgctcatattcttgaaaagattggggggacatggcaggaaggccacgttggtggttctttattagataaaggctggggtgcaaagatgggatatccggggatcgtattggatgattccggtaatcgtgtacagggttttctctttacgtcagagaatttacataatcactggcacatactcgatgagttcgaaggtcctgagtatgaacgggttccggtagaggtaaccacatctactggtcagacagtgcaatcatgtctctatatgctcaaagcataa

SEQ ID NO: 231697 - DNA, 933 bp, Klebsiella pneumoniae
gtgacagtacaacgaaaacaggttgacacatatgccacactagtcatgacctcactgtgtatagtttggggaatacagcaggtcgcaattaaaggcgtagccgatgaaatttctccagctctacaagtagcaatcagaagtggggctgctgctggccttatatatttattaattattcttaaaaaaacgtccctagaaaattttgctaattgcttaattccagggggagcagtgggcatactttttggttttcaattcctgtttgttgctgaaggcctgcgatatacgtcggcatcgcacatgtcagtattcctctacaccgcgccaatttttgctgctctgggactacagttttttagacccgatgaacggctgtgtgcaccacaatggatagggatagcaattgcttttgcagggatttgtgtcgcgtttctgtcaggtaaggctccagatgatagctccagtaagactctggcaggagacataatggggttatttgcaggcctatcatggggagccactaccgtactcgtccgatgttcctcccttagtggggcgccggcttctcttactcttttttatcaacttacaggaggttttttacttttatcagcctattcatatttctccgaccagaatcactttgaacctggcgccgtcgggattgctagtttaatctttcaaagcgcaatagttggttttttgagttatttagcctggtacagtttaatgcataaatacatggcatcacagctcggtattctctcattcatgacgcctgtatttggggtcattacggcagtattttttttgagtgaacagctacagtcagggtttatttcaggatcgatgctaatcctaagtggcataagtgttgttagcggctggccctggttcaggttgagatttttaactggttcagtcaacaaataa

SEQ ID NO: 231698 - DNA, 378 bp, Klebsiella pneumoniae
atgaaatctccctttctctttttagttgcagagatatttctgttaacgggctgtaatcagcctgctgaatcagattcagtcagcggcggtggtggaaccatcgaggccattaaccatacccactgggccatcaaccactatagtttcaacgggcagtccggtgtcgatattatcggcccgtggcagggaggaggcggtgcgggttgctttggtgtgcctccaaaatgggaaccgggaatgacggtaaaaattgagtgggaaacaggagaagcttcaacagatggctttccaggatacgatcattgggatgagtatcttgaatgggaaaaaaataaaagcaagttatgtagagcacagtgcaatagtgcctgttcctga

SEQ ID NO: 231699 - DNA, 2268 bp, Klebsiella pneumoniae
atggcaaacggcttgaaattttcccctcgtaaaaccgcgctggcgctggccgtggcggtggtttgcgcctggcaatccccggtcttcgctcacggcagcgaagcgcacatggtgccactggataaaacgctggaggcgtttggcgctgacgtgcagtgggacgactatgcgcaaatgtttaccctgataaaagacggcgcttacgtcaaagtgaagcccggcgctaaaaccgcgatcgtcaacggcaaaacccttgatctgccggtgccggtggtgatgaaggacggtaaagcctgggtctccgatacctttatcaacgacgtgttccagtccggtctcgaccagaccttccaggtggaaaagcgccctcacccattaaactcgctctcggcagcggaaatcagcgacgcggtgaccattgtcaaagccgcgccggaattccagcctaatacccggtttagtgaaatttccctgcatgagccggataaagcggcggtatgggccttcgccctgcagggcacgccggtggatgcgccgcgcactgccgatgtggtgatgctggatggcaaacaggtgatggaggccgtggtcgatctgcaacacaaaaaaatcctctcatggacgccgatcaaaggtgcccacggcatggtgctgctcgatgatttcgccagcgtgcagaacatcatcaacgccagcagtgaattcgcggcggtgctgaaaaagcacgggattaccgatcctggaaaagtggtcaccaccccgctcaccgttggctacttcgatggcaaagatggcctgcagcaggatgcgcgcctgctgaaggtggtcagctatctcgataccggcgacggcaactactgggcgcacccgattgaaaacctggtggcggtggtcgacctggaagcgaagaaaatcatcaaaatcgaggaaggcccggtgatcccggtgccgatggaaccgcggccgtatgatggccgggaccgcaacgccccggcagtgaaaccgctggatattactgaaccggaaggcaaaaactacaccattaccggggataccattcactggcggaactgggatttccacctgcgtcttaactcgcgcgtcgggcctatcctctcgacggtgacctacaacgataacggcaaaaaacgccaggtgatgtatgaaggttccctcggcgggatgatcgtcccctacggcgacccggacgtcggctggtatttcaaagcctatctggactccggcgattacggcatgggcaccctgacctcgccgattgtacgcggcaaagacgcgccgtcgaatgcggtgctgctggatgaaaccatcgccgactacaccggcgcgccgaccaccatcccgcacgctgtcgccatcttcgagcgctacgccgggccggaatataagcacctggagatgggcaagcccaacgtcagtaccgagcgccgggagctggtggtgcgctggatcagcaccgtcggcaactacgactatatctttgactgggtattccacgacaacggcaccatcggtatcgacgccggcgccaccgggattgaggcggtgaaaggcgtgctggcgaagaccatgcacgaccccagcgccaaagaggatacccgctacggaacgctgatcgaccataatattgtcggcaccacccaccagcatatctataacttccgcctcgacctcgacgtggacggcgaaaacaacaccctggtggcgatggacccggaggtgaagcccaacaccgccggcggcccgcgcaccagcaccatgcaggtgaatcagtacacgatcgacagcgaacagaaagcggcgcagaaattcgacccgggcacgattcgcctgctgagcaacaccagcaaagagaaccgcatgggcaacccggtctcttaccagatcatcccttacgccggcggcacccatccggcggcgaccggcgcaaaattcgccccggacgagtggatctaccatcgtctgagctttatggataaacagctgtgggtgacgcgttaccacccgagcgaacgctatccggaaggcaaataccccaaccgctccgctcacgataccgggttaggccagtatgcgaaggacgatgagtcgctgacgcaccaggatgacgtggtgtggatcaccaccggcaccacccacgtggcgcgggctgaagagtggccgatcatgcccaccgaatgggcgcacgccctgctgaagccatggaacttctttgacgaaacgccgaccctcggcgagaagaaacagtaa

SEQ ID NO: 231700 - DNA, 165 bp, Klebsiella pneumoniae; identical to SEQ ID NO: 119138

SEQ ID NO: 231701 - DNA, 603 bp, Klebsiella pneumoniae
atgacaaaacacactacgccatttctgatggtggattatgacctactcggattcaattccgtagaagttaacggcgaaacgcacgaagtaaaactccatcacaagattgtatattcctatcttttgagtttatccggcacatttaaacaggtgacaccttcgttaactggtattggtaaacggctcggacttggtacagatcaaactgtacgccgccacattaaagacctcgtgtcttttggttgggtgcaagttgttagtgaaggccgaaaagggatgacgaacatttacattgttctgccatatcaccagaagccacctgtaacagtgtctgacgaagtgccagcccctgagccagtgaagacagtagaaacccacgaagacataccagcaataacgcctcaaagaatccgtacttcagacgcagtgaaacacctgtttgaaaatttgtcacaacggcgagaggacgagagcttttattcctggtcatcaagagtacttcaacgaatcggaatagatcattcaatgggaatcgagcaactatttcaggaaacacacccgtatgaatacacccagattgaacaatcaacgataccattttaa

SEQ ID NO: 231702 - DNA, 285 bp, Klebsiella pneumoniae
ttgatacaatatataaaactgaacaatacaaaccagatacagatcaacgatagcgggaagggcgtttattatgcgcttatctggttctggaaaggaaggaaaaccaaaatttcctacggcgagctatctgataaatccggtgtaagtgataacgggataaggttctggcttcgtgcgctgcgcaacattggtgtgatcgctatcgacgatgaaagccattatctatcattcacgctgaaacacatcgaacgagacaatgtagaatttatctactctgatttctaa

SEQ ID NO: 231703 - DNA, 384 bp, Klebsiella pneumoniae
atgggacgaaaagaacgaaatccaattaaacggatagaacaagcaacacgcgccagcaaacgtaaatacacctcttctctacaagacctcgcacgagagtctattccaggagaatggatcaccgaaataatagaataccctgcaacggtgcccgtaggggctgagtttgaactattgcaggatgttttagcatcttcggataacgtcttctataaaccacgccgccgccgtgaataccgtgttgattcatcgaatcttaagaagtggcagctatacgcagaaaactatattgactgggtggggtattcccaaactaacggcttatctcaccacatacaagattttgacatgctctttgacgacaaggaaaacaacaatgaataa

SEQ ID NO: 231704 - DNA, 342 bp, Klebsiella pneumoniae
atgaataataaaactatggacaccgtgaacaacgtgaacaccctaattaactctttccacgatatttggcatctaccagcattgcagcttgttaatagggcgtggcgtgagagaacgccctccgcgctcctggaagcgatacaatacactgaacaggcaatcaccgcccttgaacacttgcaaatgtctgtagctcgtttggtgcagcgtgactgtagtacgatcacaccagaagaagcttggcgtgtagctaatgactttgaggagctggcttgctctctgcaatacatcaccgttgaactcggagagcttgccatccagatcgcggaagaatgctcataa

SEQ ID NO: 231705 - DNA, 228 bp, Klebsiella pneumoniae
atgtttctaatgaactatgaccgtgtgataacacacaaaggcgcttctcttgttctgtctgaaaagatgatgaaacaagcggcgaatgtattaggcgtaagtgtcgaagagattcgagaggctacagaaaaattctggcctgccgcctcgatcactaaatcaaaagaaggttctcacccatcatcagggcttgagaaaaaattaaaactattagctaaaggaaaataa

SEQ ID NO: 231706 - DNA, 273 bp, Klebsiella pneumoniae
atgttctggagaagctacaataaacgctttatcgccagcgcgtgcaggttctacgacaacatacgcaatgtcaccaggggcggcagctttcgcgcctgtagcgtctacaagatcgccaacaataagatcggcaggaataccggattccacacggatcagcttatcctgcataattgcatcacttgcgtgagcgatgattttataacgggcgtggctgttattcccgttgagagtttgaaatgttccaaattgcattcggttattttcctttag

SEQ ID NO: 231707 - DNA, 1038 bp, Klebsiella pneumoniae
atggcttattcagatctattttctggcaacatgtatgactttgccagcccgtttacattctctactcaactaaaccagattgtaactaatcttgggcttttccgtcaggaaaaccacacggtaaactcaatcgctcttgagaaaatcaccgatgtgaagaatctcgttgctcctgaaaagatgccttacgcccaaagcgattggaacagtgcagaacgtccagaatttaccaattctctttaccaactcaagtatacgaattctttgaacagtgtttcaagtcttgatctggcacagtttaaagcgagaggcgtggttgacactgctgatcaaattaccctcgctatcaacgattttagcgacgcacagtacgcccaggtgagcaacaccgtagaggttgaccttgtagaggcgctgttagggcttcgtgtgcaatctcagtttgccggacagggcgatcttgatttcctcgcaggtgggagcaaaaccacttacacgatggatatcagcgcaggtgctaacgtgttccagcaactaagcgagatcggacgcattcagaatgtgaaactgggatcagggctggcacaggctaaacaaggtgcggtgatcctggcctccggtaaagcagctgtagcgctacgctatcacccgtccgtgaaagacttcatggtgtatacgctgcctctggagtccggtgataacttctacacccgcactaaaggggcaaaccctgctttcgaaacctggacgctaaacggtgtcaccgtgatcgatgtaaccggatactctctgatcactgacaaaatcggggttgatggcttcgttagcttgcctgttatggctgaaaattcaaatgcctacgtcctgcatagcggtgttggtgttcgccatgcgacacagggcaaaggtgcagagctatatcaccagtatgttgtagttgatcagcgttggggattccctgagatcgcaactgaatgcagctatctcccaatcgtggcgattcctcaagcgatcattttcggtagcgtctcagaataa

SEQ ID NO: 231708 - DNA, 198 bp, Klebsiella pneumoniae
atgcaggtagtactaaaaagcgcggggcttcacctcgccgtaaatgctgaaacagcggaagagttattaaatctggcgggagtgtgtcgtgtgcttgaaatagatcacggtcatctgcgtcagttattacaccgtgggcgtagtgtatcagaggcactcaactacctggtgagtaagaaaggtggtggtaatgcttga

SEQ ID NO: 231709 - DNA, 1275 bp, Klebsiella pneumoniae
atggggttaggcactggtgcgctggctggcgctggtatcggtgcggcggcttatggcgcttattcatggggcaaagaggctgttacagcacaggaagagcgtagcgagattgtgcagcgtgccagattgggcggtgtagattataacgtcctccaggcactttcacagtatgccacggctaacgggatcgactcaggaatgggaattcaaggggagagaaagctgctcgattcggggaaagacatttccgaaaagctggcagatagctacaccaatagcacctttgataagaagtctggacagtggaaaggcggaaacgctgctgtagatacagccctgaacatgggattcactaaagaggatttgaaatcctaccaatccaatccgtttggcttcgtctctgcttacaccaacaccatgcaggggaaaggctattcacaagagcaaattcttcataatctggaagaccttgcagacgatttaggcttgtatcacaaggcattttctaatcaaggaaaagcgatcactgatcaggtggacgtgctcaagcgtaacgggcagtggctggatgaagcccagcaggatcagcttgtggcctatcgtaagtttaaccaggatcttagcattctctccgatagccagaaactggcattcttcgaagggtttatgtcagagattgaccctgaaaccatgcgagagtttaaggaagctatgcaggaggcgttacccttcttcaatgggcttgggaaagctgcgggtgatgtagtggatggtctgatgaaaatgaccaactggatcactggaaagctcaacctcctcaatggggataacacctctaaagaagctgttagccagcactacggcactacgtcagcacctggacagcctggaagtaaccctgtggctaacgcctatggagccagccagccgaaagcggatggtcatgagcataatgtattcgacacagtgcgcgaatggtggaacgggacaagcgacgctaaggacgtgagcagctacgcgcagagcaccaacggagattactctcctgtttcaatgttgaaacagagtgcagcagcgccagctaagccagccagtgcgccgatcatgcagcctgtagtattgcagaatcagctaccggaagggcttatccatctaactatttctcctgatccgacattcggaaacatgcttaatgctaccgttgatcagcgtatcagtgataacaatcagcgtatggtgttggctgtttcatctggacaagggacggggggctaa

SEQ ID NO: 231710 - DNA, 678 bp, Klebsiella pneumoniae
atggcaacacctggaagtttaactatcgggggcagcgatgcctcccgaatcaattcaactcagaacagtaataacagcagtgctacccgcaccaaaggtgaaaacggattcaccatccttgcatctgtatataattcgtcctcagatagctatattcagaactatcaagcgatagtgtttgatgctgtgacggatacgggagtccgtagacaggctgatattaccagctatcccgttgagagcggggcagaggtgagcgatcacgttcagattaagaataatacattcaagctatcggggattatttccgaaactccggtgaggctggaaaaggatttgttatacagcgctggtgtgaatggcactcgtatcagtcaagctatcgaatacctcgataagatgtttgacagtcgccagcccatcacattagtgacagagcacaaagtgtacgagaatgttattctctccggcatttcctacgattataaatctgaatacgcgatgcaattcgatcttgaatttgaacagatcaggcttgtcagtaaagctacagttaatgtgattgcaactaaaacgcagggaaataaatctgtaggcggtacggtgaaacaaaaggtagtgaacaatgcacctaagaaaaccgagggtgatacggttactacggagtttaagaaataa

SEQ ID NO: 231711 - DNA, 1236 bp, Klebsiella pneumoniae
atgacaatcaagggccaggagtatctttatctttcaccggacggtgtatggcagtttcaaatctacatcccgtcttacatgcgccacatgttcggcgggaaacgcctctaccggaaaagtacagggacaagagatatctacaaggcgcgtcacttccgtaaccacatgctggtagagtggaacaaccttaaagaacagttcaagcctgatactgaggataagcgtattcagcttgcgatcacttccctgcactctcaaatcaggaagaacaagaataaaccattgattgaagagcgagccagttcgattcctcatctgtgcttcttacgagatgaatacgctactgcataccaggatcggagatcattctccacactgagcaaatcagcgcgagccgttgaggtgtttctccagagtattgggaaagttgatatcagtctggatcggattggacgccgcttagttacagacttcatagaagaacagcagaaacgcgatgtagcgccccagacggtgcaaaactggcttacatcgttaggtagcctgtacgagttcgccaaacgtcgctacgacgctatagcgccgctcaacccgtttcatggtcacaacctcgaagcacgtcgaaccattgagagctaccagccgtttgaatggcatcaactatctaccctactaagcgaagctgacgaagaactacgagccgttattctgatcggcttgttctctggtgcaaggcttgacgaaatcgccagcttgaagaaagaagagatcgttatggtggaagggatacggacattctacattagcaaatccaagacgaaggctggcatcagacacataccgatccatgcttttctgattggcatggtggattattatctgagtttgaacactggagatttcttgttaccacaggctaacaagattgaacgcaaagacggtaagaaaggaccattctattcccaagcattcacccgcttacggcgtcgcgtagtgcctatggctacagaccgccaatgctttcacagtttgagggggcattttatcacgtgtctcgaccgtgccggagtacccgaacagcgtataggctacatcacggggcactcttcacaagccgcttctacagaagcattcaagacctacagcgcggggtgttccatgaaagagctatccgactatgtggaaatggtggattatccagaaatcatctttccagaaacgaaaaaaggggcgtaa

SEQ ID NO: 231712 - DNA, 1389 bp, Klebsiella pneumoniae
atgacgctcttttccagccaacccggcgacgaaggactgcctggcccggcgcgcgcacgggtgatggccgcaataatgaccaccaccttaatgggcgtgtttgatggcaccatgatcaacattgccctgccctcaatggctcaggatttgcaggtacctgccggtattgccgtctggttcgccaacgggtatctgctggcggctgcgatgacgctggcgatattcgcggcgcttgcggcccgtctgggttatcgccccgtatttctggcgggcctgacgacctttaccctgacatcactgggttgcgcgctggcgaataagcccgaagtgcttatcggtatgcgcgtgcttcaggggatcggcggcgcggcgacgctgagtattgcccccgcaatactcaggtccgtatttcccggacgcttacttggccgcattctggggttccatgccctgctcattgcctccagctccgctatcggcccggtattgggcggtacgatccttcacaccctgagctggcaatggctgtttgcgataaacgttcttcccggcaccctcgccttactgctggcggtcagagcgctgccgcgggatgcgatccgtatgcaggcgcccttcgacaccgtgggcgccatattgtcggcgctgctgttgggttcgacgatcatggcggcgaacagcctacagaacgctacttctcaattcggcagcctttgctggatggctctcgctgcgctgagcggcatggcttttatctggcaaatccgccgtacgggtcatcccttactgccgccgagcatgtttaaaaatgaacgttttaccctcgcggctttcacgtcaatggttgcttttgtcagccaggggatcacctttattgcgctacccttcctgtttcagagcgaatacggctacagtccggtagtgtctgccctgctgtttacgccgtggccgttagggatcgtgctgattgcgccgcatgcaggccgttgggcggacacgatatcagccccggcgatatccaccctggggctggtgatatttgtcgtcggtttgatcctgctggcgacgttacccgccagccctccaatgtgggatatctgcctgcgaagtctggtgtgcggaatagggtttggctgctttcagagtcccaataaccgggaaatgctctcaaacgttattcgtgagcacgcgagttatgcgtccggagttttatccattatgcgcactttcgggcagtgcctgggagccgccgccgtaggcgttctgctggcagcagatgaaaggtcaattcatgttgcgctgtggagcgccgccgcggcctctgcggtatcggtcgtcgtcagcgcgagccggttgcgtaaaatcactcatcctgcggaaacaggataa

SEQ ID NO: 231713 - DNA, 930 bp, Klebsiella pneumoniae
atgtctgatcctgattttaatttgctggtagcactcgacatattgctgagtgaagcgagtgtcgcaggtgcggcacgtcgtctgaacctcagcacctcagccatgagccggacattaagcaggttacgcgatgtcacaggagacccgatcctggtgcgcgccgggcgtaacatggtactgaccccgtgggccgaagcgacccgggatcgcgccaggcgtgcagtgcacgatgccagggcggtattgcagccctcaactgaaacgttctgcgcgcgaagtctggcgcgtctttttaccatcagggcaaacgatggttttgtggtggcgtttgggcctgcgctcatcgcagcggttgccgacgccgcgccggatgtctgtatacgcttcgcgcctaagccggaaaaaacgtcgcgctatcttcgggaagggctggttgatctggagattggagttcagagtaatatggggccagaaatacggctgcaacgactgtttgaggatcggtttgttggcgtcgtgcgtaaagggcacccgctggctaagcaggcagaaataggcgtgggtgattatgtcgcctggggtcatgtggtagcgtcacccgagggcgcgttgcacggatccgttgacgatgcgctggccgaactggggacaaaacgtaaaattgcgagcgttgtaccgggatttccgacagcactgtccgtggcgctggaatcggatcttatcgccatgatacccgcactctatttactcaatcagcaggtaacgggccaggtacacgttttcgagctgccgttcaaaagccgtcgtattacgatatcgcagatgtggcacccaagaatggaacgcgatcccggtcaccgctggctgagagcgcaaattcttgccatatgcggtgtggccaggtcagtcatgactaaggagcctgtatag

SEQ ID NO: 231714 - DNA, 147 bp, Klebsiella pneumoniae
atgatgaccgatgacatcctctcttcctgctcgctggccgcccgggggttgaaccagcggatgctgaacgcggcgaagcggctggcgggggtaaaaaagcgggtggaatatcacccgcatatggcccctcgctttccgcacaggtag

SEQ ID NO: 231715 - DNA, 204 bp, Klebsiella pneumoniae
atggctgttgcttttatctgggaaatcatctgcctgctggtgtttcgttttattgaactgcctccagtattagatataaccttcaggttgatttttcttcatgtttcctgtttcgccagcctgctgcaaattcagctggcgtctggtaattcagcgatgaatgaggactggactcgttatagtcatgccgccagccatgaataa

SEQ ID NO: 231716 - DNA, 1044 bp, Klebsiella pneumoniae
atgggaaaaataacctgtaacgcttgtctggcccatgcggaaaaagacgtacgctttgaatcacgtgaaatcgagcatgatgaacatgatgtcgtcgtgaaggtcgcttgcggcggcatctgtggctctgatatccactactatcagcatggccgcgcggggatgtctgtcctcaagcatccgatggtgattggccatgagtttgttggcgtgatcagcaaagtgccagcaggcagcgagctgaaagttggccagacggttgctgtgaacccgtccagcccctgcaatcagtgcgagatgtgcctttccggccatcaaaatctgtgcggctccatgtgctttatgggcagcgcgcagttcaatccacatgtgaatggcggtttttctgaatacgtggtggtaaaaccggagcaatgtattccttacgataggcgcgtgcctgcaaacgtgatggccttttcggaaccgctggcggtcgctattcatgcagtaaaaaaggcgggccagttgaccggcaaacgcgtactggtgattggcgcaggccccattggttgtctgatcgtcgcggcggcgcgcagtgcaggagcatctgaagtggtggcttccgatctcagcccacgctgcctggaactggctcgccagatgggggccactgcggtgatggatccgcgggttgaagaacaggttgtctattatcagcagcataaaggctattttgatgtcgtgtttgaggcctctggcgcgccgattgccgtgacatccaccgtcgatttcacccgccctgcaggcaccatcgttcaggtggggatgggcgccagcccggtaagctggccagtgtctccgatgctggttaaagaactcaattgggtcgggtcattccgttttatcggtgagttcatcaccgcggtacgctggctggaggatggtcgcgtcgatcctcgcccgcttatcagcgccgagttcccgccccagcaaattgaagacgcattgattaccgccacagacaaaaatgtctctgctaaggtgctcattcgtttcgattaa

SEQ ID NO: 231717 - DNA, 1362 bp, Klebsiella pneumoniae
atgaaggcttcaagacaacgactctttattctcacattgctgtttattgtgactgcaattaattatatggatcgcgccaatcttgccgttgctggttcgaatatccagaatgatttcagtctgacgccaacacaactgggtttgcttttctccatgtttacctgggcctacgccgccagtcaaattcctgtcggctatgtccttgatcgcattggctcacgtattctttacggtggtgcaattattctgtggagtatttttacctttatgatggggttcgcctcacaccatttattcgcgacggcaaccgcttcatttgccatgcttctggcctgccgcgcattaattggtgttgccgaagcaccgtccttcccgtctaacacgaaaataatcgcaacctggttcccagaccatgagcgagcccgtgcgaccgcgatttattccagtgcacaataccttggtctcgcgctgctgacacctgccctcgcctttattgtggctaattacggttgggaaatgtcgttttatctgtccgggggcgccgggattctgtttggcatctactggcttatgtattaccgcgatccacagcacagcaccgctgtgaaccaggcagaactggattatattaaagcaggcggcggctatggttcggcgaaccagtcctccgtgagtgcaaaaattagctggcaagatattaagttcttcctcagcaaaaaaacgatttggggcctgttcatcacccagtttgcctgctcgtctacactctattttttcctgacctggtttattgtttacctggaaaaagggctgcatctctctatttcaaaagccggggtgggtgctatgctgccctatattatggcgatgctgggggtgctttgtggcggtacgctaagcgacatgctgctgaaaaaaggaaaatcccgaacgttggcacgaaaattacccgttatggctggcctatgcgtcaccatgattatcggtctggtcaatttctttgaaaaccagccggttattgcgattatcattctgtctgttgcgttctttgctaacgccttttcaaacctgggttgggtggtctggagtgatgtgattcctcgtaatttcctcggcacgatgggcggctttttaaatatttgcgggaacctttctgggatcgttagtccaattgttattggggttattctccagcgcacgcaaaacttccagtacgctatgtggtatatcgcaggcgtcgccggactgggcttattagcctacatatttttggtgggaaagattgaagtgatcctgcctgaaaaaaagaatgccgacaccgtggataagaataccattaatccggcaactgccaacaaataa

SEQ ID NO: 231718 - DNA, 1167 bp, Klebsiella pneumoniae
atgcatcgtttttcacttgttattctcggcctactgtccctgggacagaacgcgctggcggcaggagccgacgaccccgcccatttagcgctctggcgcagttatgccggggtaacctgggagcagcgcgtcgatgcgcgctccgtcgatgcccccatcgcgggcttgcattttgacgccgctggccgggcgtttgtcagtaccccacgcctgatctcgccccaggcgcccgctacgctcagcctgctcgataccgcgtcgctgagcggccccgcacgccttaccgcctttccatccaccgaggcgaacagcatcagcgccgatccccgcacgcacctgcgcaatgtgctgggcttttatgtcgaccaccgcaacggctggctgtgggcattagatcagggctttgtcgccggcgaaaagacggcgccgccggaggcgcaaaagatcatgatttatgcgctcagcgacggcaaactggtgcagcgtattccgctcgacagcgttgccgatcgtgaagggagctttcttaacgatattgtggtcgatgaagcgcgccgggtggcctatatcgccgacagcggcctgcgcagcgcgccggataaccaggccggactgatcgttgtggatgctcagcgtgggacggttcgccgggtactgaataagcacccggcgctgatgccggttgccggcctgcaggtgacgtcccatggggaaaccgtctggccgggcaatcccattattctgggcatcaacggtatcgcgctgtcaccggaccaggaaaccctctactggacggtcaccaccggcaccacggcgcggaccatcgccaccgccgcgctgcgcgatcccgccatgagcgaacgacaactcgccgccgccatccgtacagcgggtgaggtcggcgggaatagcgatggcatcgtggtcgataagcatggcgcgctctatatcaccgatgtgacccataacggtattgtccggtatcgcccgcagagcggacagttcaccctgctggccgctgacgagcgcgtatactggcccgatacgccgactatcggcccggacggcgcggtaatgttcaccgccagccatttaaaccagcactttgctcaggcggtaaaaccgggcgaagagaaatataccatctggaaagtggtgcagccctga

SEQ ID NO: 231719 - DNA, 948 bp, Klebsiella pneumoniae
atggcccggcggtttgattatctttcggatgtggaagtgtttctggctgtggccgagcgcgggtcatttaccgccggcgcggtggcgctatcgtcaacgccgtcggtgctcagccgggccgtcacccgtcttgagacgcgcctgggatgtcagctgctgcgccgttccacccggcggatcagcctgactgaggccggaaatgcttacctgattcaggtccgccaggcatttgaggtgctggataatgccgaacgggaggcgcaggggcaagaagggtcgctgtccggacgcgtaaagctgagcgtacccaccacctggggacactaccgtctgccgccgcgcctggcgctgttccgtcaattacatcccgacgtacagattgagctgaatatgaccaaccgtaatgtcgatattatcgccgaaggtttcgacctggtggtgcgccagggacatttacccgacagtggtctggtggcaaaaaaactggaggatgccgggctatgtctggtggcctcgccggcttatttatgctctacgacgcaaccgctcaataaaatagccgatttgcgccatcattcatgcctgacatttattttgccggcgacgggaaaagttgcggaatgggtatttcgtgaaaatgaccaggatattaactggctaccgccttcctccctgcatgtttctgatgatgtgctcggggtagtctcgttggccctcgcaggggcggggatctgccagagctatgcgtttattgtgcaggaggcggtggcgcgtggggagctggtccctgtgcttccagcattcgccggacgctcacggcctttctcggtcgtttacccgccgcataaaagccagtcagccgccgcacgggcgttgattgcgctgctgaccctgccggcggaagctttggcgacgctcagcgccacatcgtctgatacgaatggatga

SEQ ID NO: 231720 - DNA, 495 bp, Klebsiella pneumoniae
atgggtgacagtacgccgcataaggcgctaaggctcatcggaacgggtttggttattttattgccagtggtactggcattgtggtttgcccaactgcgggcgaaagccgaaaccattgatcaattacactcattttcgcagctggcgctgcaaaaaacggaaatggtcatccgcgaagcggatcaggcccgggcgaaagccagccagtatcgcggggagctgtgctcagcggaccatcagcgttatttattgcatatcgttcgcggcctgctgtatgtagaagatctgatctacgctaacggccagcgctttatctgttcaacgtccgttcatcagcaaaccggctggcggatgccggcggccaattacaccaaaaagccggatgtcgcgatttactattaccgggacacgccgttttatcccggctttgccatgaattatatgcagaagggccctatgtggtggtggtcaatcccttctcgtacagctcggtaa

SEQ ID NO: 231721 - DNA, 1212 bp, Klebsiella pneumoniae
gtggacacaattaaatttcaactcaacgcccggcggcagccctatggccagggagcagacttgagtctgctcaatgaaagcgtggggaacgaagtgctggcattccatcaaaaatttcctgattaccgggtcacgccgctgcgtaagctggaatttttaagccagcggctgggcctggggtcgatccatataaaagatgaagcccagcgattcggtttgaatgcgtttaaaggattaggcggatcttatgcgatggggaaatatctcgccgctctgcttgagcgagatattactacgttgagctttgccgagcttaattcaccagcgattaaggcgcgtatcaaggacatcgtatttgtgactgctaccgacggtaaccatggacgtggcgtggcgtgggcggctgagcagcttgggctgcgtgcggtggtgtatatgccaaagggctcctcaccggtacgcgcgcagaatattcgccggcatggcgccgaatgcacgattactgaactgaactacgacgacacagttcggctggcggccaaaaccgcgcgcgagcagggatgggttttactccaggataccgcctggcagggctacgagcagatccccacatggatcatgcaaggctatatgaccctcgctgttgaaatctggcagcaattggtagaaagcggggcgccgatgccgacgcatctgtttttacaagccggtgtcgggtcgtttgccggcagcatcatgggatatttcatcgaaaagatgcagcagcaggctcccaccatcatcatcgttgagccgcacaaggcgaactgcctgtatcgctcggcaaccattaatgacgggctgccgcacagcgtcggcggggatatgtcaaccctgatggccgggcttgcctgtggtgaacctaatatcaccagctggccaatgctccgcgaccatgccacctgttttatttccgccaacgattgtctggccgccaatggcatgcgcctgctggccgctccgcgaccaggtactgacgaaccttttgtctccggggaatccggcgctatcggcactggcgtgctttacgcgctgatgactcagccggagtatcgcgagcttgccgaatctctgcgcctgaatgccgatgcacaggttctgttaatcagcacggaaggagatacatcacccgatgtctatgaagacatcgtctggtttggccgtaatggttga

SEQ ID NO: 231722 - DNA, 1068 bp, Klebsiella pneumoniae
atgcgtctaccatggcttgccggatgcgccatcatcgcaatactgccgctactctggctacccgcgttgccggggccgggcattctggcggtcgccggcgtactggcgatgtttctgacccgtctgcgcgggacggtcgtcgccgttgtggcggtgacgcttctgctgatggtctggggagttttaagcgcgtatcaggcgctgtggccaacgcagcacctcaccggcgccgtccgtcaggcggaagtgatcctccacgagacggatggtcagaccctgcaccgcgggcagattgtgcgcctggcgggtcgcttcctgttccctccggttggtgtgactttatacggggaacttgcacctgcgcccgtctgcgaggggcagcgctggatgatgacgctgcgcctgcggccggtgcatgggcagctcaatgacgggggcttcgacagccagcgctatgcgctggctcagcatcggccgctgagcggggggatcgtcgccgcttccgcgctggatacccgctgcagtctgcgcgcccgctacctggcgtcgctgacccggcgattgcagacttatccctggcatccggtgatgctggggctgggaatgggggagcggctggcgctgccggcggagataaaggtcctgatgcagaacacaggcacctcccatctgatggctatctccggtttgcatattgccctcgcggcttccctgatcgtgctcctgctgcgcggattacagtcacttttaccggggcgctggatcggctggcggctaccgctgctggccgggctggcggctaccgctgctggccgggctggcgggcgccgtcggctatgcctggctgaccggtatgcagccgccggccctgcgcacttgcgtagggcttgcggtctgctgtgctttacgtttgtcgggtcaacgctggacggcgtggcaggtgtggctctgctgtttgggggcgatactggttgccgatccgttagcggtgttgtcgcaaagcctgtggctatccgccttcgccgtggcggggctgatattctggtaccagtggttaccgctgcctga

SEQ ID NO: 231723 - DNA, 1194 bp, Klebsiella pneumoniae
atgagtatgatttcagggcaattgcagcgttctggccattcttttgtttttcatggtcaggccgggcgctattttattatttgtctggttaatattattttttctgtaataacttgtgggttatttattccatgggcatgggtacggagtcgccgttatctttgtgagaatatggaggttaatggcgcccgctttgcctatcacgggcgcggtatcacgattttactcagctggctattgatatttgtcgtgctggttttactcagcttagcgcttgccattttctctcccggtagcgaagggctggagacgctggcatttcttatcctgctgccggtaatgataattaaggggttaagctaccatgcgacgatgacctctttcgcgaatattcgctttggggttcagtgtcatctgctgcgcggatggtggattatgctcggcttacctttgctgatatacgtgctaacagcggtggtgttcgccatgctgggaagtcggctcttttacaatggcctaaatagcatgctgctggggatcgttgttctgcttttgctggcgctagttattatggcaataaccagcggtgtggtttacagccactggcttgatctcatcggcaaaggcgcaaccttaggcaaaaataaatttaatatttatgtgagtactaagcgttgtgtggtgatttttttatgggcaacggcgattttgttgccgtttatcatcatttttattggctttttattttccgcattcgctcaactgctgacgggctgtatgtttggtctgtgcagtgaaggttcggcactgtttatggcattgcgacatcttggggcgatattagggggatatatattcctcactatcggtatcgtgttatccatggcataccttcgtgtggctttacgtaatcacgcgatgaataacctggtgctgggggacagcgttcattttcgttccaccctgacgtttttcggtcttgctccgcgtttactggcgttgacgtttctcacgccgctgacgctggggctggcctatccctggttcaagattgatttgctacgctatattgctgaaaacacgacgatggtcggtgagttcgattcgctcgatctgcagccggcggcaccaccgcagccgacggtatctgacaaactatgcggcggtttttttccgatgctgccgttcctgtaa

SEQ ID NO: 231724 - DNA, 1167 bp, Klebsiella pneumoniae
atgaatcagcaacagttaaagcagcagcttatcgcctggcgtcactatttgcatgcccatccggaaagcgctttcgaagagcagaatacttcacggtttattgccgaaaagctcgaggccatgggcattgaggtacaccgcgatattggcaaaaccggggtagtggggagattgaaatgcggcgacggcaagggcgttatcgctattcgtgccgatattgatgccattcaattgaccgaacagggagaccggtcttaccgctccatgaccgccgatcggatgcacggctgcgggcatgatggtcatacctgcattgcattgggcgcggcgcagttgctattgcagcggcagaattttaacggcacggtcatctttgtttttcagcctgctgaggagcctggctatggcgccagagcgatgatggacgatggcgttattgaacgctttggcattgaggaaatctacggtctgcataatatgccgggtatgaaagccgggactatcgccacgcgagtcggtggcattatggccagtgaagataactttattattcgtattcaagggcggggagcgcatgcggcgcggccgcatatggcgaaagatccgctggtaattgcggcggaaatcatcctggctttgcagacaattgtttcgcgaaatgttgatccgaacgtgccagcggtcatttcctgtactgaactgcacaccgatggcatccgcaatgcgattccgacgcatgttgaaatcaaaggggatacgcgcagctttgtaccggaggtgcaaatgctgctcgaagaacgaatgcgtaccattagcgaagcaatttgcgcgatgcacggtgcgaggtgccagttcagctatacccatgaatttgcgccaacggtgaactggcagaaatgcgttgatgtggcggtcaccgctgcgattaacgtggtaggggctgagaaggtggacggcaacgtcgcacagatgatgatttcggaggattttggcgcttttctgcaaaaaatccccggctgtttcatctttttaggcaacggcgatggttcagatgctcagggcaatacaccgttgcataatgcctgctacgactttaatgatgagatattgctaactggcgcggagtattttgccgaggtcgtcagaacccgtctgccgcaggagtga

SEQ ID NO: 231725 - DNA, 327 bp, Klebsiella pneumoniae
atggaaaagaatttcacgcctgagcaaattgactttatcaatcgcgttgtcttcaagcatatcgataaaatgactgcggaagtcgctaatattgttgaacaaacagaaaaagccgcacaccaggaacttgcggagcatggcattgatatgacagagttttatcctgccaatcagccttttttgatgatgacaatcgtccagacgttgatagaccgggtgcacggtggggacatggcgcttgcgcaaaaaatgataacgatagaagccaaaagattgaatgtcagcgtaaatgtcgaggcggataaatcacgtgtatcggggcgttaa

SEQ ID NO: 231726 - DNA, 951 bp, Klebsiella pneumoniae
atgccagtagtgcgtgtcattctgtttgcctgtgcgggattcttgctggtatctcactattccccccgcgcttatgccgcagagtgtcggtccataagcccggcgaaatttagtttcggtacggtaacagcgggagagatggctcagaccaaccaggcgcacgaattccagtgtaataattacgattcaacaccgaggtatgtacgcctgtgtatgaatctgacgaataccgcccccccccagatgaatacggtgccatcaggggccccgctgtcttatctcgtctactcagctgacgatctgagtaccgatattggcgcaaacagtggtgcgtttgctgaacggaacatctttctggatggcgggcaaaccaactacacgttttacatcaacctggttgctaaaataccgtctggacaaagcggacttcaggccggcgactattacgacgccggcacacctgcaacggtaaagtacagcgataacgccgataacaatgctctgccatcctgctcaaccatgagcggtaccattctgtcatcaagcattgaggcccaggcgaccgtcaaaaatggctgtgaactggtcagtgtggatccacttgattttgggagcaaaagcccggctaccagcagtcagttacgtggtgatgccaccgctaatatcgccatccgatgcccggtgaatactaattttaccgtcgcgcttggtgaaggtatgcataataacggcacaagcagacaggtgtgccagggttccagttgcgtcagctacaatctttatcaggatgcgggccatacgacaccctggaatgacagcgacagggtgcagaaccagacatcaaccaccggtaacgatcagttactcacggtttacggtaatattcctgcgcaaaactggcctgcggcaggaacctataccgacacggtggtggttactctgagctattaa

SEQ ID NO: 231727 - DNA, 2334 bp, Klebsiella pneumoniae
atgagactaataaaacaattaaccttacacggtaacttcttcttttccgcgctgctgttttccccccttgtctgcggagcatctacagacgaggggttgctgtacctcacgatcagtgtgaatggttcacctgttactggcctgatcccggtaaaaaaacagggagaacgtctgagcattatggcatccgatgcgcaaggcacacctatacggaccgacgatcttcctgtttcgggagaatatattgaactccagcaaaaacatgggctaagttaccgctatgatgatttaaaccaggccctgctcatcactgccgacagcactcgtttgaccggctttcagcacctcagcgcgcgtcaggatgcacaatttatccatgaagatcagctgtccagagaggtcagcggtgtggcgcttaattataatcttttcgccagccataatagcgacaatcaatacctgacggcgtattcagaatttcgtacgtttggtctgagtccgggccacttttccagttcattcaacagtcgctttgccagccaaagctattccggagaggacaccggcacaacacgattaatgaccagctggacctgggaaaatattgataaattactcagcctgaccgtcggggataattacacggccagccagacctggtctaacagcgtgcggttcggtggcattagcctgactcgcaactataccctgcagcccagcgtcaatacttccactcgagatattttaaccgactccgttaccatgccgtcaacggtggatctgtatattcaggggattagaacatcctctcagcaggttacgcccggtcagtttacgttgaatactgcgccggttctctccggcaatggaagcgcgcaggtggttattaccgatatcaacggccagcaacgtgtggtggaccttgcactttacggaaccaaccgcctgctgactcagggattgcatacgtggggattaaacgccggttgggtgagaaaagactacagcgtccgttcattcagttatgacactgaatttattggcgtcggcgactggcggtatggcgctacgaaccagcttaccttcgaatcacatactgaacagggcgctaatctgaataatctcggcgccggcgctaattatttgttatccccgacgctgggtctggttcatctcgacctttcctggggacgctatcggaatgatgacgggctgcagtggggagcaggatggcaatggaacgatcgttatttcaatgtttcactcaatcatacccagcgggagagaacttttcgcgatattactgctctggcggatacgacactggccacgcggcaagacagcgcctttctcagctgggcatttccttcccttggcacgctcggcgcaagctggatcaaccagcaatataccgatcagcgctcccgctatgtgggcgtttcatggtcaaagtcattttcagaacgcgtgatcttagccacaagttttacccagtcactggaagaagagcgtgataaaaccttttacgtcaatctcaccattcctttgtttaccagtcgggattatctgacgctgcagcataaccatgataatcacagcaatagcgagcaggtcagcctcagccgtagcctggagtcaaaccgtccgggatggggatggaatgcttctgtgcgtaatgggcaaaatgataaccagcatgccagcgttcagcgcaggaatacctggagcgatatggaagctggcatcaataattacggtcaggagactgactactacgcatcaatgtccggtgcggtaggcctgtttatgggtgggctttatgcgacccgcgatcttggcgaggctttcctgatggtagataccgaaggggtggcagatattcctgtccgcctggaacacagactggtgggtaaaacagacagtaatggtcggttgttcctgaccaacctgctcgcgtatcaaaagaacaatgttgatatagatgctttaaatctgccgccggattaccgggctccttacaccagtcagattgccatcccccgcagaaaagggggggcgttgacaacctttgaggtatatcagacgaaggcgatactgctgctggcccatgatgcccagggcaaaccggtgcccttctcggcccaggtacagatcaaggatagcgagagccatacgccgcgccggggaacaaccgagacgattgtcggttatgacggcaatatctatctggaagatccaccgcaaaaggggaaagccattgtgagctgggacagcggacagtgccagatccgtttacccgaggctgtcggcagtcagactattatcaaaaggtaa

SEQ ID NO: 231728 - DNA, 714 bp, Klebsiella pneumoniae
atgaaatttggttttttatcttcattttccgttttttttggttgctcgttgagtgtattttcatatgccgcaagtttacagatgtaccccgtcaccgtgaacttctgccagggtcaagcggcgcggccgatatatatcaaaaataccggtcctgcgccaattggtacccagatgcgcatctatctctggcagcaaaaaaacaataatgatgtacttaccccgacccaggacataatcagcagcccccctattgccgctattcctgcaggtaagcaacaacttgtcagactcattatacctggcaacagcaaggggcatgaacaggcttatcgtttaattgtcgatgaattacctgacactaaatcaaatacttcaaccagtcaggtaaaatttttgctgcgttactccataccggtctttttgtcatgttcggagacaaaaactgacatcagcaaaattcgtgcatcattagataccagtggggcgacaccgcgtctgttcataaaaaacaccaatgctcagcatatcaaattaagtaatgtttccctgatatcagcagaaaaaaaacttgtcattaatccaggactaatgggatatgttctccccggaagtgaaatgtcgtggttcctgcctaaagggatgaataaagggacgtctttatccgtgactataaatgataatgagactaataaaacaattaaccttacacggtaa

SEQ ID NO: 231729 - DNA, 426 bp, Klebsiella pneumoniae
atgtggactaataccaacagactggccattattttgtgtttaaatttgctcacctgctttaccgcctgggcgggtattgagtccgccacggtaaaccagggagaacaggataaagcccgtgaaagcgcattaatgccccatcagcagcaataccaatcttctcgcacctatgcgaaaacgcaaaccttgatatttcccgaagaagcgacctgtcggtacatcacgaaagttgatattgcctccgaggacaatgcaaaaaccaccgccctcctcgggaagatcgctgcccaggcgcccggccattgcctcggaatagaagggattcgcctgctgacgaccgccctacaaaatgaactgataacgcaagggtatattacttccctgatcgatatcccttctcagtcactaaatagctgcgcggaatag

SEQ ID NO: 231730 - DNA, 1719 bp, Klebsiella pneumoniae
atggaaaaacatctgttgattagcaagggctgtaagggctggggtgggcctctgactatcacgctgggtcagggaaaaaagattgcgtacattaccggggggatccgtcccccggtcgtggaccgcctgagcgaactgaccggctggccctccattgatgtattcaaaaatggcgaaccgccggcagaagagattggtttaatggtcatcgactgcggcggcacgctgcgctgcggactctatccgaagcggggaattcccaccattaacctgcatcccaccggcaaaagcggcccgctggcggaatttatacacgaagggatctacgtctccggggtgacgcctgcctgcattgagatggtctggccacaaggggaaggcggaaagcttgggatcgtggctgacgatctgaccggggcaacaaccgtcggggtgctgctggcacgtagcggtttaaaaaccgccgcgtttttcgataccgaatccttctcccgcaatgaggtcgagtatccggcgatggtcgtcagcagcgacagccgcccattgccgaaagcggaggcccagcacaaagtgagcgctgcggtgaaacagctgcaggctcgcggcgcgcactacttcaccaagcggattgataccacgctgcgcggcggcatcggatttgaaatcgatgccatgctggaacaactgccgcaggagacggtggcggttgtggtgccggcgatgccgcagtcacggcgtattctcgtcggcggttattcggtgattgattcggtagccctgtcgcggaccgatgtggctcgcgatgtacgtaccccggtcaccgagtcgtgggtgccgggactgttggcggcgcagacccatcatcaggtcgggcatatcgcgctgacgtcggtgatgaaaggcgaagggcaaatccagcaggatttgcaggagcaacagcaacgcggcgtgcgggtgatagtggtcgatgcgataaccgtcgacgatgtcgatgccatcgccggggcggtagtggccctgaactggaacgtgctggccgtcgatccggggccctttaccgaacggctggcggttcgtcgcggcctgatgcgcgaagcgcggagcagcgcgcccgcgagcctgacagcggacggccagcgcggctcgattttgatcgttgccggcagcgcaacgccagtaaccaaaaaacagctccagtatttgatcgccagggatgaccgggtctgccatatcccggtggatgccgagctgttggttgacaggaaaaacgccgctgagattgaagtcaatcgcgtggtacagcatgcccgacagtgcgtcccggcgcagcacaacgcgctctttgtttttgaatccgccttgaccgggcggttgctaaaccttcaggaaaaggagcagagatttggtctggcccacggtgaggctgcgcaaaatattaaccacggattgggcagtattgtacgcgaggtgcttaactgtgcgtcgggtgaaattaaaggattgtatatgaccggcggtgacaccatggtcaatgtcctaaaagagctgggcgcgaccggaatagaaatgattgactatgtcatcccgcaaaccgatatggtgcggattattggtggtgattatgccggcttaatttgtgtcggaaaaggagggttaaccggaccggaagatattattggcatcattgttgaccgaatttatcaagaagcacagcaataa

SEQ ID NO: 231731 - DNA, 1020 bp, Klebsiella pneumoniae
atgaatattaatatacttgagaaaatgaataaggtgcccggtgggctaatcattattccactgctggtggcaatattgattaatacctttgctccccaggtgctcagtattggcggcccgaccaccgctttatttaaagtcggttccagcgccatgatgggcatatttttgctcatttgcggaacctcaatcaatatccgtcaggccggtttgccgctctataaaggcgccgtgctgctgtttctcaaatgtctggccggggccctggcggtatgggccgcgggaacgttgtttggcccgagcggatttctcgggatatcgaccctggcgctgattgcctgcctgaccagctcgaacagctccctctatatcgcattgtgcagcaactatggcgatgccagtgatgccggggcgatctccgtgttctgcatcaaggatggtccgtttgtcaccatgatggtgctgggcgtcagcggcctggccaatattcccttcgccgcgctgctgtcgatgcttatcccgctgctgattggcatgctgtggggcaatctggacgaacgttttaaacagttatgcgccgcggcgcagccgctggtgatcattattatgtcgttcgccatcggcgccaactccagcatcaatacggtgtttaccgccggcctgtccgggatcctgttggggattatctccgcgctcaccgggattgtgttctactttatctacaacctgtttttgaagaagaaaagcgcgctgggcgccgcgctgggaaccaccgccgccagctcagcgctgacgccggcgatggttgcccaggcggatccttcgctggcgatgtacgtggatgccgccaccgcgcagctggcgacggcgagcattatcaccatgatcaccgcgccgatactggtcgcctggtttgataaacggctgaaaaagcgggcgccagccgctgaacctttgaaagacgcgaaaagtgaagagagcgtgacattatcttcccctgccgctaaaggacacaaatag

SEQ ID NO: 231732 - DNA, 375 bp, Klebsiella pneumoniae
atgagcgtgccgttgtattcattacgaattaccgccgtcggggaatatgttgagtgctctttgcgggagcagcggcttattttattctccgatgccgttcccgacgatattgcgagttattgcgccgtacaccaggccagcgaactgaccgccgagttagcgcccggtcagcgaatgaaattaaatgataaaaattatcgggtgaccgcggtaggcagtgtggcaacggcaaatttacgacagcttggccatatcacgctaaattttgatggcgcagatatcgctgaattacccgggacggtacacctttacggcgaaccaccacaaattattcagcccggcgaccaaatttcgttttacccgaattgtcattaa

SEQ ID NO: 231733 - DNA, 459 bp, Klebsiella pneumoniae
atgaaaacaatcgctattggtgcggatgatgccgcctatgcttttcgcgatactatcgtcgcttatttgaatgggctgggaataaacgtcgcggattacagcagcgataagcgccaggggagtaccgtttatccggatgttgcccatgcggtggcgatgtcgattaaacagggcgaacacgagcgcggcattctgatctgcggtaccggcattgggatgagtattgtggccaataaagtccccggggtccgtgccgcccagtgtcacgataccttctccgctgagcgagcgcgtaaaagtaacaacgcgcagattattaccctcggcgcgcgggtgattggcactgagctgggcaaaaaaattattcaggcgtggcttgagtccgaatatgaaggcggcggctccgcgcccaaagtggaacgtattgattattacgaacaccagcatgccagagattaa

SEQ ID NO: 231734 - DNA, 951 bp, Klebsiella pneumoniae
atgagccagttagacgaactgaaaaaatacaccacggttgttgctgataccggcgatattgaatcgattaaaaagtttgcaccccaggatgcgaccaccaacccctcgctggtgctgaaggccgcgcagctgccgcagtatcagccgctgattgccgatgcgattggcaaggcacgccgccagggaggcagcgcagaaacacaattgattaacgcctgcgatcaggtggcagtggatatcggcagcgaggtgctgcgccatgtgcccgggcgtatctccaccgaagtggatgcccgctttgcctgggatcgcgggatgtgcgtcgcgaaggcgcgcaagctcatccagttatatgaaaaaaatggcattggtcccgagcggattctaattaagctcgccgccacctgggagggcattcgcgctgccgaagagctggagcagagcggtataaactgcaacctgacgctgctgttctctttcgctcaggcccgggcatgcgccgaagcgggcgtctttctcatctcgccctttgtgggccgcatctacgactggtatcagaagcaccagccgcagtcagcctatcaggtggacagcgatccgggcgtggtctctgtgcgccagatttatcagtattacaaatcccatggctatgacacggtggtaatgggcgccagcttccgtcgaattgagcagatccaggcgctggcgggctgcgatcgactgaccatctctccggcactgctggacgagctggcggccagcgaaggggcgttgacccgccagttgacccccggctgcgtgacggaaacccgtcccagcccgatgacgcaggcggagttcctctggcagcatcatcaggatcccatggcagtggaaaaactagcggaagggatccgactgtttgctgtcgatcaggtgaaactggaacaacagattcagcagatgttgtaa

SEQ ID NO: 231735 - DNA, 552 bp, Klebsiella pneumoniae
atgcgccatccaattgctgcaccgttagctgcgcctgaaacaaaggaattttgccaaaagattgttcctggcatccaacccgtattactgaacaacgatccttttccgggagcggaagagatggactgtttttttaatgtcgaacgggctattgaacagcatggcggcaaggccgtctacggttgggctatctggcagataacaggagtttatattgaggcagagttccactgcatctgggagaatgatgcaggagatatgctagatatcaccccatacccttatagggtggacagcattctgtttctccctgattacacaagaatttacacaggtaagcaggtagataatatccgtcaagctctggttgatgaccccgacgtgatcaggtggttgtaccttgccaggaaacgatttgaaatcttaaatactggcgacttagcgaaccagcatggacgtattgaattgccatcaaaattagccaaagagtacagcaaagttatggatgagatagacaggctaaactctcgactaacacgcaggtattcatga

SEQ ID NO: 231736 - DNA, 1101 bp, Klebsiella pneumoniae
atggataataataatcttcagttaatagaaaaacggctggtcacccgctttctcgatatgtttattcggttcagtcttattctggcgctggcctcattctgttttactgtcttttctcccttcgtcaatatgatgctctgggcgttgattctggccgtggcgctctatcctttacatcaatattttgccgggcttttcgccggtaaacaggggctggcgtcggtggtgctggtgctgttaggtattttactgattattatccccacagtgctgatgatcacctcgctggcggaaagcgccagcgcgatgatcgaccggatgggcagccagagctttgccattcccccaccctcttcacgaattgcctctttaccgatcgttggcgaacggcttagcgctctgtggatgcgggcgtccgtggatctgccaggattgctcagcaattaccgttcgcaaattggcgatattgccaaacagttcctcagcatattagccagcatgggcggcgggctgattggctttattatttcgtttatcgtctcgggtattatgatggcctggggcgcggcgggcgccatcagcgcgcagcgtattgccatccgtattaccgatgagaataaaggcgtgaccctcacccgcctgtgcaccagcaccatccgcgcggtcgcccagggcgtcatcggggtggcactgatccaggcgctgctggtcggggtgatcatgctgatggccagcatccccgccgtcgggatcttctttatacttgccctgatcctcggcattgcacaggtgccggtgatcctggtgacggccccggccatcgcgctgatgtggagtttcggcacccacagtaccggaatggatatcttctatactgtcctgctgatcgtcgccggtatggccgataacgtcctcaaaccactgctgctggggcgcggagttgatgcgccaatgccggtggtgctgctgggcgcccttggcggaatggcctctaacggcattctcggtatgttcctcggcgccaccctgctggccatcggttaccggatctttatgacctgggtaaatgaagggcaacccgccctgccgcaggataaataa

SEQ ID NO: 231737 - DNA, 264 bp, Klebsiella pneumoniae
atgattcaggctttcgtcgttttcgtcgccgaatttcagcgcgcctcttgttcctcctgcatacactgcatgaatacccgcatcgccggactgattgccttcccggcgtggtgggcgcagactccacagttcgatggtgttctccatggtaatgccgcgctggcgcaggatgctttcaaaaatctgccggaacacgccctggggttcgttgatgataaagctcagcgggataggctgccgcggggctggcgtgcggcggcatga

SEQ ID NO: 231738 - DNA, 1101 bp, Klebsiella pneumoniae
atgacccatgcacatgaggcggtaaaaccccgccataaggagtcttccctcgtctttccggtgctggcgctggcagtgctgtttttctggggcagcagccagtcactgccagtggttatcgcgattaatatcctcgcgctggtcggtattttaagcagcgccttcagcgtggtccgccacgccgacgtcctcgcccaccgcctgggcgaaccctacggctccctgattctcagcctgtcggtggttatccttgaggtcagtctgatctccgcgttgatggccaccggcgacgccgcgccgaccctgatgcgtgatacgctctactccatcattatgatcgtcaccggcggtctggtcggtttttccctgctgctgggcgggcgtaaattcgccacccaatatatgaatctgttcggcattaagcagtatcttatcgccctgtttccgctggcgattatcgtgctggtgtttcccatggcgctgccgggcgcgaacttcagcaccgggcaatcgctgctggtggcggtgatttcggcggccatgtacggcgttttcctgcttattcagaccaaaacccatcagagtctgtttgtgtatgagcatgaagacgacggcgatgatgacgacccgcaccacggtaaaccgtccgcccacagcagcgggtggcataccgcctggctgctggtgcaccttgtggcggtgatcgccgtcactaaaatgaacgccaacccgttggaaacgctgttgaccagcatggatgccccggtggccttcaccggcttcctcgtggccttgctgatcctgtcgccggaaggccttggcgcgctcaaagcggtgctcaacaatcaggtacagcgggcgatgaacctgttcttcggctccgtgctggccaccatctcgctgacggtcccggtggtcaccctcatcgccttcctgaccggcaatgagctgcgctttggccttggcgcgccggagatggtggtgatggtcgcttcgctggtgctgtgtcatatctccttttccaccggacgcaccaatgtgctgaacggcgcggcccatctggcgctgttcgccgcctacctgatgaccattttcgcctga

SEQ ID NO: 231739 - DNA, 1224 bp, Klebsiella pneumoniae
atgccagtaaatatctttgatattccattagcagaaaaagcagctcaaaaaaaattgccattatggattgatgccgtaatttctgtttgcatagtggtggtatatatatatgtttttttagtttatttccctcagtatttatcaaaaaatagcttcgctttttggactgaattattgctggtaccactacttttttgtggagctgtattttttttcagaattatactttgggataatgaggatattgaggtaaccaactggaatgaaactcgctccacttattatcaggagttgcttcaaaaaggaagggttaatcttgatattattgagttacaggtcagattacctgatttaaacgggaaagtggttgatgtggcaggcaattctttgttgcccgttcgttacacaccaaaatccacacatatgtccaggtaccttacttttaattcgtcagtaaatgaattaaaaagcggtagtcaaatacagcaaagaaacgttcatttatttaatgaaatcatgggggagttcattaatgatattcatatgcatataactattttacctaagcatgccagaataaaggtagtgtgtgttcttcatgataatttaaaatctttgatggaaaaaatttggcaagttcggtttgagaatgtatttccgttagcgaatgttgagtttagcaataatctatcagaatctattgatagctggttagacagatcttctgatgaatatattattctcatcgctgccagttttcatggtgtggaattattttatgataaaattgataataaatctgaatctgtaatgtttttatttggaaaattaaaaaatgatgacgaaggtggcaacaactcatctttaggatctctttttcgtccagaatacgactggccggggatagataagtcactaatttggggtggtgctaatgatggggagaaattatccggtgttgtatattccgggttgaatgaagaagagctaaaaaagctggtgttaaaaaccacagactatatgtctgaaagtgcactttcgtcgtatacctacgttgattcaggcaactatgtatgtttatgcccgccgcttaccaaatttttacaattgaattatgtaaatgaatatcttcttcctggaaaatatttgtttgtaaataaaaatgatgacctcttaatctctcatttctttaattcggctgccagtggtaaaggtgtgctatag

SEQ ID NO: 231740 - DNA, 690 bp, Klebsiella pneumoniae
atgaaagatatcatgatcaatttattgattttaaaaaaaagtcaaaataacctcactgatagtgagagaacaaagatgttgtttcaaaatcaatactggttgataaataaaaaacaggacttatggcttggcttttttgatggcaaaaaagttaaaatctccaaaggtatttatccagatataaatattgattcatatctgccacaacaaatcattaggattaaaaagggcggtaaactatctcagtttattataaaaagcactgaggtgaacagctatgaatatcctttacactgctataataaatttgatgctgtattacttgataaacctgattatctgctattttattcagggtgtacaaatatcagtccgggaaaggatggacgtcgaggtacctcatataacatcctgttttatagtaaaacatttgatacgttagtttctataaatgaatttacttcctctgcaataattgataataagttgcatgctgctttcctcaaaagtaaagaagattattttgtttatgaaaaaaacaatattgcatttagaatcaatggaaaggataaagtagaagatgtgaatcccgatacaggattgccattaaatagggatgatagttctgaggatgctgatggtgttctggtgttaccgcttgaaagacttcctgagataaacaataaataa

SEQ ID NO: 231741 - DNA, 504 bp, Klebsiella pneumoniae; identical to SEQ ID NO: 186048

SEQ ID NO: 231742 - DNA, 258 bp, Klebsiella pneumoniae
gtgatcgaggccgatcacggaaagctcaagatactgatcaagccggtgcgcggtttcaaatcgatccccacggcctatgccacgatcaagggattcgaagtcatgcgagccctgcgcaaaggacaggctcgcccctggtgcctgcagcccggcatcaggggcgaggtgcgccttgtggagagagcttttggcattgggccctcggcgctgacggaggccatgggcatgctcaaccaccatttcgcagcagccgcctga

SEQ ID NO: 231743 - DNA, 234 bp, Klebsiella pneumoniae
atgggacgtgtaatgcaagagatgacgagaagtgacggcaccaccatctcccttattgaaagagaatccgggtgggccgtcgtactatctaatgattcaggatatctcagcgacaagaactttaaaagttattcccaggctgagttatacgcgagaaccatatcaaggatgcccgttaatgaagagttaccttgggaatctctcgtaacatccgtatcacccgatcttaagtag

SEQ ID NO: 231744 - DNA, 450 bp, Klebsiella pneumoniae
atggctaaatacatggtcagcgaaaacgaaattcgccgacctgatacaccgcttggccgggctaaaaaaatgtcagacgcgctcgaccgcgggctcgatgaggacgacattgcggtgttgtttggctgcagcgttcagaccgttcgagcaacgctctccctcctcgatgctacccaggccgtccgggaagcggtagaggctggcacaattaccgttacccaggcgcgtcagttggcatcgctaaaacccgaagaacaacgggagaaggtcaagcagatcgagacagcgaccgccggcaccacgggccatgaaaaagcccgacgacagcgccaggttcttggtgaagcaaagccgcgtatcaaatcacgcaaggaaattacaaaagcactcgaagatgccagtggagaatatgccgaggctctgcgctgggtgcttggggaggcggtatga

SEQ ID NO: 231745 - DNA, 411 bp, Klebsiella pneumoniae
atgaacatcgaaacagtaaacgagctcatcgcctcactggaggcagcaggcgagctgtcgatcaaagagacaaaggttatggcgctggcgaaagcgtaccagcagttggctgcggagaatgtgcaaatcaaagctatgaacgattgcctatctgaggaattgcgtggttatgagtctgatggcgcttttgaggggccgaagatgaatctgctgtggtggcaggtcgaaacccccgccaccgatcgcatcgtagccgggattaaggctgatggggtggaggagttcattggtcgcctgcagcagcatgtcgatgagggtgattttgtaggcgatgaagttgccgtaattgttggcgctatcgactgcggtaaggagtttttcgagcagctgcgcgagggggccgacaaatga

SEQ ID NO: 231746 - DNA, 501 bp, Klebsiella pneumoniae
atgaaatgttccgtcgcatcaatgttcatcatcttcacaggtatcacatcattatccagttatgctgacacaccagaatctatcactcaggcattccttcagcgttgcgccaaacccgtgttttatgcacaaaccgctaaccataagaaagaagtacaaatctgcattgcatcaccttctgtctcttattcattcggcaaaatcagtgcaggtagtaaagaaatggatattcttgttccggttaagaacacgtcatttgccagtcagagtaatcaaatctacagtatcagtgagtttactatccgtaatggtgatacatcctaccaggtcgcttctgggtctaatgatgaaggactgcctttcgctacacttgacgtttacaaaggcccggcaggtactggaaaacatctggctcagattaaacttgaccccaatactgtcgtgaattacatcagcaacaccctcactgaagagggcattcctgagtctgactcattctaa

SEQ ID NO: 231747 - DNA, 432 bp, Klebsiella pneumoniae
atgtttagccttaacaaagaacctgaatgcatcaaaaccaacctagttaacttccgtggtcgcagtaccttctggcgtttctatttcagcacagtacctgattggcagcgtttagaaggcgatatctttaaacttatggaaaagatgtgtgaggtctatcagggagccttctgggagttcagtatgctgtctaacggcggcgtatttatctggcctaatatgctcgaaacttcattgcgtatgtttaacccgcataacggcaatgaagcggagttaagcccggaggcagccggtattgcggtatgtctgatggcttacagtatctggtcctttaaaacagaaagtgaagtactggtggagtatttttaccagttgcgtgattacgctatacagcatccagagcaggctcaaatctttcgcatgatagactaa

SEQ ID NO: 231748 - DNA, 4902 bp, Klebsiella pneumoniae
atggcgctggtcggtattaataacgaaaacgaattttactctaaccactatttgggtgaggttttcaccagtgatatccgcgatgtgctggaaccctggatagcccaggaaaatgcagcgcgtgaagcggagcgtgccgctcgtgaacagggcaaagacgtagagccgggataccgcgctccgtggaaccagtttaacagtctggcgactgagtttttccgcaaacttgccgagcacgaaaaacagcgtcagatcccgcagcgtctggccgatcaacgtaatcgctggcagccattgttaaaggcgctgggctacgaaattacgccgcagatccaaatgctggatgacgatacaccactgccggtactggcgcgttacaacagcactgacggtagcccgtggctgtggattgttgaagcacacgatcaggaagagggaacgctggatccgctggcgctctccttactgaccgcgcaattcccggcggataccgacaaacataagcgcgacagcctgcgcaaaaaagccaacggtgaatatcgcagctggcaggatctgctctctacggcggtcttcacccaaaatgaaccgccgcgttttgtgctgctgctcggtaaccgtcagctcttgctgttggaccgtactaagtgggcgcaaaaccgtctgctgcgttttgattttgaagagattttaagtcgtcgtgaaacggatacgctgaaagcgacggcggtgttgctacataaagattctctgctgccgggcagtggggcaccttatcttgactcgctggatgacaattcgcacaaacatgcgtttggtgtttcggaagatctgaaatatgccctgcgcgaaagcattgagttgctgggcaacgaagcgatgcattatctgatcgaccgtggcctggcaaactataccggtaaccgtgcggtggatccggatgaactgagccgcgaatgtctgcgttacatgtaccgcctgctgttcctgttctacattgaagcgcgcccggagctgggttatgcgccaatgaccgccaaaacctatctgcaaggttacagcctggaaacgttgcgcgatctggagatgatcccgctgaccagcgaagaagatcgcaacgggcgctacttccacgacagcctgaatatgctgtttaaactggtgcgcgaaggctacaacggcggcgtgaaaatgcagagtgacctggagagcggcgaccggattaccatccatagtcatcagttcagcgtcccgcgtctggaaagtcatctgtttgatgccaacaacacgcgcattcttaaccgcgtggtattccgtaacgaaaccctgcaacagattatccaggcgatgtcgttaagccgcccgggcaaagggcgctttaaccgccgcggacgtatttcttatcgccagttgggtatcaaccagttgggggcggtgtatgaggcgctgctctcctatcgcggatttttcgccagcgaagatctctacgaggtgaagaaagccggggaagagtttaacgagctggagacgggttacttcgtcagtaaggatgagattggcaaataccacgaagacgagaaggtttacgagaaagacggcagtctgcgcattcaccgcaaaggcagttttatctaccgtatggccgggcgcgaccgtgagaaatctgcctcctattacaccccggaagtgctgacccgttcactggttaaatatgccctgaaagaactgtttaaggagcagattgatcccattagcgatccgcacgccaaagccgacgccatcttaaacctcaccgtgtgcgaaccggcgatgggcagcgcggcgttccttaacgaagccatcaaccagctggcggaagcgtatctgttccacaagcagcaggcggaaggtcgccgtattccgcaggatcgttacacccaggagttacagcgggtgaaaatgtacattgccgacaacaacgttttcggcgtggacttaaacccggtggcggtggagctggcggaagtgtcgctgtggctgaacgccattagtggcgatgcctttgtaccgtggtttggttaccagctgcactgcggtaactcactggtgggcgcgcgccgtcaggtgttcaacaagagtgaactgacctacaaaaaagccaaagatccgagctggcttaacagcgagccggtcgagctggcgatgaacacgccgcgtgaagagacgcagattttccacttcctgctgcccgacggcggtatggctaactacagcgataaaactgttaagcagcgttatccggatgacttcaaagcgctggacagctggcgcaaagagtttattaaaagctttgccgggcatgagattgctgatgtgcagcgtatcagcgaaaaggtggaagctctgtggaacacctatcgccagcaacttaaagcagaacgtctgaaaaccgccgacagctacccggtgtggccggcagataacagcgagcagacgcgttcttcgctgagcagtaaagatgaaaccttcagtggtcgtcttgaagataacagtgcctaccagaagctgcgttgggtgatggactactggtgcgcgctgtggttctggccgatcgacaaagccgatgagctaccggatcgcggcacctggttgtttgagattgaaaccctgctcgacgggattgtaatcacggaaaaagtcactgaagttgcggagcacaccaccggcgatctgtttgccgaagaaggtctgctgcgagaagagtcttcactgttttccggcgcaggtcgtctgaaaactgaggtgttgttccgtcatttgccgcgtctggcgattgtcgatgccctgagaaagcagcaccgtttcttccactgggatctggagttctgcgacctgtttgccgagcgcggcggttttgacctgatgctcggaaacccgccttggctgaaagtggaatggcaggaagctggcgtgctgggcgactacgagccggagtttgtactgcgtaagctgagcgcctcgaagctggcaatgttgcgtgttgatacctttaacgccattccggcgctggaagatgcatggcgcagcgagtatgaaggttgtgaagggatgcaaaacttccttaatgcgcagcagaattacccggtgctgcgtggtgtgcagaccaatctgtataaatgtttcctgccgcaggcatggcgtttaggatcgcagaatggcgtggcaggtttcctgcacccggaaggaatttatgatgacccgaaaggtgggcagttgcgtgcatcggtgtatccgaggttgagagtgcattttcagtttcagaatgaaagagctctgttcccgatcggtaaccgtaacaagtttagtattaacttgtatgcaactacacctgcgacaattgggtttagtaatatagcgaacctctttatgccacaaacgatcgatggctgttttatgccttcagataagatcgtaggtggcattaagaatgatcaggatgaatggaacctggagggacatccggatcggttactgcacattgatgagcaattattagagctcttttcgcagctttatgatgaagaaggaacgccaggtttcgaagcccgcttgccagctttacatgcaaaacaattgattaacgttttgaggaagtttgccaatcagtctaaacgtcttggtgatttgcaagggcaatatttgtctttggaaatgtggcatgaaacgaatcaacaaaaagacggcaccattgaacgtaatacgcagttcccaaaagattcgtcacaatgggtattgtctggccctcacttttatgtaggaaatccgctatataatacaccgaaagctatttgcgatacgcataaagcgtacgataacctcgatctactaacgctgcctgatgactatctgccgcgcactaactatattccggcatgtgatgcacaggagtatgccaaacgtactccgtgcgttacatggactgaaccgggtgaagatgaaccgaggaaggtgacggattattatcgttttgttgctcgctcaatgctcagtcaagcgggggaacgaaccttgatcccagccatattcccagccggtgttgctcatatcgatccatgtttcagcctcacatttaataaagtagaaactttattatcttttactggtcaatcaatgtcgatttgccacgactttttaataaaaagcacaggaaatcctcgtttcagggaaaatttggcaagatatttacctattgttgaaaaacataaaaccaaaattcaaatacgagcactctgtttggtttcacttactagtaattacaagcagctatgggatagtgctgatttagaacttgcaatgcaccagcgttggagccgcaacctcccgcaacttccccaggatttcttcgccaacctgaccccggagtggcagcgtaactgcgctttacgctccgactacagccgccgtcaggcgctggtagaaattgacgtactggtggcgcaggctctgggtttaaccctcgaagaactgcttactatctaccgcgttcagttcccggtcatgcgtcagtatgaagccgatacctggtacgatcaaaacggccgcattatctttactccaagtaaaggcctggtgggcgttggcctgccgcgtaccgcgcgtaaagcggacctgaaaaacggttttgtctttaacgtcgccagcccagactggaccggcggcgattgcaccgatcaagccatcggctgggatgatgtcaagcatctgcaaaccggcactgtcagcgtcacttttgatgactatacccgcagcgatgaaggcgagcgccgaaccgtcatttggcaggctccgtttatcaaacccgaccgcgaagatgattataaagtggcctgggcattctttgcacaagataaggagagtgcctga

SEQ ID NO: 231749 - DNA, 1338 bp, Klebsiella pneumoniae
atggctaagtataaggcgtatccggagtataaggagtcgggggttgagtggtttgatgtgaggccattgagttggaaagtaactcgcttaaaacttgaaacgttcatgaatatgggccaatcacctagctcggatgattgcaatattgagggcgatggcttggctttccttcaaggcaatgctgaatttggtaaggtaaacccaatagaaaaacaatattgtccggtgccaaaaaaaattgccaatccaggtgatatattgttttctgtgcgagctcctgttggagccatgaatttcgcagataaaaaatatggtattgggcggggactatgtagcatcgctgcttcagcgaaacttacatctccttttttatggtggttacttccaacatataaataccaacttgatgctatagcgacgggcagtacttttgaggccgtatcagcagaacaattaggtaacttgtgtttcgctttgccttctatttctgaacaaagtcagattgcagctttcctcgatcacgaaaccgcaaaaatcgataacctgatcgagaagcaacaacaacttattgaactattgaaagaaaaacgtcaggcagtgatcagccatgccgttaccaaagggctaaacccagatgtgccgatgaaatattctggtgttgaatggttgggagaggtaccagaacattggattataaaacgattaaaacatatttctcctaaagttggtgttgggctcgttattaacccttctacatatactaaagatgaaggtgtctattttatatttggtggtgatgttaaagagtttggatttgacttaactaaaacaaggcgaatttcacctcaagatagcaataaactacttccttcaagattaaatagtagagatttagtgtcagtacgtgttggatatcctggaatcacgtcagtggttaccgatgatttggagggctctaattgtgcgtcaattatcatcatcagaagaggcagttacaactctgactggctatgtgctgcaatgaatgtttgggttggaagacaacaagttgatcttgcttcttatggtgcagcacaaaagcagtttaacgtatcggacgctattgaatttgtatttcctgtacctccgataaatgagcagaatgatatagctgatttcgtccaaaaaacgttgaacaaatttgatgatttaactcagaaagctctcaaacagatagagttgcttcaagaacgccgcaccgcccttatttccgccgccgtcaccggcaaaatcgacgtccgcgactgggttgcgcctgacacgcaggacgttgaggagccacaggaggccaccgcatga

SEQ ID NO: 231750 - DNA, 567 bp, Klebsiella pneumoniae
gtgaaccatttaatgatcgacctggaaactatgggtaataaacccaatgcccctgtagtctccatcggtgcggtattttttgagccatcaactggtgaactcggcaaagaattttatcgcgttgtcagcctgaaaagttcgatggatggtggtgccgtacctgaccatgaaaccattatatggtggatgcagcaaaacgaagaggctagaaaggctatttgcgataaggaaaacagcatagcactctggtttatgctgtgtgaattcagccactcatttattcgcaataacgccgaccccaaaaagattcaggtatggggcaatggtgcgacgtttgacaatgtcatcatgcgagcaagctatgaccgtgaggatattccctgcccttggcatttctccaatgatcgcgatgtgagaaccatcgtcgaattaggccggaccataggtatcaaccctcgccgcgacatcccgtttgaaggtgataggcataacgctctagctgatgccaaacaccaagctaaatacgtgtccgcaatctggcaacaacttttacttaaacattgttga

SEQ ID NO: 231751 - DNA, 198 bp, Klebsiella pneumoniae
atgcaccatgatttcttcggcctcatgcctttcaataacgccatcttcaagtgcctgttcgataatctgatcaacctgccctctggcggcagaggtacgcattgcccggctaaacaagtccacgcgatccagctcttccaggtgcggaacatccaccagcaaagcaccacgacggcgggcgaagtagtctgccagtag

SEQ ID NO: 231752 - DNA, 939 bp, Klebsiella pneumoniae
atggcctttaacccggagctggggagcacgtctcccgctgtgttgctcgataacgccgagcgtctggataagctggtcaatggacccgagctgactgagccggatcgcgctggcgttgagctggatacctggcgcggaatgatggcgaagagcaccgcagctatcgacgatgcgcaaaacagcattaccatcctgggattgccatttgccacactcgcggatgcacaggctgcggtagatgccggaaaaattccagatggtgctgtaacatggatacgaaatgatgatgcgtcgctggcagacgagtacatcaacaacggtggtactctgtcagccaccgggcgaaagatgccgtcgcaggaatatatagatgatgggtttacccccggcagggttgttgaaagcgatacggatgtcgctatagcggtaacattcgcggacggctcccgcagctggctggaatcaggctttgatggtcgacctaccgagcattcagcgcaaatgattggcgaagccattcacgtgggcgattctcctgtttcaagtgagcaggtggccattgcaaccctgttcgcggacggctcccgcagctggctggaatcaggctttgatggtcgacctaccgagcattcagcgcaaatgattttggatgtaatttcaggggcaatttcggcatcagaaacccagacaatcgcgctatctacagccccagatggaacgggtcgtgaatatccgacttttgagcgtctgaatacccctattattcagttttctcagcaaagcgctgagacaatctactggccctggatagtggataaatcagcgtggggaggatcagggttcgcgcttttttatagcactgaccattctgcaacccatgacccatctggaatttttctttttgagtcagacgacattaccgggccatggattaaatag

SEQ ID NO: 231753 - DNA, 846 bp, Klebsiella pneumoniae
atgaaaaagttaatcatggccgcaatcgtggtcgcttcgctatgcctgagtaacgccgcttcggctgctggagttgtcattactaccggccagcaagggcttacctacaatgcggtgtacggcgtgaacctcgccagcgccctgagtgagtatggctatagctccacagtgatccccagcaaaggctcgctggacaatctcgacaaggtggccagcggtaccgcgcagatcggtttcacccaagctgatgctttccagttctggcgcagtcggcacagcaacgaagcgcagaaggtggacattatcggcgaactggctgatgaatgcgtttttgtcgcggtgaagaagggcggcaagatcagcgacgaaggggatttaaaggcgggtgtgaaaatcgcagttggtgagccaaccagcggatcgtatgcatcctggcaatatctgcagggactggaaaaggattatgccaaagttgagacctacgccaaaggcggtgtgcgctcgctggcgaaagtcaccactggcgagtatgacgccttcctctgggtctctgcgccagacaggtcgaataagtttctggaggcggttaatcaggaaggtagcggcctgacgatgatcgacatgaacggctggcacgtagacgataagttgcctaacgggaagccggtgtacgaactgaaaaaggcggtgaccgaatccggttggctgagcgattcgaaggtgaaggttccctgcactaagacgctggtggtcgccaataccgaggcgggcgatgacatgctggaaacggcctcgactgtcctgctgaaaaacctgagccgagtgctcggcaccaatggtaaataa

SEQ ID NO: 231754 - DNA, 918 bp, Klebsiella pneumoniae
atgaaatgctatatagcgattccaacttttaatgcaggtactatatggaaaactactgtatcaagtataaaagaaaatataggcccggattttgtagttcatataattgactctggaagtgatgatgatactgtagagattgcgtcaaatgctggctttgatattgttacaatcagtagcagtgaatttaatcatggacgcactcgtaatatggcgactgataactttttaaatcaatatgaaatagttattttcttaacgcaggatgccatcccacagaaggggtttattgataaaataatcgatatttttgaaaatccagatattgcatgtgcttacggcaggcaagttcctcatgtaaatgcaaaccctatagctaaacatgcaagatattttaattatccatctgaaagttacattgttggaaaagatgatattaataccaaaggattaaaaactgctttcatgtcgaattcattttcggcttatagactttcaatgtttaaagagttaggcggatttcctggaaacaccatattatgtgaagatatgttctatacagccaaagctatacttgctggctacaaagtggcatatgtttcggaagctgttgtatctcattctcataattacacacccattgatgaatttaaaagatattttgacatcggagtatttcataccgatgaatattggcttcgggaaagttttggcggggctggtagtgagggaaagaaatttattatttcagaatttatttttttgcttaaaaatgcacctggttggattccgctggcctgtatcaataattttatgaaaattattggatacaaattaggtcaaaagtatcggtatttacctaaatgtttaataaaaaagcttagtatgcacaaacggtattggatgaagcgagcgtaa

SEQ ID NO: 231755 - DNA, 351 bp, Klebsiella pneumoniae
atgcatcaattaactgtatttgaaatggaagagatttctggcggcgcgctgactgatactcttaccgatattatgacctgggctgctaaagaagtaggcgccgtcgctctgggcgcctctctgggggcgatttttgggacagctttcgctggacgttggggcggggctggtggtggtcttctcggctttggcgcaatcggtcagggtgtaggtatcttgtttggcttagtagctggtggcgtttgttttggcgttgccgccggtatcgttggctgggatatgactctggattatgcaacaggtgtaatggatgccgtttatgatggcacattaaacttctggagcaattaa

SEQ ID NO: 231756 - DNA, 321 bp, Klebsiella pneumoniae
atgtacgccaaatctttcatagcccttgacggtaatggtcgtctcaccggagccagaacagcacaacggtatccgtatgaccgctacacctgccacctgtgcggcagtgcgctgcgataccatcctgaacaccacactgagcgaccttactttgaacaccggtccgacatgctgacagataacgggcgtcagcattgtccgtatgtcaggcccgatcctgaggaggcccgtcatacccagcaactgcaacgttatatacctgatgtccgcccgctcatccgttggccgatggataaactggtttacgttatatggcgctga

SEQ ID NO: 231757 - DNA, 240 bp, Klebsiella pneumoniae
atgaccacgacgaattcgaacattaatgccagccctgacaccctgatttcagctcaggacccgcttatcgacatgacctttatcacctcgtacaccggtatgtcggacaagtggttctataaactgattggcgacgggctgtttcccaaacccatcaagctgggccgcagttcccgctggttcaaaagcgaggtggaatcctggatgcgacagcgcattactgattcccgtggcgtctga

SEQ ID NO: 231758 - DNA, 570 bp, Klebsiella pneumoniae
atgagttacatatatgaccctttctggcagcaacgcatcgccgataccttcagttgcgcacttaacgcttacacccgcttactggccctgcgtgttgacctccgtctgccggatacgccagcggctactgatgcggctgttatctcccgcttcaccgatgccctgaaagcccgcattgctgcccttcaggcgcgtcaacgtcgcgagggcaaacgcgtctggccgaccacgctgcgttttgtctgggcgcgggagtttggcgaaatcaaagggaagaagcattaccacgcggtgctgttgctgaaccgcgatacgtggtgcggaccgggggattaccaggacccggattcgcttgcaggtatgattaaacaggcgtggtgcagagccctgaaggtggatgcacaggcgcatgcagttctggcccgcttcccgaagagcccggtgtcctggctgacgcgtggtaatactacagagcttcaacaggcgctggcgcaggccgcttatcttgccaaacgcgaaaccaaagtcaccggcgatggtgaacgtaacttcggctgcagccgtggctga

SEQ ID NO: 231759 - DNA, 486 bp, Klebsiella pneumoniae; identical to SEQ ID NO: 208759

SEQ ID NO: 231760 - DNA, 819 bp, Klebsiella pneumoniae
ttgcccgaaacctcacagcatcccaattaccagaggatcctgattgagtcgtttaaatccctgtctctggaaaccggctgccaggttatccttaccacgcacagtccggactttgctacagagctacctggggacagcatccgctttgtatcccgtgatgccgctacagggcagccgaccattcaggctggtgctgatgtttttggcatcgttaccgatacgctgggcgtcacaccagacaaccgggtcagactgctattctgcgtggaagggccgaccgatgtcaccgcctttaaagctctcagcaaagcgttacatgcagaagacaacacccttcctgacctggagaatgacgaacgtgtggcgtttatcgtactgggtgggggaacgctcaagcactgggtgaatgaaaactatctacgcgccctgaaccgcagggaaattcatatctacgatcgtgatgttcctgcttatgccgaagcagtcaatgctgttaatgcacgtgctaacggatgctgggcggctcaggcgctaaaacacgaggtcgaaagctatcttcatcctgatgccattcacgaagcttttggtgtgatgatcgacgccaccgaccatcctgtcggcggtaaagctacccctaaagtgtttgcagaagcctattcgctggctcagggctttgacggtgtgatgaaagataaccctgccaaggcacgtctggcagaacgggcgttccctttgatgactgcctcccgtatacacgaacgcgatcctgagggagaagttgtcggctggatgcggaggatacgtgacatgcttcagtga

SEQ ID NO: 231761 - DNA, 501 bp, Klebsiella pneumoniae
atgaaagcagacgtacagtacgtgtttcaccattttggtatcccgcagcaggacggagatacctcaggtaagttcagtgccagtgctggggtgtataccaccgataattcgggcaaatttcgggtgcagtggcatcgtttcactgaagactcaccacttcatccgtttctgaaaaccgttccacatgtggcgtttaaggccagtagccttactgaagctattgcgggcgagacggttatcttggggccttatgaacccattgatgattaccgggtggccgttattgatgactgcggtgtaccgattgaactgattgagacaacgctcagcgatgaagaactgtgggcacgtgcaccatccggtcaggggagtctgtaccggaagccggaaatgctcggggataaaaatagcgatcgattacggatatcgcgagacagtggacagataatcatccatcgtttcttgaggctcaccgtttgtcccggggagggatcagggtga

SEQ ID NO: 231762 - DNA, 966 bp, Klebsiella pneumoniae
atggctcttcacgaaaaacaggacagaaatggactcatcaggagtagggatctgagggtttgtactttttatgccaagtggctgaatgttaatagcgaaatcaacaccaggaacgttccctgtcaggatgttgaaagttgcaggagagaattaaacctgctgattaacagagccattccggataaagcgaaacagacgagattgttgtctgatatggagattggccgggaggaaaacattctcctgctggagagttttgactgggttagaatggatgagcgtgctgcattctggctgtgggcatatctttgtgaaacacgagactcgttattggaaattgattctccatcaactccggaattaactaactggtatcagcgcctgaatctgagtgtgtctccggtgagtcacactgagagggtaaatctcattgttacgttttttgacagtattatcattcctgcaccacctgtgaaatatgttaagaaaaaggtgatggaaaaactcaaagaccagtggagagtaatttacaataagcctcttccattaaaatggttaccggatgaagaagatgctgtcctgtgggcctggaataatcttcaaaaagtacagagggataatccgttgggtatcagtcgttcctccatgagacggaatgcatcaggattaacaatctggtttacaccattcaatcatgctgaacgtaacctcgcgttacgtgctgcactggatttatgggatggaacacaggatacaaagcgtttatttctccttaatcttaacaaggcctggaatcagcagaaattacgtcaatctcgcaccgataaaaaagcgctcaatacgtacctgaagaacgaaacaaaaaaccgactggacctgatggctgaacgtagcggggttcgcatcagcgatatgctcgaaaaactgattaatgagcattaccgtaaaacgctcggcggagaatga

SEQ ID NO: 231763 - DNA, 1209 bp, Klebsiella pneumoniae
atggacgaaaaacagttgcaggctctggctaacgaactggccaaaaatctcaaaacccctgacgatctcagccagttcgatcgtctgctgaagaaaatcagcgttgaggcggcactcaacgccgaaatgtcccaccatctgggctacgatataaatcagcccaaatcgtgggccaactcccgcaatggctattccacaaagaccgttaccaccggcgacggccctctggaactacgtactccgcgcgatagagacggctctttcgaaccacaactggtgaagaaaaaccagacccggatcaccgggatggataaccaaatcctgtcactgtatgccaaagggatgaccacccgcgagatagcggctgcgttcaaagagctgtatgacgcggatgtctcaccggcgctggtctcgaaggtcaccgacgccgttatggaacagattaccgaatggcaaaatcgcccactggatgcagtctatctcattgtttatcttgactgtattgtgttgaaggtccggcaggacagtcgcgtcatcaacaaatcggtgttcctggcgctgggcatcaacatcgaaggccagaaagaacttctgggtatgtggctggccgaaaacgagggagcaaagttctggctgaacgtgctgacggagctgaaaaagcgtggcctggacgatatccttatcgcctgcgttgacggcctgaaaggcttcccggacgccatcaacgcagtatatccggaagcacgtatccagcggtgtattgtgcatatggtgcgcaacagcctgcggttcttctcctggaagaactacaaagccgtcacccgcgacctgaaagccatctaccaggcccccacagaagaagcagggttgcaggcgctggaagcgttcgccagtgcctgggacagtcgctatccgcagataagccgaagctggcaggcaaactgggccaacctggcgacgttcttcgcttacccggcagacatccgcaaagtcatctacactaccaacgccatcgagtcactgaacagcgtgatccggcatgccatcaagaagcgtaaggtgttcccgacggacgacgcagtgaaaaaagtcgtgtggctggcaatccaggcagcctcacagaaatggacgatgccgctgagggactggcgtatggcaatgagccgctttattatcgagttcggtgaccgcctggacggtcacttctga

SEQ ID NO: 231764 - DNA, 303 bp, Klebsiella pneumoniae
atgaatatccccctctctggtggttcgcgcagcccggtacgcgttttgtctgtactctgcctgcttctttctgctacagcactcagcggctgtggcgacgaaaagtcaaaagccgaaagcgagtttatccgggactgtaaatccggtggcggtaccaccggcatttgtggctgtatttacgacgtgctgcagacgaaatatccccatggagagctgcttaagatgaaccaacagtacggctatgtcccacagggctttatgaacaacatgctcagcgcggcacaacagtgccgtaagcaataa

SEQ ID NO: 231765 - DNA, 312 bp, Klebsiella pneumoniae
atggcgctcgtcattaagtatttcgctattgctttcagtatcgcgctggtcgtggtgctgtttaacgttatcagtgccaccggcgaaattcgcagttttggtcaggggatggggtatctgttctggatgaccctggggcccggagctggtatgaccatcggtgccgctctgcgactgtggctgatgccggatgcggtatacaccagcgaaggtatgatcgggctgctcaaagcccgtctgttctggcttgtgggaccgcagtgcattggctggctggcgggactgattatcgtgagcaaacagcttgtatag

SEQ ID NO: 231766 - DNA, 471 bp, Klebsiella pneumoniae
atgcgatttattcacaccatcctgcccgcaggattaatggcttttaccataaccgcacaggcagtccccaatatgtggagtagcggttttggtatgggcatcaccgaatacatcatcaccagcccggaacaggtgatgctgaatctgagctgtaccggcaatcctgacgaccagaatatcctgcagcaccacgtcatgctcaccctgccggacggtacagaagctgattcacaggatgaaaaaaccgccatgaccgtcgtgacgagtgaccagcagtatccgttgccgtcatccctgggctggcgtaacggtgacaacgactggctgttgtttattgaggccatcagcaaagcaacctcatttgatatttatgtcaacgataacaaggtcggacactttgccccttcaaccggtaacgtccacaaagtccttgccgatatgtccggctgtacaacgctcaccgccgggtaa

SEQ ID NO: 231767 - DNA, 222 bp, Klebsiella pneumoniae
atgacattacttaaaatactgctcgctacgctggagcgggcgctgacgtggtgtgccagcagcaaagcacaacagcttgtggaagaccattttcgcgaaaaaggctacgacgaggacagtatttatatcgccagacagacggcagccctgctcgcaggtgccttaatcgcggcgctgatagagcagatactgcaactcatcgccacatacgtcacccattga

SEQ ID NO: 231768 - DNA, 141 bp, Klebsiella pneumoniae
atgcacaacaccgacagtccgttactgcccgaaggcgcgtttacccacaggcaggctgaggtcatcgtggcggcgtaccagaacgtcgcgattgaagatgaccaggggacactttcggctggccattcgcgacagcgataa

SEQ ID NO: 231769 - DNA, 471 bp, Klebsiella pneumoniae
atgaccgacaaaacacagccactgtttacccctgaagcaaccgttcctgttgcagctctgcagcagattgtcgccacaccggtcaccgatgagaaccgcatcagcttctggccgcagtacttcggcagcataccgcagtggataatccttgagccgaccatcttcgcgtggatggaccgcttatgcgcagactactgcgggggtatctggcagttttatacgctgagcaatggcggcgcatttatggcaccggacgcggagagtgatgaactctggtcgctatttaacactatgaacggaaatgacgcggagatgagcgtagaggctgccgggattgtggtctgcctcattgcctacagtcatcacgccagccgcactgaatgcgacgacatgacagagcactattaccgcctgcgggactacgcgctcaaccacgcggaatgcaacaccattatgcgcattattgactga

SEQ ID NO: 231770 - DNA, 480 bp, Klebsiella pneumoniae
atggaacaacaactcccgctgtttgcccgcgagttagcccccactgaccagcagaccatccgggtagctttaaccctgctggaacgccagctacgtgaacccggcgcgccatttacctccagcaatgccgtccgcgactggctgcgtctgcagcttgcgtcactggagcgggaagaatttaccgtcctctttcttgataaccagcatcgcctggtagcccacgaaaccctcttcaccggcaccatcaaccatacgcaggtccatccccgcgaagtggtgaaatccggtctcaggtataacgcagcagctgccgtgctggcacataaccatccctccggggaggcggagcccagtcaggccgatcgtcaggtcactatgcgtattcagcgggcgctggaactggtggatatccgtctgctggatcacctggtggtgggtggtatggaaatcacctcgtttgcagaacgtggctggctatag

SEQ ID NO: 231771 - DNA, 222 bp, Klebsiella pneumoniae
atgaaaattatcagtaaacgtcaggcgatggcgatataccgccagtatccgcagtcccggctgtttcgcttctgtacaggcaaatacaaatggtccggcagcgtctgccactataccgggcgggaagtccaggatatcagcggtgtactcgccgtctttgcagagcgccgtcaggaccgcagcggcccgtatgtcgtcctgcgcagtgtcacgctcaattaa

SEQ ID NO: 231772 - DNA, 360 bp, Klebsiella pneumoniae
ttgtcgaatgaaataccggcagtaaaccacgatatcgctgaaccctggtggggccttaagcccaccgtcacaccgtgctttggcgcacgactggtgcaggagggcaaccaggtgcactatctcgccgaccgcgccagcatcaccggtcagttcagcgaggcggatttacgccatcttgaccaagcctttccggtactactcaaacagctggaattgatgctggtttccggtgaactcaatcctcaccatcagcacggcgttacgctctacgcaaaagggttgacctgcgaagccgattcactcggctcgcatggctacatttatattgcgatttatccaacgcctgcagcaaccgcgtaa

SEQ ID NO: 231773 - DNA, 378 bp, Klebsiella pneumoniae
atgcaaacccaaccgctatcctccacgcaggaggcttcgccacgcccgtcaccggtggatatctggcaacagcttctgagttacctgctggatcgtcactacggtctgacgcttaacgacacgccattaggtcacgatggcgtaattcaggagcatatcgacgcgggtatctcactgtgtgacgccgtaaattttatcgtggaaaagtacgatctggtgcgtaccgatcgtcccggtttcagcgcagaaacacagttgccgcttctcaacagtatcgatattctccgcgcccgtaaggcctgtggactgatgacacgcaacgactacagaacggtgaccgacatcaccaccggtaaatactgtggggtgcagccatga

SEQ ID NO: 231774 - DNA, 432 bp, Klebsiella pneumoniae
atgggccggatcgccgtcgatatcgacggtatcgagctggctgcgctgattgatgtggtctgtgacaacggttattcacttcgcgttgctgatgagcccgggaagctggttgttgaagatccactgcctcctgtcacgcgcattaacggcatccagagcagtaccgcgcatattacccgtcaggataacactattctggaccagacctctcttcagcgacatgacggcagcaacagcgactggatattgaacacctgctacggcttgaacgcccgcttatacccggtcctggagctgaagcgaatggggttatcaaaggcctgtcgccggttagtggtgacgcttatgcgtcgtgacctgctccccgctgacatcatccactttgatgcttcaggtgaagtgctgcccggctttaccacctttgactggtga

SEQ ID NO: 231775 - DNA, 204 bp, Klebsiella pneumoniae
atgccaccattaaccactgaaaccgccctcagtattctgatcgactggctgcaggaaaacatatgttgcgacagcaacatcatcttcgataacgacgaagacaataccgattcagcggcgctgttaccatggattgaacaggcgctcagggatgttcgcgatcttcgtcatcttcagcttctgcaacaggccggtacagattag

SEQ ID NO: 231776 - DNA, 846 bp, Klebsiella pneumoniae
atgtcagaacttactctcatcgaacccgaagtattaaccggtcacaccgacgtgatttgttccaccagcattgagcgcatcgtcaccggacgtaatgccgcgctggcgcagattgaaacgttgatacaacagcttgacgatatttcaacgctgacccacagtatcggcggaaaaacagcgctggactgggcgatgaagcagaatttccgttgcggctgctggttgatggaaaaaccagaagtggcgatgaaagccattacctgcaatctcgatcgcggtatatggcgagacctcatgaagaagtcagggatgctcagtctgatggatgctgcagcccgtgagcagtggtacaacagcctggaaaaggacgacattccggctgtcagcgaagagaatattatgagcacctttgagcaactgcatctgaacaagggggcggtgtttgagcgcggagtgatcaatgtgttcaaaggcttaagctgggactatcggacgaacagcccctgtaagtttggcgcgaaaatcattgtgacgggactggtcaaattcgaccgttggggatttgggcttaactggggctggcaacgtgaccggttagcggatcttgaacgtatgctgatgcttctggacggtaaaccagttcccgacaaccgtgccgacgtcactcgtcgactcggcgatcatatccatgagaacaggcacagcaatcgttacgaggacgagatgtttgccatcaaatattttcagaagggaacagcacatatcacctttaagcgacaagaactggtcgataaactgaatgacatcatcgcccaacactatccggggatgctggctgctaagtaa

SEQ ID NO: 231777 - DNA, 810 bp, Klebsiella pneumoniae
atggaaaaaacatatacgattaatggaagaattgccttttttcctcagcgtagcgctctaatacttattgctgacgagacgaaaacggtttccttaaatatgccggccagccgctgtttattactgcttattcagcatgatggcaatactgttgcccgcgaaaccttttttgaggaagtgtggataaagcatggcgctcaggtaaccagcaacgatttttaccagaatatttccctgttacgtcgggcatttaaggagctgggggtagacgaggatattattattacggtgccgagggtaggcgtcaggctggatgcaacattaacggttacggaatctcagccgcgcgatgtagagaaggcaccgacggcggaggagccacaagcacccgttgacgagcctgttcataaggaggtcgcagctgcgagtttgcccgaaaaaaagcggttaaggccgcgacgctctcttttgtgggggcttgcggcgctgctgagttgtctggtttgtggatttgttgcgtggcaaacagaattcgaatcttatttgcaaagttattcgcccataattgctaaattttcgcaacaatgtcacttctttgccaataatgacgtagttgaccatgttcgtcatgtcaattttatcaagcgcagtaaatttgaatgcgaagaatatccatggatttatttgacgctttatcccgggcaagcgcgggtgtcggtgattcgctgccgtcagccatttagtcaatggcgtgataatcaatgcctcaccaaatattacattaaggaggtagtcaatgcgccggcgtga

SEQ ID NO: 231778 - DNA, 471 bp, Klebsiella pneumoniae
atgcgccggcgtgaaattaaatggttaatcgctatcgtatttatcggagtattaagcggtatgacgataaaatcctggcaatactggcagcgcaatcatttccagtgcagcggtgagatgcggctattaaactcaggttatcagggcgatatttcattacgcttcgtatttgatagcacccgtgggctggtgattgtccggggagagattacgccgccgcagggtgaatcgtttaccatcaaccagaacatctggtttagctttacccgcgacggccagcactacttcctgcgatcggaaaccgtctctgtcagcatcggcgaaaccgagcaggagaagcatattaacaacatcctgcccaagtttttcctgcagccgcaggtgccgttttaccttaatattcagcggctcaatcaacgaacccggctgctgtataccagccgggcgccgtctttgctttgcgaaacctga

SEQ ID NO: 231779 - DNA, 1239 bp, Klebsiella pneumoniae
atgaaaggcagtaacatacgtcgttggggcgccgcgctggcggtagtgattatcgccgggaccgcctactggttctggcacgatcgtggaacgagcggcagcgggacgcccgcagccgggcagggtccgcaggggccgggcggcgcgcgccatggtcgctttggcggcgcgctggcgccggtgcaggccgccaccgcgaccgaacaagcggtgccgcgctatcttaccgggctgggtaccgtgacggcggccaataccgtcaccgtccgcagccgggtcgacggccagctgctgagccttcacttccaggaggggcagcaggtcaaagccggcgatctgctggcgcagatcgaccccagccagtttaaggtggcccttgcccaggcgcagggtcagctggcgaaagataacgccaccctggccaacgcccgccgcgatctggcccgttaccagcagctggtgaaaaccaacctcgtctcccgccaggagctcgacacccagcagtcgctggtggtggaatccgccggcaccgtgaaggccgatgaagcggccgtcgccagcgcccagctgcagctcgactggacgcgcatcaccgcgccgattgacggccgcgtcggcttaaagcaggtggatatcggcaaccagatttccagcggggataccaccgggattgtggttctcacccagacgcacccgatcgacgtggtctttaccctgccggaaagcaccatcgccacggtggtgcaggcgcagaaagcgggcaaagcgctcagcgtcgaagcctgggaccgcaccaataagcagaaaatcagcgtcggggagctgctgagcctcgacaaccagatcgatgcgaccaccgggaccatcaagctgaaggcgcgctttagcaatctggacgacgccctgttccccaaccagttcgttaacgcccgcctgctggtggatacccagcagaacgcggtggtgatccctgccgccgccctgcagatgggcaacgaagggcattttgtatgggtgctgaacgatgagaataaggtcagcaaacacagcgtcaccccggggatccaggacagccagaaagtggtcatcagcgccgggctttccgccggggatcgcgtggtcaccgacgggattgaccgcctgaccgaaggggcgaaagtggaagttgtcaccgccagcggcagcgagcaaacgcagcccgccccgcgccagagcggtaaacacggagcgcgttcctga

SEQ ID NO: 231780 - DNA, 126 bp, Klebsiella pneumoniae
atggaggcgatctggaaaatcgaagtggaagatttcccggcgtttattctcgtcgatgataaaggcaacgatttcttccagcagatccagaacaagcagtgcgccggctgtaaacagcacggctaa

SEQ ID NO: 231781 - DNA, 792 bp, Klebsiella pneumoniae
atggctttcttcaccatagagaaaagattacgcagtgatggaactgcccgttatcgctgtactgtagccgttaaacaaaatggtaagtacgtccaccgggagaacaaaaccttctccaagaacacccttgcgaagtcctggggtgctaaacgtgtagcatacattgaagagcatggtatccaagaccccgccacaaatgcgcagacgaactctgttataactgttggtgacctgcttactcagtatgagaaccacccaaacataacgcttggcgcatcaaaaagaagctctctccgcacacttggtcgttccttcctggcagacatcagactttcggagttatcggcaaagcatattatcgagcattgccaagccagaaaagcgcaagggcttgcaccttctactatttctcaggacgtatcctatttaagcgttgcgcttgaagctgccagacctctctttggagctaacgctaatctaaacgaattgtcagatgccaaagtttggttgagaaatatgggtatcataggcccatcacagcgacgcactcgacgagcaagttctgtagaagttgatcaaatatatgaagcactcaagatgaaggctgaaacggcttatacaggcgcgccattacatcaaatatttatgttttccattcttacctgcatgagaataggtgaagtttgtcgcattctctgggatgatgttgatgaaaatcagcgttccgtaatcgtgagagaccgtaaagatccgagaaatgaagtggtcaacaaaaactggccaccgcgttag

SEQ ID NO: 231782 - DNA, 819 bp, Klebsiella pneumoniae
atgggcgtgtcgcgtgcgcagctgtcactgcggattaaccgttctgccgactggcaggacaggcgctgtaaccggcgtaatgaagaagcagacgcagaaatactgtcggctatcctcaacattatcagcgatatgccgagttatggttatcgacgcgtgtggggcatcctgcgcaagcaacgtcgcacagagggacagccacctgtgaatgccaaacggctttacaggataatgcgtgagcatcacctgttgttgcatgacaaatcagcgcggccaaagcgtgagcataagggcaaaatcgcggtggcagaaagcgatatgcgctggtgttcagacggcttcgagttcaactgcgacaacggtgaaaaactgcgggtcacgttctcgctggactgctgtgacagagaggccatagactgggcagcgagcacgggaggctacgacagttcgacggtgcaggatgtgatgctgaggtcggtggaaaagcgcttcggtgacaggttaccggacacaccggtgcagtggctgacggacaacggttcagcgtatacggcgcatgaaacgcggaggttcgcggtagagctgaatctggagccctgcacaacagcggtgagcagcccacagagcaatggcatggctgaacggttcgtgaaaacgatgaaggaagattacatcgcgttcatgcccaaaccggatgtgagaacagcgctacagagccttgcagcggcgttcaatcactataatgaaaaccacccgcatagtgcgctgggataccactctccgagggaataccggcggcagcgggcatcgttaacttaa

SEQ ID NO: 231783 - DNA, 1392 bp, Klebsiella pneumoniae
atgttcccgctgttaaaaacgggcggactggccgacgtcaccggcgcgctcccggcggcgcaaattgccgaggggctggatacccgcgtgctgctgcctgggtttccggcgatccgcaacggggttcaggatccgcaggtggtggccagcagggagacattcgccgggcggatgacgctgctgtttggccattttaacggtgtgggcatctatctgattgatgccccgcatctctatgaccggacgggtaatccttatcataaccagcagatgcaggattatcctgataacgtcctgcgtttcgcgttgctgagctgggtcggggccgagcttgccggtggtcttgacccgttctggcgtcctgaaatcgtccacgcccatgactggcacgcgggtctcaccccggcttatctggccacccgcggcaacccggccaaatcggtgtttacggtgcacaacattgcctatcaggggttgtttcaggcccggcatatggcggagatcgcgttaccgtggtcgttcttccagatgcacggggtggagtttaatgggcaaatctccttccttaaggcgggtctctatttcgctgaccatatcaccaccgtcagcccgacatatgcccgtgaaattaccgaaccacagtacgcgtttggtctggaagagctgctgcggcaacgtcagcgggaagggcgactgtcggggatcctgaacggggttgacaaaaatatctgggatccgcgccgcgatccgctgctggcagcgccttacgaccagaattcactggcggagaaagcgaagaacaagcagcagctgcagacgtcgctggggctgaaggcggacgatcgggcgctgctgttcaccgttgtgagccggctgaccagccagaaggggctggatcttctgtttggcgcgctgccgggaattatatctaagggagggcagctggcgctgctgggatccggggacccggatttgcaggcccgttttctgaccgccgaggcgcaataccccgggcaggtgagtatccggatcggctacgacgaggcgctgtcgcatcagatgattggcggcgccgacgtcatcctggtgcccagccgttttgaaccctgcggtctgacccagctttatggtctgcgctacggcacattaccgctggttcgccgtaccggcggactggcggataccgtcgccgactgttcgctcgaaaaccttgttgacgggctcgcgaccggatttgtgtttaccgacagcgagacggaatcgttattacatgctatccaccgggccagtgtcctgtggtcgcgtccctcgctgtggcgttacgtgcagcggcaggcgatgagcatggattttagctggcaaagtgccgcggtgatgctgccaacttactga

SEQ ID NO: 231784 - DNA, 861 bp, Klebsiella pneumoniae
atgactaaattaattaaattcttgatattctgctatataataatatcgccattaactcaagcagaaactatatcttctggtcgcgttgatgatcagtcatggcaaactcgtcaagaagcttttgatcgagagcaacatgaaaattatatagaattcaaagttaaacaaaataatcttcctgataatcaaagatcaaagctattaacaaccaatgaatattggttggtaaataaaaaacaggacttatggattgggatatttgatgggaaatatgtaaaaatacccgcaggtacttatgttaatattcctggcgaaacgttatttccagaaagcataattcgaataaaaagaggtggtaaaatatctcaatttttattactaaatagtaatggtaaatatccatccgtttgtgtcaatcgaagagatgggatattgtttgatgctcaggattatatggttttttatactggatgtgcccgtggtgataaattatactctaaaaaattaggcattttttataatatactattttacagtaagacgtttgatacaatattgcagcttgatgaatttcctgattcggcattgcagggagatagtatcagcgttttcaaaaaatcggttgaaaaggttagagattattatatcgattacagtattgagtcagcatttaagtttacaggttcagatcaggttattgttgttgataaaaaaactggaaaaccccaggaaaaggtaccagaaatagatgataacggaagtcctgtcatgaaaaatggaaaaccagttatgattgatgatccagatggattccaacctgtcattttaaaaagacttcctgaagtcactgttgttgattaa

SEQ ID NO: 231785 - DNA, 1173 bp, Klebsiella pneumoniae
atggcgtacctcagcgaagtcagcgtggagcagctggaactggtctccagcgccctgaaagtgatccgcacggtcagggtgaaaaaggcctgcacccgatgtgactgtatcgttgaagcacctgcgccatcacgtcccatcgatcggggtatcgccgggccgggtctgctggcccgcgtgttaacggccaaatactgcgaacacctgccgctgtatcgccagtgcgaaatctttgcccgtcagggcgtggatctgagccgggctctgctctccaactgggtggatgcatgttgccggttaatggccccgctggatgaggccctttaccactacgtgatggactgccacaaactgcatacggatgacactccggttccggtgcttgcaccgggcagaaagaagacgaaaaccgggcgtatctggacgtatgtacgtgacgacagaagcgcaggttcatcagatccgccagcggcatggttcgccttctcgccagaccggcagggaaaacatcctcagcaacaccttcgccactatcatggtgtgctgcaggcggatgccttcgcaggcttcgatcggttgttcagtccggaacgtgaaggagggccgctgacagaagccgcatgttgggcccatgcccgccgaaaaatccatgatgtctatataagcactcacacagcgacagcggaagaagccctgaaacgtatcggtgagctgtacgcgatagaagaagaaatacgcggcctcacgacagaagagcgtctggcagccagacaatcgcaaagcaaaccactgctggcatcgctgcatgaatggctggtagaaaaaaatgagacgctgtcgaaaaagtcccgtctgggcgaagagttcgcttatgtcctgaaccagtgggatgcgctgtgctactactgtgaagatggcctggcagagcctgataacaacgctgccgaacgagcccttcgtgccgtctgtcttgggaaaaagaattttatcttcttcggcagcgaccacggtggtgagcgcggagccctgctgtacggactgatcgggacgtgcaggctgaatggtatcgatccggaagcctaccttcgccatatcctgagcgtactgccggagtggcccagcaacaaagtggccgaactgctgccatggaacgtggttcataccgataaataa

SEQ ID NO: 231786 - DNA, 879 bp, Klebsiella pneumoniae
ttgattcgcgcaagtatgctaggagaacaaaccgctgaaaatgacagtcagttactgctgaataactttatagaaactcctgaataccgttcagtaattgagacaaaagatagtacagttgtcgtagggcgtagaggtactggaaagagtgcaatgtttgcaaaattggcaaacgaatggggtgctcagaaagcaacaaacattattgcaattgcgcctgaagattatcaaaccattggatttagagggttatttaaaaattttgaagttaaatattcatatgtcaggtctgtagctaaaatgctatggaaatatggattgttgatggaaatgctaacccacctttctaagagctttaaaacaaaggataaaataagagatgatcctatagtacaaaatcacataaaaaaatggagtgtatcaaataaagattttttcaacaggctatcaactgtaacttcagcatatctaaaaggtagtgaagatgtagaaattaaaataggtggacttcacaactttcttgagatagatgatttagaggatgcgttagataatttactaaaaaactctccggttagattttgtattttaattgacagaatggatgaaggatatgaaaatgatgaaggaggggcagccatagtatctggagcaatatcagtttcctcggaatttaataaacgacatgatcatattagagctgtaatgtttcaacgagacaacattttacgctcagtccaaaaattcgatcctgattatacaaggaatattgaaggggaggttattacgatccattgggacacatatcaactccagaatttagtcactaaaaggctgaattcagcttttaatttaaacctaaatagctgcgcggaatag

SEQ ID NO: 231787 - DNA, 1044 bp, Klebsiella pneumoniae
atgcacgttcctgaagcaggtcaaaaacttgtctatgaacgattaaaaaaaatgtctaatgatttcaatattcatttgatttctttcgtaaacgagttagagtcatctttttttaaaccacatgactatgatttttgttgtagtgctcatttttataaaataactaaaatgcagagaataaaaaacatcgtcctcaattatcgtctcccatattacattgctgcaagaactgatccgcgtattaattcgtgtatatctaaaataataatggaatataatattaccggttttcatgttgagtatgaacaaggtattgttttcatcccgcctcactacttggataagagcactgcagtcttgcatgatgtaatgtcacaatcaattctccgatttcaagagaatgccgataatgcattctcacgttttttattcaaatggcaatttgcaaaactggtgcatttcgagaaatttttttttaaaagaattgcaaagatcatagtgttaaataaaaaggatgaaactcttgttaatcaattgtcttttcaacaggcaaatgtggaaatagattatccaggtgtttcagaaaaattttatttaattaaacgtaatgaatcattgattgaaaaaggatcgcttatgttttggggggcaatgaataggaaagaaaatattgatgcagttcaatattttgtatgtaaaatatttcctttgatattaaattcttgtccatcagctaaattttatattgtaggggctaatccacccgaaaaaatcaagaagttgaattcagagaacataattgttactggttttgtggaggaccctatatttatttttgaaaggattcaaatatcagtagtatctctgttacaaggcgctggaataaagataaaagtcttagaaactttagctgcaaagataccaacggtctcaacatctgtaggtggtgaaggcgttattgatcctgataatcttcttcatattgctgatgatccagataaatttgctagaaaggtcgtcgatttaatcaatagcaattcataa

SEQ ID NO: 231788 - DNA, 240 bp, Klebsiella pneumoniae
atggctattaccctgcatcaaaaagaaatcatgattctcatgacggaccccaacttaaaagtgccggtccaacacaccaacttcccttttgagcatccatacaaaattgattcggctatagagcagctatatcggatgggatacattacagcaatacagtcgaaatctgattctagttggctcgccacttcaatcacaccaaaaggttatgtctttcttaacgaggcagggttggtttaa

SEQ ID NO: 231789 - DNA, 855 bp, Klebsiella pneumoniae
  misc_feature (792)..(801): n is a, c, g, or t
atgctgactattatggatgcgttaattaacaatgacgatattatagttgaagctttgattccacataaaacaggagaattgttttctattttaaaggaaaaaaaagttgctgtacataagtataaatattatacatgcaggtataactgtgataccaaggctatatttataccaatccgatatactaaagctcttctaaaggttggtgtttcatttttctcagcaattttatggctaataaaaaatcgggaaaggtttaatgtggtgtatagtaatacatcagatatatatattggtgcatttatttcgatactagcaaaaataccacacatatggcatttgcgtgagtttggtattgaagaccaaaactgtcgacatattgttggcgataaattattttacaagtttgccgggaaattctcgaagcgactgatttgtatttctcaagcattaaaaagaaaagtaattagatttgttgatgattctaaagttagagtcgtttataacgatataattctttcaagcaataatggaaggggttatcaggcaagaactcttgggggagctatgctttttaagccgaagatacttattgctggttcacttattccaggtaaggggcaattagatgtgattttggcaattaatgaattaaagaatataggagttatgtatgaggtaggtatcgctggtgatgatactacagcatacgcaaattttttaaagaaccaagtcaaagaattaaagcttgagaaagatgttaaatttttaggatatataagtgaccttcannnnnnnnnngtgaatataacattggtgtcatatcttcaaatgcagaagcatttggtagggtaa

SEQ ID NO: 231790 - DNA, 351 bp, Klebsiella pneumoniae
atgatatccctcccgtcaggcacccgcatctggctggtcgccggggccacggatatgcgtaaatccttcaacgggctgggcgaacagatacaccacgttctggatgaggatcccttctccggccatctgtttatcttccggggacgccgtggcgataccgtgaaaatactctgggctgatgctgatggtctgtgcctgtttatcaaacgcctggaagagggacagtttgtctggcctgctgtacgcgacggcaaaatcgcgatcacccgctcacaacttgccatgctccttgataagctggactggcgccagccaaaaatatcccgccttaactcactgacaatgttgtaa

SEQ ID NO: 231791 - DNA, 213 bp, Klebsiella pneumoniae
atgctctatctcgcgctcttcgttctctattttctcttctgcgcgggccagtgcagaacgcaggaacgactcagtctctgcaacgagactgagctgactgtctttctggcgaagcgcgtcttccagcgcagcgatacgggcgagatagtcgtgattcataaccgcttttacaatgcggttatgattttttttacaacattgtcagtgagttaa

SEQ ID NO: 231792 - DNA, 246 bp, Klebsiella pneumoniae
atgactatcggccttgatggcattaacaggctcataagacccctctatttccctgaattttcgtctgaactgctcgagggggctgaaacactcgtgcttatacccttcgcgaaggtatataacgcgctgtgtttggggctcccagcgtatgaccctgaccgggacgccgtagtgatctctgaaccatcggttgagctctcgcatactttctccgcctggccgttaaagtcccctaccacccactga

SEQ ID NO: 231793 - DNA, 558 bp, Klebsiella pneumoniae
atggcaatgttgctagcattaggttattattttattcacaaactttcaaaaaacaatagaatagtcaaatattatttcatatttgcatcttttccattagcaatattttttcttattacaaacatatctgcaataagtaatcgtgacgttggtgcatcgtcaagttttctttccagaattataattctcaaagaatacttatcaaatatgactatctttgatttgttttttggagggaaatttggacaagcaactgcatttgcagttcttgataatagtagttccagattcattgcagacaattcgtttcttgttattctggtgagcatgggaataatagctttaatttgttatattgttttttttattaaatttttatatcttgataaagataaaatcatgtcaattacactgtttttctacggaatgacagccaatatctttgatttaagtccagtgtcgcaacttttattctttacgctgggtttcatttgggcaagtaaatccttttacatagtagataatcgattcactataaatcaagttggtattaaatga

SEQ ID NO: 231794 - DNA, 1092 bp, Klebsiella pneumoniae
atgactattcgatcatttaaaggagaagtgcttgagctttcaccggaagttagaggtctgcttgataatggaatggattttttaaaaaaggctcagatcgaattcgcaacgtctccaacacattctattgttagtttttggacggctgtagaattgttactcaaagttccgcttgcacatgaacattggtcgcttgtgtgtagcggaaaaaaaatcatacgttcgaaatatcttactggtgatttccagtcaataactttttctgagacatgtgaccggttgagggatgttctcgagaaacctctacatgcttccactgtgtcatcatttgatataattaggcagcatagaaatcgagttgttcatttttatcacgatgcattaaatgaccaagccaaggagaaactgctgattgagcaggctgatgcttggttcgccctgaatcggttgatgcgtgaagattggaaatctctctttgaaggagcattgggtcattatcttgcaagtcaagaaactcaattgctcataaataacagttattatgcagatattaaatttcagcaggttaagaaaatattagaggaacatgtcagaaagggaggtcgagttattgagtgttatttatgcaagaaagttgctgcacctcttaaaaccacgtttgaatttgacgagtattcgtttaagtcatcttcatgtcttgtatgcagtactacacaggacagattggttgaattttcatgcccagaatgcgatgaaaatcaaatactgaaggcttgggatgaatcggactttgaatgtagtaagtgccaacataccgtttctcgttatgagctttttgatacgagtagtttttcaccagatgaatatggcactttgtctgtccccgcaggatgttcagagtgtgagctgaacgatactgtctgtgagttcggagaaaaatacctatgcacttactgttttggaattttcgaaactgttgaacagtgcgaatattgttcttatcacagtactagtgttgatgagtttagcggaatgactggctgtagtttctgcgatggccaccgagaaacctggcctgaagacgatgactga

SEQ ID NO: 231795 - DNA, 372 bp, Klebsiella pneumoniae
atgcgcaggtcacatcttgtgctggtatcgactcaagcgttagatttactcaatgaactgaagatcatgactgggaactatcgttatgtttttccggggcggaacgatccgaacaagccgatgagcgaagccagtatcaatcaggttatcaagcgaattggctttgggggaaaagttacgggacatggttttagatatatgctatcagcgattttacatgaagaaggttttgattcatcatatattgaaattcaattagctcaggttgataaaaatagtatacgtgggacttacaatcatgctcaatatttagagaaaagacgtcatatgatgcaatgttatagtgaatatatgacagatggggatatttaa

SEQ ID NO: 231796 - DNA, 1242 bp, Klebsiella pneumoniae
atgatgtttgaaaaagaaattaatgctaggtattttctaggaagggttaaaaaagctcattataatacttcagttgtaattcttggtcaaaatggagaagggaaaagtaggctgctcgttgatataatagggtatgccaaagataacaactataccaatgtcatagctgtatctacgagcccctttgataaatttccgataaggaaaaagtttagcggtatagattacagctatgtcggtgtgaaaggaggtacgacaggtaactctatattgtctttgatcggttcggcttcattggggttattgaatcaaaataaatttaatggcatttatgtagaacgaatcctgtcttttttaggtgcttcttctgaagttgaatatgtattcaaagttaatcagaaaatatttcaaaagcaaaattactcagatgataaaaatggtccagatatccatcattatcatcataatggattttttggaaaagatttacatttttctgacaatgaactttataacattaataaagctatagacttattaacgtacttagttgatagcaataaaaacttcaaagttagattgaagattggtagtgaaggttacataaaaactaaagatgttttcattgataaccttaatagtaagcttttaacattacttgatcatgatctcataaagttaattgattttaggatagaaaaaaaagagtttggttggatgtcattgaggcttgcaagttcaggggagcaatgtattctattatcgatgctaggcattgccacaaatatcactgataactctttaattcttatagatgagcctgagatcagtctccatcctgagtggcaagagagatatatatcacttctgatgaggatttttgagagatataattcatgtctttttatcattgctactcattctccacaaatagtatcgaaacttgatgcctatagatcatatatttacactattaaaaatgatgaactagtaagtgcttctgagtatgtgaaaagatcttcagactttcaattagccaacctatttctagctcctggttataaaaatgaatatttaacaagagagctaataacattcctcacgtctccgcaagaatactatgcagataaaggttgtgcagaaataataaaaattatctctttgagagataatattgataaagatgatcctgtatttaagttgattcaattggctcgtaaagtaattgcggagatatcgtaa

SEQ ID NO: 231797 - DNA, 699 bp, Klebsiella pneumoniae
atgcctctgaattgcattgtgtatgaaggtgaggatcttgaaacatatagagattataatgcgctgcctaacgataataaagatggaagaatatgggattcggaggagcgtaacatttgtagaattaaaaaatcaattaaagaccattatattattgctcaggattacacatgtccttattgtaaacaaaggattgaggttgaccataatggagcttgggatgccgaacatataatacctaaaagtagtcatccaagctttgtttttgagcctttaaatttatgtgtttcatgcaaggattgtaataatgaaaaaagggacaagactgtattagagaataataacaggagaagacttcctattagaagtgaagattacattattgtccatcctcattttgacgattatgatgagcatataaaagtaattgaggttgcgggttattatataccacgaacagataaaggtagaaaaacaatagaaaagtgtggtttattaagatttgcatataaatacgcaaactatggaggaacttcacaggaaaataaagaaaccattctaacattagccaattgtctactagatgctaatactccggctgatgaacatgcctttttaggtgtgatttcagatgcagtggagactggaaagaaactatcaaaaacagcatttctgcagcaatttggagtaagggaataa

SEQ ID NO: 231798 - DNA, 621 bp, Klebsiella pneumoniae
atgagcaaaaagaaagaatcaaccagtgcattagccagatactggaaaatatatggtggaactggggctatatttaaaagctgctatttttggtctgctttacttatgactgtgattctttacccatcttggtctcataaaggatggtggaatgatattttatcattgatgccaaacctacttggattttcgttaggtggttttgctatgtggatagcaattggtgatgaagcatttaaaaaaataataactggtgatgagataaatgagaaaggagaagtggaaagttcaccgtacatgtcagtaaatgcaacttttgtacattttatattattgcagttgttaacaataattactgcacttattacaaaagcatatagttctattcttattgataatgcgtttatgtattattatattggggatagttataagtacatcttgttgggttttagcttttttgcctactttatatttatatactctgttttctctgcattagctgctgtcttggctattttcagagtttcaagctggtatgataaatttatgacactacgaaatatacaggaggaatctaagaaaaaaaaaggagatgctatcacagagaaatctagctaa

SEQ ID NO: 231799 - DNA, 267 bp, Klebsiella pneumoniae; identical to SEQ ID NO: 227150

SEQ ID NO: 231800 - DNA, 549 bp, Klebsiella pneumoniae
ttgccggtgcgtaatccctcgccactggccacaccggaagcgctgaaccagagctggtctgtcgactttatgcatgatgccctggtctgtggacgtcgttttcgcacgttcaatgccgttgatgactttaaccgtgaggcgttatcgattgaaatcgatctgaatctgccagctctgcgcgtggtccgtgtgcttgacaggatcgcggcaaatcgcggctatcctgtcatgctacgcatggataatggtccggaatttatctcacttgcactggctgaattggcagagcaacatgcagtaaaactggagtttatccagccgggtaagccgacacagaacgcttttattgagcgctttaaccgaacataccgtacagaaatactcgatttttatctgttcagaacgctgaatgaagtgcgggaaatcacggaaagatgggtgtcagaatataacggtgaacgccctcatgaatcactgaacaatatgacaccggaggaataccgacagcaccattatttggccgggatctcaaaaaatgcatggaactaa

SEQ ID NO: 231801 - DNA, 630 bp, Klebsiella pneumoniae
atgttagataatttggtcaagtcccaattgcttagggcagatcttgtagctgcagatgagcatttcgttgcgcacggatacaccggtatgacggggatagttctactcaaatcagcattagtggcagtgtcgaatctggttgattttgaatcatcaattagtcgtttgtacaaggaagcaccacatctatcggagatctacaaaactgcttctaaggagtttaagttcgctaagtacttacgtaataaatttgcagcgcatatacatcctgaattattagccaaggctatagagtggaagcctgagcttaggttcctcgcagatagaatggatgaacaacaaatcatgcagttttgcaatctttgcgtactcgaaacagcaataaacacatacgttgatcaaagcggagatcatctggtttttgactccgagactgacttattcttcccgaatgacactgagcgtttcagcaggtttttagagaaagtaattagaacaggaattcagtatcttactgaactgggagttgtgctaagaagtaaaatagataagccagcagaagggttagagtctcttgagtattggaaaactgcgggattaacagagttcaattttattgctaaacaataa

SEQ ID NO: 231802 - DNA, 2265 bp, Klebsiella pneumoniae
atggcacgttctagatatgacgtagaaattaatggcgacaacaaaggtctaacaacggccgttaataaatctatggatgaactgaacaaactcaatgaggtcgccggaggattattcagtaatttaaccggaccacttggtagtctccaaggtggtattaataccataaacacaatgaaccctgctttacgtgctcttggcgtagcagggttagcggctggtgctggactcgcagcaatcaataaagcagcggatacggttaatacgcttaatcagattagtacaaacacaggtgtatctgttgagatgcttcaaaaactccagaaccagtttaaagatactgggatggaagccgagaagttcggtgatatcaacaaagatgcaatggataaacttggtgactcattcagaaacggtggcggtggcgtagctgatgacctgaaagaatggggtatagaactacaagaatataccaaatatgctggtgatgctgaaggtggtatcaaagctgtaattgatactttctataaaatgaaagaagctggtaaatctcatgctgaaatcactaacgcaatggaaacaatggcgagtgattcaagtcatttgattacgactcttgagaagtacagttctacacaagaagctcttaacagtattaatagacaacacgctaatattactaaagaaacttccgaggaatacaagaacttccagaggaatatcaatactctgaatagtaatgttcaggacttaactgttcaagctgttactccattagttgctgaaatcaatcacctttggtcgttgtttaacaaagagtggaccaagagcgatatcatggacgctcttaaacagttctggtacggcggtgatacggctattgcaaagcttaaccgttgggttgatggcgttgatgaagaaggatatagcacagcatctaagcaacgggctgaaaatcttaaacagatggcagctgatttagctggtgatgttaaaacatctgttgaccaagccgaagaagcaactgctgctcaaaaaaacatccttaagaaacagcaagaagaaaaagataaagctgatgctaaggctaaagccgcgcgtgataaggctcttgctgacgctaagcgtaacgcagctgagcaattaagagttcaacaagaacttcttaaaggtctacagtcattatctgagtcttcgtctggtgctaatctgattgattataacgctgagggaattaagttaatccagaacgttaacactcaggcagagttattcaaaaatataatgaagaacctcactgacgagtataaaaattcgttcagagaaatgagtggtaaagaacttggtgatagtcttactaagttaaaagactattacagtactcgcgagttacttcttaaacagtcacttgaaaatcagaaaatcactcagaagcagtacaatgaagaagttcagagaatgcaggctgaacagaaagctattgaagatgctcaagtaggtatagatggaaaaggaaatcaactaaaagacctgtcgagtattggctttactacctcagacgaagaaattcagctccagcagcagaaacttcatgagcaattccagatgatgtacgagaacaaccagtcgatgtatgaagctggtctggtacagcatgatgattttcttaaacagaaacaacgtcttgaccaagcgtatgctattaaatctcaagctattgaacgtcaatctgcacagcagaaacttcaaatcgctaatgatttaacttctggcataagctcggctatgacaggtatgttaggtgagaacaacaaagctgctcaagcaatgtttgcagtgtctaaaggagtggctattgcaaatggtatgatgaacgctcatgagtctgctacgactgctatggccaaatatccaggaccattagggtatgcactggcggcgtcatcatacgctcgtgttcttactgaagtaatgcagatgaaatctatgtctctcggtcaattccatgatggtatcgataatgttcctaacacaggtacttatctgttacaagagggtgagcgagtagtagataatcggttgaaccaagacctaaaagacttcttaggcaaacaacagactggtaaaacagacagtcaaccaatcgatgcatctatccatatctctggatctgtgaatggtgaacgtgagttaatgcagataatgaaacgtcaacaaaaaatcctagctgatattgttcaagatgctaatcggcgtaaaatgtaa

SEQ ID NO: 231803 - DNA, 351 bp, Klebsiella pneumoniae
atgcgtaaaggactcactggagatgaaatactctccatgagtatgaaagaattctacatggtatatctgttcgatactttcattgagcctcaaggtcctgtcatgaacgatttctatcaggcgcgtctggcgcatagtgtaatagcttctaatcctaatcttactgctgaaggccgtaagaaaatcaatatgaaagatttctatctgttgaaggataaagtattcaaaagtcctgaggaactcaaaaagaaaaacagaaagagcaagaacgtaaacgaaaagctcttgaaagtatgtttgaacctgaacttctggctaaagctagaaagtcaatcaaataaggtgggataa

SEQ ID NO: 231804 - DNA, 315 bp, Klebsiella pneumoniae
atgtctaaatttaactttgaagaaatgattgctgctcttagcccgaaacgtgaagcagtagaactaaatggctttaaattctatgctcgtccaatgactgtatctgaatttggtgaagctttctatcagggtaaagataaagaagaccgaaacgatatcatgatcttggaatgcattgaacatgaagatggctctaaagttttcgactcacttgagcaagtcaaagctctttatacgactgttcgcgctcaacttgctggtgccgttactcgcgcaagtatctttactgaaactgtagaagaactggaaaagtaa

SEQ ID NO: 231805 - DNA, 486 bp, Klebsiella pneumoniae
atgacattatatgaaatgctccgctttgatgaaggcgagaaactacaagtttataaagacaccgaaggatattggactgtaggtattggtcatttattgactaagaaccctaccaaggaacaagccatcgcttgtcttgataaagaactaaaccgagttacttctggtgttatctcaaagccagagtcagaacagctgttcaatcaggacacttctagggcactccaggacatttcccgctcagaattgagttccatatacattcagatgaatggacctcgtagggctgctctggtgaacatggtgttccagttagggctcactggtgtattaaagttcaggaaaatgattcagtacctcaaagttggtaactatgaggctgctgctgatgaagggcttgatagtaagtgggcaaggcagacacctaatcgtgcccgtcgagtaactgaagttattcggacaggaacctttagttcttacagttga

SEQ ID NO: 231806 - DNA, 561 bp, Klebsiella pneumoniae
atgttatctaacactaacgttaaactaactgacgttaaattaacgtctaatgctccgttttttgggaacagagcagtttcaggaaaataccaacgaagatacacaggccttcagtactacgacttagaatttaacgctaactatatggctaaagatatttcaatagttcagaactttattgccaaacatatgtatggccgtccttttgaatttaacattagttatgctggtcaatacactggtacagctcgcggttctgttaattcaacacaggccattcaacccggcgctcgacaggttgtagttaatggtttctctggtacattggaagcagggacaatcatacagtttgaaaatcataaaaaactttatactgtaactgaagatgttgtttcaggaaaaccaatgaagttattccccgctttaataaagaatgttcagaatggcgagactgttaaatatcagaaccctcgtggtgagtttattctgacgaatgactctataccttacgatttgaaaagcattagtaaaatgtcattcacagcaacggagaacatctaa

SEQ ID NO: 231807 - DNA, 660 bp, Klebsiella pneumoniae
atgtctgagattaataatatcaaacaaagatttgaagagttatgcaagaaccctgattttatcagtgcatataacgattttaatggcacaagtcttgcttcactaagtcttagccagttattttctgttggtactttgtttcacgtcgtaagtatcaaaactcatgataatcaagaactactcattacggatgcttactttgatgttcaatatcaagaaaagacttatcttgctactggtgattttacggacattagtaccattcaagaaagtaaagagattaataacactggtatgacagttcgtctatcaaacgtgcgtactgagtatatcagtcttattcgttccaaagctcttgataactctgaagtaaaaattgacatcggctttattaacccaaacaacggttcagttcagacgagttttaacatctttactggtgtcattgataagttaagcattcaacttgattataatgacgcagaatgtaagaacgaaacagaagcaactttagatagtatctgggctgtacttgaaaaatcagctcgtaatcatgcatcagatggtatccatcgtgcttatccaggtaatgaaaatgacagtttctttgctcgaattggtaagtggaatagtgaagcacgttggacgtcagtcaaataa

SEQ ID NO: 231808 - DNA, 720 bp, Klebsiella pneumoniae
atgttgaacaatatagaaagaatgaaatatgcattaaccgaatgggctattaaagagggcgtatttgatgatgcaactttctatactcaaagggagtggaaagaacgtggagaggattttcacaatgatgcggtaatggtgcttgtgatcgatggtagtggattattccatctgcttaattatggctgtgacacaactgaatttgaggatttggtcgaatcctttgggttcttctatgaacaaggttatagctggagcgttggattttatcctgtagataactatgactacagaagacagaccggaagttaccgttctaaattacgtgatcctcggtggttaaggaaatccgagttagttaaaaaacaagcggggaatcactgccaagattgtggagcagtgggacgtctcgaagctcatcattgttattatacgacgatgagcaaaggttatgaaccatgggagtatcctctgagcgcatttagagcactttgccctacatgtcatgataagcgtccaataccagaaatcagagcacgtgctttcttggctagattaactcattcccaactaactggattgcttgagggattggacaatggttttaatcgatttgaagcagattcttttattgagtttatgaagaaggccacttttgacaagaagcgcatggaagaagcgttattacttctaaagaaaaatggtgaaatctatgattaa

SEQ ID NO: 231809 - DNA, 387 bp, Klebsiella pneumoniae
atggaccagaagttcaaagacgagttcttgaaagtaggcatcactgaacatctactgccagtgattgagcggttgtttagtcatactgcgggaaggttctgtgagaattttgttgagcaagaatgggcttcattggattttccgggattaatctatcatcctctgaatatcaccgggtattacgtagtcaatccctgtaatcaatcagatgctattctgaacaacagagagtttggagcattcgtctcaatgatgacgattaacaacctgtgttggaagttcgagaacacagattactgccagaagctatgcgatttgtactatcaaactagggaatcattctatgataacttcaagaatcgatccttatttagacttattgattaa

SEQ ID NO: 231810 - DNA, 171 bp, Klebsiella pneumoniae; identical to SEQ ID NO: 205735

SEQ ID NO: 231811 - DNA, 2145 bp, Klebsiella pneumoniae
atggcctttaacccggagctggggagcacgtctcccgctgtgttgctcgataacgccgagcgcctggataagctggtcaatgggcccgccgcagatgttcccgaccgtggcggtgatcctctttattcatggcgccagatgatggcgaaaaacgatgaggtcaggcagaacctgatccccctaagtcgccagtacatgacgctggccgatgctcaggcagatattgcaaatattcctgaaggaagcacgacgtattaccgcagccctgatgatagcgcgctggctattgaggttattaaccacggtgaaacgcttgagcctaccgggcggaaaatgccatctcaggaatctattgatggccgggtgtatttatctgaagggagtgaactaaccagggttatcgctgctggaaaacctgtgctcatacaggatgagctcgggcgtgtatacctggcgggaatggaagcgccggtgcaggaagttttagacagaactgatgaaacgaataatagctcagtccaccttaaccgggactcagcaggaaatgtggtcttgcttcaggatgagaacgggcaactgtatgcccccgggttgaatggctcagtgcaggatgagttcgacagaatacgccggaagataaacagcaatcgttctccttatcttaatgtcatgcccgatgctctggaggcggtgtggcaacgagtggatgagcttggccggctttacttaccgggtatgacttccggcttacagactcagctcagcagaaatacagagcgcctgcgtgagcttgcgaacaaccgacaggtttatgatgcgcgtgatttcgggctgcgtagcgaacagggagatcgaaacgaatacatcataaacggcgttatcaatgctgccgcgcgaaatggtggtggcgtggtttatattccgccaggtaactgggggctgctgaactacattaccccgcgttctggggtgagcattattggcgcaggaaccggagccacaattctgcggccgcgtggttcctacgccgccattcagcgattgccggatgacgacagttatctttctgattgtctgttccaggatttcgccattgatggcagcgagcagactctgatcggagatacgacttatgacagccggataaaagggttttatttctttttctttaagcgttgtttcttcaacaggcttctaattcagaataccggcgcaaccgggctgggtgtcgattacgcctacgactcaaccatgaccaatatcacaacagagaattgcggacgactggccccggcaggacaggccggggcatcaggaattggtattggtaccggagggaatctcgatgaaccgctgtatatcggtgggacgttcaaccggaataacaggaatttcgggattttcggagaatgggcccgccgggaaaattcgaaaaaccatagccggtatagcatctacgccaacaatgtttgcaccggaaacggcatggcagggattggtgactgtggcctggacggtctggtgtgtatcggaaatgacctgactaataacaccggatacggctttctacaggataccggaacaatggatgttgtagatggaaggccggcaccgggctcccgagggatactgatgggtaacaatatcagtcgtaatggtaagtcagggattggatatgaaggcgcagttgtcgccgggagcgggtatcactacaaggacaacatcattaatgataatgctgaattcggcatcgaaatcacggcgggctcactggaatataacgacgtatggatattcgggaatgagatggccaggaacgggcgggatggatttcgcctggtgagcggcaccatgaaaaatgtcgatattgagcacaaccgagttttcaacaacgggcaggatattgcgaacggtggtggctctggtcttgttataaacgggaatattactggtggctccataaccagcaataaattacgtgataatcagagcagcaaaacacaggactacggtttgtgtggcaatggaaacctgaccgatgtcgatattgatggaaaccattatgtcggctttaaaacggcggctgaaaatctcacgggtacaaaaattaatgtgacctatggtcgtaatccaggaaaagactaa

SEQ ID NO: 231812 - DNA, 1410 bp, Klebsiella pneumoniae
atggctcttgaactgaaaagcaattctgaatataaaggcgacccatcacagctgccgggggcaaacgctcctatgccagataatgcgtcgctttacctcgactttaagaacgggctttatttagcccgaaacattaccacaggcaaacttttccgaagtacgttgataagtgaaatcaccagttttgctcgcgcttcgcaaaagaccgtcgtcggtccttacggtattctccagaccgtggctgataatgaacctgctgttgtttatgaccccgttacccgtaaacggcgtggtattacgttacataactccacgtctaacaaggtaatttacagcgaggatttcacgcaaacggcctgggcgaaaactggggtcacggtggcagcggccgcggcagtttcacctgacggcaatacgtcagcaacgctggtgacagaagggaccggtaacaccgttcataccctggaagaagtgaatgcaacggcatccgcagttggccagtaccacacctacagtatttatgtgaagaagggaactgcgcgatttgtacagttatatgcgctgcctgcatcttccggaaatacgtttgcgaacttcgacctggataaaggggtcgtagtcaaagtatcgccgacggttcaacaagcgggaattgaaccggggccgaatggatactggcggatcagcattacgatccgtatctatgcgacgtatccggcgggcggggccgggttggcgttcatcaacgatggcgtgaacgcggggcttatgcccgcctacgtcgggactggtaagaccgtgtatgtctggggggcacaactggaagtccgcgaagcagcaacgccttatgtcccaacatctggcgcatcagggacgcgtgcagccgatactctgaatgcaaataattcagtgacaggattcatgtctcctgatgccggaactatctacgtggaggcagtgatgcccgccgttaatcagtcgccggttggcgtcctgaagttaggaaacggtttcttcggcgttgaggccaccgataccagcgctaactatattgcattttaccagaagaacctggcgaatcagaacggcgtcatttccgcgtcttcatacaatgccggtgccaataccagtctggatacgaaaaagggatcggcgggcgcagggcgtagttaccggggatttatgtcgtatgatgctgcgacactgcttacttacgatgaatatggattaacccaggtcgccgcctcggttgcagcagcgctttttggccgcatatgtgtaggcagagggagaagcaccgataaaaacccggatacactgtcgtttaacggtactattcagaaaattgtctactacccaacacgattaaccgaagcgcagatggcggacatctacgatgcaggcatttag

SEQ ID NO: 231813 - DNA, 759 bp, Klebsiella pneumoniae
atgccaggaattgttgttgcacaaaattttaaaaataatgcgttgccagcgggggaaagtctggcatctgcgctgattgccgactcaggcataaaaaactggtttcaggccgatgcgaattctgtaacgctgagcggcaatgatattgcctcattcaacgatcggaaaggtaccgccagcaagttgacccgcgctgatgcagctaatggtgcaaccctggtgagtaacgcattcgggccatactctggcgcccggtttaatgctgttgaatctgacagatcgctattcaatggcgacgcgctagacctgactcagccatttagttggtcgggagtcgcgacattacggtctctctctgcatcgagcaacctctgcggcacattcacttcatcatcggttcgcgccattctcaacgtatcggtatccggtagtaatgcagggaaattaacgtttcaggttggtacggcgacatgtgttggcccgacactggatctgaatacgccgtttgcgttcgtttgtggttatgatgggacgaatattttcctgcgcgtgaatggtgtgatggcttctgttgctgctgctggaagtccttcttcttcggcattcgccctgggcgcattacctggtggctctcagttctgggatggtgacgtgtccgatctctttctgtgtatcgtcgcaatgaacaccagtgctggagcatcattgctgacaaagctgacggcattttatgaagatgtttatggattaactctttaa

SEQ ID NO: 231814 - DNA, 2028 bp, Klebsiella pneumoniae
atggcctttaatccgccgctgggatcgaccaatgccgatgtttttatgggcaacgttcaacgtcttgatgaactgattaacggtcctgcagccgatgttcccgaccgcgccggcgacccgctttattcatggcgcctgatccggcagagccttattcctctgagccgccagtatatgacgctggctgacgcccaggcggatattgccaatattcctgatggttcagctacctacgtgcgcagcactgatgatagtgcgctggctgatgagtacatcaacaacggcgggacgctggaggcaaccgggcgccgaatgccatcacaggtttatatcgactcattactgagcattattcagcaaatgcagaatcagtcactctatcgagacggtgtggcgggattttcatttccggtcatctcagctgataaacgtgttatcggatttaaaaacgacggcggcgtatatgtggcagacgttgaaattcccggcacagataaaatacctccgcgcgacggaccgcaatatatttccgttgttaaatcgaaaaatgacgggcgcgtaggtatcggattcaatccaaaaaacggcttaacattcgctctgcttgatgatgattctgttgcatacattgctgacagaattggtggtggaggggctaccgttcctgaaattcgtggggaatggggttcgcgtgtatttaatccccgacactatatcggcgacgaatacaacacagcttctgtcctggacaaaagctctcgcactttcgacgcgcgtcagttatctgacggtgtccaggatacgctggtgatggcggcgccactggctacggcaatccgtattgcgttggtatatggtcagtcaaacgccgggcttggcggttcaactggccgcattattgatactgctccgtgggcgttttctgcatggggttttgcgggagtcaacggcagtagtcagcaggggacggtccatttatcgcccgcttcattgactgattttgtgccggcgctggactactcagctgcacagtcaccggcgatctgctctgcatacggaatcacgcagcgtaacgcagagcttgggcgggatgaccctggctatattgccgcaacagcctggcatggctcgcagcctattagctcattctacccgaatgcacagtcgggatactggaactacgagaacgcagtgacgttcctgcagcgtgcctctgctattgctgtggaatacgggcggacagccattcttgacgtgatgcaatggattcaaggagaggcggggccaacaggtcgcgataactacgccacccaactcgacgacctgttcacaacgattttgccagggttcaaggccgcgacggggcaagccgacaacgtgcaggtagcaatctggcaaaccaacatgagcaaagcggccagtggggagaattacgcatcacagggccaatgggacgtagccagcaaccgtgctgattgttttctcgcaggacctatgtaccagtttaagctcggtgatgagccaggcactggccccagcacagtccacactggcccagaggggcggttgatgttgggtgaaacttacgctgacgtgtatagcagtatcgtcgataaaggagcgtggaatccggtacagccggtatctgcggttctctccggaaatgttgtcgatattaattttgaaggtacgccgctggatgcctttggcgcaaaactgtcaatcgatagcgactgggtacccaatacgcttaaccacggcttttctttccccggtgcgaccatcacagccgttgaaataaccggggccaaaaccgttcgtctgacgctttcggcagctccgggagcaagcaacagaaccctacgctacgccattgacgcattcgacgatgtgacctactggccgacacgccgcggcaacctcatggttgaaaccgaccgaaaatcctggtggaactcgcagggagtgaatatcccgcgcaacgttcgccactacgctattcgttttgaaatcactgttacggagtaa

SEQ ID NO: 231815 - DNA, 579 bp, Klebsiella pneumoniae
atgcttcagaacatgcttaacccggaaccaacctcaacagggatccggtctggaaaccgggtgattggctactccgctgctattcgcctgctggataacggtcgctatgacaaacaccttgccgatggaatggaaattctggcctgcatcatggaagcggtagaaagcaactggatcacgctcaatatcgaaaaagagttgatcctctggcgctggttactggctgccgtgttcatcactgaggagctggagaaaaacggaactgtcgacgttccgaatgatactggcggtgttgatactgctgttatctattccagcaagcatggcgccattagcgtctatccgggacctgaacgctttgcactccccaaccatattgagctgggggcaatcgagaaatatgggccagaggttggccagcagctggcgctgcggatgtatcaggacatggttattgctgacgaagaatttgggttcaggttatcagcacttggccgggaggggtttaacctcctccacgacagctttatcgaacacatccagatcgaaggtgtgccagaagcgccgattatgcattga

SEQ ID NO: 231816 - DNA, 192 bp, Klebsiella pneumoniae
atggtagacattgaaatgattgacgaggaagaggcaatgcggatgatccgagtatcttcacgcgtgaccatccgcaaatacaccgagcgctataatttccccaaaccggtccggacctatcctaagcaatatctgcgctctgctattgtggagtggatcttaaacgggggaatcaaccagaaatcctcctga

SEQ ID NO: 231817 - DNA, 357 bp, Klebsiella pneumoniae
gtgtataaagctaacatcgctgacaaggaaaataaggcgtggaagagtcaactcaccgggttattgacttctgtattacagcctcatttcaaaccacatgaatttgccgttgatattgtctccgactgcgcctttaaagacctggataaaaccgaagttaagcttttggtgaaagatcttaagaaccgctacgaaataaaaccgttaattgaatgtggtgataagttaaatcagtatcaaatcatcaaatattgcattcgggtatttgttgaccgcgatatcaaagaacgcgtaactcctgaaataatctataaaatcaatgaaatagtggtcaagcagatcgcgttgctgaattga

SEQ ID NO: 231818 - DNA, 1035 bp, Klebsiella pneumoniae
atgggaaagaacagcaaggcaaaacgagatttaaaaaagaaaaaaagcagtaacaaatccagagaaaaatcctctagcaagggtaacagaaactatgaagacgctatgcaaaaaataaaagataatttaacatctgtatataaagagtacaatctcgcagaactttttcttacattaagtatttctgaactatggctacctaatatctcgtcacctgtaaaacacactatagctttcaacactttgctctccatggatgttagtacatttaataaccaaaaggaacttaaaacatatcaacaagcaagcgaattttttagcattatttataagatattacctaacattcctcaaatggaagactttgtccctgaacaagactgggggcaaataaaaatgccatggggagacaatatttatagaattttttacggtagctcagtcgaacgcttatatgattatattcaagcttttggaattagatacgcagaatatccaattatccttaagcaaatggaaaatgttcttattttacaggaccagtttctatcaagcctaaatccagttgatacactctcagagttctctcccggccatgtcgaaatccctccagaaacattctggaaaggttgccatcaggctttaacggatgcctgtcatgtgtttgagaaaataagaagtcagacggaaaaaatatttattaaaaaagcaggggaatttagaagcattaactctaccgctgaattatcaaatataataatggagggcgtagcactccctgctattggtatcaacattggtgatcgtgtttatccattgtcattcaggaatatggcaaatgtaattattgagcactatgcttccaaaaaaatggatatcgattgttcagatgctatttcaaatttcatatctcagcgttttgaaagcataattgaggaaccatttctgctcctgagcagaaaaaaggtcctaccttataaattctcaggattattacagggtaatgataagttttatttatttgctcctttttga

SEQ ID NO: 231819 - DNA, 933 bp, Klebsiella pneumoniae
atgggaaataatactcgtgaaactatatggtttaaaaataatattccggctctcgagtactgctcggtagtccgggcggcagagttgttaggttgtaaagtaaaagatattttgcatttcgcagaaataggaggcatagaactttctgccaaacttgagggattcgaagcatcattgacatcaccactaagatttagaggggatgatttatgggaggataattttcaattcccttattttcttaataaatatcatgtgaacagccgtattagtcttttttcccctatgattcaggatgaaacgcacatcgattcagaaaaaaaaaccaagtatttgtatgaatataatgaatctccaggactaaagaaaccacttgttaagttatatggattatgggctataaaaccttcggcgttgctgggttctgctttctttaataaactatcatcctgtacaggtgttagtttgtccccattggatttctattttaaagaagctgatgtggaggttaattctgatgtcgttacggcatcaccaaaaacagagtttttatatccagataatggcttggatataagcaggttacatgagattattaatcttactatggctgatttgtttttaacaaaaaagcaagttgaaattttttataactgcgttggtgatgtgatgccaagtcatatcactggcgaagtaaggcagtcggaagaatcagggaatataattaaagcagaaaggttaactgtgcatcagttctcttttatttatggtcttttaagaatgttagatatcagtgatgaagatataatcagcgcatcaccaggcgagataaataaattattatcccaaaaggcggcagctcaaggtgtcccgttttccccgccagataagaatacctgggcaaggtggagagaaaaatttccagttaagtga

SEQ ID NO: 231820 - DNA, 219 bp, Klebsiella pneumoniae
atgaaagggcaatcttctacacaactaacattaccagtttctggttatatccgccgctttcgcctggctgaactgctgggcgttagcgtatccactatcgaccgtaaagtgcgcaacggctcactcccgcgcccggtgaaactgggggataagattaccgcatttgacgcggtggagattcataactggttggcagaatgccgcgggaaggtggcctga

SEQ ID NO: 231821 - DNA, 435 bp, Klebsiella pneumoniae
atgaaaaaagaaaaccgccccggacagcaggcggctaacacagatactctcggatctgatgttacgccagccaccagctacaaacaagccccacgacgcacaccgaagaagcatcgcgcccgcgtttatatgctgcgtaccggcgttgagggatggacagagaacgatatcttgcgctactgccggctttcttctggccggaactacgccacagagcttgaacgtgaactgagtatttgcctggaacgtctggaagagaaaaatccggatgggatcggtgctcatatgcgttaccgctttgcgtgccgcaacgatgtgatgaaggttatccagttcgttaaccacatggccgctattaatcagcaccgtgggctttctgtgcaggatattaccgacattctgaacctctacccggacaacctcaccgccgcataa

SEQ ID NO: 231822 - DNA, 180 bp, Klebsiella pneumoniae
atggcaacaggtaggaagaacaatcgctccctacagctttcggtaagactccctctcgatgatttggaagagatagagaaactgaaagaagagggtgaaagtacggccggatttctgattacggctgcaaagggcgagatcaaacgccggcagcgcaagaagcccaaagaatcggaatga

SEQ ID NO: 231823 - DNA, 219 bp, Klebsiella pneumoniae
atgtcaaatcgtatcacaccccctgcagggcgggcatcactcagccctaatttattcctctggcgctttctggcgctcaaccgccacgacaaaaaggccaggccctgccgcctgtctgtcgaggccgcaaccgaacgcgaagcccgccgcattctggcgccgcacttcatcctttcgctggctgctcgcctgccgctggtgggggtgcgtcatgcttaa

SEQ ID NO: 231824 - DNA, 180 bp, Klebsiella pneumoniae
atgcttaaaaccttccagattgacgggtacgcggttaataagcgcggtaacaccgtcggcattcactacaccctgaccagcgacagcccggatacagccaaatcaaccgcgcaactactggcgcagcagggcggctatcagcacgttcgcattacccgcgttcaggaggtagcagcatga

SEQ ID NO: 231825 - DNA, 264 bp, Klebsiella pneumoniae
atgaaaattaacacaatctgtcgccatcctgcagagcttgaggccgaggcaatgttattccgtaaacagccttaccctgactctttctcgctggcagagcgtaccgcggaacgcatgacccgcgcccgcaatggtctggctcacattatgacagagctggcaccacgcctcgacgatgagcaagcggccatcgtgcattgctggctggataaagtcctggcgattgtcgatataacccgaattgatgcagaggccagtttatga

SEQ ID NO: 231826 - DNA, 222 bp, Klebsiella pneumoniae
atggtgaaaaataattctggctcatctgccagtggtctcgctcaccctgaaatcctccacggcgataaatgggcagataaaagcggtgtacgggtaattatcgaaagctgccagttcaacagggttaagttttaccgcgaaggctatcagtcgccgtgtatttacccagagcagcggtttatcaaagagttttcactaatacagggagcaggccatgaataa

SEQ ID NO: 231827 - DNA, 573 bp, Klebsiella pneumoniae
atgaataaacaaccttatccagaagccggccctgaaggcgttattaccggagccgggctggtgggctttctttcggtaacggaaagccttagccgcggtgattatgaccgcaacccggaggaaggcatgggccttgcctgcgctgcgctggatggcgtggccctgacgtggttcgcggcagcgccagaacaacatgctgctctctggcggtggattgtggcggcggtatttatcgaggaacaagtgaaaaataacggaaatatcgacgtaataggcgaagatggccgcaaagttaaggtcgctctctatgccgggaaatgcggcgccataaccgtttatccggtagctgagcgtgttgctcttgcaagccaggttgaagggtacgctttacagaaatacgggcctacaacgggtatggatctggctatccagcattaccagacgatgctcgaatggcgtgatggcatttactgcctgtcagatcatggccgggatattctttccgatctgcacgacaaccttatcgccaccattcacgccagtggtgttcctgcgatgccaacggagcactaa

SEQ ID NO: 231828 - DNA, 2691 bp, Klebsiella pneumoniae
atgaagcgtgcaattgagcttatccacgaagtgaagcgccggactgccggacgctgggaaagcgtgctgccgcagtgcggggtgacggttccgccgaaaggtcgtcacggaccctgcgccatctgtggcggttctgaccgctttcactttattgacgaccacagcggcggcgagtggcattgtcgccagtgtgacgaaccgaatcacggcgacggtctggatctcatcgccagagcgcacggtattaccataaccgcagcggcgcagaaggtggcctctgtgttgggtgtagatgcccggacaccggaaccgaagccggccagagagaagcctcaaacggatatcgccgggaaagtcgccgggatggccgctaaagctgcgtccggacagtcagcctatctcacatcaaaggggcttcagtgccccttcccgttgatgcctgacgggtcgctgctgatggtgctgaaaaacggcgctggcgctgtcaccggcgcacaggggattaagccagacggcaataagcggctggtggccggaacggtgaagaaaggctccttctgtgtggttaattccgttgaatcgccggaaacggtggttatcgctgaagggctggcaaccacgctctcagttaacctgatgcggcccgatgcgctggcggtcgttgccgttgatgccgggaacctgctgcccgtggcggaggttatgcgccggcgatacccggaggcgcggatcattatcgctgccgataacgacataaagccgggagagccaaacacaggcaaagatgctgcggagaaagccgcaaaggctgtctctggctgggtggctttacctcaatctgaggaaaaggccgactggaacgactgccaccagcagcaggggcttgcagcggctacagcagcatttaatgattcgatgtaccagccggagggcgaagaagtggttgtaaaacttaaggcgatcgacggcggtaaagtctctgacaaagacagtgatcggcttaaaccgcgcatcgagagccgcgcagacggaattttttgggttacaccgaagatggacaaagacagtggagagattattagccacgaagcctggctatgctccccgctggatgttgttggtaccggccgggatgataaagaccagtacctgattatgcgatggcaggcattcggcgccgatgcgctgacgaccgcagcaatcccgctggctgacattggagagcgggagggatggcgcaccctgaaaaatggtggcgttaacgtcacgaccaaaagcagcttacgggcaattctggccgactggcttcagcgcagcggtgcgcgtgaactttggcgcgtggcccatgcgacaggctggcagtgcggggcgtacatcatgccagatggtgaaattatcgggacgcccgaacatccggtattgttcaacggtcgcagttctgccgctgccgggtataccgttaagggaacgcctgatagctggcgcagaaacgtggcgcacctggtcgctggcaactactcgatgatgacggctacagccgctgcgctggctgcgccgctgatagggctggcgggcgctgacggtttcggcattcacttctatgagcagtccagcgcaggcaagaccaccacggcaaacattgccagcagcctctacggcaacccggatttactgcgcctgacgtggtacggcacggcgctggggctggcgaacgaagccgccgcacacaatgacggcctgatgccgctggatgaggtcggacagggatccgacccggtaagcgtgtcgcagtctgcctatgcgctttttaacggggtggggaagctgcagggtgcgaaggagggcggcaaccgggacttaaagcgctggcggaccgtggcaatcagcaccggcgagatggatttggaaaccttcatcgcgggcgccggccgcaggaccaaagccgggcagctggtgcggctgctgaatatcccgctgagtaaggcggttcacttccacgagcaccggaacgggaagcagcatgcggatgcgctgaaggaggcataccagcaccaccacggcgccgctgggcggctgtggattaagtggctggccgaccaccagcagcaggctacagaagctgtccgggagtgtgaggcccgctggcgcagcctgatacctgcagactacggcgaacaggtacatcgcgtagccgccaggttcgctattctggaggcggcgttgctgctgagcgccggcatcaccggctgggatgcacagacctgccgggatgcggtacagcacagctataacgcctggctgcgggagttcggcaccggcaacaaagagcatcagcagatcatcgagcaaacggaggcgtttcttaacgcctacggcctgagccggtttgcaccgtttccttacagcccggccgacctgccaataaaagaactagccggctaccggcggcgccagggggaacacgacgagagcccgatatcgttctatacattcccggcaacgttcgagaaggaaatcgccgcgggctttaatcacaagcagtttgccgaagtactgaaaagagcgggaatgctgacgccgccgagcagcggacgcggatatcagcgcaagtctccacgtatccaggggaggcagatcaacgtttacgtcctcaactacctgccggaggactacaaccagccagaggaatag

SEQ ID NO: 231829 - DNA, 666 bp, Klebsiella pneumoniae
atgcctgttttgaaccaacgccagcgcgtagagttttttccctggcaggcggtgaaccaacagaatgccccgctgaaccaacgcaaaattgctgaagttggttcaggaaaacccagtaacggcgcgggctggcgggcagtgaaccaactgaaccaactgaaccaacactatttctgtttattatcagaaaaaaaacagagactggccgagagagaggtgagcatgacagcacaaatttcagcatacgggcggctggtggccgaccctgagacccggacaacgggaaaaggtacgagcatggctatggcccggctggcggtatcgctgccgtgcaatgccgcagcggacgggcaggctaccttctggctgggcgtcattgcctttgggaagcaggccgatgcgctggccaaacaccagaaaggcgatctcgtgagtgtggcgggcaatatgcagcttaaccagtggacggggcaggatggcggtacccagcagggctatcaggtactggcagacagtgtgatcagcgccagaacggtacgccccggcggtaaggtggggcagcagggacaggccactaacgcccttcgccgggcgcatgagcaacacccaccagcgaccggtcatgaggattttgaccagacgccgccgtttgatgatggcttctga

SEQ ID NO: 231830 - DNA, 270 bp, Klebsiella pneumoniae
atgataaaggacggtaaagcggaatcgctcgaagccagagggttgtatcgacgcgccgctgccaggtggtcagaggttatgcacctgtgcgctgatgataaagagcgagaacaggcaaagcgtcgctgcgatgaatgcctggagaaagcgaagcgcccaccagctaaacaggttgtttttgccgatctgcgcgaagcagcaaaagagacccagaagcgcatggggctgggcaggaccggcggggaggcgttcagagcctataaacggtaa

SEQ ID NO: 231831 - DNA, 186 bp, Klebsiella pneumoniae
atgtccagacaaaacgtaaacgtaaaaccggtattactcagtcacgagcagataaaggcgctgagtgacattcaggagcagcaccgcaaaacatccagtatcggcgttgcgccaactatccatgagattgcacgcggtctgatggataaagcgctggcgtctctctccgacggagtgaaagtatga

SEQ ID NO: 231832 - DNA, 2001 bp, Klebsiella pneumoniae
atgaatgctgaaactctgaaggactttttaattagcctgggcttcaaagtagatgacgccggcgccagaaaatttgatgccatcgttaccggcgcgacactcaaggcgatcgagctcggcaccaaagtagagctggccgctgcgtctgtggtggcctttaccgcgaaagtcgccagcggtctcgataacttgtactgggcctctcagcgcactggcgcaacggtgcagggcatcaagcagatcggctttgccgtcagccaggttggcggcagtgtcgacggggcccgcggctctctcgaaaatcttgccaggttcatgcgtaacaatcccggcgctgagggtttcctgaaccggctgggggttcaaacgcgtgatgccagcggcaacatgcgggatatggcgacgatctttaccggcgtcggccagcgtcttagcagcatgccgtattaccgcgcgaaccagtacgcacagatgctcggcatggatgaaaacacgctgctggcaatgcgtcgcggtattggtgagtacatgggccagtacaacgccatgaaaaaggccatcggttttaacccggatcaggcagcagcggcatccaaccggtttatgacctcgctgcggtcgttcggcgaaatggccggcatggcacgcgacaaaatcggctctaacctcgctggtggtctcgccggcgccattgataaccttcgccgccagatcctcgataacttcccgaaaatagagcgcaccattaacgcagtggtgaagggtattctttggatgggggaggccgtcggacgggtggtctatcgtctgatacaggccgcgggtgatatccgggactggtggaaagggcttgatgaagactccaggaaactcatcggcacgctgggtggaatgctggtggcctggcgactgctgaatgccgctatgctcgcctctccgattacctgggttctggcgcttgctggtgcgcttctgctgctctatgacgattacaagacgtggaaagaaggcggtaaaagcctcattgactgggataagtgggagccggcgataaactttgcgctgactgccattgaaaaactatggactggtgtgaagcgtcttaaagacgagttgattaaacttttcggtatcgaccctaaaacatggtcgattaagttcgaattcgacagtctgaagaagcagttcaatgagctgagcaagatgctggataccataggcaagcttctcaatgcgatcgatgaaggtcgctggtcagacgcggcagcttacgccagacagctgctgaatcagggcggcgagccgacaccatcaaacgcggtgacagacagcgccaatagcgctgcggactggattcagaataaaaccgggtttgacccccgcagtattggtcaagccgttactggctggtttggtggtgacgctactcaatacgggcagtctgttaaacgacctcaggcctctaaagctggcgctcagctgctgggttggatggctccgatgatgggtaaactggaggcgttgtataacctccctgcgggcctgctccgtagtgttgctctcgctgagtcaaacggcaatcagtttgctgtgtctggcgctggcgcacagggaatgtttcagtttatgccgggtactgcccgcgatatgggcctgcgcggcaacgatgtgtttaacccgatgaaagcggcggaagcggcggcgcggtatctctcgatgctcctgcagaagaacggcggcgatctgaataaaactctggcctcctataactggggcatcggtaatgtgcagaagtacggcatggcgctgatgcccggggagacccgtcaatatatcccgaaagtgctcagcaatatgccgggcagcggggcaacgctgaaccaggaaaccaatatccatattcacggcgtcaataatccacgagaggcggccaatctggtggtcgaaagacagaatgccgtaaacaatcgtgcaactcaggatctggcggggggcaactga

SEQ ID NO: 231833 - DNA, 591 bp, Klebsiella pneumoniae
atggatattctttcaacgctgttccagcagcattcccgcaatatcgggattatcgtgccggatgtggttgtttctgaaaaacacagcgatgtgctggaaattaccgagcatcccgtagagaaggtcaccagctcaggaacgggtgttatgacagaccacgcctaccgccgtccatcagaagtggtaatggatattggctttgcgggtggcggttcgctgctcgacctgtttgacaccaccagctttggcattaaagcgaagctgagcccgagagaggtttatcagcaaatcctcgacctgcagcgctcgcgggagccgttcgacgtcaccacgggcaagcggctgtataccaacatgctgatccgcgcgctggaggtcaccaccgatcgcaccagcgaaaacgtcctgcgtgccgttgttaccctgcgcgaagtcatcatcacacagactcagagtattacggtggccgacaaagctgatatggcactcggcgttaatacctcggcagtccagaacaaaggtgtgaaaaacccggttccggtcgatgaatcgttaatctacaaactcagcaaactggcaggtgtaaaatga

SEQ ID NO: 231834 - DNA, 306 bp, Klebsiella pneumoniae
atgagcgtgactgaaattcctttaagcccggacagccagacgttcagcacaaccctgaacggtacgcaataccagatgcgtgttgtatggcgcggctcctgctggttcctcgacctgatggacagcaccggtacgatgatgattggcggcattccgctgatcaccggcgccgacctgctggcgcaatatcactatctaaatctgggattcttgctgtatgtggtctgtgatgacccggctagcgaaaaccccactcagtttgatctcggcattaacagccacctttacgcagagacagaggaataa

SEQ ID NO: 231835 - DNA, 1065 bp, Klebsiella pneumoniae
atgtcaaagaactggatgcggcatttcgagctggtactcaccgataacgaaggcaagggcctggtgctcagcgagtttaaagcgacgttcgaaatcgaatggaacgataataaatggcccagcgtggcgaccgtgcgtgtgtataacgtgtccagcgagacggcaaaccgcattatgggccgtgagttctcgaaaatgaaaatcatcgccgggtacgatggcattgcgccagttgtaccggccagcgaagtgggcaaagttcatgaggtggatccgtctcaggtcgggcaaatgaacggcgccaactatggcgtaattttcagcggtgatatccgcttcaccgtcaccgggaaagataacgttactgacagttgggtgcaggttcaggcctgcgacggtcaggaggcgttcacgaaggcgtttatcagcacgaccctggcgaaaggatacactgtgaaagatgtgtataacgtgctgatgcgtgcgcttgagccctttggtattgtcggcggtgcggtaccggaattcccgtctacggtcttcccacgcggtcgcgtgctgcatggtacggttcagcagtacctcgataatgtagcgcagcagtgtggcgcccgctggcagtttgcttatggtcgggtggatatgctcagcgccgatatggctatgcacaaggcggttgtcctgaattcggataccgggctggtgggcatgccgcagcagacgatcggcggcggggttaacgtgaagtgccttatcaacccgaatatccggctgaatggccttatccagctggatcagacatccatctaccgcgctcagttgtcaggcgagcaggtgaaacagtctggccttattaccgtcgataccgttaacggcaatcaggtaactaccggtctggcccagcggcagaacccggccagcatcgcgacggatggtgtgtatctggtgcgctttattatttatcgcggtgatacccgcggtcaggagtggtatatggacatggcctgtgaagcgcgtagcgcggcggacgtgccgaacaaaaacttgttgaatgcgggattctaa

SEQ ID NO: 231836 - DNA, 258 bp, Klebsiella pneumoniae
atggatgacggcggaagcatgacttatgtcaatggagagcaggttacatcgcagaaaatctatttcttaggtgccaagggtgattacaaccaaatgaaaatggatatgactctgatgccagccagagacggaaatatgtacggctatgagttcattaagcagaacggtaaagcctttctgaacgttgagctgattcgccgggtgatggaagagccccgaattatcggaagtttcgactgtaaacgcgtaccggactaa

SEQ ID NO: 231837 - DNA, 732 bp, Klebsiella pneumoniae
atggcgaatatcagacctgcagagcttcaggaaacactggagcgagtgaaagaaaaatccgtagcgaatgccagaacagccttacccggcgtaattctgtcgtttgacccggatacggtgacatgctcagtgtcgctttgcagcaaatcgagtaagcccgtaccgtacgaggatatcagcaaaaccgagtcgatggatttcccactgctggttgacctgcctgtggtcttcccccgcggtggcggcgttacgctgaccttcccgctggccgagggtgatgaatgcctggttgtgttttccgatcgctgtatcgatttctggtggcagaacggcggggtgcaagagctggtggactggcgtagccatgacttatcggatgcgtttgttatccccggcccgcagtcgcaggcgaagaaaatcagcggcatcagcactacggccgcgcagctgcgtaccgacgacggcaccgcattcattgaggtgtccgccggcggggatatcactgccaccaccgccggcaacgcgactattaacgccccggaaatcattctcaatggcaacgtaacgattaacggcaacctgtcgcagggcatgggcgagaacggcggcacggccacgatgcacggcccggtcaccgtaaccaacgatgtgacagcaggtggtaagagcctgatgacgcacacgcatggaggggttgagactggcagtgggaatacaggagagccgcagtaa

SEQ ID NO: 231838 - DNA, 192 bp, Klebsiella pneumoniae
atgcttaaatctgatgtcattgagtcggcaattgctgagatggtcacgaagcagggattcgcattgagcgccgccgatatgctggagctacgttgtagagtggccggtacgctcgcagcgaaggagcgccaccgccggcggatgacggccccagcctaccagtggaagaagccggataatccgcgtagctaa

SEQ ID NO: 231839 - DNA, 360 bp, Klebsiella pneumoniae
atgagactaaccagccgcaaaaagacgatactcagctactttgagccggataaccgggaatgggtaacggtcgagatcggcgcacctccgctcgatgtatccggcgtagcatgcctgctacatggcgtggggctcaaagataaccgacaccggctcgaatccaccaggcgaacgcttgaagcaatggtgaaagacgggttgctggaaaggtaccgtagccgtgaggtgcggagtatcgttctgggcggcgagacgaccgctacagtcgtccgttatggccttccgggtaccgtttcagtggtgcacgataaagatggcgctggtggggcgatagaaggcgaatttacgcgtgtgttttag

SEQ ID NO: 231840 - DNA, 303 bp, Klebsiella pneumoniae
atgagtatgaatgtggcggaaaagttgaaaattatgcgcgagagtgagcgccttacaagtttgccagaggcggccaaaatgcttggcttgaatcgtgacgctttgtggcgttacgaggcaggaaaaacaatccctaacactgaggtgattatgagcattcttaatcatcctcgatttgaaaaatatgccctgtggttcatcaccggaaagattgcccctgaatccgggcagatcgcaccggctctcgcacactttgggcaagacgaaacaacgtctcagccctcagaccagaaaattggctga

SEQ ID NO: 231841 - DNA, 624 bp, Klebsiella pneumoniae
gtgacagaacttccgctgaatatcgatgttttgaggcgatattcacgccagcaaaggcaggagatcaccagcaggctaagaaaatccgcccgggaaagctcagatcaagccttcacgcgtaccgcgcgcggcctgcgcacgtcgattgatgacgaaagcgcgctgacatgggggccaaaagtcaccgctgcgaaagatatgagcctgacgccggaagaggcagagcagcgctggcgcgagcaaatgaggatcgaggcggaacggcgcgcggataactacgcggcggcggttgcggagtatcaaaagaaaaaagccgaggccgcattgcgccaggagcagcaaaaagaagcgacgcaaaaacacggcatctccgaagagatgatcgccaacatcggcgcgcagctccgcgattgccggattttcgtcggtgatgaagttgtgcgatcagttgcaggcggcgcccgcattcgccacggcggtagcctgctcgctgcggacaatggccaattgcgtgaggtgaaagtgtggcgggctggcgagaaagataaaccaacttccgaatatatggcagtgcgtgacctgatcacgcgctggagtaaggttgttaaccgaaaaaagaattga

SEQ ID NO: 231842 - DNA, 552 bp, Klebsiella pneumoniae
atgaaaaagggcgttattgcctgctctgtcgccgcgattatctcgctggccgccgtgctctggccgcagtcactgcgtaccagcccggaagcgcaactgaagatggcgaaatatgaggattgtcgcaagaccccgtattactgcccggcaggcgtattaaccgtggggatcggctctaccgggaaagtgcagaaccgggagtatgccgagccggagattgccgagcgctgggtgaatgacctgatgcgcgcggaacggtgcgttaaccgtgagtttaacggcgcaactgcaccgcagcgcgttttcgaggcgctgaccgatagcgcatttaatgtcggttgtagcgggcttgcctggtacaccaacaggcaggggaagaaggttagaacgacgatctggcgtaatgcgcaatcggctgactggcgcggcgtctgcgagcgggtaacggattttgttaactcaggcggcaggcgcttgcagggactggtcaaccgccgggaagagttccgggagtggtgcttgtcagatcctgtgtttaagggggcgaaatga

SEQ ID NO: 231843 - DNA, 228 bp, Klebsiella pneumoniae
atgccgactaaccggcttggcatctcctaccaggcgattcagttcatccagtgtttttggtgtaaggccaacttcatttacatcaatctcaagccggaacgtgcccggctcatctccgacatcgaaccattccgcaaacgtggcggaaaaacccatatcttcgatcactcgccgcacggctgcgcgcgtacccttccggcgatgaagccagtaggattgctggattga

SEQ ID NO: 231844 - DNA, 1071 bp, Klebsiella pneumoniae
gtggataaattattttatgcgcgccttaccagcgcgggagagcggaagtttgccgccgctgctgtctcgggggagccggtcaactttagcgagatggcggtaggagatggcggcggaatcgtacctgacctgtcagagaatgacgatctggttaatgagctttaccgggcgccgttaaatcgcgtggtcattgccgatcagggtgccaatattattcgtactgaaatgatcatgatgccgcaggtgggtgggttctgggttcgtgaggcaggcctctatgataacgagggagtctgtattgctgttgcgacggtgccaccttcctataagccattgctggcgcaaggatcggggaggcttcatgctgtaaacatctggattgcggtaagtagtaccgcagatgttgagctaaaagccgatccgtcagtcatccttgcaacggttgacgaggtgaacaaagccaagaatgaggcgaaggattacaccgatcaggttacaggagatctggatactaatattcagcaggcaatcacagatgctatcactgcggcacgtcgggacttctgggaagaggaaaacccgccgggaacggtgcgcttctttgctcaaaatatcgatccgaacgagaagtggccgtggtcgcaatggacttacaccggcgaaaataaaacgatccgcgtcggcaaagcggacggttcagacgtcggcgcgaccggcggcagcgataccgtcacactcaagcaggccaacctgcccgccgttcagattgatgtgagtggcgaaaccagtgaacagaaagagcagaagctgacgaccacgcgcggcggtgttcacaatcatggtggggtggcaggtaaagatgacccgtgggaaattggcggcgatgtgcgtcagctctttaacccgaaagagctgggtgtgacagatgacgccggagagcatgatcacgaagtcacgatcccaccgcataaacactcggccaacggcaaaacagccaacctcggtgaagggaaatcattcagcgtggtggaggcccacaccctgctgatgtgctgggcgcgggtggcgtag

SEQ ID NO: 231845 - DNA, 489 bp, Klebsiella pneumoniae
atgatgatggtattcgggatgtttgtttttacgctgcgcactgtcccctatcagcagctgcgccactcgcaggagtggcgtcacgttaagaatgaccgggtcaatcagtcggcgggttggcagtacatcgggcccggtgacgacacgatcacgcttgacggtgtgctctatccagaaatcaccggcgggcggtggtcgctgtcggcgctggagacaatcggctttgccggtcgcccctggccgctgattgaaggtgatgggcagatttacgggatgtacgttatgacgcggctggagcgaggaaaaacggagtttgatcgctacggcaatcccaaaaagattgagttcactatcagtctgagccgggcggatgcggattttcgcgagaagctgcaatcgtcgtcagtcagcgatgtgctggatgatctcaaaaccagtgcgaccaaagccgttaactcggtttcaaactccctcaatagtctgttttaa

SEQ ID NO: 231846 - DNA, 2712 bp, Klebsiella pneumoniae
atggatcttagtattcgcgttgcgttcagtgctattgataagctcacccgcccggtcagtgccgccagcaaagcgattggcggcctttcggactccctcaagcaaacgcagggctcaatcaaagaggttgagcgacaatctgccgccttcaaccgtctacgcgacagtgttaaaaaaacctcccgcactatcgacgacaccacccgcacgttggaaggactgaagcaggcacagcggtcaggtgctacgctgacggacaagcaacgccagcagatgaccgatctcgcggcgaagctggatcgcctcaaagtccgacgtgataaagagaccgagagtctccggggagcctccgaggcgctccgtcgtcacggtgtctcccttgcgggtggcagtcagaccattgccagcgccattcgccgaaccgagcaatataaccagacccttgagcacgagcgccgccagctcgctgctgccacgcaagcgcgcatgcagtatgaccgcgcgagagagatcgccggcaagatgcgcggcgccgggctggcgatgacggcggccagtgccggggggttctatctgggttcgcggctgatggcgccacaaattcagactcaggagcatgcctccgttattgctgctcagaatggcgaggacgcagcatccggcggtcgctactctcgcatcattcagaacattaacgccgctggcgtcagtcgcgatctggcccgcatctctgaggcggtggcgggtgttcgcagtacgctgggcgcactcggcgcggtgggtgacgaggaactcacgcgcatttcccgcaaggcactggatctgcaagccgccctcggcggggatatgacggaacatatccagatggcggcgatcatgatgaaaaacgggctcgcccgcagcagtgatgaggcattcgaccttatcacggcgggaatgcagcgcgtttccacgcagatgcgcggcgagatgccggaaatccttcatgagtattcaacccacttccgcaatatgggtttcaccggcgcagaaaccatgtcgctgctggtcaatatggcgcagcagggtaagttcgcgctggataaaaccggggatgccatcaaggaattcagtatccgcggctctgacatgtcaaaaaacagcgtcagcgcctacaaggcgatcggtcttgacgcggcggccatgtcatcggcgatagccacgggtggcgaaagtgcgcgcaaggcgatggagaagaccgcgaaagggctgctgtccattcaggatccggcgacgcgggctaatgccgcgatttcgctttttggtaccccgattgaagacctgtctatagaccagatcccggcgtttctttcggcgttggcgaacgtttctaatcgcctcggtgataccaggggaagcgccgacaggctgggagataccctgcgcgataacctgcctggtgatatcagcaagctgggcggggcatttgacgggctgcgcacggaggtgctgacggggatggatgccagccttcggacaatcacgcagacgctgacggccttcctcaacaacctgcgggcgtgggtgagtgaaaacccggagcttacacagactctggtgcttgtcactgccgcgcttgtggccctgactggagcggtaggcatagcgagtctcgctgtcagtttctacgttggcccctttgcaaagctaaggctagctattcaaaacatcggcctgtcttcgatcactacgacctccagtatcgccaggctcaacctggttctttccggcctgcgcgtcattcttgcaacactactcggcatccccggagtgattgcgctggggtttatcgctgcagggctgattatctggaaattctgggagcccattaaagcattctttggtggtttccttcgcgggatatgggagggattaaccccgctcaggaatgcattctcagcgatggcgccagtattctcctccttgggtgatgccattaaagcagtgtggggatggttcaaagacttgctgtctccgatgcaggccagcaaggatacgctggataaatgcgctaccgccggggagattttcgggcgggtgatgagttctgcgctcagtttcctgctgtggccgctacagcagttaatgaatggcgtgggctggctgcttgaaaagctggatcttattcctgaagggatagacagggccaggcagcaggctgacaaggcacagcgggaacttgaagcctctgcgacagcgctggccgggcatcaactacccctgggtcaggcgacggtatccaaaccagttagtggcggtaagccgccggtcattaccggcgttcagggccacctgaaaaacatcgacacgaataccaaagcaacggccaacaacacgaagaaagtcggccccggggatattgtctttaaaaatctgccgcgtgctttggcgctgcgtggtgcgtatcaggaggcgcgggttattccgcaaccggtgccgcgcgtatctgcggctgcggccggcggtgtgctgtcggtaccaacggcgacgcaaggggcgacttccgcgccggtcgctgccgcgtcgggtgcggcgccgttcttccaactggtctttaacgacgtcggtaaacgctcggatcaggagcttgaaaaaatggtgcgcaacgccgtgcgcgatctgatggccaacacccgcaaaactaaccgtggttcattccgcgatcgggagtag

SEQ ID NO: 231847 - DNA, 972 bp, Klebsiella pneumoniae
gtgacgattgctattgtaataggcacacatggttgggctgcagaacagctgctgaaaacagcagaaatgctgttgggcgagcaggaaaacgttggctggatcgatttcgttccgggtgaaaatgccgaaacgttgatcgagaaatacaacgcccagttggcaaaactggataccagtaaaggcgtgctgtttctcgtcgatacatggggaggcagccctttcaacgctgctagccgcattgtcgtcgataaagagcattacgaagttatcgccggcgtcaatatcccgatgctggtggaaaccttcatggcccgcgacgacgatccttcctttgatgaactggtcgccttagcggttgaaaccggcagcgaaggcgtgaaagcgcttaaagccaaaccggtggaaaaagcggcccctgcgcccgcgcctgccgcagcgccaaaagccgccgcaccggccaaacccatgggcccgaacgactacatggtaattggccttgcgcgtatagacgaccgtctgatccatggtcaggtcgccacccgctggaccaaagagactaacgttacccgcatcatcgttgtcagtgatgaagtggccgcggataccgtgcgtaaaactctgctgacccaggttgcgccgccgggcgtcaccgctcacgtggtggatgtggccaaaatgatccgcgtctacaacaaccccaagtatgccggacagcgcgttatgctgctgtttactaacccgaccgacgttgaacgtatcgtcgagggcggcgtgaaaatcaccagcgtcaacatcggcggtatggcgttccgccagggtaaaacccaggttaacaacgcgatttcagtcgatgccaaagatattgaggcgtttaaaaagctgaacgcccgcggtatcgagctggaggcacgtaaagtgtccaccgacccgaaactgaaaatgatggatctgatcgctaaggttgataaataa

SEQ ID NO: 231848 - DNA, 1590 bp, Klebsiella pneumoniae
atgcagactgcacaaaaagtcattacggcctatcgtcacaaacgcattattgtctgcctgctggtagccctggcgaccctgggcgccacattagccatccgatttatttcgcagcgcagcgtaaatgaagattatattcgcacggccgccagccaacgggtggcggcgctcaatgacatcttgcgcccgctaagcgcgcagcgagccaccctgctccctctggtgggcaaaccctgccctgatatccatctgacgctgcgcaaaatggcggcctcgttgcaaaccattcgttccgtcgccctcgtcacgtcaggtatcgtttactgttccagtatttttggcccgcgacaggcagacttacatcgcctgcagcccgcgcttcctgcgccccgccctctgctgctcttctcgaacgacagctccttgctcaaaggctcgccggtactgatccaatggtatccagccgcggagagcggcctggacggcgtgatgctggtggtgaatattgagctgctgggaaccttaattcttaatgaaaaatcggccctgatcagcgacgtcagcctgcaggttggcgatcgttattttagcagccgccatgggcttctcgaaaaagcgcatgtcccgcagggcacggtgatttatcgccagcgctctacggagtttccgtttactgtcaatattaacggccctggcgcctcggcgattgcgcttgaggagctgcccggcgagctgccgctggcgctgatttttagcctgctaatgaccggcatcgcctggctggccaccgccggcagaatgagtttctcgcgggaaataagccttggcatttcggcccgggagtttgccctctggtgccagccgctgcaggatgcgcgcagcggccgctgctgcggggtggagatcctgctgcgctggaataatccccgccgtgggacgatttcgccggaggtatttatccccatcgccgaaggcaataatctgatcatccctctcacccgctatgtgattgccgaaaccgctcgccgcctggacgcttttcctcgcgaccgccattttcacatcgcgatcaatgtcgccgcgcgccatttcgctaacggactcctgctgcgcgacctgcacaattactggttcagcgtggatccggtgcagcagctggtggtcgagctaaccgaacgcgatgtcctgcaggatggcgaccagcatatggccgaacatctgcactttaagggcgtacagctggcgatcgatgattttggtaccggcaatacttcgctctcatggctggaaaagctgcgcccggacgtcctgaagatcgaccgctcgttcaccagctcggtcggcatagatagcgtgaacgcgacggtgacagatattattatcgccctcgccaaccgcctgcatattgttaccgttgccgaaggggtggagacgctggagcaggaaaactacctgcgtagccacggcgtcgatgtgctgcaggggttttattatgcgcggccgatgccggtggaggcgttcccggcgtggctggccagcagggaggagagtgagagtgagagtgagagtgagagcgagacgacagaataa

SEQ ID NO: 231849 - DNA, 483 bp, Klebsiella pneumoniae
atgagcgaacaaaccattctggacatgtgttgtggctcccgcatgttctggttcgataaacaggatgagcgcgctgtattcagtgatatccgtgctgagcagcacgaactttgcgacggacgcagcctggttatcagcccggacattatcgccgacttccgcgcgctgccgttcgctgactcctctttcccggtggtggtattcgatccacctcatcttgagcgagttggcgaaaacgcctggatgggtaagaaatacggtcgcctgaacaaagacacctggcgcgatgacctgcgtgctgggtttaaagaggcatttcgcgtactgcggccacacggcgttcttatcttcaaatggaacgaaacccagataccggtgagccagattctggcattgacagatgagaagccggtcatctggcaacgcaccgggaaggcggacaaaacgcactgggtaattttcgtgaaggggactgcagcatga

SEQ ID NO: 231850 - DNA, 756 bp, Klebsiella pneumoniae
atgaaagaacgcggaatgatattcaacggggaaatggtgcgggccatcctcgacggtcggaagacacagaccaggcggattatggcaccacaaccagcagacgatatcgagcgttgcattttccctaacccagaagcaattggctggaaatcctctctgaggcacaagcatggcagtaccaccgctcatttttgcccttacggcaagccaggcgaccgcatctgggtgcgcgagacgtggggagtcgtcagtcacgaacttgatgaggatggtcgaatccaaccatggacgccagaccgtccggctacaactattcacgaaatgccgtttggcaatggctattactctggccacgccatttatgcagctgatggtgattttacctggggtgatgacgatggttatgaagatggccgttcgtgctggaaaccttccattcatatgccgagagcagccagccgcattctgctggaaatcaccgacgtgcgcgtggagcggttgaacgctattagcccggaagatgcagagtcagaggggctggagtgcaccaactttacaggtttcggcgacgaacctggattacctagctatccagagccggatgtttatttcgacccactgaagaaacagtggaaggaatatccgcctgaagcattcgcggggctatgggaatccatctacggcgaaggaagttggcaggccaacccctgggtttgggttatcgagttcaagcgcgttgaaggcggtgcagtatga

SEQ ID NO: 231851 - DNA, 222 bp, Klebsiella pneumoniae
atggagagttcaacgacacgcaacaaagtggaggctcgcaggatagaaagctggttacacagccagatagctgaactgggaaccacgaatatcgccaaagtggccggagtgaataagtcgacggtgagtcgctggcgggaaagcctgctgccgaacatgtcgctgctgctggccatcctgatttctaacaggccgggagagaaaggtgattttgaagcatga

SEQ ID NO: 231852 - DNA, 393 bp, Klebsiella pneumoniae
atgaccagcaaattaaccagagagcagcttcacgaacgcgctcgtgaaaacgtcaaagcgctgaaaatggcatcacgacagacagcattcgaaagcgctcgcgaagaaatattggcagacctgcagctggctgaactggcgctggccgcaatggaaagcgagccggtggcgtacatcagcaaatcagactttgatgccggttatccgcatatcctggcaagaagagatttcaataaggcttgcaccatggctgtatatgccgcgcagccagcgccggtagtgcctgatgaaagagataaggcagttgatgctgatgaccatccattgctgtggagctttaacgaaggctggaacgcctgccgcgccgccatactcagcggaggtaagtcatga

SEQ ID NO: 231853 - DNA, 522 bp, Klebsiella pneumoniae
atgaaattcgaagaatggttagcacaacaggatggggttattgaggtagattgcggctgtgttaccacggaagctttttatcactggatgcgcgtagcttatgaggctggcaactctcaggtgattccggatggttggacatgcaacgataaagcaaacgcagcgctgatgatgcttgatcggattgaaacggtagaccctgttgatgatgaccgtatcgacggcattaagcgcattgttcgtgagctcgcagccgccccgcatgatacccccgctctgaactcggtgcagagcgtcgctaccgtgccgggtaaatggattcaggtaagagaacagatgccggagagtaagcctggaagttacgaatacctggtatttgaaactctcaacaatcgagtgaaccacgattactggaatgctccagataaaggtgacgatgcatttacaccattctggaactattacggcgagcacgtcacccactggatgccgctgccagccggtccgcaggaggtgaggtga

SEQ ID NO: 231854 - DNA, 672 bp, Klebsiella pneumoniae
atgagcatttatcaacgcatcaacggcgctgactggcgcaatatctgggtagtcggcgatctgcatggctgctacaccaatctcatgacccagctcggcaaggtggattttgacccggcgcaggatctgcttatctccgttggcgacctcatcgaccgcggcaccgaaaacgtggagtgtctggatctgattactcagccatggttccgcgccgttcgtggtaaccatgagcagatgatgctggatggagtcgaggattacacactggaacggcactggcgagctaacggcggctcctggtatttctttctcgatgatgatgccgggcgctatgtcaggaacaacctgctacaacgcgtggctgatttgccgctgattatcgaactggtgaccggcgaccggaaggttatcatctgccacgctgactacccacgcgacgaatatgagttcgataaacctgtaccggaagagatggtcatctggaatcgcgatcgcatcagcgactctcacgatggcctggcgaaagaaatcactggtgctgacctgtttatcttcggacacactccagcgcgcgaacccgtcaaatacgccaaccagatgtatatcgataccggtgccgtgttctgcggcaacctgaccttggtgcagatccagggtggtgatcatgcttaa

SEQ ID NO: 231855 - DNA, 690 bp, Klebsiella pneumoniae
atgaacacccaatacctccagtatgttcgccagcagctgatagtggccacttccgatctgagcggtgcgacgaaggggcaactggtagcctttgcagagaacgcgcaattcaccgctacggcgcgcagccggggacggaagaaggtgtatagcgaggaaaagcaaaaaatggttaacccggatggcccaccgatgagcggcagccagtcccgcgctaagggttcatcaatcgctctggttctgcccgttgagtattcgacggcaagctggcgccgggctctgctgtcgctggaagagcatcagaaagcctggttgctctggaactacggtgaagaaacaaaattcccacaccagacaaccatctgccaaatatcatggcaggagttcaagcgccagatagaaggggagaaaattgctgcaaaaacgctgggtaggctgaaagctatgatatggcttgcagcgcaggacgtaaaagctgagttagccgggaagcgcgtatatcagcaacaggagcttgcatcccttaccggtaccacgccgaataactggagcacaaactacgcatcccgctggcgggcaatcagagagatatttctcaagctggatcgtgactcgcttctgagtgtgacaaaagcacgatcgcagcaaaagtcgacaaattaccattcaggtattgcaaaaatgaattaa

SEQ ID NO: 231856 - DNA, 300 bp, Klebsiella pneumoniae
atgaaccaaaaaaactcaggcgtaaaaataaaaaaggtatctttcgactggaaagaggtaaataaatctgaacttacaattagttacagggtttcctgcaaggttacaacagataatgggttagaggttgaaggcagtcatttttataaatggagcaagccaggtgcagatctttctttcccttttaactatggagatgcagagactaatgccgagcttgaggcctttaaattagctgtgtctcgagtgcagatgataatttcattacaaatattacctcaccagaacaatccgaactaa

SEQ ID NO: 231857 - DNA, 354 bp, Klebsiella pneumoniae
atgagtagagaagatccgcaactgagaatcaggctaccaagtgaacttaaagataaaattgaagcctctgcgaaagctaataaccgctcaatgaatgctgaaataatcttcaggataaacctgagttatcttcttgatgaagacaaaagcatgttcactaccgtcgccgaacccaacagctatgttgggcatgctgaaagggttcttaaatctcgagtcgaagaatccttgccatccttccttgaacttatggcgaaaaaaatcatgacggatgaattcagggacgaactcaagagaaaagcaagggagcaagccgaaaaagaatgggatgagatgcacaaaaaacccacctga

SEQ ID NO: 231858 - DNA, 168 bp, Klebsiella pneumoniae; identical to SEQ ID NO: 96561

SEQ ID NO: 231859 - DNA, 3444 bp, Klebsiella pneumoniae
atggctggaacctttgatgctggcagcgttgtctatgaagtcgacatggatacttcgcgtttactggcagcgcgaagagaagttgatgcggcactgaacggtcttaatgggagcatgggccgccttgaagccagcgttaaccgcactgagcgctctattggatcgatggaacgaacaatgtccagcctttctggcgttgctaaaggcttgctggccgcgctttctgtgcaacaggttgcgagttacgccgatgcctggactgaactgaataacaaagtcgctaactcggttcgtactggagagacgcaggccgaagttatgcagcggatctttgatgtttcacaagcaacccagtcatccctgaacggcacggcgactctttacgcccggcttgagcgcggaaccagaacatacaacaccagcgcagaagacttaacccgccttaccactattatcaaccagggatttgcggtatccggcgcaacggctcaggaagctgagaacgcaatcattcagctatcacagggtatagcttccggcgttctgcgcggcgaagagtttaactcagtgtcagagcaaggcagccgcctcatggtcgctctggctgattcgatgggtgtttctatcggtcagttaagggctatggccgctcaagggcaactgacaacagacgttgtagttaaaggacttctgtcacaaggggatgtaatcggcaaagaatttgccaacaccaccgtctcaatcgccaagggattgcaggtggccggtaacaacgtaacgaaattctttggcgaaaactcgacggttaaatcattcgcagcagggttccgagactctgttattacaataagcgaaaaccttgagacgctgagcggcgcccttatcattgtagctggcataatgggaagccgttatgttggcgcgctggcaatgtccactgccgcaaaaatatccgatatagcagcttcaagacaacaattaatagccgagaacgagcgggcgcaatcagcgcttgtggctgcaaattccgcacagagaaaggctttagctgataaagaggcggcactatcatctctggctctggctcaggctgaatataacgtagcaaaaggcagcgcagctgaggcgctggctcttgatgctcttatagctgcaaaaacaagagcaactatggcatcagcaacgctcgccgaagctgaattggcccaggcagcagcttctactaccgcggccaccgcagcaagggctgcatctgtaggggttggtttagctggcaaagcattgtcattgataggcggcccagcaggcgcggcaatgttagcggcgggggcaatattttacttctggcagaaagcacagcaagccagagaggaagcgatccgctttgccgatagtctggacacagttaacgactcaatgaaggcgatgaataatacccagctcagggggacaattgccgatgccaataagtctattcaggcacaagaggaatatgtaagggatcttgaagacagcattgataaacttaaaggtgagattgatgactataccgcaagaggaaagcagttcggaacaacaatagagcaaggaaacgggttactaaaaatcgcatcagataaaactgatgagctgaatcaaaaatcgcgcgacctggcgaacgccaaggaaaaactagcaagaactcaggccacggcagccgaagcaagcagaacccttacaaacaacatgctcacgtctatgggtgtgcatgacagcctgattgagaagggaacaacgcttgaaagggtgcagggcgctgtagccagggcatttggcttgactgctgatgagataaatcgagcaaaccaagccgggcaaaaattcaaccccaaatccttgcaggtatcaccacccacagaagaagctgacaagatgattctcagcctcgaggagcagaatcaacttttaaaaatacatgatgaaagacaaagggcggtaacaaaggcgagaatggaggcagctaaagtaaccgataaccccaatcagatagccagagctggtgagcttgctgggcagatacatgatttaaatgaggctgagaaagcaagggaaaaagcgctaaatgattctcaatcagcagcgcaaaaagcagccacagagcaggaaaatatcgccaataaacttgagcagttgcgacaagaatcattgctaacagcagacagcacaaaagagctaagtcgagagcaagcaatattacaggctcagcaatcactaggtaagggagccacccaagagcaaattgctcttgccggtaaataccgtggagaaatatgggatacggctaatgccctcaaagcccaggctgcggcagaaaaactgctccctgaagccagagagaatgcgtcttaccagcaggatgttaaagatctgcaaactgcactggccgccaaaaaaatcactcagcagcagtacaatcagaccagtgagcaactggaggctcagcaccaggttaatctggctaagatacgcgctcagcaaactgtaagccccatgcaggaagctcgggggcagattgaccctgtccaacagctggctaaccagcacgcgcaggagttggctctaatccagcagtttgaatcgcagaaggggcagattactcagcgcggacttgagctgatgaatgccgctaacactcagtacgagcaacagcgcatagcggcgcagtgggagatatggcgacaacaaaatgcaggatatgaagtagctgccgcggcgtttgattcatttgctggaaacgcctccaacgccctcactggcataatcactggcagcatgtctgtcagcgaagctatgcggtcgctaggctcgacggtacttaacagcgtcatcaactcctttgttcagatgggggttgagtggttgaagtctgtaattatgggtcaggctggcatgaccgccgcttctggaatggctattgcgcaagggcagctaatcgccgcttccatggcccctgcagccgcaatgacatctcttgcaactgctggcgcgaatgcagtgccggcacaggcgggaatagcttcaacagttggcatggcgcaggccctttcaatagcgggagcgcggtacaatggcggaccggtatcagctggcggtctgtatcaggtcggcgagaaaggcaaaccagagatttaccaggccagcaccggcaagcagtacatgatccccggtgataatggaaaggttatcagcaataaggatatgcagggtggcggtatgcaggtaaacatccagttctttgaccagacgaccggcggaaggcataccctgcaaactgacaccacaatgcagaacggaatcgctgaaataaaagcctacctgcttgatgaccaggcgaacaatggagaaatcactcaaggttacgcggctgcgatggggcagcgagtagttgccagaggtgcttactaa

SEQ ID NO: 231860 - DNA, 528 bp, Klebsiella pneumoniae
atgcttaaggttcggttcgattcagaaaaggctttagaggccattctgtatgtagcctctaaagcacccataccagacatttaccatgtttgtaagattctttattatgcagacaggtttcatcttgagtcatatggtcgtcttttgtcgggcgatcactataacgcgatgaaagatgggccggtagccagtaacacttacgacattattaagattgctcgcggagacggcaggtacataccaaatggttgcgatgcggatgatgtaagaagctcgtttcgtgtaatcggcaaatatgttaagccaaagcgtaacgcggatgaggatgtcttcagcgactctgatttagagtgcattgataagtcgatagaatttctcggcggaatgagcttcgaggatatcaggaacatgagccatgatgctgcctgggcgtcggcagatcctaatggtgaaatgtcgcttgaagccatcataggcgagctaaataacagtaagctcatactggactacgtacaaaacggatgctga

SEQ ID NO: 231861 - DNA, 150 bp, Klebsiella pneumoniae
atgcagaagacccatgaattccttgaatgggattcgttcgtgaactgcatcgaggcccatgctgccttcaaccttgatgatgtaaaggatcaaatatctaccaactatggttacattttgaaggtaagcgtgcagcaagaaccgtattga

SEQ ID NO: 231862 - DNA, 957 bp, Klebsiella pneumoniae
atgaaaaagcccgatgcgcctgtcgaagaggagagtacgctggacaagatagttggcgcaacggcggcgaaatcgctggcgacgggcaatcgcgcgctgatgaccgaagacatggcgttacaactggcgcccggcgcgtttaagaagaacgtcgacgagatagtggcgctgctcctcaagcacggcgcggacgtgaaggccgtcaacgcgtccggggaatcggcctttttcctcgctgtcgatcacgcgcgatcggcggaaaccatcacgacgttggccaacgccggggcggacaccagcctggcggataaatccggcaccacaccgctgatgctggcggcggcgggggatgagcccgatctggtgctggcgctgtcggcctccggggtggaagtggatcagccgaaccgtgaaggactcacggcgctgcaggtggcggcgggtcagggggcgcctgcggtgatcgcggcgctggcgcagcgcggcgcaaaggtggaccagctttccgccaacgatctcagcccgctgatgctggcggtcaaaatgaataataaagccaatgtcgaggcgctgcttgcggctggcgccagcgtcaacctcagcaataaggccggctatacggcgattggctacagccgggccggcgaggttcgccagctgctgctggcacagcatgccgagctgaaggggcaggccgcgcatatggcgcaaagcgaactgcagttttgtgctaatgcctttgccgacaagctggcatacagcgacatcgcccgggcggtgaataacgatacccgcccggatattatgcgtcatcagcaatcctgcccggagctgggggagctgacgatgctactgggagagtttacattcaccccggcgggcgcaacctatctcggcgagccggtgacatgtaaggtatccgagtatcgcaaaacgtttgaggtgaactgccgctaa

SEQ ID NO: 231863 - DNA, 126 bp, Klebsiella pneumoniae
atgacgctggcgatgctgttggtgcttatcagccaccataaagggctgacgctcttgctgatcgtaattattgcgctcactccgctggtcaaaaaactgttgagtcaccttcacgatcgttcctga

SEQ ID NO: 231864 - DNA, 510 bp, Klebsiella pneumoniae
atgaccacgttcagtgtagaaattcacgaagatatcgtcaccagacttaaagaaagtgtacgtccggaaataacgcttgatctgccatctgtgccggagcaaggcgataagttgtgggtgaaaagcctgcgcggtacgcatattgtagaaacggaaaagtgcatgattctggagtcgtgtcgcgtttcacgcctgcggccgactgtgcggttggtattgttatttggtatcgcaactaatcatgggcacgacgcttcaggcgaacaggaagccctccgcgaaaggcgccagcatgcaccattgccagagatcattcgcagcattagctcggaacaaatccaaaaggagttgtcgcagagtcgtgctcgaatggcccgcaaattagcgctgctgaataagaaaggcaccttcacccctgagcgtgctggccatacatcgagtaccgttacaaatgactgtgctgcaggtggagtggaagattctgattttgcagggagcgataaagaatga

SEQ ID NO: 231865 - DNA, 966 bp, Klebsiella pneumoniae
atgaccgacggtggtgtgattgcaatagttcagaagcttgctaagcctctctttagtattgttaaggtgacggggccatttctgttatctcaatccaaagctggggttgaaaattactctaattatcaactcaataagtctcgtcttgaagcgatctctcttttccttgctgaggaggcaaaaaacatttcagcggatagggctaaactaagagataaaataattaactcaaatggactcgaaagaactcgagcccaaaatgactatgatttactgactaaggaacttaataaattctccaccattagtaaaataaaaaacttcatcggtgaagatgatgtatttgataatgaaaaagaaataagtgatggatggattgataaatttaatcaactcgcttcctctttaaatgaagattggcgttcgcagttgctagccaaagcattttctgaagaattaaagaagcctggcgctattactatggttgtcctaaacagcattgcatcatttgatgaagcaagtttccgtaggtttggtcaaattatcaacgccagtattagattgtatgaggttaactgcttcccctcaggtcatgctgatacagtttttaatatagatgggaaagaaataaagctaagtcaaatgctttatgaaatcagccatttgaatttaattagctcgactgattcaggatatataaattgcgctaacagcctaactcacttacgatatggaaaaagaattctcacaatacaatacccacataaccccatcccatatccggcacagattttatgctatttcttcacaacactaggcaatcaaattgcttcgttttatgaaagagatttgataccacagggacataaaaattttgaatcccttatcgaaagcgcaaaaagaaaagggtatggttatagtgaaacggagctcaccgaggctgattacagtaccctaggcaactaa

SEQ ID NO: 231866 - DNA, 153 bp, Klebsiella pneumoniae
atgccgcaaaagtatctgttgtttggcttagtagtgatttgcttcactatcttattattgacctggatggttcgtgattcgctatgtgaattacagcgcaggcagggaaatattgagctggtggcattcttagcctgtgatattaaacagtaa

SEQ ID NO: 231867 - DNA, 1320 bp, Klebsiella pneumoniae
atgaacacgacagctaacactactcgtattcgctggtggatagccgggttaatgtggttggctattgccatcaactatatcgaccggacagtattatctgccgcagccccacatttaatcgatgaactgaaactcgaccccgaaatgatggggtttatcatggcggcttttttttggtcatactcgttattacagatccccgctgggtggttcgccgatcgttttggtcagaaaaaaggtcttggtttagccgtcgcctggtggtcaattgccacctcgatgatgggtgttgccacgggttttaaatcacttctggcactgcgtctggctttaggtgttggcgaggccgccgcctaccccagcaacgcagggatcgccgcacgctggtttccggataaagaacgtgccaccgtatccggactcttcgatagtgcgtcaaaatttggcggggcgattgccatgccgcttatcgtctggatgatctacacctttgactggcgactgacctttttgattatcggcagtgtgggcattttatgggttatcgcctggtattttatctatgctgaaaacccggaagaacacaaacgcatcagtccttcagaagtgcgtattattcgcgatggccaaaaacaacatcacggcgacaaaactgtattgcccatgaaatggtataagctcttgcgttatcgtaacatttgggcaatgtgcatcggcttttttaccatcaattatacctcctatttttttattacctggcttcctacttacctggtaaaagaaaaaggtatggattttattaaaatgggaatggtagccgctctgcctttattatgcgggatggtgattgaagtttttgctggctgggcctcggatcgtctggtacataagaaagtactgtctcttacggccacccgtaaactgtttttgactatcggcttgcttatggcactttgtatcggctttgcaccatttaccgactctgtgtttatgaccgtctttctcttgtgtgtcgcaaaatcaggcacgacggtcgccgcatcgcaggtttgggccttaccgggtgatgttgcacccaaaaatagcgtctcaattgtcgctgggctgcaaaatacggtttcgaatatgggaggcgcagtcggtcctatcattacgggtgcgatcgttgctgcgacaggctcattcaactgggcactgattttctcggccattcttgtcgttatcgggataatcaactacctgttcctgatgggtaaaattgaacctatcaatgacaaaggtggaaaatcacccgtccttaatgccgcagaacaacattaa

SEQ ID NO: 231868 - DNA, 1248 bp, Klebsiella pneumoniae
atgcccggcggtgattctgtttcaaccagcggctgggatggtattgtccaggctgacaaaggtaacatctgggttcctgatggtgcctctttctgggaaatgggatgttcctccgacatcattactaaagcacgctcagattttcggaagagaaatcaacaaatttcaccacaggaagcgactaaaagttgctttattttcgtatcaccacgtcggtggcccaaaaaagttagctggctcaaagaagctcgggctgaaaacatctggtccgacgtttatgcacttgatgctgacgatctggaggcgtggctggaaaacactccggctgtagctctctggttcggtgaactaacgggccatactggcgcaggcattgaatccatttcccatttctgggaacgatggcgcaatcagtcacaatttccattaacaaaagaaacgttgctggcaggcagagaagaggaaaaaaacacgctgaacggcattctgtcagagaaaaaagaacaaattattatccgggcagacagtcaggaagaggctatcgcttttgcctgcgccagcttaatagaaatggggcatgaaaatatagccgcctgcattactactgaagatggatggcactttattgataaaaatccctcaattaagttctgtctggcaatgaacagtgatatttccagacaaagccgtcatcagcctgaacgaactgtttttattccattttccctaggcgatcacaatactacgggcaataaacaaagtgataccattactctggagcgtcttaccagaagcggtttcgaagagaagctcattgctttaggagaagaagaatctgatgcaaggcggttatcacgaacaaccgggcgctcctggtcagtttatcgacgtcttagggccaagaacccggcaatctcatctcccgtatggctgaccacatcgccagcaaatgcgttaatcacgttgactttggtggggtgctggaatggcaaaaaagcaggcgataaatattgcgttgaaactattgcgaaaataagttacgaagaactggaacaggaactacgcgaaatctctcttcgggatgactctccggtattacagattggcaatgtatggaaagcaaaatctcccattgagctattgtatcaactagcccctcgacttacagaaagtcagctcgaacgtttcttcttggttgtaaaacaaacgctacttaaacccgatcctgcccttgaacggctttgttga

SEQ ID NO: 231869 - DNA, 606 bp, Klebsiella pneumoniae
atgaatagcctgttaccgccgggatcgtccgcgctggagcgcaggctggcgcaggcctgttctggaatcagcgatttaaacgtgccgctgcgtgacctgtggaacccgtggaagtgcccggcaaagttcctgccttatctggcgtgggcgttttctgtggaccgctgggaggaaacctggacggaaaccgctaaacgccaggctgtcagtgatgcgttctggatacatcagcgcaagggaaccgtggcagcggttaagcgcgtgatcgaggggttgggctactcaatgaccattgaggagtggtgggaagtggccgaccccgcaggaacattccgacttgagattgacctcaatgatatcggcatcactgaaccgatgattaacgagcttgagcgaataattggcgatgcaaaacccgtgagccgccatatatcacagctaacgctatcggtgagcactaagggcattgcaaatataggatgcgctatttttgacggtgaagagataacagtttatccggctggctataccccggatgaaagtatttattacgacgggcaagcccattacgacgggaattatcatttttcaggtgacagcaaatga

SEQ ID NO: 231870 - DNA, 702 bp, Klebsiella pneumoniae
atgtctcatgtagtagaggattgccctagatgtggggcgcaaaaaattgcttttgatgttcgtggggttaatgtttgcggatcatatcgtgggtttcataatgaggatattttaagatacgaagctttttgtgtttgtcgtgaatgcagtcaaacaactttgttccttgttgagagttgcgattcgcaaacaaggttagatgacgtcccgtggcagggtgtaacattcaattttacaaaaataggtaagattatcagagcgatatcccctgctgatcttgattacagtgaaccaccagagcatttaccgaaacatattcatgatgcttatgaggagggagctaagtgcttatctataggttgttataacgccgccgccactatgttcagactatgcctagattatgcaactaaaggattgttacctgaaggtgaggaaggaccagcaagcaaggttagaagaagccttggcttgcgtatggaatggttattggataataaaatcttacccgaagcgttaagggaacttgcggaatgtgttaaagatgatggtaatgatggagctcatgagggcatcttagacaaagaaaccgcagaggatctcgacgactttgtatatatattacttgaacggttgtatacagagcctcagcgtctagttgatgcaaaggaacgtcggaagcagaggaagggtaaggaatag

SEQ ID NO: 231871 - DNA, 705 bp, Klebsiella pneumoniae
atgactatcttaatagaaaacattcccatgcccagtaggctcttactgacatggcaaccggttgacggaggctctcgctatgtcattggtgagcttcttcaagatgagtctgaaggctacgagtttaattatcttactgatagcaaagattttgctaaagctagggataacggctttcgcggttttcctgcttttgatataaaagttgcgactcatcgcaaagacgttatgcaaaccttttcaagaaggttaccctccaggaaaagagaagattttgacgattacttgctgacgtttcgtcttcctgctgattttagagagaatgacttcgttttgctcgcatgtactggcggaaaagttgctagtgatggtttttattttgtcccagacttgtcttctgttcggccacctttcgattacgtcatggaggtcgctggaacgaggcacatgatcaaggaagggcgtctagcgcttgatgagatatcaattggtgatgaagtcatattgcggaatgaagataccaatacggttgatccgctggccatattggttacgaaaaacgacaatcatctcggatatgtcaacaaggcattgtgcgccgcattacgtgatctaagtaaaaaccatgatgtcagtggagtggtcgtacgtaaaaatggctcttcggataggcctttgatttatgcaaaagtatccgttcggtaa

SEQ ID NO: 231872 - DNA, 912 bp, Klebsiella pneumoniae
atggattgcttagatgtaaccaattggactgagctagatgttttcgcacaatatcctgttggtgctcgctctaaggcattggttatttcccctgatgtagcaccccatggtatcaaagcatcgtggccgtatctttttaagagaagtattaaaaagtatccagatcaattttggtgtgagatcgttgcctacaggattggattgaagcttggttttgatgtccccaaagcagttccatcggtaaagactaatgatttggggcatacgttttgcggggccctcattgagtggtttcatcataaagattatgagaaatttgctcccgctggtgattactttgtccgaagagatccaaattttgatcgcgagaaaggagctcagcattcccttgaagggctgaggattatcgcgaaagctcttaaagttgactatgttgagtggttggagaacatggctctctttgacgctgtgataggtaatacagatagacatcaagaaaattgggggtttgtcttttcacctttagccagcgagtgtcagcttgcaccatttttcgataatggtacgagcttatgttacgaacgctttccggagcatgttgccgattggaccgatcatagactcagggagcatgttggccggggaaggcatcatttgcgtaagactctgggcaaagatgagtatcagagattaggtcatttagagttcatcaaagaactttgtgataaaaaagaagcattaaaacagcgggtagctgaaaaactggctcttttgaaccatgatttttgggagtcaacttttgcggagttgacggaaataaaatgccctgttccgctgactagagaacgtgctgcatggattgttcgtgtaacaaacatgcgtattgaactgattaaaggtgttacttcatga

SEQ ID NO: 231873 - DNA, 546 bp, Klebsiella pneumoniae
atgaatcatgtaatgttagatatagaaacattggatgttgaaaaaacggcttatatcctttcggttggtgcggcttttttcgtgccggagactggcgaggttggtccgggtttctatcaagttatttcgcttgatcatgaacaagcaggcagaaccattgccccctccactgtaaagtggtggatgtatcaaagttctgaagctaaaaacgaaaattttggtggcactaaggaccttttagacgttctgaatgaatttgtggcgtttgttcttcataatcgtaatggccgagtaaaagtgtggggaaacgggaaagagttcgactgcactatcatgcatcatgccctgtcacaggcaggtctggagtgcccatggtcattcagagatactcttgacgtcagaaccatcttagcgcttggtgaaagcaaaggaattttttctcatgctgacaaaaagttcactggcatcaggcacacagcattcgatgatgttttatttcagatcgcactggtttctcatatctatatgaatttaaataaaaaataa

SEQ ID NO: 231874 - DNA, 861 bp, Klebsiella pneumoniae
atgagcactatcctgaaatgggcgggaaataaaaccgccatcatgccggaactgattaagcaccttcctgctggtccgcgactggttgaacctttcgcgggttcatgcgctgtaatgatggcgacagactatcctcattatcttgtcgcggatattaacccagatctgataaatatttttaagcatattgcatttgactgcgagaaatttatttcaaatgctaaaggattcttttcaggcacaaatagctctgagtcttattgcaacatccgtcaggattttaatcattcggctgaaatcaccgatttttggaaagctgtatttttcctttatcttaatcgccatggttatcgtggattgtgccgctataatttgagcggtcattttaatgtcccttacggtaattacaaaaatccgtattttcctgaaagtgaaatacgcgcttttgcagaaaaagctcaacgcgcaacgtttatctgtgccagctatgatgaaacactggcgctgctgcaggctggtgatgttgtttattgtgatccgccatacgatggcacatttagcggttatcacactgccggttttacagaagacgatcagtatcatctggcgtctattcttgagcgccggtcatcagaaggtcatccggttatcgtgtccagcagcgacacgtccctgacacgttcgctttatcgtaattttacccgccatcgcatcactgcaaagcgcagcatgggtgtggctgccggtgagagtaaatctgcagcagaaatcatcgccacaaaatcagcaggctggtttggtgtcgatttggcgtccggtccagatatctcggtggaaactgaggtgcgggcgtggcagtga

SEQ ID NO: 231875 - DNA, 234 bp, Klebsiella pneumoniae
atgcgaaatactgaaacccgtaccactaaaaccggaccagatgatgctggactcaacctgctgctgactgaggcacgcaaagaagaacgccgtggacgcgcagatgtgatggctgcgcgtctggattctttagctgcccgtatcgtgtcacgtcagcttaaccacacggaagcggctgagctactgcgtcaggaagctgtgaagattcagaacgaagcgcaggagatccactga

SEQ ID NO: 231876 - DNA, 1209 bp, Klebsiella pneumoniae
atgatacttactcaacaagaactcgatgaagaacttgatgacctctttgacacaattagaagaaaatcaagtattcgaccaccaattgagattgaaaaaaatcttactttgatagatgacttcactattaaatgcaataaatttcgtagttgtttaatagattacattaatggcaatgataacaggctaagttcacgcttgcgcacgagacttagggctgtagatattttacagaaagaaatcgtttcttgtttagaatgtttcttatcaggagatatcaagtcggcgtatgactcattcgaaaacatgctcgaaccccgaactatatctcgccatattgaaaatatatgcatacctctttctgagttatgtaatgatgatgaaccattatttcgcgttagaaaatctgatgcaccacttgcatcaagaagagatatgtttcatattccattcaatcagcgccaccttgtaagagcacagagattttctgtggctggtctaccctgtttatatttaggaacttctctttacatctgctggagagaaatggataaaccagattttgacaagttatatatatctgcctacaagatcgacgaaaatgatgattcaatggtactaaatatagggccagattttttatataaaaagagatctatcttagaatcaaaaagaaggaacagatatgatttcaatactaaactttcatatttagcactttggcctttgataattgcatgcaattatttgaaaaaatatgacaatgcttcttttatacaagaatatattatccccaatcttttaatgcaatggatcagccgaaacagcgacgaggatgttgttggtatagcctaccgttcaacaaaattacctgctaatgctttgggtagcagaggaataaatgtggtgcttcctccaaaagtacgttacgaggagatggccaaaaatgaattttgtccaaatttagcgaaaattttcaaattcacattacccgtatcctggcaggttttaaaaacagttgagtacttacctgagtcagttgcacaatccaatcgagagtatctcagccgaaggttgcgaagaagaaaagatcgtgcgcttacaggaagcatagatgatgaaattttgaacatttatcctttaactgacttttataaactcgaaacttgcatggatgaaattcaagtatatgaccatattaaaccatga

SEQ ID NO: 231877 - DNA, 2541 bp, Klebsiella pneumoniae
atgagtgaaaataaactgtttgataattatgagattatagaaagaaatctactaaaaacagaatcaaataaaaatattcctgaagtaattcttacccttaaagatggagagagttacattatcaaacattggccaagaaatacctcaagtgatgaacaagttcttgaaagtatttggcaacatgaattacgacaactacaaaggttaaagggatatcctggagtaggagattatatagtaaatcctgttgaatcaaaaaaaacaaatgaagggtactatcttgttttaaattctgatggaagagtacctacttcttacttattgaataaaagaacattatctctcccaagaaaaagccactggctcacccgtttaaaagatccagcagttagaatcagattctggaaaaatatctgtagaattacaaatgctattggtttgcttcatgcgcaagggttgttacatcgacatttagatgaaaattcaattctaacatatgattatgaatcagatgattataacgattttcaattgaccggcttcgagtggtcaatccgaatgcctacacttaccagagctaaaattgagcctgttggtgaacacggtaaaatatcaacttttgctacagattggatcgatttaggaattttaatagcaaactttttaaaaatagatataaatgaaattaaatctctgcagttcccagcagaatacttcatttctaagtacgatctgacaattagtgaagtagctataattcgtagtctattaggaatccaacctattcagcaaaatgctataaaagaacttcttggtgaaaaagatattctacagtttttagatggtataattgatgagcttactgaattctataaaaaaacgaaaactattcatgggttagcaataaacactaagtatgaacaatctgataataccaaagataaaaaagagctatttcactgcatacaaaaaataatctttgagaaaagtgaattcacaatatccagagatgactctgatataataaagagtttcgtaagcgaagatttatcagattcaccagtattatttgttaatacctcagaacacaatcgatatgatgtagtattgaaagggaaagaacttttttatgtactaacaccatttcaacctgaccatcgaacgagtgacaaaacatgggatttaggttattcacaatatgcatatttagagttgccaaatagattctttggtaaagataattacattgaactaaatagtaataatatatcatgttatactcattacgaagccaggaaatttttgaatagtaatgataactcattaagcctactgtcttgggaaatgattttcaaagatataggtaaaactaaaaacaaaagaaatgaagaacatcttcgattattggagggcctaactgccgttcatattacaaatatcgcatatgcaaaagcagaaattttccctgtagaaaacatcagtgaagaaagcgaaccagataatattagctcatggatctttaaattcattcccaaatttgacgaaacaacggaggaactgtctaagtcgctaagtattgactcaccatctgtcaggcttgaaaaaattataaatagtagtgaaaacaacgataaggtatcttggagtttagtagacaataatgatttcagtagagttgacgaagagattcttttagagttttatggctatgaaacagatcaagacaatcaagaaatatatagcttcatctctaaaaaacctcttccagaatggaggaatttttatattgttcccgactcgattgaaggaactctgcgccaaataacaagacatgcaaatacattggatatgcttgaaaatcatatcgaattgatgaatgtaattacttcccctaattcaaatctcacagtaagcaatgaagatataaatgcaaaagatataatggactcattggatgaatctaaacaaagagtttttacaaaagtattatcaacattgccaatgaaccttgtacaaggtccaccgggagtaggtaaaactcacttagtcaaagcaatttctaaatttatctttaaagaagaacctaatagcaggatactctttactgcacaaagtcatgcaaccgttcaacatctatatcacgaagttgtcaaagatttacttactgaaaacaaacatacaaatgatcccataattattagatgcaacaaaatatctggcgaagataatataatattaaacagtgccgatgaaactggattagaatatttgcggaagttcgtagaaagccctttatacaaaaactcttccaatcaaagtttaaaaagtaatatttccagtttgcttaaagctcctccagtaaagagatacccactaattaatcaactaattaaatcagcaagcttaatatttgctacaactaattcagattatgtagagagaatgataaaagaaagagcacaatttgattggtcgatcatggaagaaagtggaaaggttacaggtatagaattaataagcccacttttattatcctactga

SEQ ID NO: 231878 - DNA, 486 bp, Klebsiella pneumoniae
atgctgtgcgagggtcgagatagcccggcgctgttcggcatagtcggcagcgagctggttttttaccgtgccgttgtagtggctgtactgcaggttgtaatcgagttcggggttttccagcatcgctttcttcgcactcatcgagaacaaacctgcctgctgcgtccagtagttctgcagccggaaatacttcacgaagttttcagacgatggatacagaatggcttcgtacaacgaccgtttggtggccgcctggagtgtggcgagtttctccagaatatccatttgcggcggtggtgccgctggtacggctttcctgtcctcatcacggggcttcagtttctcgttgtaccactgccagcccgcgtctttggcgaaagccggcatcagggcgcagcaaaggcaccccgccagcatggcggcatgtattgttcgcatggcaaatacccttttatgaattattgcgactggcgtgacagatgctga

SEQ ID NO: 231879 - DNA, 1392 bp, Klebsiella pneumoniae
atgctgtgcgtaatggaggacaggatgcgaattaaacttctgtcactcttctgcggtgccgcgcttggcctgtcatttagtgccgccgccgacgtgaatggcgacatgaaccaattcttcaataagcttggctttgcgtccaataccagccagccgcaggtctggcagggacaggcggcgggttacgcctccggcggttcgctgtatgccagaacgcaggtgaaaacgatccagctggtcagcatgaccctgccggatattaacgccggctgcggcggcatcgatgcgtacctggggtcgttctcatttatcaacagcgagcagctgcagcgcttcggcaaacaaattatgtccaacgccgcgggctacttctttgaccttgccctgcagaccacggttccggagatcaaaactgccaaagacttcctgcagaagatggccagcgacatcaacagcatgaacctcagctcctgccaggccgctcagggcattgtgggcggtctgtttccacggacccaggtggcgcagcaaaaggtctgccaggacattgccggcgagagcaacatttttgcggactgggcggcttcccgtcagggctgttcggtgggggggcagatggacaaagtgcaggataaagccagcgataaggacaaggagcgtgtgatgaagaacatcaacattatgtgggatgccctgtccaaaaaccggctctttgacggcaataaggagctgaaagagtttgtgatgaccctgaccgggacgctgatttttggtgagaacagtgagatcaccccgctgccggcacgcaccactgaccaggatctgattaaagccatgatggagggcggcacggctaaaatctatcactgcaatgattcggataagtgtcttaaggtcgttgctgatgccaccgtgaccatcacctccagtaaggcgctgaaaagccagatttccgctttgttaagcagtatccagaataaagcggtggctgatgaaaagctgacggatcaggagaaagggtttatctccagcacaaccattccggtattcaaatacctggtcgatccgcagatgctcggggtgtctaactcacttatttaccagctgacggactatatcggctacgacatcctgctgcagtacattcaggaacttatccagcaggcccgggcgatgatctcaaccggtaattatccccagtcgacaatggatatgatcatggaaaacctcaaccaggcgagtgtgcagattgccgctttccagtcccgcgttcaggttcagcaggacgccttgctcgtggtggacagacaaatgagttacatgcgccagcaggtctccgcccgcatgatgacccgctaccagaataactatcattttggggggaatcagtaa

SEQ ID NO: 231880 - DNA, 1713 bp, Klebsiella pneumoniae
atggcgcattcctcctggcccgcactggttttcgcgcgccatcacgacgcggcggtcattagccgggcgctgcggcgaggccggttgcagcgtctggcgcgcggcatttacagcggcgatgttcatacgcccgcagaaaccctgaccagacgctatttgtgggagattgtcagtgcgctttttcccggcgcggtcgttgccgggccaacggcgatccaagctgacccggccgcctgcgccacgatttacctgatacattcgcgccgccgcgcgctcgccctggccggcgtaacgctcgtacctgtcgcaggcgtggggccgcagccggatgatatacggctgacggataacctctggctggcatctccggcacgctgtctgctctggttcttcagccagccggaggcggaacgcgatcttgcgcggctacatgcctggcggcaggcgacgcaaatcgcgcccgatgcgctgctggccgccatcatcaggcaggcggcggcgctgaacagggaaagcgcgctgcccgacgcagccgcctttcttgaccagacgccagcgccgcagagcgcgcctgcggggttgccgcccctcggcatgcgcgcccgccagttgctggagtcgcttatcactgacggtagcgccatgcagtctgaactaattacgcggctgacgatgagcaaaagcaccgtttcatcaggcttgcaggagttacagcgtcaccaactgatcgttacgcttgaaggggagcggcgcggtgctcagctatatcaactttcccgccagaccggctgggtgctgggcgccgatatcggcaatacgcaggtgctgttggtcgctcgcggtcttgatggcggccagttggcgctgagacagtttacgcataccgggtccgttcaactggtgaaagcggctgccgacgccatcgcggcgctgcgtcaggagctggcgtcgcttgggccgctgctggctatcgccgttgcgctctccaagccggttcgcccggatattcagctgtcgggccgggaaggaccatcccaggcaggacagtcgccggaggcgatactggcgcgtctcgcgctgccatcgggcgtaccggtaatcgttgaaaacaacgtcaactgcgcggtcgtggccgaagtgcggcacggcattgcgaaagggttgaaggatgtggtgtttttgcaaatcggcgatcgtatcggcagcggcattctcagtggcggcgttgtgatccacggcgcgcgcggcggcgctggcgaaattgccgatattccgtttccctggagcctgcacgaatcgcctggcgagctgatgctggagcggcatctggcgaaacagggttttcttgagcgacttaacaccagccgcccggccgcttcgcccgtggtgcgctcgtttgatgcgctgcttgaacgggccgcagcaggtgaacctctggctatgcaggcggtggagaaatatggcgagcaaatcggttttcttgccgccggactggtggcgattctggatccggcgatgattgtgacaggaggcagcgtcgggtcgaactggcttatagtggctgcggtgcgcaaaaccctggccgcgatttccccgcacacggtggtcgccgcttcgcaatggggccagcaggcgaccgttgaaggggcggtgcagctggcgctggacgctgcgcaaatcaggctgctcgggcgagcggttaaaccgcgttag

SEQ ID NO: 231881 - DNA, 1017 bp, Klebsiella pneumoniae
atgagcgacaacgaaatcttaattccttttgcgcagggcgtggcccagcagggcgacagccttactgataccgtccagcgcacgcaggcatggctgaatacgctggatcttgaggccatgcgccgcagcgcgctgctgttcgccggtatcggcgcgtcgtatgcagtgctcgcctcgccggtacatgaactgcgggctgccgggatccgcgcctttcgttccaacggagatgatatgccaaccggcacgcctgtgctggccgactggtatatcggcgtatcccaaagcggacgcagcccggaagtggtgcgtatcctgcaacagcaacgtcacggacggcggctaacgattgtgaaccaggcccggtcgccgctggagcgcatcagcggccagccgctgtggctcggcacgcttatcgactccagcatgtcctccgtcgcgctgatggccacaagcgtcagcctgggtttattaaccgacgcgctgatcggtcgtgatgagacagcgggctggctgaccctgccgcaaacgctggcagcgcaacggccttccgccgatgcggttattgcccggtttgtcgcccgccttaacaacccaggctgtatcgacttggtcggcggcggcagcagcctcagcgcggcggaacagggtgctctgctactgcgcgaaggaccgaaagccgcggcgatgggcatgggtactcgccactacctgcacggcatgaccgatgcggtcggcagtacagcgcatgtgctgatcggcggcgagcgcgaaattttgctggcaaagcagatgtccgcctttggcgttccggtattgcttatcactgatacgccgcaatcactgcccagcgtagagacgctaatccttccttcgcttccgcctttgcagcgcctggcgctggaactgctggcgatggagctgctcgccattcatcttggcgccgtgctgggccgcgatatcgatgccggcatcgtcgagcgtctggataccaaaatcaacggagagacgttatga

SEQ ID NO: 231882 - DNA, 933 bp, Klebsiella pneumoniae
atgaccacctgctggttaggaatggatgtcggggggagcaaaatccaggtgcggatcgaagacccgcgcggcgctgtcctgcttgatacacagtggccgaccggcccttggagcggcgaaccttttgtctacaaagccgcccgcatggcggagctgattgcgctcgcctgcgggcaggcaaaacttactgcgccgcccgtcgccgtaggcattggcgcgcacggctgcgatacgcgggaagagtgcgccgcgatgaccctgctgatggccgagcgcctgcccggttcagcctgcgaagtcgtgaacgacgccgcgctggtcgcgctctctgccggtagtgggcaggcggccggattgattgccggcaccggctcggttgcggtagcccttgatgccgacggcaactggctgcaaaccggcggctggggctgggtgatcggcgatgaaggcggcgccagcgggctggtgcgcgcggccatcggcgccgtgctgcacgactgggatcgcggcaaacagaatgatccgctgaccgtcgcgctggtcgaggctttcggcgtaacgcatctgcttgaccttccagcgcagctgctgcgctcgccagccagcggatggagtcgccacgcgccgctgattttcgactgcctgccgaaggactcccggctggcccggcaggtggttgacgctgcggtcatgtcgctgacgtcgctcattctgcggctgcgcgagcggggcgcgcgctttaatcaggtggttgcggcaggcggtgtcattcgccatcagccgatcctgttcggcctgctggcaaacgccctgcgccagcatgacgacaccttaacactctctctgttgcagcaggcgcccgtcaccggcgcgctagttctggcgcgccatatcgcgcccgcgacgctctctttttcccggcgaggtgaatga

SEQ ID NO: 231883 - DNA, 1509 bp, Klebsiella pneumoniae
atgtctcagtatgaaaacgacgctgctccggcagtcagcaaagcgtggcggtttcccagcacttataccgtactgattgcgattaccgcggtggtctggttgctgacctggattattccggccggtcattaccagacgcaggatggccgcccggtagcgggcagttttgaggtcgccgccagcccgctgacggccgatcagcgggtcaaagagctgttcctcgcgccggtgaacggcctgtacggtattgagaacgcggcgggccacgtcggcccttacgagagcggtagcgtctttggcgccatcggcgtcttcttttatgtgctgtcgctgggtgcgtttatcgtcaccaccaccaaaaccggggccattgacgcctgtcttggccatgtcgcgcagcgctttcgccggcgcggcggcctgctgattgccatcgtcatgctgcttatcgccattggtggttccacctacggcatgggcgaagagacgcttgggttttacgcgctgttagtgccgctgctgctcggcctggggtttgaccgcatgacagcggtgggcgttatcctagtgggttcggtagtcggcaacatgaactcgaccgttaacccgtttatgaccggcgccgcctccgctggcgcaggcgtaccaatgggcagcggtatcgggctgcgttttgtgatgtttctggtgctgaccgggcttgcgattggctacgtcgtgatttatgcccgccgcgtgcagcgcgacgccgcccgttcggtagtgggctttaccgatgaagatcgcacgctggcgaaggcgcagctacagctgccccagccgatgacgcgccagcaaaaagcggtcatgctcgccttcgcgggaacgttcgcctttatgatcttcgcgattattccctgggcgcaggtgattgtcggcccgcaggcggcctcgtggtcgtggcagctggactggtactttccggaactgaccgcgctgtttctggtcatgtcggtggtgacagggctgttgggcggcatgcgcggcaatacgctttacaacgctattctggcaggtattgccgactttatgggcgcggcgctggttatcgtgctggcgcgcggcattaccgtgatcatgcataacgcccagataaccgataccgtgctgcattcgatggaaagcgtggtcagtggcgcctcaagcggcctgtttgccatcatgatgtatctgatcattatgccgctgtcgttcctggtgcccagctcatcgggcctggcgacgctcgccatgccggtcctggcgcctatcgccgatttcgcggaggtcggacgggagatggtcgtaacggcgtaccagtgttcggtcggaacgatagccatgatctcgcctacctcggccattgtcatgagcggcctggcgctggcaaaggtgagctatccgcgctacctgatgtgggtgctgccgctgcttgcgctgcttgccgtcgccacctgcctgttcctggtggcgggcgccgccctctcctga

SEQ ID NO: 231884 - DNA, 306 bp, Klebsiella pneumoniae
gtgagctacatcatcgcgtttgtgaagtttgatgattcggacatgaactatccggtcgaatgttttcgcacggatattaaacctcagggccgggtgctggttcgccttgcgaatgagcggataaaacaggccaccgtcgagcgcgttgattacctgaactgggactgtacggggcgtatcgcctggaaggcgggagaagcccggctcgacgaaaaaggtcggctcgttgcgcagcctgacgcgcccgaaaccgtcgggctggtgatgtcgcaggcgacagcggcctggataaaaatgctcgggtag

SEQ ID NO: 231885 - DNA, 444 bp, Klebsiella pneumoniae
atgtacagcaatcaacgcgagacgtcgcagatcctgtttcgcaaaaatggcgtcgatttgctgattctccctgagcgcatcgccacgctgcccgcgccgggcagtgtcgtccatattcgcatcagcaaaggacaggtggtgcggcatttcctttccggtaccacttttaatctttatgagggtatttatcgcttcgcccgcagctttacgcgcgaagaaaataactatgcgcgctttttccaggcggtaggttcccctaagtgtagcgaccgccgccatgccacacgtcttgcaagcacaaagcgtaattgtcgtctcagcataattcacacgcgtcgtgattctgatagcgccttcagcccttcctttcgccttattaaaagcctcacactcagcgaatacagaaaaactatgcgtttaaaaaagaatgaattatctccttag

SEQ ID NO: 231886 - DNA, 306 bp, Klebsiella pneumoniae
atggattccggcccccgtgccgactgggagaggtctgccgcggcgcagttccatattggtatgaacgtgtcccgggacgggggggacgccagtgaaactgcgttcacggacggtacccggagctgtcaggatacctatccggtaacgctgagtcgtaccgtctatatgaccggaaatgccgccaacaccctcgcccgcaggcgagggtcaggcgctgacgtgacgctctctggcgaccgtcagcgccagcaggataagcagtgcgccgcccacctgcgacagcgtcatcacttcgccataccatag

SEQ ID NO: 231887 - DNA, 1077 bp, Klebsiella pneumoniae
atgaccaatgaaaatgctcgtttacgaagcccaaccgtcgccgacgtcgcccgcgaagccaatgtttccaaggctcaggcggcacgtgccttgggcggatatggttcagtgagtgatgacgtgcagacccgggtgaataaggcagctgaagtgctgggatacaggccgaacgagttggcccgcagtatgaacaccggccgatctaataccattggggtaattgtcggcgacattgaaaacccgcattttggcctcgcgctgcgcggaatggcggacgttgcgcgacaggcgggatttcacttgctgctgagcaacagcgatgaaactctggacgaggagcgggaggccgtgcgcgtgatgctggataagcgcgtcgatggcatcatcgtcgcgccgtgcagctcactgtttgaggataacgaacatcttcgccaggtgctggctgaagggcgttcattaatgatgtttgaccgggcagttcaagggatggaggtggagaccgtccaggcgaactttgttacagtggctaaacaggccacggagctgttactggcggccgggcatcaacgtattgcttatatctccagcatgcgctgcgctacaccttattcgccgaccatcacgttgggcccaacgccggtagcgcaacgtgttagcggaatgattgacgcctaccgggccgcgggtagggagctggatccggcgctcattcggcttaatgcactcagcgaagccaccattgagcagatactgactgaactacttgcgctcgccgagccaccgagcgcgctgattgcctcggacaacctgattgcgataggcatcctgcgtggtctgaccaaacgtggcctgcgcgtacccgaagatatctcttttctgatgtacgatgattttccctggaccgagctgatgtcaccgccgctgactgtggtcgcccagccggtatatgaaatgggacgcgaagccgcgcgccgattgatttgccaaatccgcaagcaatccgccggcgccttacctgcgtttgacagctggatgatagtgcgcagctcggtaggtggaaattcatccgctgggtga

SEQ ID NO: 231888 - DNA, 822 bp, Klebsiella pneumoniae
atgacatcgcacaaacgcttcaatcatctgaccgctgctctgttcggctcagctatgctggcttcagcctgctggagtgcatacgccgctaatgacagcaatccctggggtttgatcgaacccggtcatctacgtgtagccagcctgggagactcgaagccctacactttcaccgataaaaacggcaattttactggttttgatgtcgaattcttcaaaaacgtggcacatcgcatgggtattgaacaggtggactttatcggtcaggatttttccgccatcctgccggctgtggcaaatggtcagtatgatgccggtgtcgccgccattggaatcacgccgctacgtgaaaaaacagtcgacttctctactggctatctcgcgggctatctaactgtgctgacccgcagtgattcaggcgtgaagaacgttgaaaccctggcgcataaacgagttggggtgattcagggcacactgcaggagaactatgcgctgcagcatttcaaacagtccgatctggtgcgtttccccgataacaacgcagcggtgtccgcgctaaacaacggcacgctcgatgccatgttcctcgactacgaagcggccaaagattatgccacccgcttcaggctggtcacggcggcgaacatcccttcttttgacgcgcctgcgggcgtcgccatcgccaaaggtaagcctgagttcaaagctgcgctggataaagccatcaaagcagcgatgcaggatggaacctggaaacagctgtaccagaaatggttccctggttcgccaatgccgcaacagtatctgcccggtggccaataa

SEQ ID NO: 231889 - DNA, 813 bp, Klebsiella pneumoniae
atggatctgatcactattctttcccgtacgttttttgatattccatcgatgatggacgtcctgcctcagctgctggcaaccggactggttaacaccatcattatctctgtagcagccaccgtgctgggcacgctattcggccttatactggcgctgatgggcatctcgccctcccgctggctgcgcgtgcccgcgcggctgtataccgatctgtttcggggcttgccatccatcctcaccattttgttgattggtcagggcctggcgcggtttagctatcagctgtttggccctactccttatccgctgggcatttttgccctgagcctgattgccagcgcttacatgggcgaaattttccgctccggtattcagagcgtggaacaggggcagatggaagcgtgccgggcactgggaatgagctatggccgggcgatgcgcctggtgatcattccgcaaggcatccgccgcgtattacctgcgattgtcaatcagttcatcgccatcatcaaagactcgtcgctggtttatctgctgggcctgatgaccggtcagcgtgagctgttccgggtcggtcaggatgctgccgtgctgagcggcaacctgtctccactgatgctggccgggctgttctatctggtgatcaccgtgccgctcacccacgccgtgaactatatcgacatccgctaccgtaccggacggcgtcgcgccactgcgccacaaagcggcctgaaggagctcgatgaagtgcagcaaaagcgcaatgtggttccggcggtctcggtctcccttaccagcgagcaaggacattaa

SEQ ID NO: 231890 - DNA, 747 bp, Klebsiella pneumoniae
atggctataccttctgcgtttcacggcgcgagcctggagctgtgcaatctgaccctggcgtacggcccgattgaggtgctgcgtaatgtgtcgctgagcatcgaacctggcaccaccacctgcatcatcggtccctcgggatcgggaaaatccaccttactgcgtggcatcaatcgcctgcatgagccgaagaaaggggatgtattactggccgggcgatctgtcctgaaggataagcccgattcgctacggttgaggattggcatggtatttcagcatttcaacctttttcccgatcatagcgcgctggaaaacgtggcgctggcaccgtggaaagtgaaaggcctcccgaaagccgaggctctggagattgctcgccagcggctggccgaagttggccttgctcagcgagccgatcaccgtccgcgcgacctctcgggtggccagcaacagcgggtggcgatagcacgtgcgctggcgatggagccggaagtgatgctgttcgatgaagcaacctcggcactcgatcctgagctggtgaaaggtgttctgacgctaatggctgatttgtgccagcgaggcatgaccatggtggtagtgacgcatgagatgggcttcgcccggcgcgtggcagaccaggtagtgtttatggatgaaggcgagattgtagaagccggcacaccagaacaaatctttgaccgcccgcaatctgcacgcctgcagcgttttctgtcggaggtactgtga

SEQ ID NO: 231891 - DNA, 1074 bp, Klebsiella pneumoniae
atgccacatcaacaggttagaggcccaatccgcacggctctggtgggttttggcgtcgccggcagcgtgtttcatgcgccgctgattacccctaacaccgactatcgtctcgacgtcatcgtcactggcgatgcccaacgcgtagcgacggcgcagcaacgttacccacaggcgcgggtgctgccggactggccggcgttgcttaaggcaattgatggcggcgagattagcatcgatctcatcgtgctggccacgccgccggcgcaacatgcggagcaggctgtgcaggccagccagcgtgctatccatctggtggtggataagccgtttgcagcagatgtacaagcggccgaaatgatgatcgccgcagcgcagcaggctaataccttgctcaccgtttttcataaccgacgctgggacggtgactttctgacattacagcgcctggtacaacaggaagcctttggcaccgtaagaagttttgagtcgcgtttcgagtggtggcgaccgcagggatttggcaactggcgtgacagcgtcactcttgcgcagggcggcggtttgttgctggatctcggaagccatttgattgaccaggccatgcagctatttggcccggtagtccacgccacggcggagctggcacgccattccgggcctcagccggacagtgacgaagacagtttcgtctcattgctgcatcacaacggggtgcgttcccggctgtggatgaatggtcaggcggcattgaatgcgccgcgcttccacctgctgggcagcaaaggcgctttcacccactgggggctggataatcaggagccgcagctggcggctggcatgtcgcccaccgatagccagtacggcgtcacgccggcaggtaattttgcccgggccggcacggtcggggcaaccacaacggtgcccattgaacgtggccactaccccgctttctatcagctgttagcccacgcgctgttacacggcgggccgccgccggttgatgcacgtgaagcgctcagtgttttacagcttattgagcaactccatcggcagcatcgcgtacgtattgcctga

SEQ ID NO: 231892 - DNA, 1119 bp, Klebsiella pneumoniae
atgtctgacaaaaccgtggcaaagaccgtcatcgtgctgggtggcggcattctcggcgtctcaaccgcctggcagctggcgcaggcgggcgcgcaagtcacactggtgacggaagcggcgctctgctcaggcgccaccggccgttccctctcctggctcaactcagcaggtgagcgttcgcagccttatcatgcgctgcggatggcgggtattgaccgctatcgcacgctatttgcccgccatccacagcttgactggctgcgtttcgatggtgctatttactgggccgcagacgatgtcgcgggcaccaaagcgcgtcatgactatgaaaaagcgcagggctacgactcaaagctgatcaatcacgccacggtcggtgatgtcgatgcgcaggtgaatccggccagcctgagtcaggtcgcgattgcaaatctgggtgaaggctgggtcagtctgccgcatctggttgagcatctgatgcaggcatttcgtgcgctgggcggagaagtcgttgagcacgctggtaaagccagcgtgataaccaaagacggccgggccagcggcatccgcagtgaaaaattcggtgagctgcaggccgatcaggtactggtggcgtgtggcccgtggacgccggaagtggttgccccactcggcgtgaagatacccaatagctctccggtctcaatgctggtgaccagccaaccctgcgatcacgcactccaggtggtcttgaatacaccacgcgctgcggtccgccctaaccctggcaacactatcgccgtcgatcatgactggtatgaagagcatatcgtcgctcaggctgacgggcagtacagcattgatacatctgtcattaaccagttgatggcggaagcgggtagcctgataggtgacggcgagccgttaacagccaacagttggaaaattggtctgaagcccattccaggagatggcgaaccagtggtcggcgagttgcagaacgttcccggctgttttgtcgttttcacccattccggcgccacgctggcgttaatcctcggcgagatactgacgcaggagatgctcaccggcgtcaaacacccgatgctggcgaccttccgcccggaaagatttagctaa

SEQ ID NO: 231893 - DNA, 579 bp, Klebsiella pneumoniae
atgacaacgacagtaccggacgaatttatcgcggcatttaaccgcgtttggcgactgccagcgggcatggacaacgacactatacttaaatcacccgaatttctgcatcttcggaacacggcagataagctttgctatgccaaaatcaaaggaaacctcctcgatccatttctgcttcgtggactccaaaactgcacaactaaaaaccatgataagaaaacgggtatagataagaagggaaggacttgctataacaaatccctgatcaattcccatggaggtaacatggctatttcagctcgtaatcagctcgtcggaatagtgagttcaacagaacacggtgcagttaacgatgaagtcgaattaacactggcaggtggagcaaagctgattgctattgtcacatctggcagcaaagatgtgctcgggctattgccgggtaaagaagctatcgcgctgataaaggctccttgggttacgctggcgaccgaaagctgtggacttaaattctctgcccgcaatcagtttgcaggtgaggtgagcaaggtaacgggcactgttgcaaatagtcggtggtga

SEQ ID NO: 231894 - DNA, 1506 bp, Klebsiella pneumoniae
atggaacctgtattaaatatttttacgaccagtcatgacgaataccatactgatgaaacttcttcaacatttggcattctgcagacactccctgaacacatcccgtcaaaagaaaaccatattgtccctggtgaaataattgaagagtggataagtaataaatatggtgttctgattaaacaactgacagacaggatctcaaataatgcattccggaatcttttgcggacaggtcaggacaatccctgtgattttcgcgagattattacagaagtcatgacatcccggttaatcagaagagggaccctcagcgcagaggctcgagcgcaacgagtggcagatattcagactgactcagccggtcgggtgacgttctccatattgttgttacctttccggacaccgtcgccactcaaacatgactctttattaccggacctgggggagtactacaccctgagtgtactctatgcccttgctgccagctgccggcaggtccagctcagtctgtttaatatggctcattccgtctccgaaacacttaaagcacagggaactgatccctggacattgttacggcaagccggagaacgtacatccggtaaacgcggagaagccatgactcttattgaagaggatttgagacttaaattttccgggaaggaatacatccgccggcgaaaattcatccgctcaatactgcagaatgacacatgtctaaattatgaatacccggaacatctatcctcatttttacttctgctttctgatgctgaaatgtcccctgtacagttcagacactggatacaggcagatattactccggtacatatttatgctattcaggatgaatatcgctacccgtgcttcgatatgcttgacagaaagatgatacgggactatcgcgacgatctcctggcttttatggataccgtcaatatggacaatcagttactgtcacttatccgttacgaagatatccagaataatttatcatggaaaacccggtattttaatgatcttgaatacaccaccaaacttaatcctttgatggcgtgtgtcagtgattctgaagggttgtaccaggcagaaggaaggggggcttttcttacgactttgcgtgagcaggatccccgccttcagcagttgtttgaaccgcttctctttgcactaccctaccctctccttgaaacgtatgcccgggagcagtcgcttgagtacggcgagttttactgtcagttcatgaataatatctatacccctcagaaagaagatgtcgagttattaagacgggtgatcctgaatcaggtgctgcatgcggttgccagatacgttgcagcctatgaaagcaatactgcagataaaaatacgaccggtttcgatgatgtacgttccctgttcccggaaaccctgcgcatgtcgatacaccgtaaggatgagaaacacgggcattactctgtgcagatatcgccttcctcctcccgggtacctagactggccccctga

SEQ ID NO: 231895 - DNA, 909 bp, Klebsiella pneumoniae
atgagcattattcaggatcatcgcatacggtatttctatgaggcagtcaaacgtgggagtgtcagagcggcggcagattttctcaacgtggcgccatctgccgttagccgacatatcagccagctagagtgcgagctgtcggctgcgctggtcgagcgtcatcgacgcggcgtgaggccgacggaagccggtgaaaaggttctggcctattatcgctcacatatgactgagcaagatctgttgatggatacgctgcaatccttgaagggtctgcaaagcggaacggtcagtatcgcgattggcgaggggtacatcgacgatatttcttccgtcttgtgcctgttttcggcgaaatatccttcgatcaagatcaaggtgtcggcgtgcgggagcaatgaattgctacgccagattagcgaagatgaagcccatatcggtgtggtatttcatccgggacgagggcctaaaattcgcacacattgccaagtggttcacccggtgtgtgcggtggtaaacagggagcacccgctatttgctacgcaggagccgattgatttgaatcagctcaatcaataccgactggcgctgcctgatgtatcgcacggcgttcgccatattattgcggaggcggaagaggattccggcatcactctgacgcctacactggtgtgtaacaatctctccacgctgaaaccctatgcgctgcatggaggtgttacgctactgccggtcttcatggcgcaggaagagatcgaccagaacaagttgcgcgccattccgctggataacccagtattctcctccactaaaacacacgttgttacgcgtttgggacggcaactcagtgtgggcgccgcgcaattattacaactgatgactcaggaaatgcgttcgctaaaaccgctgtga

SEQ ID NO: 231896 - DNA, 1158 bp, Klebsiella pneumoniae
atgcctattttgcaacatttgatcgctgaagccatagcatggcgtcatgaatttcatgccaatcccgaattagggtatgaagaattcgctacgtctcaacgcgtggctgaactactcacgtcgttcggccttcaggttcacaccggactgggcggcaccggcatcgtggcaacgctggaaaatggtcagggaccgacgattggattgcgtgccgacatggatgcgttaccgattactgagcttggcgaggccagttacaaatcacgtaacaaaggcgtgatgcatgcctgcggccatgatggacacacggcgattctactggccgcagccaagcacttaagtgaaactcgcaactttagcggaacggtgcatttcgtgtttcaacccgctgaagaaaacctcggcggcgcatacaaaatggtagcggacggcctatttgaacgttttcccatggacggcatttacgccctacacaactggcccggtttaccggtcggtcatgtaggcttgagcagcggcgccatgatggcctctctagactcattcgaaataaccatcaccggcaaaagctgtcatgcggcaatgccggagaacggctctgatccgatcatcgccgcctcgcttttgatacaatctctgcaaaccattgccgcccgccgcttatcaccgcaatcttccgccgtggttagcattactcagatttcaggtggcgaagctattaatgtgattcctgagaaggtgacgctacgcggcaccatgcgatgtttacagactgatgtgcggatcaaggttaaagatttgattaatgaatttgtcaacgaactaccgcgcgttttcggcgtcaggggcgaaatcacatactatcccggctatccggtaaccatgaaccacgagcaggaagcgttgaatgtacgcgaagccgtcagcagcatattcggtgaatccaagttgcattggcagatcaatccatcaatggcgtccgaagattttgcatgtatgctagaagcctgtcctggcgcctatctctggcttggttccgacggagttgaaccatcaaaaccgctgcataatgcttattacgattttaatgacgagctaattaagccaggtgtcgaattatggacatcgttggtcgagaggctgttactgaagtcctga

SEQ ID NO: 231897 - DNA, 1377 bp, Klebsiella pneumoniae
atggctttaagtgtttttgatctgttcaaaataggcatcggcccatccagttcacataccgttggcccgatgcgcgctgcctgtcaatttattcagtaccttatggaaaataaattgatcgaggagacccggcgcgtccagattaaactttatggatcattatccgccaccggcgtaggtcacggaacagacaatgccatactactcgggctaatgggatttgaaccagagacgattgatacggatcgggtgaacagtctggttgagaccataaagcgtgatcgagtattgaggttaaacaaccatcatcccattgttttcgactatcaccatgatgtgatctttctgcaagaaagtttgccgtaccatcccaacgccatgaccttcacggtgtggggacagcaggcagaaatttattcgaatacgctctactctatcggcggcggattcattgttagtcaacaacagacgcaagaaggggggctggttaatgataaaaccaggcttccctatccctttagcagcgccgatgagttattgcatttatgcaagactcatcgattgtctgtcagtaatctgatgatggaaaatgagaagtgctggcgcagcgaagaagaagtgcggacaaaaatattgtccatatggtgtgttatgcaaaagtgtattgaaaacggtatcaagcatgagggcgtattgcccggcggtttacgggtgaaacgccgggcccaccagtttcatcagcgtcttcttgatgccaacaagccgaacattatcacctcaacgctaagcgccatggaatggatcaaccttttcgctttggcggttaatgaagaaaacgccgcgggcggacgtgtggttactgcgccgaccaacggggctgccggaattattccagccgtgcttcactattacatgaaattttcgccaaaggcctgcgaggaagatgtggtcaaattttttttaagcgccacctccgtcggcattctttgtaagctaaacgcctcgatttccggcgcagaagtcggctgccagggcgaagtggggtccgcctgcgcgatggctgccgccggtctcgccgaagtactaggcgcaacgccggaacagttagagaatgcggcagaaatcgggctggagcataatctgggcctgacctgcgatcccgtaggcggattagtgcaggtaccgtgtattgagcgtaatgccattgccgccgttaaggccgtcaatgcagtgcaaattgcattacgcggtgatggtcaccacttcgtctcacttgacaaggtcatcagaacgatgaaagaaaccgggaaagatatgtcagaaaagtataaagagacatcgcagggcggactggcagtcaacaccatagaatgttga

SEQ ID NO: 231898 - DNA, 1335 bp, Klebsiella pneumoniae
atgcaggcaaacacacttgatcttgatcaatcaagaggtataaaagacttcatccccatatacttatgggcagccatgatacttatagtagcagaacttataggttcaatatctattcccttaggatctgctaaagttgttttattgcccatgatatgggctttaattattggcgcgataataggtaagatgagtgaaaaatcctcttccgcattttctttaacccgtaacagacaggttatttcctcacatatcctgcaaccggctttgcttatttttattgccaaactaggcgttgtcgttggtggttcgttgaacgttatcgccaatgcgggatgggcgctggcctttcaggaattggggcatttcgtgggcactgtattgctggcgatgcctgtcgcgctgctattaggcattaagcgcgaggcgatcggtgccacattctccgtcggtcgtgaaccgagcctcgctattatcggcgaaaaatatggtatgaattcgccggaaggacgtggcgttctggcagagtaccttaccggtacactgttcggcgccgtttttattgctataatggctggttttatcaccagcctgaacattttcgatccgcgttcgctcgccatggcttccggtgtaggctccggcagtatgatggcagcggcatccggtgccatagccgctcaggttgataagcaaactgctgatagcgttatggcccttgccgccgcatctaacctacttaccaccaccttcggcacgtattttacactcttcatttccctgccgctggcggtagcgtcatataaaattctggaacccattctgggaaaatggtcaaaaaagagcacagcggaacaagtcaatgacgaacaagcacttaaggcaataaaagaagcctctataggtctttcctggtcggataaaattatcgcctggtttgccaccgcagtgctatcttctgtagcgaactggattgcatttggtcatatctcgttcgacgttctcgcagcctgcttaatcctgattttggtttcacttttgggagatatcgtttataaacttacccgcagaaaaatcccaactgtctgctgggtatctgttattgccatgtttgccacatcgccatggtgcccgtgggcgaaagagttagcgacgttaactggcagcatcaacatgctttccatcattacgccgatgctaacctttgccggcctctctattgctaaagacttgcccgcatttcgcaagctgggctggagaattgtcgtggtatcttttgtcgccaacttaggcacctttattggcgcggcaataattgcagagtttttccactaa

SEQ ID NO: 231899 - DNA, 1236 bp, Klebsiella pneumoniae
atgcgatatatacctggcaggatccctgtgatacttgctgtcagtaatctgttttttacctgtgccgtgtctgttgacctgaccattgccaccctggtgggctatcagctggcaccgactgatgaactggccactgttccgtttgcacttatcacggtcgccggtgcgttctcgagtctgtttgcggccggcatgattggtcggggaaacgaaaaactcgcgtttattctgggttctttatgcggtaccgcaggcggattactgtctttcctcgctgtgctgaagggcagttttttactcttttgcactggctgctttctggtgggggtctatcaggctttcagccagtactatcgtctggttgctgccgatcactccccgcctgaagtgaaagggcagtcaatctctctggttatgattggcggcgttgtggcagcaatcctcgggccattgctgacgattgttgcacgggatatccccggtctccctcgctttgccggtgtttatctcgttgtggcgggactggggattctgtctgcacttaacctggctctgttcctcgaacgttcaaaaagagacgtctcctccccggactcccgggcgatccagagagtatcgccaaccagccgggagttaatgaaacgtccggattatcgtacggcctggtttcatctggttattggctccttcgtcatgctttttctgatgacggcggcccccctctccgttactcaccaccactcgatgaatgatggtgcactggtcattcagttgcatctgctggggatgtatgtcccttcactgtttaccggtctcctgatacgaaaagtggggctcaccgttctgttgtacgcggggattgcgcttaacctggccgctgtcgtgataaacctgaccggagaaacgatgctggcatacggcttaagtctgcttctggtgggggtcggatggaactttatgtttgttggcggctcgacgctgctcagtttgtcctaccgtgataatgagcgaaaaaaagcgcagggtctggccgaaaccagccgtttcattttctccgcgatagccacatccggagcgggcgtgatgctggccttgctgggatggaagctgctgggtctgatgatgataccggctttactggtatgcctggcctccacctggcagtacagtcggaccatacggaaagaaaggactggcacgtcacgccctgctgcagacggttcttcaacccggtaa

SEQ ID NO: 231900 - DNA, 318 bp, Klebsiella pneumoniae
gtgatttgcgtaaccgcctggcgcaccatgaagcagtctggaaatccccgggaggaagatccggttaccggtgcgccggataacaaccgcccggtatatggtcttcaggcgtcccttcagctgttgcaacgggcatggaaagatctgcaggaggctctcagctggctcagtcctgcaatgcatactgcgtttctgtcagacggtcatcacctgcgtttcgaggcactggccacacacgacggtttgctgagttgcaccggacgggcacagctgatgcacgacctgaacgtgcggcgcagtaaagagatcagaaaatga

SEQ ID NO: 231901 - DNA, 417 bp, Klebsiella pneumoniae
atgaagaaaacctggatgctcgacactaacatctgctcgttcatcatgcgcgagcagccggaatccgtcctgaagcgcctggagcaggcggtgctgcgcggtgaccgcattgtggtctcggccgtgacgtatgccgagatgcgcttcggcgccaccggcccgaaggcctcgccgcgccatattcatctggtcgacgcgttctgcgcgcgcctcgatgccgtcctgccctgggaccgggccgcggtggacgccacgacggacatccgggtggcgctgcgcctcgccgggacgccgatcggcccgaacgacacggccattgccgggcacgccatcgcggcgggcgccatcctggtgacgaacaatgtgagagagtttgcgcgggtgccgggcctggtgcttgaagactgggtgaaataa

SEQ ID NO: 231902 - DNA, 2004 bp, Klebsiella pneumoniae
atgaaactggaatcctttcgtgttcgaaacttccgctcggtgtttgacagtggattgataaccactgagaaactgactgcaattctggggaggaatgaaagcgggaaaacaaacttgttacttgctcttaaaagccttaatccggcagaaggtttcggcaagcttaatgatataaaagatttcccaagaaacagaaaattgagtgaatgtactcctgacacaccagttgtagataccacatggaaattaaccgaacaagaactggctgaactcagtgccatttatccacgggcaagaaatattacttatgttgacatcagcagacgatacaatggaaaaatcaggcacatcaattttagtggtcttgaaaaattaacatatgatgaacaaaaaataaaaaaagaagtccgtaaaataaaggctcaaattgatttgtttttcgataacgtcgaaaataaaactgaacaaactcagcctgatatacaggctatcagtgatatatgcaatgccttacttccgatcccggaccgtccaattgactggtcagagcaggccaagggaaaaccacagaagctaagacaatttcttgttaagtatgacatcgagcttaagtcagaatcagatgatgctctagatgaactggaggatactcttaacgagataagcaatgattcttcccgatctaaacaggcacgagaatggatccttacaaaactccctgtgtttgtgatggtagatgaatatccggaactgaacggtcaccatcaaatggctgaatatacttatcataaacagcagggtacattaactaatgccgatatccattttgagaaactttgcaaggtggcagggatttcccctgacgagctgacggctaacagaaataattcagaggttcgaaatcagcttgtaaacagagcgggagctgtcgttacgacagaaatccgaaggctctggcaggataaacctcttaaaatccgttttaatgttgacagtgattattttgatacatatgtttcggataccaatcatacctacgatgttgaggtgaacctggacgaaagaagccgagggtttaaatggtttttctcattctatataacattttttgctgatactaagggtggagcagcagaaaatgctgttattttactggatgaaccagggctttacttgcatgctaaatctcaagctgatcttctcaatcacctgaccaatgattttgataaccagattatctataccactcactctccattccttgtaccaataaaaaatatttccgatgtaaaaacggtatctattgcagaggacaaaggaacgacggtaaccaacgatcccagcggggattcgacaaccttattcccgttgcaggcagcgctgggatatgacattgcgcagtcgctatttattggatctcataaccttattgtcgagggagtaactgatttctggtacctcagtacgatttcagatgtacttacctccgccggcagaaaaggcctgaacagcaaaataataataactcctgccggtggggcacagcgtgtgtcctacatggtttctctactgtcttctcagaatctcaatgttgttgtacttctggatgatgagaaacaaagccgtgagacttcagttgagcttcagcagcagggcatgcttaacagaaagaacgtggtatttgtgtctgatgctctggagtcaaagcgtgacgagtgcgatattgaagatctctttaatcgtgatactttcctccagctggttgatgaaagttatgatctgaagccaggcactcttaagctgaatgagaaaattccgcgaattgtcaaacagattgaaaattccttctcgacagacaagaaacattttgtgaaagccaaacccgcccgcgcattcatgaaccgtctgaaagacggagatattcaactgctgtccacagaagaactggatcggtttgaaaaattgtgcgatttgataaacaaaagaatgacggcccgcagctga

SEQ ID NO: 231903 - DNA, 486 bp, Klebsiella pneumoniae
atgatatttggacggcaatcaaatgaacctgctcataacgagccctcttttgccagagatttccactacctgacagctctgatacagcatctgggcgcgcatgaacgctggaacagcagaacccctaggaatattgctgatagtctgggcatggatatgaaggaggtagaacgggtgcttgcttcttacccggcgtttttcagacgctcttccaatctcagttcacagggcgaacccctctacatgatccatctacgctatgcaagaataaggaaaaataacgaaacagatgctcgtgaatctcctccagtcagtgctgcagagattggcattatgctggatctcgtgacgaaaatgattgccgtagaagaacaaaataaaaggctcagcttcgaaattaaaactaataatcttaaaatatggtctgctcttgggctggcctttctttcttccgtcactgcgattgccacagcattactgaaatag

SEQ ID NO: 231904 - DNA, 996 bp, Klebsiella pneumoniae
atggcgaccacagtaatagctgcctttaacgaatttatgaaagataccgtgaatctcgaaaaggcagacaccgatgacgcgcgtgcaagtcgcgactggctaatcggtaagattaatgattttgaaaacgacgaggtttttccggtgagttatcccgggatccacattgctttcggttcattcgcaagaagaaccaaaattcgtccgcttgatgatatcgatctgatgtttggcttaaccgggcaaggtgccacctataccatcctgagtgaccgggtaactgtaacctcctccggagagggttcacgtctgcaccgttaccgccattccggggcagacaccgtctgctccgtcagaattctgaatgcctttaaaagccgtctgcaggatgttgcccagtatgcccaggctgatatcaggcgtaaccaggaagccgtcacgcttaagctggtcagcaaggactggaattttgacatcgtaccctgctttattacgagcgaagatgcctttggacggacttactatctgatccccgacggcaacggccactggaagtttaccgacccccgcaaagacagggacagagtcacaactatcaatgtgcagaatgacggcaatgtgctcaatgtcatcagagcagttaaatactggcagcggcgaccgacgatgccttccatgagttcctacctgctggagacgctgattctggactattacgccgtcaggacatcctgcttatcgtttgtcgatatggagctggaatcgcttttccgccatcttggtcttttcgtacagtactccgtcaacgatcccaaaggcatacagggggatatcaactctctttcagccgaggctcgtaaggcgatatcggacagatgttatctcgatgcgcagaaggcatcggaggcgagactgtttgaagataataaagagtatgaaaaatccatcaataaatggcgcgacgtgttcgggccgtcctttcctgtttacgggtga

SEQ ID NO: 231905 - DNA, 933 bp, Klebsiella pneumoniae
atgaatgccatttacacgaaccagtcgaccagagaaaacctggatttactgtatgcgcaggcccgtgtctacgacagggtaaaaaactggaacaggctgaattttctcttcagcatcatcgtgccgctcctgctttcgctcgttaccgtatacaaccggagccggggatttgtcgattcagagctgttgtcttcactgttggggttgtatggacttctggtacttacctttaacattgccatcagtggacacatctcagcactgcgcaggaaggctgcctcaatccaggaaatgtacgactgccgggtacttggcatccgtcgcaatgaactgaaggtggaggagatcccacgggatgacatcatacgggcagcggcatatttcagagacagtccggaaaaagcacgaaagcgatttggtgaagagggatggtacgtcaataaggtgtatgacgcgccgcaggccgtaatggcgctcctgtgccacggaaaaaacctcggctgggacaaatcgctaagggaggtgctgcacgtgttttatctttcagcattcattgtctcgcctgtcgcgatgcttgtttacggcatcgccatgaaatctgggctgaatgagatccttttctatgtagtgttcacattgccggtcatccgctatttcttgcttcagtttctggataatcgcagcagtatgaaaagaagcgagaagctgaaaaaatacgttgagaaggaattatccggcatcagggtttccggaagggcagaagaagagcaactgggttatacgctccggaatatccaggatgagatgttcgcttaccgggcttcatgtccgcccgttcccaacggtattcagctgataatgaaacccaaaaatgagcaaatttatgttgattactttgaaacgaatctgaaggagctgcaccttcaggagtaa

SEQ ID NO: 231906 - DNA, 3114 bp, Klebsiella pneumoniae; identical to SEQ ID NO: 97294

SEQ ID NO: 231907 - DNA, 228 bp, Klebsiella pneumoniae; identical to SEQ ID NO: 97290

SEQ ID NO: 231908 - DNA, 732 bp, Klebsiella pneumoniae
atgaaccgcaaacaattcatccagagccggggggccacctgtcgtaactggacctggagctggtcttttatcaaccatgacgaccagctggtcatcttcggggcgtgggacgttgagcgtgatcaggagcgcgctgttatcctgcgtgaagcgtgggaatacaacgccaggctcaggaagaaccccggctacacccaggcggttgagcatatcggctacatcctcgggggatacgacctgtacacctttaacatggtgcaggccaccagtccggatgcgccggacgtcgcggtcattcaggatttcgaacgccggctggaaaaacgctttctgagaaaagagggcgccgtctggtacactgactttactgccagtccttatcccgaagagctgtccgtcgccggtagctatattgagggcgccacaaaatccatcaccatcaacgcgtatgaacgcgacccggccgcacggcgggcctgtatcgcgtatcatggtgccgtctgtcagtgctgcggattcgattttgagaaaacctggggtgagcacgggaaaggatttatccacgttcatcatatccggccgctgagaacactcggacctgactatcagattgacccggtcaacgagctggtcccgttgtgcccgaactgccatgccatgattcatcggggcaatgaggcaaagccgttgtccgttgaggaattacgcgccatgatgaggccctccggctga

SEQ ID NO: 231909 - DNA, 699 bp, Klebsiella pneumoniae; identical to SEQ ID NO: 181235

SEQ ID NO: 231910 - DNA, 222 bp, Klebsiella pneumoniae
atggtaatcagtaacgatgaagtgctgcacctgaccgataaagtccagtcattaagtaaaaaatctgcagggaaccgcccggcgaatacttcatccctgatgaattatattaaatccctgtccggtaatacaaaaggcatggcgctttatggtcgcgttaaagaggaattaatcaggcgtggtgtgattgcggtgtatgagaaaactgtggtctggcgataa

SEQ ID NO: 231911 - DNA, 408 bp, Klebsiella pneumoniae; identical to SEQ ID NO: 98254

SEQ ID NO: 231912 - DNA, 888 bp, Klebsiella pneumoniae; identical to SEQ ID NO: 98255

SEQ ID NO: 231913 - DNA, 2139 bp, Klebsiella pneumoniae; identical to SEQ ID NO: 98256

SEQ ID NO: 231914 - DNA, 1785 bp, Klebsiella pneumoniae; identical to SEQ ID NO: 98257

SEQ ID NO: 231915 - DNA, 921 bp, Klebsiella pneumoniae
atgtccctgctacatcagattcaagagtctgtggttcaagatggatcaagcttgggtccaatactgctcaaactccgactcttggcagcaagattaggaagtaacgatttagaagaatgggtcaaacatgagtcggaaggctatcctcaggatgctgtgcttcccgattacagaatagtaggagtaacttataaaggcacgttttctggcccttttggctctggtataaaaaatgcgcctatcccaccaatattaataaaaacgtttgcaaatgatagctggaataactactccgtcagagaaagcattgctgctgttgacgaacttgttaaagttagtacaaaaggtggttctttggggattaatgcgtcaaatttaatccttcttctacaagggaagatatataaaggttatgcttgtaatgatatctctggagatatttcagtagtatcactatcagaaatttcacaagccgttcgtaatagagttcttgaattaacaattgaatttgaaaaatcaattccctcagcagcacacatcacttttggtactcaaggcatggataaagataatgcatcaaaagcccagcaaataacacaacaaataatctatggtaacgttggtaatgccatctctggtggcagcgaatcaactattaacgtaaatatacaatcacacaataaagaatcggtagcaaactacctgaaagattcaggtatttctgaagaagatgctcgtgatttttcactgattgtagcgtctgaaacaccatcaagttctgaagaaccttttggggaaggtgcaaaaaattggattgcatcaaatataagaaaagctgccgatgggacttggaaagtcgggatggcagttgcaaccaaagttctgacggaggctgcactgaaatactatggtttgcagtaa

SEQ ID NO: 231916 - DNA, 252 bp, Klebsiella pneumoniae; identical to SEQ ID NO: 184749

SEQ ID NO: 231917 - DNA, 561 bp, Klebsiella pneumoniae
gtgaaaaaaattaaccgtacactccgcagatgttgtctgtcggggcttattagtctgactttgtttgcatctgttccggccgtgtatgccgccagcatcgagacgggatattcaccggaaggaacggctctgcagctggtcctgaagactattgattctgcacagcaggaaatccggctgatggggtattcctttacctcacctgaagtcgccggtgcgcttgtcagggcaaagcggcgtggtgtcgatgtgaaggtggttctggactggaaagccaataccggcaagcaaaaccaggcgagcctggcggccatgaatcttctggtcaatgccggcatcccggtgcgcacagtgtcgcagtacaaaatcatgcacgataaagtcatcattgccgatggccgcaatattgaagtcgggtcttttaactacacccgcgccgctgaacgcgtcaattcagagaacgtgcttgtcgtatgggatgttccagtcgtagctcaacgctatctgcagcactggcagtctcgctggaatggcggtactgattggcattcatcgtactaa

SEQ ID NO: 231918 - DNA, 1356 bp, Klebsiella pneumoniae
atggcgacacgttctaccatcatggataccaacagctttcgcgcagagcatgcggatgcgctggatgcccagacgcgaaggctgaccgacagacgcggccaactgctgggcgagtcctaccgtctgttttatcgtaatccggtgcatctggtgcgcggcgaagggcagtatctctgggatgcggcgggagagaagtatctcgacgtctataacaacgtcgccagcatcggccactgccacccggcggtgattgctgccgtgcacgagcaaatgagccagctcaacacccacacccgctatctgcacgagcggatcctggactacactgccgacctactgactaccgtgcctgacgccatcaataaggcgatgtatatgtgcaccggctccgaagctaacgacctggcaatccgcattgctaaggcctggagcggcggctcagggatcatcgtcagccaggaggcctatcatggtaccagcgagctgacctctggcgcctccccggcgctcggcagcggtcagccgctggcacccaccacccggctggtgccgccgccggatcgctatcgggtggacgcctccgatctcggcatctggtgggcgcaggagatccagaagcaaatcgatgacatggccgtccacggcatcaagtttgccggacttatggtggactcgattttctcctccgatggtgtactgcctggtccgcagggcttcctgaagccggcactcgatgtggtgcacgccaacggcgggatctttattgctgacgaagtgcagccgggttttgcccgcaccggagagagtttctggggctttggccgccacggcattgtgccggacgtggtgacacttggaaaaccgatgggaaatggcatcccggtctccgggttgctggcaaaagccgacgtactggccgccttcagtgacgatattccttacttcaacaccttcggcggcaaccctgtgtcgatggccgccgcccaggccgtgctgcaggttattcgcgaggagaagttgcaggagcacagcctcagggtcggtgagctcttacgtaacgagctggcgctgctggcagatcgccacccgaacgtcggcgacgtgcgcggcgccgggctgtttaccggcttcgagctggtaagcaatcgtgagagcaaaacgccggacaaagcgctggcgttggatgttatcgaacgcttgcgcgccgagcgagtgttgacctccgtggccgggccctacggcaacgtgctgaagctacgcccgccgatggcgttccagacagaggatatcgactggctggtaggatcgctggataaagtactgatggcttgcacggcgaataaacggcaaagctga

SEQ ID NO: 231919 - DNA, 1017 bp, Klebsiella pneumoniae
atgaaacgcttttcatttcgccgtaccagcctgatggccacctgtgctctcgcaacgctctccggagcggcgcatgcgggaaccattaccgtgtatacctcgctggaagaggatgagattaaggactacgtcgagagtgcaaaaaaggatatgccggatctgaccatcaacgtactacgcctctctacgggcgatctgggtccgcgcattctcgcggaggctaaaaatccgcagaatgacgttatctggggatgggcgctgaccaacgtgatggacccccgtattgagggcttactggaaccctacaccgcaaaaggtagtgaaaagcttggtgccgcctcccgcgcaccggaccataagtggtttgccaccactggctatatggcggcgttctgcgttaacaccgaagccctgaaggcaaagaacttaccggtaccggagacctggcaggatttgactaatccggtttataaaggcgaggtggtgatgccgaaccctgtgtcctccggcactggctatctgcagattgcggccttgcttcagtcgaagggcgatgagaagggctgggcgttcctgaaatcgctggacggcaatatcgcccagtacaccaagtctggctcccgtccctgcaaagccgcgcgcaccggtgagtacgcaattggtgtctcgttggcctttgccgcgatgcagtccattgaagaaggctatcccgttgagatggtcatcccgaaagacggtgcaggctacgagctggaagcctccggcctgatgaaggcatcgaaaaataaggccgatgctaaacgcttcctcgactggacgctctccggtaacgctgccacccggtacaccaaatacaaggagattgtcaccattccgggtgtaccgcagtcacaggctgcaaaggctgcgggcctgccggcggacctctctaaggtgctctatccggtggacttcgccaaaagcgccaaagagcgcgataccattctcgccacctggcagaagacaatcggtcgttaa

SEQ ID NO: 231920 - DNA, 999 bp, Klebsiella pneumoniae
atggctttggtaatcgaaaatctctacaaaacttttgacggctacgttgccctggatcgcatcaacctgtcagtcgataaagcggagtttgtctgtctgctcggtcccagcggctgcggcaagacaacactgttacgcattatcgccggtctgctgggagctgacggcggtaaaatcagcctcgacggcagggatctggtcaacgttccggcccgtgatcgcggatttggcatagtctttcagtcctattcgctgtttccgcatatgaccattgcccaaaacatcggttatggcctgaaaatacgcaacacaccgactgctgaaatcgaggctcgggtcagcgatctgctggaaacggtgaagcttgctggcttcggtcatcgctacccggcccaactttcggggggacagcagcagcgggtggcgatcgcccgtgcgctggcggtcagcccctccctgctgttgctcgacgaaccgctctctgcgctggacgctcgggtgcgggccggactccggcaggagctgcgcgaggtacagcagcacctcggcattccaaccttgatggtgactcacgatcaggaggaggcgatgagcatggcggataaaatcgtctgcatgcagggaggtcgcattatgcaggaaggaagcccgcgcgagctatacaccacgccgcacacacgatttgtggccgaatttatgggtcacagcaacctgctgccgcaggcggtggtgcaacactggatgccggacttgctcgcaggcggccagccggaggatgccgagctgtttatccgcccggagcgcattggcattcgccaggcaccggatgcggaagggatggtggtgagcaccagcttcctcggtagcattcagcgagtgcaggtgctgtggcgatctcagccgctgctggtcgaaaccagcagcgccgtggggctggcggctggcgaccgggttactctcttttttgacgcgcaggactgcgcatgggtgcaggcatga

SEQ ID NO: 231921 - DNA, 1659 bp, Klebsiella pneumoniae
atgggtgcaggcatgagcagatcacttcttcctccgcaatcagcggctgaccgctggctctcccgcctctgcctttggctgccgctgctggcgctgctggcctttttcggcggaccaatgctcagcatcctctggcacagcctggtggacgaccgcagcggcgccgtcggccttaataactacgtgacgctgtttgacgctcccggcgtctggcgggcgctcggcaacagcctgctgctgggcatcgcaaccacgattattaccctgctactgggttttatcgtcgcttacggcctgcagtttaccgtgatgcctgcgaagcgctttatcacgttcgctaccgcgctgccagtgctggcgccttctctggtactggggctggggcttatttttctgctcggacgcaacggtatcgtcggtaatattctgggagtgaggctggatatttacggctttcacggcctgctgattgccgacgtgctatatgccctgccgcaggctgtgctgataattcaggctgctctgcgccacagcgacgcccgtcagtatgaggcggccggtgtgctgggggccagcggctggcgacagtttctcgatatcaccctaccgggcgtgcgctttggtttgctcagtgccgggttcgtggtgttcacgattaccattaccgattttggcaacgctgtggtgatcggtggcgacttcacggtgctggcgactgagatttacagccaggtcagtgggcagatgaaatttggtatgggagcggtagtcggcattctgctgctgctgccggcagcggcggcaatctggattgagcgggcggcggccaggcggcagaaaatgatcggcactgcttcggctcagccctacgttccgacgccgcagcgcgggcgcgatattctgttctggctgctgaacatgctgatttctctggcaatcgtcgccaccattaccacggtggtgatggccagtctgatccggctttggccctaccggctggacctgactctcaaacactacaatattgacctggcggggggctacacgccgctgtggacctctgttgggatctcggcactggcggccattgtcggcacgttgctgttgttcctgctcaccttcggcattcgccgccagccagggcgaaccgcagacttcgctacactgctcagcgcgctgccggtgggcgtccccgggctggtactggggctggcctacgtctttacctttaacagtgccgatctgccctggggtatgctctatggcaccgcgttactggtggcgctgtgtaactactaccactaccacacccagggcttcaccaccatgatgatgggcatgcgccacgtgcccggttcgatggaggatgccaccaacgtactcggcggcggggtggtacgtataatgcgcgacgtctacctgccggcgatgcgggtgacgattatctcggtggcgatgttcctgtttatgcgctcaatggtgacgctctcggcggtgattttcctcgtcacgccctcgctgccgctcggcgcggtaacggtgatgcgcctcgacgaagcgggcttcacctcccaggcggcggctttttctacgtgcatcatggggattgtcgctataatggcgctgctcctaaacctgttaaccggcaagcgccgatag

SEQ ID NO: 231922 - DNA, 771 bp, Klebsiella pneumoniae
atgttagaagagacccgccttcaccgtatctgtgcgctgctctccaccctcaaccgggtcagcaccgagcaagttgtccagcatctcggtgtctcccgcgagacggtgcgccgggatgtgctgaagctcgaagcgatgggcgcgctgcggcgggtgcatggcgggatcgcctccatcgctcaggaagccgagccaccgctatcagtgcgcaatactgtacgcgcgaaagagaagcacgatatcgcaagggcagcagtgcagcagctgataccggggcagacgttgtttatcgacgccggcagcaccaccactctgctggcggacgaactgctgtcgatgcctggcatgatcattatcactaatagcctcaacgtggctctcaaactcagtggcggagagatgccccttaagcatgaggttatcctgctcgggggccatatgggcccgtcgctacaggccaccagtggcgatcggaccctcagcgaaatccaccattaccgcgccgacgtagccctgttgtcgccggtcggggtaaccgcccgcgacggcgccagcagttttgcccatcatgaggcggccatcgccagtgcgatggtgaggtgcgctaaaacacgtattattcttgcggatcacagtaaaatcggcgtcaccagtcgggttatttacgctcagataccggagatagatcttattattaccgacgcaggagctgccgaacttgcggagtggcagtatctgcagaaaagcggcccgcagacgctcattgcctga

SEQ ID NO: 231923 - DNA, 429 bp, Klebsiella pneumoniae; identical to SEQ ID NO: 181247

SEQ ID NO: 231924 - DNA, 876 bp, Klebsiella pneumoniae; identical to SEQ ID NO: 136888

SEQ ID NO: 231925 - DNA, 351 bp, Klebsiella pneumoniae
atgtctcaattcttttttaatcaacgcccccatctcgttagcgacgtgatcgacggtacaattatcaccagcccgtggaataacctggcgcgtctggagagcgacccggcgatccgtgtagtggtacgccgcgatctgaataaaaacaacgtggcggtgatttccggcggcggctccggccatgaaccggcgcacgtcggctttattggtaaaggcatgctgaccgccgcggtctgcggcgatctgttcgcctcgccgagcgtcgatgcggtactcaccgcgattcaggcggtgaccggcgaggcgggctgtctgacctgctccccgttgattagtacaccccgatgttag

SEQ ID NO: 231926 - DNA, 660 bp, Klebsiella pneumoniae
atggacgctatctttgacagagtcgtaagggaattttttccaaatacaaccatacctttttggaaaaaatggctgttcaggacggcatttggcaataaggtattttctcgcttaatatataacgagcgactcgttaataaaagtggggtcgagtgggttaatgcagttgttgaactccttgagttgaaatgtgaaagcgaacaccaccaatttaacaacatacctgagcatggggctacggttgttatttcaaatcatccgacggttatcgatggacttagcttaatatatacggtctcccgagtcaggagtgatataaaaataatagccaatcacgttttgccaattatattcccccaggtatcggaacttaccattggaattgagaatatggccggtaagatgagccataaaaaattccgcgagatgaacgatcacctgcgaaaaggaggcgtattgattatatgtcctgcgggtaagctggctaactggtctctttccgggttacaggagcataagtggaaccccggttttttacagcttgctatgagaaataatgcagcattggtaccaattcatattacgggagcaaacagtaagatttattatcttactgcaacattctggcggcaactgtcgaatatgatggttattcgttaa

SEQ ID NO: 231927 - DNA, 750 bp, Klebsiella pneumoniae
atgagttatctatttacgcgtttgaactttgaaatacctttttctggtgcggagtatttgaatgagagtgatgttaaaaaagttataaatcaaataacccctgaggaggggtttattaactggttttttggcggctcatctgcaagtttagtttcaagtgataaggctcattcactttcagaagcaaataccacgctaacgaaaatatatggtgataattatgtagaactcccggctaactcggcctcgctactaaatggtttgcgcaccgagtatagcgatagcgtttctcaaacaatgtgtgcagttataaaattcactggtgaaccatctcaaattcttcttggtagtatgaacccaacatcaggtgaatgcatacaaatgacatcttcagctgccatatcctactcgtacaggccgtcaagtgggggcgggaatatagcgacaagtataccagtgcctccaggattgaccaaaggtgataatatatttattgcgataaccagaaatggtgatgatgttattgcttttgttggtggagcagcttcaaagctacatctttctgcaccaaaatcaattgctcagagtgctaaagttggaattggcaattgtaactttacatctactgctggtttttcaaaaacgatgcaatgttatgagttcatttttttaaatggtccagtaacagatggcaaactgagcgaagtatacgcaaatgcggctttgttgaataaatcgaacttttgctga

SEQ ID NO: 231928 - DNA, 2478 bp, Klebsiella pneumoniae
atggttcgatatgagttacagaggttgcctggcgcgccgctgcagcgagggacggtagatgccgacaccacactggtgagcctgctggattctctgcagctgcaccgcgatgttatcgtgaaactgaatggcagagcactgccggacgattacgacataagccggccactgcgatccggtgacgtggtagctgtgttcgaccagccagagggtggagtagggaagctcatcaccacgatattgcgtccggtcacgaaaatcctctccggcgcgctgaaggtgttcggcctgtcaaataagcccagcgcgtcggtatcggttgcgacaggcgaatctcccaataatgatctgaccggtcagactaaccgggcgaggctgtacaagggtcgtccaaacatttacggccagtgccgcgtctttcctgacctgattcaggaggctctgttcgagttcgtcgacaacaacaaacagcttacggagtggtttgaggtcggttacggccggtacaccatatcgtcgatccgctactcggaatcgaacctcggcagcctggcgggagccagttctgcgatttataacccgggagacgtgatcggcacgattgaggtggggtatcagttcgatgacgtcgataacgaaactgtccccggactgaacgaaagccaggacttcccggctcagaccgcgaccacgacggcgccgacatcagtggcgatcgagagcaatcagctcaaagccattgtgctgtcgaacgatgacaactttgcatacttcgccgcgcttgcggtacctcatcccgtgtcattcgtcattaatgctacctggagcgaaggcgggacaagcgtcacacggaatgtcactggcgccgggaacatcatctcctctgagagctttatcggagacgacacgctgtcgtacacgacgttctttatcggcgaactctcgggagagattacgtctctgccgggcaatgcggttatcaatgcgacgcttttcacgctgaatgaccagacccctctggttatcgggccttcagtgtcgccgatcgtctcgacgcaggtttgggtgcatgtgctggttcagctcggcgcgacggccggcacaacgcaataccggatcaagttctggcaggtcgatgacgacaacaatcaggtgccggggacatccgagcagcacgattatttcttcgataacgacttccaggtgacgacccggtatttccgcacaacgcataagttcgttccggcggccggggcggggcgctatgcggtcactatagagcgcctcgacaacagcaatgacgctaacgtggtgactttgatggcgatccatgcggtgaacgtgcgcgaaaacgttgtttatccggaagacacgattgcccgcatcacgattaaagggtcgaatgacagcaacagcaaccgcgagcagaagtacaatatgctggcgcagcggcataccatcagctacgaccggacaaccggcgcggttgattacacactgcggccgagtcgttcgtttgctgacgctatcctgcatgagtgggtggttgtgggtaagcaggacgtggccagtattgacgtcgcagctctttatgccattgccgactctttgacggatgaggcgcttgggtatttcgattacaccttctcggatgagaagcagtcgctgggagagaaaatagcgacgatcgcaaatgtggcccgcgttgatggcaataatatcggcgatgtgctgacgttctggcgcgatgagaaagtaacaaatccggatgcggtttttgcgcgctcaaacatgttctgggacgagtacaaggtcgcctggcaaatgtctctccccggtggttacgacggcgtggcgctggactacgttgacccgctgacgaacaagaaggcttacatctacctgcagatcgacagcagcggcatcactgaggttgaggatgccactgttaacgcgatgcagatcagcctggatggctgccgaaacgccactcaggcgatagaccgggcctggcttgaggcgaggaaaatcctttactcacgcctgaccatgacggtgaaagtgctggaagaaacgcaggtcgtgcgcggcacggtggttcagtgtccggacatgtacgacaacgcgcagcaaaccggatacatcactgggcgctccggagacgagtttgcgacctcagagcgtatcgacttctcactcggcgatatgtgggttgtgatgaccgacagcctcggcaattaccgcgggcgctggcgagcttatccggtaagcggcaaagcccaggcatttcaggctgcagccgataccttcgatctgaacatttatgaccgcagtacggtacaaaaccccagccggtatttcatcgctaccgactcggaactgaactccacaatctggcgcgttgatagcgccaagccaaatggtgacgatactcaaacgctttccctgactgagtattcagacttgatttatccgtaa

SEQ ID NO: 231929 - DNA, 396 bp, Klebsiella pneumoniae
atgacacagagcgactttatcgggcttgttaacggcaagccctgggctaaccgcgcctgcagttttgagcagatggactgttggggactcgtcgttttgtattaccggcatgttctcggcctggagctgcatcacatcgccggctacgaatcgggcgcggatttcatcacctgctacgaacaggaacacgcccactggcggcgtgtgccggtggcggcaaccggctgcatcgccgttttttaccgcggcgaagtgccggcgcatatcggtgtgatgatcagcccggttaagtgcctgcatgcccgcggggagtttggttttgtgcgctgcgatagcccgctggcattactgaaggtttacagccgcgtggagtacatgatccatggttcgatatga

SEQ ID NO: 231930 - DNA, 471 bp, Klebsiella pneumoniae
atgccgacattgagagagtggaaggagcgccggccggcgagcgacatcaaacagacggtggagttttatcaccctgcgtttggttattaccgggtggtcaataacctatttcgcccggcgacgtttggcggaaactcattcgagcctgcgcggttcagcgtgaccgagccggcgcaggacggaacggcagtgatatccatgacgatcacctttgtcgccgcgacggaacatgtccggcagacactgaaaagctggcgtggggctgcgcgcatgacgccgataaaatgcctgtatcagcagtggaatgcgatcggtgatgcatcatccctgaaagactggacgctttacgtgaacgacatttcagccgacgccagtaacgtcaccgtgactgccggaaaaacgaacccgctgacgctggccaactccatcatttacaccacgaaagactatcccgggctaatcaccgtatga

SEQ ID NO: 231931 - DNA, 477 bp, Klebsiella pneumoniae
gtggcgacagttcaataccctccgttcctgccgcttccccagcgcgcagatcagaacatgacgcaggacaccgcctggcagacgacgcagacggcagtcggtcccctgataatcacgccgattaccactgaccttaaggcgacatggacgctgcagtggatattcacgcttgcccaggcagagagatttaagtcgtggcttcgctcgccgacatactgcgaccgcgggcgtaactggttccagatgccgatcgacctgggtgatacgcagggcgttcagcagcagacgctgcatttcgtcgatatgccggtgcagaccagcaaaaacggcaacattgtcacctggaccgcaacggtcatcagcaacggtatcgaggacattaccgaggactatgacgactggattgttgaggctcagcctggctatggatactggctggattacctgatcaccgaagtgatgccgagggccgactga

SEQ ID NO: 231932 - DNA, 405 bp, Klebsiella pneumoniae
atgaaatcattaaccgcagtgcgtaaaaaaagccctaattatcccgttgagttcaaaatcaaaatggttgaactctcgcatcgaccagagatctccgtagcgcaactcgctcgtgagcatgggatcaacgataatttgctgttcaagtggcgccagtactggcgcgaaggaaaactacgtcctccttcaacaacagaaaacaacgtgcctgagctgctcccgataacacttgataccgaagatgttgtccctgcaacctccccccggtcacaacctgtagctgctgcggcacctgaatcactcaatatcagctgtgaagtgacgttccggcacggatcactccgtctgaatggtgccatcagcgaaaatatcctgaacctgctgatacgggagctcaaacgttga

SEQ ID NO: 231933 - DNA, 300 bp, Klebsiella pneumoniae
gtggagacagaagttctggatttcagagttcagcagtatcggcaggtcgccaattttaatatccgaagccataccatcacgcttcatctggcgggccacttctttgggcttgtcggacagctggcgtccgccggtattctcatcctcgctctgctgtttcccctgccggcccagtacccagctggcaacaaagaacgtcacgatacagatgacgagagaaaccacggcggcgaaaataaaactggtccacaactgctcaccgcaccagatggtgtatttatcggccaggatttgttctga

SEQ ID NO: 231934 - DNA, 261 bp, Klebsiella pneumoniae
ttgtctacgggcgtggggtcagtccaacatggcgacttcttgcccacgattgatttctgcccggtgattttcaaaggcacctatgacgaacaaaactggcaggtactgagtcagcgctgggacaacctgcgtgcacagttgcacggcaatcccttctccgccagtgcgctgcaggatcatgctctgcataaagaacttattcagtcggtgctggacagtgcgccgaacttctctccgttaaagagagcgcggctttgttga

SEQ ID NO: 231935 - DNA, 324 bp, Klebsiella pneumoniae
atgatgagaaacaccaatgtgactggtggttccgcaagcctggctttggctggagccaaagacacacgtgtcgagctgagaaccagcgccgacataaaagagaagttgaaagaagcagcctcgctggttggggtggatatgagtgcgtttattttgatggctgctacacgcgcagctcagcaggcgctagatgaacagcgaatgcgagtgctcagcgaacaggagtggaatcatctaaacgacatcattaattcacctcgtcagccgggagagaaactccgtgcgctaatgacaagggaaacaaggtatgtccgagattactaa

SEQ ID NO: 231936 - DNA, 549 bp, Klebsiella pneumoniae; identical to SEQ ID NO: 197528

SEQ ID NO: 231937 - DNA, 2214 bp, Klebsiella pneumoniae
atgacctgcttattcgcaccttccctagtggccgtctgtccgaacgggtatggcggttatcgacccgacgcaaatgggcgctctgcggcaatcgcaaccgagatcgaccgtcagggacatattattttcggcggaaagggcgatcgtgaattttttatgaaaacgaatcgttatgacgatgctggcgtcaaacccgtcttcctctgctccgatgcacaccgggtggaggatatcggcagccgttacacttgggtaaaggcgcttccgaccttcgaggggcttcgccaagcgttactggagcctgaaggccgactgaggctcggggatgagtggctgactgagctcacgccaaaagcgcatttcagtcagatcgatattgaagggacgatttttgatggccaggaaatcagcttcaggaagctgtccatcccccttagtcaggatatggtggcgattattggcggccggggcacaggtaaaagcctgctgcttgatgcgctccgttcccgctttgccggtaccgcggcacggggaagcgagcaacgtgaagtgaatgttcagtatctaagtattgaattggataaagccaatggtgagaagatacgatttgatgcccgttcagaagggtatgagtatctgcatgtgtctcagggggaaatcaaaaaactctgccaggagccggggctcatcagtgatgagatcaagaaaatgctgaggctgacaccggttcatgaggcgggtgatacggccacacaactggcagaaaacctcagcgcctggcgtgcctggcgtgaattcagtttgtacaggaatgagcattcagagccggtgaatacgcgtgagtttcagcagcagatcatcagaggcgctcaggaaaaaattgaggttctcacaagtgaccgcaataaggcattgattgagacgtttcgtgaaaacagccggcgtcagacattgctggttcagatgcgggataaattaacgggtgtgcgtgcggacattgcgacggccgaacataacctgaatgccagcatagcggctattaatgctgactctaccgctcaagaagcgatcccgctcgtagatctgtcagcacagacagaggctgttgcgcgcaggcttctatccgtgcaggagcagacggcacagttcgggcgtgataacgacgagattattggcgctttccgtgagcagggactgggacaggacatcacagggttgctggaaaaagtacatgaatatcagcgtcaaacggagcttgcggaaacgcatttgcgtgaaatagcgcgtcgagagacacagtaccagaccggactggaacaacgcgccaaggttgcggctgaattcatggatggattgctgtccagacagggtgtgatcgatacggctttcgcgtcgctaaccaaaaaaccacatctgacgcaggaccagcaggccctgataaaagacattcttacggatatccgcatttatggacagccacactttgatataaaggccttttatgatggaatgctcagttgtctgaaccgaggacgattcagggctagcggggagctgacctctgttgacaggcttcgggaggtgttcagggtcagcggtattgatgagtttcgggcactgcaggcaaatgaacccatgctggttctgccggaattttcggacaaaaaactgaccgtcgaagagttcttctggcgtgatgaatattttaacagtcagggaccggattcactactcagttatctgttcagtccggagcagatccagcgctatctgaacgtcagggcggaatttgaatacaaaggcaaaacggtcgaaaaactgtcagccggtcaacgggggaccttctatgtctgccttaaactggcgacggacgccttcggatcgccatttgtattcgatcagccagaagatgacctagacaatgacttcatcatgcacagtctggtacctctcttcagaaaaataaaacagtacaggcaggtcattatcgtgacgcataacgccaacctggtggtgaactgtgatgctgagcaggtcatcatcgccactaataatgatgaagtcatcagttaccgtagcggggcgcttgaatacggagatcatgatgcgccaaacagcatgcgcaaggcaatatgcgatgtgcttgagggaggccgtcaggcgttcgaagcccgtgagcaaaaatacggcatgttgtggcttaaagccatctaa

SEQ ID NO: 231938 - DNA, 258 bp, Klebsiella pneumoniae; identical to SEQ ID NO: 197433

SEQ ID NO: 231939 - DNA, 1815 bp, Klebsiella pneumoniae
atgaatcattatgtcgttctaacgaaagtacgaaaatctagctatgttgtgcatgatcctgctttgggtaaacgtataattggtttgcaggagatgtctaataatttcaccggcgtggctctggaactttggcccgatcagaactttcagcaagaaaaggcaaaagcacgcttacgtttattagacctgatgcgaaacattgtcggattaaagtctgcattaattaaaatcttcgcattctctgtcgtaatcgaagccattggccttttactccccattggtacccaactggtcacagaccatgtcatcatggcccatgaccagagtctgttatccgtcatttgtataggactggtctttttcactctcttccgtacctttgtcagtatgctaagggcatggacctcactgactctcaatactctgactaatattcaatggaaaacgacattgtttgatcacttgacaagcttgccgttatccttttttgaaaaacggcatcttggtgatatccagtcacgttttacttcattggatactatccgctcaacgttcactaatagtattgtcagtggcatcattgactcgatcatgacaattggtctgttaattatgttaaccctttacggcggctggctagtatgggtggtcgtaggatttacgctttgctacgccattatgcgcctggcgacataccgtttttaccgtcgggtagcagaagagcaagtcattaaaggagcccgctcgagctctcatttcatggagtcactttatggaatatcaacgattaaagctcttaatttaaaagagcgccgttcgcagcattggcttaatattaacattgatgcatgtaatgcaggaattaaacaaactcgctttgatatgatgttcagtggcataaacaccttcatatcatctatagatcaagttgctatcctatggttaggcgccattatggtgattgataacaacatgacgttaggtatgtttatggcgtttaactcttatcgtggccagttttctcaaagagcatctaatttgatcgatctctttatgcaactgcggatgttatcattacataacgagagactatctgagattgttttcagcgaacccgagaaagagctcccagcacgtcgagttttcgatgagaatagtggagtgaagctggagattaaaaatctcagttatcaatatgacccgttctcgcaacctattttttctaactttaacctgcaggttgagccaggagaatctattgcgcttgttggaccttcaggggtcggtaaaacgactttactgaaagtgatgtgtggtttgttatctccaacgtcaggtgaggtaattgccgataatcttgacatttataaaatagggcttaataactaccgactggggacagcatgtgtcctgcaagaagatcgtcttttttcagggtcaattagcgataatatcagcggatttgaagataatgcggatgaagaattaattgttgagtgtgctcgacgcagtaatattcatgatgaaattatgaaaatgccaatgggttatgaaacaatgataggtgagttagggctgggtatttcaggtgggcaaaaacaaagactcttaattgccagagcgctttaccgcaagccgagcattttgtttatggatgaagcaacaagtcatcttgatttgaagaatgagtctgccataaaccaatctattgccagtttaagtataactcgaatcattgtcgcgcatcgtccttcaacgatagcgtctgcagaccggataattgatctttctcaatatggaaagcaagcatcataa

SEQ ID NO: 231940 - DNA, 1122 bp, Klebsiella pneumoniae
atgaatattattttagtaaacacgttatattatccatataaaataggtggtgccgaggtttcggttcagatattggccgagtcattaattgagaaggggcattcggtaacagtcgttagtattcatgagcataatgagcgtaaagatacagaacataacggtgtaaaaataatatatttgccatactcaaacatatattggggattgagtttaactaaaagaaatccgttaagtaaaattttatggcatctaattgatctatataattttaaaattgccaaagaattcgaaaatattattatggatgtaaagcctgatattgtacatactaataatcttagtggaatatcatgtgctgtatggcaaaaagctaaaaaatacaagtgtagagttattcatacttcaagagattattatctgatccatccaaattgcaaactttataaaaatggttcagaaatgtcagttaaatcgattgcggtatcattatggtcgctttcaaaaaaaatattgggtaaaaatgtcgatgtttatgtaggcattagcaactatataaaagataaacacattgaagccggtttttttaaaagtacagaaaaatacactatatataattcagtgaaatctaatgttattcttgatcttaccgccgctaatgataaacgtttaggctttatcgggcggttgacttacgaaaaaggctttgaccaattttgtaagttggcacagttaaataaaacaaaaaagtttattgctgcaggagagtttgacaaaaatagcgcttctttgaagcagttagcacttgactcaaatgttgaattattaggctattgtcctgtcgatgattttatgcaaaaagtcgatataatagtattacctataaaatggcaagagcctttcggtcgtgtagttgtagaagcgattttcgcggggaaagtagttctaactaatcgagtcggtggtataactgaattatctagaattttgccaaacatttattttttagaagatattcaagatatagatagcataccatttcctgttgagatagatgattctgaaaagaaaatatttaacgttgattatgttactgaacaatatttgaaaatttataaaggttaa

SEQ ID NO: 231941 - DNA, 1023 bp, Klebsiella pneumoniae; identical to SEQ ID NO: 129977

SEQ ID NO: 231942 - DNA, 1815 bp, Klebsiella pneumoniae
gtgcaccgcgccctgaccaccattgagcaggtcacgccggagcaggtgccgagaaaagaaggcgcctgggcgccgggcagttctgtggtggaattcacacagaagcaggaaaaggcgatagaaaaggcactgagcgaggggaaaaccctgccggaaggtcagcccgcgacgctctacgaggcgctggtgaaggactataccggacggaccccggaggcacagtcgcagacgctggtgatcacccatctgaataaggaccggcgggcgctgaacagtctgatccatgacgcacggcgggagaacggggaaaccggcaaagaggaaatcaccctgccggtgctggtcacgagtaacatccgtgacggtgaactgcgcaaactgtcgacctggacggctcacaaggaggcggtggcgctggttgataacgtataccaccgtatcagcaaagtggataaggataatcagctgatcaccctgacagacagtgaaggaaaggagcgatttatctcaccccgggaggcatcggcagaaggcgtcacgctctatcgtcaggaaaagatcaccgtgtctcagggggaccgaatgcgcttcagcaaaagtgacccggagcgcggctatgtggccaacagtatctgggaagtgcagtctgtttcgggtgacagtgtcacgctgtctgatggcaaaatcacccgtacgctgaccccgaaggcggagcaggcacagcagcatatcgacctcgcctatgccatcaccgcccacggagcccagggggccagcgaaccgtatgccatcgcgctggaaggggtggccggtggtcgggaacagatggccagctttgagtctgcctatgtggctttatcccgcatgaaacagcatgttcaggtctacaccgacaaccgtgagggctggataaaggccatcaagaattcacctgagaaagcgacggcgcacgatattcttgaaccccgtaacgaccgggcggtgaaaacagccgatctgctgttcgggcgggcaaggccactggatgaaaccgccgcgggccgggcagccctgcagcagtccggtctggcacagggaagttcaccaggaaaattcatttctccggggaaaaagtaccctcagccgcatgtggcgctgccggcatttgataaaaacgggaaagccgccggtatctggctcagcccgctgaccgatcgggacggacggctggaggctatcggcggagagggacgaattatgggcaatgaagacgcccggttcgtggcgctgcagaacagccgcaacggtgaaagcctgctggccgggaatatgggggagggcgtcagaatggcccgcgacaatcccgataccggggtggtggtgcggctggccggtgatgaccgcccctggaaccccggggccatgaccggtgggcgggtatgggctgaaccggcgccggtggctccggtaccgcaggccggggctgacattatcctcccgccagaggtactggcacagcgggcggcagaagaacagcagcgccgggaaatggaaaaacaggcggaacagactgcccgggaagtggccggggaggcgcgtaaagccggcgagccggcggaccgggtgaaagaggttatcggggacgtcattcgcggactggagcgtgaccggccgggtacggagaaaacgacgctaccggatgatcctcagttccggcgccaggaggcggcgattcagcaggtggcctcagaacgtctgcagcgtgagcgtctgcaggctgtggagcgtgacatggttcgtgaccttaaccgcgagaaaacactcgggggcgactga

SEQ ID NO: 231943 - DNA, 726 bp, Klebsiella pneumoniae
atgagagcacaacacacattttcaggcgcgacagacagctggcttcagcgcctgctgacctggactccgggacaaacggatatgattaaaacggtcgcactggtactgatggtgactgaccacaccggcttactgctggccggaaacaatgaagtgatgcgcctgctgggacgtggctgttttccgctgttcggtctggcatggggaatgaatctggcacggcacgcggaaatacgccagtctcaactgaacagcctgtggggctgggcgctggtcgcccaggtgtcgtttatgctcatcgggtacccgtggtataccgggaatattctgttcgcctttgccgttacgggccaggtcctgcggtgggtcagccagccgtcctggtattacaccctcccggcggctggactgcttgtcacctggatacccctgtcgaccgccagctacggcatggccggagtgggtatgctcaccgccagctggctgctttgtcgcgcacagcatgcaccggaacggctgggatacggggtgctgtgggccctcatggtgttgctgatgaatatgaatgacctgagtgaatcagtggccgggctggcgattgctctgctggcgctgatggtgtgctcatctgccggagagcgtgtgaaacgcttctggccacggcagttcttcgtgatgttctatgccgttcacctggcggtactcggtattgtcgtctcgatgtaa

SEQ ID NO: 231944 - DNA, 126 bp, Klebsiella pneumoniae
atgaagaaaattcttataatgacgccggacattgaggggcctgtccgtaacggcggtattggtactgctttcactgctcttgccactactttggcaaaaaaggggtatgatgttgatgtattgtag

SEQ ID NO: 231945 - DNA, 2094 bp, Klebsiella pneumoniae; identical to SEQ ID NO: 164815

SEQ ID NO: 231946 - DNA, 1290 bp, Klebsiella pneumoniae
atggcttccactctgtgccagctggttgagcgtggcattgtcgagttcgcgttgcgtgacggaggcaaagacggtcgccgtttcgctgaccgaccggccgggactctccacccagccgtggccgaccttaatcccgtcgaacgggctgctgccgacaggaagcgtctgggtggttttctgcccgggacgctgaaccgtcagctgcccggcttccgctttcagcaccgtgacactttccccgcccttcaggcgcgtgtcggggatcttcccgagcaccgccagacgctcaccctctgctaccggcagcttatccgtgcgaaacagcgtccactgactgtcgacggcggagactttcaggtccagacgctccccctcgcggtctttcagggtcagcatgttgctgctggccgtcacccggtcaatgacaaagcgatcatgcttccgggtctccgggtcccaccgctccatgaccatgccctcgcggtaatagtcccgcacgccccggctcttgctgtccagccacaccggcgtcagcgcggtcaccgtcatgtcccggttgccgagcgccccctcatttttgagagtgtcgcggataacgttgttcaggacattctgctcacgcgtcccgctgatttgcgccacactttcctgcccttcacgcacgctggcggcaaactcctgtgccagccggctgtagcgcgcactcttgtccggctcactgatgatgtctgccgtcgcctgttttccgccctgccaccggtaggtgttcacgccgctgtctttcaggaccgtcagcgcgctcccggttccgctgcgtttgccgctgtcggagagcaggacctgcacgttatggcgcatggcgccatccagcagggaaatcgtctccttcaggctcagcttctccgcctggtccacaatgagtgtcccgcccgggataaacgccgtcccgtcctgcagggcagatttgcctgtgacggtttctccggccagccgcgcatccccggcgagaaaatcccgggagcggttatcggcagcgaggatatgcacgtcgcgcccctgctcccgggccatcagcgtcagctcggccacccgctcccgctggcccgcagcgccgccctgaccggcgacaatccccatcgccggacggtcctgcgccaggacgctgaccgcatcgctgaagggagcctcgcgcaccaccgacgcgtcgggcgtgacggagacgtggttctgccgctgaatttcctggctgagcgctttcacggagagctcatcaaggacgtgaatgtttga

SEQ ID NO: 231947 - DNA, 636 bp, Klebsiella pneumoniae
atgcaggaaagaggcggtggtctgcgcgtcgacgccagcgctctgcatctcgcccacggcgcggtgtgtcggccccagaccaatgacgcgcgggcgcgtctcttccggcagcaggctgatggcgctcatcacagctttgaactgcgtggttttccccaccccggcatagccctgaaccacagtgaaccggtccggggtctcgagtatcatccgggttgccgcacgctgtccggcggtcaggtctgtcatgaggctgcccggcacccggcccatcagcggtgccaccgcatccttaccttccagcacccgcgtcaggacgcttttctccgcatcccaggtctggcgggaaatcagcaggtcgttgccgtgtccggaggccaccggcacattcagcagactcccggccttaatctgcgcctgaatggttgcctctatgtccttcatcgggaccttaccgccgccggtttccagtgccgtggccagcaactgcggccgggtaaaggtcaggctgttgctctccagcagcggcacggaaaggtgaatggcctgctctgccggggtatgcagtccggctttctgctgtgcgatggcctcctcaaggtctgtttctcccgagcgggccttcagctgctctga

SEQ ID NO: 231948 - DNA, 231 bp, Klebsiella pneumoniae
gtgcacatcccgctcaatcaggctgtagaccgccggtcgcagctcaggtacctggcgcacaatctctttcatgatcgccacatcagccgcgctgcgctgctgcatcagccggaacggctggcccggcgcgatggactgcagctggtcggtatcgccgctgagtacggcacggcctcccccggccgcaatcagggagagcgctttcgcggtgtcggacagaccgaccattga

SEQ ID NO: 231949 - DNA, 1458 bp, Klebsiella pneumoniae
atgagtttaaaattaaaaacgataaaaagcacgaaatggtcagcgttatcatctttgacaattattgtgcttggttttttacaaatggtaatactatctcgtattctggagccatttgaattcggtgttttgtcaataatgacagttgtctttttattcactgatatgcttgcggactgtggtctctccaatgccattattcagaaaaaaaatataacgttagatgagttatcagctttatattgggttaatatatttttgggggtatttttatttgttgtgacgatcattttgtcatatgagatttcttcatggatgaggctggatagattaagctttcttatacaattgactgctcttgtttttattatcatgcctcatggccagcaataccgagcgttaatgcaaaaagaacttgaatttgatattctgtctaaaattgaaagtttttcttatcttactgggttttgtttgacagtcatcattggaataataactaaaaatgcctcatgtgctgtttttggatatttacttacagtttcaatgagaactgtaatattaagttttgttggtcggaaatattatcatccgacttggaagagaagtaaattacgagagattaaaaaacaacttttattctcattttaccttacgcttgatagtatattaaattatatcaactcctcaataacaacaccgatagtcgctagagttcttggtgctatttatgttggggggtataatttatcatttaacgttgcagtcaatccaccatctaaaattagccctataatcaccagggttttatttccagcattatcaaaaatacaagatgataaagaaaggctgagaattaatttctttaaactcctacacgtgattagttatataaatttccctgcattgcttggtttatgcattattgcaaaagattttgtatatctggtgtttggtgagaaatggctttttatagttcctacgctccaacttctttgtattgccggagcaatgcgtatggtagcaaaccctattggttcattgcttatggcaaaagctaaaatggagttaagtgttagatttaattttgtaaaaataatcatatttattcctgttctgtatttttctactatctggaatggaatggttggtgcggccattggttttttgatttgccaggcaattaatgcattattaagttatttctttttacttaagccagtgctagggaattgtattgttgactatataaatagtttttttattccgttcgttcatacactacctatgattttattattgttggtatgtgatatttatattgataaaatctcattaacattttttatcctgaaaatagtaataggtgggggcgtttatatcttaactatttttattagccctaataagttacttgctgagatgaaaggcttatttcgtcaattgctcttaaagagataa

SEQ ID NO: 231950 - DNA, 237 bp, Klebsiella pneumoniae
atgaaacgactgataaacctgacgcccgccgagaaaagatttctcgacgatgctgttgccgccgctgagagagcgtcaggcaagaagctgaatcagcccaacaggcacattgtccttaacagggctcgtgcacagatcgaatcgcagcgccaggcagaacggcagcgatctgcgcgtgaggaggagcggcagcaggcggaatttacctggtcgcgtccgcgggcgccgcgtcgctga

SEQ ID NO: 231951 - DNA, 252 bp, Klebsiella pneumoniae
atggactggattttacttactatcgccattgctctacttgttgtagctgtctactcaggaatctcatactacaaagaaaaaaaacaatcagtcgtacatttaggcgatagcgccctatttaccataatcccttcttacgcgcaccgcgaaaacggcctcagggcgtttctgcgccttcagccacaaaagagcacgtcttacccccagaaaaccgcccggaatcgctctggtgagttttacgggggtgaatga

SEQ ID NO: 231952 - DNA, 174 bp, Klebsiella pneumoniae
atgctgcctgccggcatgaacgaggacggtgtaatcgaagacatgcaggcgtatgacgcctggctggcagatgagcagacgctgcgcgatatgcagcggcgtgaagaggtcaacatcaaccacagccaccgccacgatgagcaggatgatgtcgagattggggggaacttctga

SEQ ID NO: 231953 - DNA, 720 bp, Klebsiella pneumoniae
atgatccagtttcaggtcactaaggattttggtaatccattactacccgttagtaaggcccgctcagagctgtatttaagttcagcgttagcaatatatgagatgcgcagcactaaggaaagcagcggtaatggtaaagcgctggaagttaacggactgacctttgatagtgaagggctgatttgtgatggcattgatggtcattatgccgatacgggcattattgagccgttggcaaacacggtgattatggcctttcgcgcggataaaccgggggctacatcgcagttatactccagtctggctgaagggacaagcccgtatacaggtacacgtgctgcagtgaccaaagatggcttttttgtggctgatgttggtatccatgtatccgagggaggggcttataccggacgagcacaaacaggtgatattacgcctggctgggaaatcgttgccgttgttacatcggcaaaaggtatttcagtcactcgtatgactaccgggggcagtaattacgggctgttcgatagccgcacgaatcccaaaaatactgttcgtattggtggcggttacatcgcgccccacaatctggggattgttggtcgaattggtttgtgggcgatgtataccggtgcaatgaacactacaacggtagattatttgctggagaaagcacgcggcatcatggctggtaaaggcgtcattattcaggcgccgtaa

SEQ ID NO: 231954 - DNA, 585 bp, Klebsiella pneumoniae
atggggcttccggcaaaccataccatcgggcagggtaacgtccatcacaatgcccacggttaccggctgatggggctgtatgcgcaaaaggcattacgtcatcgcctgcttacacgcaccgcagataagccagacggagaaaaatatttacctgtgcatgctacccgcgcccgtaaattaaacagcagaaccgtgattactgacgtgtttacgtatcaccccccgctggttattgatgactcgtatatcactgagctggccgatggtcatcatggtgtcgaattacatgatgaaaccgggcggcttgatattgcgtccgtggagattgtcgcgggtacaaaaattaaaatcgtatcgaaaacagatatcggacacggggcatttgtggcgtttgcctggacgccggataaccgaggggaaattacaagcaaccgatatcaacaatggtttttcgggcgtgaaaccggggtgcgaacaaccattcatgattctgaccctgaaaagaccgatttaacagatgaaaacggcaagccttatccgctttataactatttgccgattcagaagattgccatttccgaataa

SEQ ID NO: 231955 - DNA, 1221 bp, Klebsiella pneumoniae; identical to SEQ ID NO: 185278

SEQ ID NO: 231956 - DNA, 501 bp, Klebsiella pneumoniae
atgatcgctagcggaatagttcaaaaactgaatgcgcaaatgaatcaggagttttatacctcaaatttgtatcttcagctcagccagaggtgcagcgagaatagccttaatggcaccgcactatttttgcgtcatcaggcgcaaaatacggtgacgcaaatgatgcgcatgtacgaatacatcaaacagagcggcgccacgccggtgttacaggagcaacacgcccggtgcggtgaattttccacgctggaagatctgtttgagcagacggtaagcgattaccagaagcgcattaatgcgctgacctctttgacggaagacgcccaggcagcaaacgataagtcaacgattaacttcctgaagcgatacagaaaagaggaaatcgtggacgggacgctgttgcaaatcattctggatgaagtccgcagcgctaaaaaagcgggcatcaacatgcagcaaaccgaccactatctggttggcgtgatcgatcgctatcactaa

SEQ ID NO: 231957 - DNA, 339 bp, Klebsiella pneumoniae
atggattttgaagcgcggaaacaaaaggcgctggcgataatggccagccgtaagatgtggaaaagcaattatgcaccgcttctgatacgactgttgtggcggctggggataaacattcccccgctgccgtttgctccgctctggcaggtttttgtcgtaatgacaggctatttctcccttggatatgggctgtggatgtactggacggtgtggcgggcccaggggatgcctctcctgttcgcctgcgaaatcagtcttatcgcgggcgtgttatttggcctgacgatggcactttttcatctgtggcggcgaaaggtgaataaattacggctttgttga

SEQ ID NO: 231958 - DNA, 519 bp, Klebsiella pneumoniae
gtgaaaggttcagaatggaataaatgggatttacatattcacagtccgatgacgtggcaggccaatggttactccgaccagtgtgatatagagcgctatgtacatctactcggagaaaagcaactttctcttgtcgccgtgaccaactatttttatttccggcagaatgagctggaaacgatcagggaagagattgcccgtcagggtctcaatataaccgtgctgggaaatgtggaattccgccttgatcaacagaacaaggccggggattttattaatgtccatatccttttttcagataaggtgagcaccgaacgtattaacgaagccctagcccgttttccgctccggttaacagacggcgacagaaaggccatttactgctgtgaaaagagcgtcatggaaagcggccatggtgtggataccattgtggtggcgttcagtgcactgcttgagcatctcagttccgcattccgcccgttcagggattacctagggaaggtgcgaacaagttcctga

SEQ ID NO: 231959 - DNA, 354 bp, Klebsiella pneumoniae
atggtggccgggggcgggggggataacgcggtcagcgccattggcgtcggcgcggtctcgccgggggatgcgtttatttcgctcggcacctccggggtgctgtttgtggtgaccgatgcctatcgtccggcgccgcagtcggcggtacatgcgttttgtcacgtgctgccgaacctgtggcaccagatgagcgtcatgctgagcgccgccagctgtttgcagtggttctgccgcctgaccggcaccacggaggtggcgctgctggcggagattgccgagctaagcgaggaggagaaagcccacgccccgttcttcctgccctatctctccggggaacgtacccataagcgctaa

SEQ ID NO: 231960 - DNA, 615 bp, Klebsiella pneumoniae
atgaagagaattgccatcgtcggcgtggggccgacggggatttacaccttttatgaactggtgaagcgcggtgagccgctggccatcactctgtttgaaaaagaggcgcaggccggggtgggtatgccctacagtgacgataataccgcggcgcaaatgctggccaatattgccagcattgagatcccccccatcgacctgacctacctgcaatggctgcagcagcaaagcgatgactggctggcggcgcgcgggcttgaacggcacgccctgcatgagcgccagtttctgccgcgggttatcctcggcgaatactatcgcgaccgttttctttacctcgttgagcgggcccgggacgtcggctttgtgattagcgtttgtgaatcctgtgaagtcacggatattgcggttcagtccaccgggatcgccatccacaccgatagtgcagcagacccggtaatcgtcgacctggtggcgattgccaccggccatctgtggcctgaagaagagcgcgccagccgacagtacttccccagcccgtggaccggcctgatggaggcccgcattgctccctgccgggtgggggatccttgggacttcattaagcgcgattga

SEQ ID NO: 231961 - DNA, 540 bp, Klebsiella pneumoniae
gtgctgaactttcaaaaagaccgggtaaagatcctgcgtcccgtgggagaagaagttgaaagccgccatcagcaccaccaggtacaggcacagcttccagtggctacgcagtaccggcagcagggccgtactctctttattctgcctggccgcctgccaaaccggagactcctcgacgcagaaatagataaacggcagcagcagcaccggcgcggcgccaatgacaaacatcccgcgccagccgagttgttcaaacagcagcccgtaggcgacggccgccagcaaatagccgaaggggtatcccgcctggaacaggccggacatcaggccgcgcgagcggtcggggatcgtctccatcgccagcgaagaggccacgccccagatcccgcccatcgccacgccgtacagcacccgcagcaggaaaaacagcatcaacgacggcgcggcggcggagagcagctcaaaagccgagaagaacacaatgttgagcatcaggattggtttgcgaccaaacttctccgccgccctgccgaaaattag

SEQ ID NO: 231962 - DNA, 1338 bp, Klebsiella pneumoniae
atgaaactatcaatcggagaaaagatcggctttggtgctggcgatatggctatcgctatcgtcatgatgtcgatggcgatgattattacctatttctatacggacgtttacggcctgactcctggcgatttggggattctgctgattggcgtacgctttatcgatgcggtgatcgacccgttgattggcatgatgaccgacaaaacagagagtcgctggggaagataccgtccgtatctgctttttttctctatccccttcggaataaccatctggatgatgttcaccacgccaaactttgactacaccggcaagctaatctgggcctggggctcctacatcgcgctgacgctaacctatacgtttatctcaatcccttacgtttcactcatcggcgtcatcaccaacgatcctaaagaacgtctgagtgccaacagctatcgctttgtgatgaccaaaatcgccatgtttttagtcaccatcatcgtaccgatggcggcgctgtactttggcaaaaaaaacttggccagcggctaccagctggcgatgggctccatggggattgtgtcgacgctgttgtgtatttgctgtttcttcagcgtaaaagagcgcattacgcataaaaccgagcacatccactttccaactcagttcaagaatctgatgaagaatgaccagtggttgatcctcggcgtatcgatagcgttaatcatgtttggcggcatcgtacgtaactcggttgcggcttattacgccaagtactatctgcacggcggcaacgagctgatttcgccattcctgaccaccggcgtcgtggcgtccgttatggcgatgctgctggccgggaccattacccgctactacgacaaaatcaaaatgttccgttacacccagctgctgaccttcgtcgcaggagttgccatgtacttcgtcgttggcgagcagaacatttatctggcatttgttttctttttcatcattacgctattgggcgacatgcagcttccggtgtactgggcatcaattgcggaagcagtggactatggtgaggtgaaaaccggtacccgcgtttccgggctagcgtttggtgggatcctcttcttccagaagctagggatggggctggcaggtggctttatgggcttttcgctgagcttcttcggctaccaggcggacgtcaagcagtcgccgtcatcgctgctgggcattacgttgatgatgacgcttatcccttccgtatttaacctgatagtcggcctgtttatgaaaaaatacgtgatcaacgataagtactacgaaggcatcaaacagcagctggcgcagggtgaaacggcgtaa

SEQ ID NO: 231963 - DNA, 1077 bp, Klebsiella pneumoniae
atggaaaaaaaatactatgctgtgctcaccagtgcgggaaaagaggctttcgcatcctctgcaatcagtgggactccggtaggtttctcctatatgggggtgggcgatggcgatgaaatgttgccggtaaatggagttctgcgctcagggttaataaatgagcgttatcgtgcaccattaaaccgactggttattgcagatcagggggcgaatgttattcgcgctgaaatgattatgatgccgcaggtaggtggtttctggttaagggaggcagcactatataataatgacggtgtttgtctggcggttgcaactttgcccccatcttataagccgctacttgcggaaggttcggggcgattacagtccgttaatttatggatagccgttagtaatacagcaagtgtggagctgaaggcagacccggctgtaattattgcctcggtggcggaggttgaacgtgcaaaaaatgaggcaaaggattatgccgacaagattgcgggccagctggatacggatattcagcaggtgattgctgatgcgataacggcggcaaagcgtgatttctgggaagatgataacccggtgggcactacgcgattttttaatcagaacgtcaaccctaatgaaaaatggccgtggtcagaatgggtgtacaccggcgagaataaaacaattcgtgtaggcaaagcggacggttcgaacgtcgggcagagcggcggcagcgataacgtcacacttcagcaggccaacctgcccgccgttcagattgacgtgagcggcgaaaccagcgaacaggggcagcaggagctgacgacatcgggcaacggaaggcaccggcacagggcaggtgacggggcgccgggggatacctggcaggaagccacacacggaacggataaccagaaatatacggggtggaactataccgactatgcagaagaccatcagcatggcgtcacgatcccgccgcacaaacactcgaccagcggaaaaacagccagcctcggtgaaagtaaatcgttcagcgtggtggaatctcacacactgctgatgtgctggagccgagttgcctga

SEQ ID NO: 231964 - DNA, 387 bp, Klebsiella pneumoniae
atgaacgaaaaatgtttaggctggaatgaaataccagtaaaaataaccgcgagtaatcctgagacagcaaactttactactgatgttataaatacctataacgagttaatacattacttatactttaatctaagtgaagatgtatttctgaagaaattgatggatgggttttacagggagatattcataatggatattattaatctcaagctacatgaatggcttgaaagttctgaagagataaagattaaatacatatcagtcccagaggttaaaactatactaagtagctatcatgagtttttgattaaatgctttaatggtgatggttatgttcgttattacaaaaaagtagaaatcagcgcaaataaacagtctgtgatgtga

SEQ ID NO: 231965 - DNA, 288 bp, Klebsiella pneumoniae; identical to SEQ ID NO: 14114

SEQ ID NO: 231966 - DNA, 381 bp, Klebsiella pneumoniae
atgaagaaagataatctgagtaaaaaagatgaaacaatgatattcgccatttcagcaacgctaatgttgtatgtggacaggatatacagcatggcaagtgtaaacaaagatgatgcagtgatttatgtaaatgatgaagatgttgttgagtttgcactacgaattcacatgaaggaagtattaactgagtttgagtattacaagtctgcttatggtacaggaaaggaaaagtatgaatatataaatataacagagctattaaaaagggtgatgttttttcatgatttatatgtcaaggatattttgataagaaatatagagtcgggacgatcttttgatgattatagtgtgttggactgggatgtggacataaatagataa

SEQ ID NO: 231967 - DNA, 138 bp, Klebsiella pneumoniae; identical to SEQ ID NO: 146758

SEQ ID NO: 231968 - DNA, 153 bp, Klebsiella pneumoniae; identical to SEQ ID NO: 14111

SEQ ID NO: 231969 - DNA, 1629 bp, Klebsiella pneumoniae; identical to SEQ ID NO: 18579

SEQ ID NO: 231970 - DNA, 390 bp, Klebsiella pneumoniae; identical to SEQ ID NO: 18585

SEQ ID NO: 231971 - DNA, 1536 bp, Klebsiella pneumoniae
atggctatttttcatcttgattttaaaattgtgaaacgaagtgagggcaaatcttccgttgcgaaagctgcttatcatgctcgtacaaggataacagatgaaagaacaggcgatacgtatgattatagccgccgtaccgatttatacggacatttcatattagcacccgttaatgctcctcaacatattgtaaaagactctacagcattgtggaatgaagttgaaagggtcgagcgccagcaaaatggtcaaacagcccgttatttcgatgtttccattcctaccgagttaaacaatgacgacaagaaaaaacttgtccttgagtattgtcagaaaaatttcgttgataaaggtatgattgccgatatcgctttccatgatctcgatagcgacaacccacatgctcacgttatgttgacgttaaaaaccattggcccggaagggtttggtaaaaaagaaagaagctggaatgacagaaaaatgtctgtgttgtggcgtgaatcatgggcatctatggctaacagctaccttgctgccgctggctcgtcagaacgtattgaccatcgttctcttcaggcccagcatgaagaggcattagaaaaagcggcggtagctttagataatgaagaaaaagcgctatggcttgctaaagccgctgaaacaaaccgtcctccaatgaagcgtatccacagtgccaaatggcgtagtaaagcagctcaagagcaaagagccgcagaacaggctgttcgtgatgctaccaagcaagaagccgttgaagtctacaaaacattcagcgaacttgatcttgaaattgtcgttgatatcagaagctttacgataacacatcttgctgaaccagaagatattgtattagcaaaaacgcgttccgattcttctaccaaagaaacgcaaagacctgtactggtagtcccggcacctaatactcgtatgcgaggtgttaaatcctatcgtgttaaatcctatcgtgataaatccaaagtcagtaaggttgttgctggtaagaaaccatcagtcagtatttctgattctggaaaaaatactattctgaaaacatcctcctctcaagccctaaacagggcatccagaagcgcccctgaacgtgttaagagaaaacaggctattccacgtcaggataatatttttaaacgcttcacaactcttgtaattgattttttcaagcagaagtttgtatgggctaaagcaaacaaatcccaaaatgatcttatcagtgaagaacatgataaacgtattgctgaaaactatgtctttgatgaggtattaggccgtcatgtttcacgtaatgaatatgaacaacgtgctaaattcaataatgatgaaaaacaaaaacaaactgagatctgcgccacgaaaccagcggcaggtgaaatttatcgtttcccaagtcgtgtgaaaaaatctgaacaacccagtaacacaccagactacatacctacactctcatctggtaagcgcaatgggacaaaattaagaccgccggggttccccccaaaataa

SEQ ID NO: 231972 - DNA, 5172 bp, Klebsiella pneumoniae
atgctttccgtttctacggtaaaaagtgcatcaaaagcatccgtttattattttgaagaagacaattattacttccagggcgaacaatccacagcctggtatggagctggcgccgaatcacttggacttgaagggccagtaaagcaagaaatgtttaagcaggttctggaggggaaactgccagacggcagtgatttaactcatatggttggcaatgaaaataagcaccggccgggttacgatcttacattttctgcgcctaaatccgcttcaattcttgccctggtatatggcgataaaactgtcctcgatgcgcataaatgggccgttgaacggaccttagacgaagtggaaaaactcgcatcgactcgtacttacagtggtggtgaaaccacatttgaacaaactggaaaccttgtaattgcgcagttcttacatgacaccaaccgtaattctgaaccacacatgcatacccacacggtcgtggccaatgtaacgatgaacggaagtggctggaaaacattatcttcggatactaaaagtgggaagggatttaccgatactgtctggaaccaccaggtagccattgggtcaatctatcgtcgcttttataaagggaaactggaagccgaaggttatcccattgaggagaagggaccacgtggtgaatgggatattgcaggtgtgcctatcgatgatttatctacgcgccggcaggaaataatcgaaaaagtgggtgaggatgccagcgccaaagcaaaaagtgtcgccgcgcttgatacccgaaaaaccaaggatttcaccgatatcgaaaacgtcaggaaaggctggcgggaaacaatggaaaaggccggtttcgattatgaacaattcgaaactgaacgtctggaacgtgtgccaggaacatctcaggttcccactttgaccgcgggtagtgatcctcaaaagggaaatgcgccagcagacccccacagagtgaatattacgccgcaaaatgtacccggagtggtgcatccgggggctgatcgcaccgagcctcagcctgtcctggaaaagcaagctaaagagaatcccctgtcagctattgttgataaggctatcgagcaggtttcaagcaagaatgtcaggtttacctacgacaacgtactgaccaacgtgcttaaccagaccgaaattaagaaaggtgtgtaccaggaagcgcgccaggcgcttgatgccgcggtcgagaaggggagtcttatcgcagttgatacaaaacagaccctttttacttcggccatgcatgttcgagacgaacaaagattatcccaaattgccggccgtatggccgaacaatccgctgggcttacggcagatgttaatgcccgggatatcacggcaaaaattgcagaccgtgatcgtgctctgacgctggtcgatgccaggggtgggggggaatttcagagcaatttattaagccgaatgaaagaactggcgcaaaacagcagtaaaacgccggtactgattgccggtaacgtcaaagataagaaccagtactcagaacaccattcagtgatggccataactgtaaaagaactggccacaaccgaattacctgaaaatacgatgcttatcattcctgaagccgaaaagctaaacgtcccggccatgtatgaagtcctcaaaacggcaaacgccgttaatgctccgacggttgtcattgatacgcatacccgcagggcgacgggctttgccagtgaagttttgagaggtgcaggcgcaccggtactctcatcttcgccaggaatggaaaagagctccttaacgttagttcagaaagatacagtggacgatcgcctccaggttgcagccaggtatgtcagccagcaaaaagcggccggcatccatgtcgttgctcaggcgggcaatgatcgcacccggggacagttaacgcgcgagatccgaaatgctcttcaggagaacgggatacttggtgagacggttgccactatttcaacgctttcacctgtgtggcttgatggtacaaaccggaaccttagaagcacatatcagaccggaatggtgcttgaacggtatgagggaaaggaactccaggagacaatgacgatcaccggtatcagcgataaccacaatactctgcgagtagtaaatgaacatggcgaatcgcaggggctgagattaaatgcgatcgacagtcagtatcgcctgtacaaacaacgtgaactggagattagagaaggagaacagctaaaggcaacaggtgcatcctctcaaatgaatgccggcgataacttcagagtgagtggcgtgcgtaacggtaactggctgtttcgcgagaaacttgtccttgaaactgctaatggtaaaaccatcaaggttcggatggatcagccactcaagctcgattacggctatacagaagggcttggtgccagccgtaactccgacgggcatgtagtggccgtgctcagcagtaaagaagccacggacacaacggttaaccagctgcgccgcagcggcgaaaatatcattgcttttactccgctagatgaggccagtataacagcacgcctggagtatgaacggacgtctgtcagcgtaactcagggaattaaaaatctctccggtaatgacgatatcacccttgcgctgcgtgaactccagaacaaccgtcttgcccccagagaaagagccgtaagacaggctattgaacttgtacagggcacaaacgtcacgttttcaagtctgaacgtagtcagtaccgcgcttaaaatggaccagtcactatccccccttgtcgcccaggccgaacttctgcgtctggagaaccggggtgaaattatcgcgctggatggcaaccaggggcgtttcggggattatgtgcagcgtgagaactggcaaaacgaaaagactatcctgaaaaatattctggaaggaaaaaacgctgtcgatccgctgattgcagatgcccggcatgaaactgaaggtaagggactgacggatggccagcagaatgccgcgggtcttatcctcgaatcgcgcgatcgttttgttactgtacaggggtatgccggcgtggggaaaactacacagtatcgggtagtggcagcggcagttaatcaggtggagggattagaaatacgtgggctggctcccacacaccgcgccgtgggcgaactgcaggcggccggtattccggcgcagaccattgccagttttctttcagaacagggggagcgtcaggcaaacggccagacgacagattacagtcggacgctgtttgtgattgatgaaagctccatgatcggaaaccgcgacctggccacattgaccgatattatcgtggccggtaatggaagagcggtaatgagtggggatgaggcccagctgaagcctcttgaatccggcgttccgttttcactgacgttaaatcgtagcgcagcggatgtggccattatgaaagaaattgtccgtcagacccctgaactgagacctgcagtggaacacatcattgcagggcaggtgcaggaagcgctgaatgtggccgatatggttagcccttccattgtcccgcgtgacaaggatgcgacggttccggagaggagcatcattgatctgaaagacagcgataaaatagcagtcgatgagatcgctacggatttcgctggccgaaccagtgaagcacgggataagaccctgatagttgcggaactgaaccgggaccgcatggcgatcaacgaaagtgtgcatgacctgctgcaggcgaaaggtgagctgggtgacagtgtcacggtaaatcatcttgtccgtgtcagtaattcgatggctgatttaaaccgcccgggattctggagtgaaaattataagaataccgttcgtatcggggagcaatatctcacgattggcctggttgatccgaaaagcaaccttgtagagcttaatcatcaggagacggggagcagccgctggatatctccgcttgaactgcgtgcgtcaaacgtagcagtgttcgagacaaaagaaatggaggtttctgtcggtgaacgtattcgatttacggccacagaccatgacagaaaggtgaagtcgaatgacttagctgttgttaccgaaattgataaggttggaaagatcacgctcgatgccggcggtcggaaagtcgtcctcgatccccgggagcagaaagaccaacatttcgattatggctatgctgtgaccacctatagctcccagggtgcatctgtaccctatattattgggctggttggcgttgacggtgccagagagcggatggcctccctggacagcacgtatgtacagttgtcccgttccgtcgaacatatacagctatatgcagatgacctcagtaagtgggttgagaaggtgaaggagcgttctggagagcgtgaaacggtccatgatgtgatgttgcgtggagaagatcttaaggccactaacgaacttaatatatggaaacgtagccaacctgtttctgcgacccggctggctgcaaaaatcgaagacggaatcgcagatgccgcacatttccggagtggaaagacgccggagctgctgtacgcggtactgaatgaacatgggcgccagaggggcaactggcatgtgccagtttcgccaacgactggcagactcgatgttgagaatgcgtactatgctggggcgagtgacggtgtaatggttgtcatgcagcagggagagagtgaagggaaaccgatttatacagataacctgccgcaggcgctgtccgagatggcggagcatcctgataaggctgtcattattctcagggatagcgacagaaatgaaacgaccgacgtcagcgcagctgaaacgattgatataaaactggaagacgaaattgaaaaagaaaaaattaaagaactgctaaaaatcgacacagaagaaccgcttaaaggtgatgagctaaaagataaaatagagtctgagagagacactaaagagctgaatgatgagaagcttatagagcaaatcaacagagaaattaatgaagaggaaaacaaagagcggcaagagaactatcatgttgagttaatgaatgacgagcttaatattgtccgccatgataaagagaaagattaccaacctgattaccaacccgaaatcatcagagaagtacaaaagacgattgaataa

SEQ ID NO: 231973 - DNA, 567 bp, Klebsiella pneumoniae
atgcatcatgaccttaaacaccgtattcaggcgatgcgggacaaactggaggggcgcgcccctgtcgctgaaattcaggggagctcgcagctttttgtcacccccgccccggaatgtcgccggctggttgagctggctgatgtccgggaaaccgatcgcattctggaacccagcgccggaacgggcgctatactgcaggcgatcagggatgcagtcccccgggcgaagtgtgacgccgtggagctgcacgccggattagtcagccacctgcaggcacgtttcccggaggtccggacctggtgcggggattttctcgaataccatccggatcgccggtatacccgaatcatcatgaatccgccgtttcatcgcggtgatgatatccggcatatccggcgggcattaactttgattgaacctggcgggattctgactggcatatgtctggacgggccgcgtcagcaaaaggcgctgcagtccctggcggacgtctgggagccgttgccgcggggaacattcacatataccgaggttgcgaccgccatcctcagaataaccgtcagatga

SEQ ID NO: 231974 - DNA, 900 bp, Klebsiella pneumoniae
atgacattcagaattgcagcaaacgtatttccaaccgcgtcagatttgccaactctcgggccgtcattttctgatttgcttgttgatggttctctgtccctgctcgataagcgcaatttccccgcagtgatagggcttattcccggcgctaacctggggaacctggcgacgtcatatgtgtcaaaacaaacaagcagccccgttaacgcctatttaaaaaatattctccccgataattttccgacggctacaacggactttaagcaatactttaaagcgtcactgaccgctcgtggcggactgcatatcctgccgacgatggggctaaattcttcaaaagcgatcggcctcgctattcgccttttaccagacgcggcaacgactgctattctgtcaactacaaaaaacatctatatcgacctctgggcgaggattacgcgattacccgttgtcaatacgggaggtccggcatcgtggaaaaaaattaatattcactcgcttgcaattgacggtgataccagtacctcaacgacgaaactggcttcattgaaattcgacctgacagacccggcattgccagcggcgcaggcgcctaccggggccgagcaactattatcggcaaaatatctgcacagcggcttcgagttgaatgaggcccggatgctggcatccgccatgagttgcaatccggctgacgcgaagcagtatcgcccgacgattccgttctcaattctggaggggaactacaacggctatgggatcattatttacggcagttatatggaggacctgacaacatcggggcgcactgctgatgaagtggcggccatacgcaagaaagattttgacgcagcctttgcaatgggcgggcggttctataacgattcctggacagtatag

SEQ ID NO: 231975 - DNA, 579 bp, Klebsiella pneumoniae
atgttaggactattttcaaagcactgggccactaacttcgacggcggggcgatcccctcttggttgaccaccagttcggaggttactagcgacgcagggacggccccatggggcggtctgactctgacgaggccggacacgacaggaagcaaacttgttttcgggaacgtgattgccagtagtaaagagactggcatcacgttggattgtgttgtcaatggattcactatcgggaaagggacatttgtcgctggctttttctctgatacggatggctggtttttacgcacaagtggcgatatttgcaacctggtgctgcgcaagggcggggttgaaaccacgaagaacgtatatcttcaatttacagggtggtcaaaagtgtacccactaaaactggagtgggacatcaagggtaagcgcctcagtgtattcaggggtgcgggtgcggcgtacctttctttagaccatctagatttgggaagcgctgtcgggactcgcccgacagtgggctgggtcagtagtcccgccggtgagcaaaatacagtggcttccctctcaatcacccgacattttatgtga

SEQ ID NO: 231976 - DNA, 1983 bp, Klebsiella pneumoniae
atgtctaatttacctgaacaggcctcgtgggaatcgggaattcatcagctcgaagaagccgatcgagctaaagccgggccgggtggagtattgaatatccaggctaatcaacttgcgaatcgtactcgctggctccgggcattagtagaatccgctcaggattaccgggaatatacgttttataaatcagaatcggaccctgatggaacaatcgcaggacttgcaaatactccggcgggaaaaatgtttcgtgttgctcagggtttgagtgatgagcttgcgtttatttattatctgaatgactcaggcatagctgtagccctcacagcacttcttgggcgcggggcgataattaacaatgtcagggaatatccaactcttacactcgctcaaaacgatacggttgcaggaaacatcctggacggtacgaaatgttgggtgactaacttaagtgattctgctctggcagatgagtacatcaacaacggtggtactctgtcagccacagggcgaaagatgccgtcgcaggaatatatagatgatgggtttacccccggcagggttgtcgagagtgataacggtgtcgcaatagcgctaacgttcgcggaaggttcgcgctcatggctggagtcagattatgacggcgcacccactgagcattctgcaaaattgattggccaggctattaaaataggtgattcaccggtatctgataataatgtcgcaatagcgctaacgttcgcggaaggttcgcgatcatggctggagtcagattatgacggcgcacccactgagcattctgcaaaattgattggccaggctattaaaataggtgattcaccggtatctgataataatgtcgcaatagcgctaacgttcgcggaaggttcgcgctcatggctggagtcagattatgacggcggcccaacggggtacgccgcagagaaaatcgcagaggcaatatccgggagtctcccggcggttgaaaataagaccataccgctatctaccgctcctgacggagcgggccgtgaatacccaacgttcaaacgtctgagcgctccgattattcaattctctcaacaatcagcgcctacggtttactggccgtggatagtagataaatccgtatggggcggcacaggcttcgcgctgttctacagtaccgaccacgcagcgacgcacgacccgtccggtatttttctgtttgaggcagatgacatcaccgggccatgggttaacaggggtaaagtatatcgtgacgatgccgggggctggcaaacagaaacgccgtcagtcatttatgaccccgttaacaataaagttctcatgtactatcagcaggccggcgttcccggagccatcgggcagcagcaaacctgcctcgctacagccgaccccaccgatttaaccgtgtggacgcgcgtaggcgttgttctagataaggaatttcttgagcaaccgggggacgggcactgtggttatttcagaccgtttttctacaatgggcggttgttcggctatagcctgtacggcgggacgaattactcaaacgcggcgctgtggacgtccgacgatggcggttatacgtggcggcgcgatgggcggttgatcggctggatgcaggataaatgtcgtcacctggcagcaacattaaacgcagatccgcaggacgtcctgctgacaatgtatgaaggggacgtcatcaactggcgcggcaagccgtggtgggttggtgtttcaggaaaagctcaatcaggtagtgtgcttatcaggcatttcagactcgttacagcgcccctggctgacgattttgcgtcgttaacgacccgggttaaagacataacacctaatcctgcaacgtatgaggtccaaaacgatattgattacccaggcaactgtgtggccgccggtggggatgtttatatggtctaccgtaccggcgggcagcagggcaacatttcgctgatgaggctgaactaa

SEQ ID NO: 231977 - DNA, 624 bp, Klebsiella pneumoniae
atgtctggcgatattaaagcagtatttgatagcaatttaattgcaactcaggcaggtaccgttcaggtatttcattttgatatgacttcccgtgagtttatcggtagcgaggatgtttatattcatgtcggtgttggccttcctgcattttcatgcatggaagaaccaccggtacaaagtgaatatcaggttgcagttcgttctgacgataattcgtcctggtctgttaccgatgattatcgcggcatcaccgtctatgacattcagacgctggccagccatgttattaccgagccagggcccatacccgatactttaacgacctctgcaccatcaaccccatacgacaaatgggacggttctgcctgggtcacagatgtagatgctcagcatgcggctgatgtttccgtcgctgatatgcagaaaaaagagctgattgctcaggtttcggcggatatttccattcttcaggatgccgttaatttaaacatggcgacggatgatgagaaatcccggcttactgctttacaggcttatcgggtgcagcttaaccgggtagatacatcgcttgctcctgatattatttggccggttatgacgaccccggagggtgataatgtctaa

SEQ ID NO: 231978 - DNA, 360 bp, Klebsiella pneumoniae
atgcgttttttactaagcctgctttttgatgtgatcgttgcagtttctctgacattgggtgttctgtggtgcgatgaaaggttgctgaatatcggttattttgccggctggtttttcggtgtagtcaacctgactggcctcgccagcgcaaatggccgggcaactattgcgcgtgaatataagccccgcactttgctctggcgcggttatgacgtgctgacggatacggcgtttattgtgtttgccatctggtctggctggtatgtcatgggggccgtctatgcgctgcaggctgcgataaaggcgcagatgtatgcagagctggaacgtaagttaacagcacaggctgtgccggagtaa

SEQ ID NO: 231979 - DNA, 453 bp, Klebsiella pneumoniae
atggccaataaaaataagctcatttttactgcatttgctgttattagcttttcagtttcagctggctttaagccggaggggaacgaaaaagaggcccttattgaagctgtaaaggatggctatcaggtacaaagaaatcttgcttacaattaccaaacaggccgaggaaatcccggtgataaagattttattccaaaggacgaaacaaaagcgtgtgcttggagaaaaatcttactcatagttaatcccagtaaaactgacgcatccgatacacaaaacgagcggttttcgtgccgcaatctggattttgaacaggatgaattggtctggaaaatcgtttataagtacatgccattgattgatgaagcaaaaaacaagggggagtatatggtggttaaagatgaacctcctgtatcgaaagacgacctacaaatcattgacgttgcaccataa

SEQ ID NO: 231980 - DNA, 540 bp, Klebsiella pneumoniae
atgaatactgcaaaccattttattaccaccgggtcaggtcagcacttttatttttgtaattctggtcctgatattgtgtatatcgaagatatcgccctggcgctttctaacttgtgtcgttttactggccatctcgacgagttctacagcgtcgcgcagcattctgtactggccagttacctggtgccgtctgagttcgcgcttgaagcactcctgcatgatgccagtgaggcttactgcaatgatattgctgcgccgctaaaagccctgctaccggattatcgtggcattgaaaaatgggttgaaggtttaatcagccagaagtttggcacgcctgaaactatcagcccggaggtcaaacaggccgatctcattatgctggctactgagcggcgggatttatttattgatgatgacactgaatgggccattcttcgggggattcagccgacgaatgaatttacgattaatcctcttctgccccgccaggcaagaaagctgtttatggagcgctggcatgagctcagttcgaaagtctga

SEQ ID NO: 231981 - DNA, 168 bp, Klebsiella pneumoniae
atgaaaatatctttagacagtgtttttgaacgtgtgatggcgtgtactcacctgcgtgcaataacctggttgataagcgttagtttttgcattgtcttctggggttattgcattttttacgggttaaaagcctgggaattgttattgacgatgtttaaggtggcttaa

SEQ ID NO: 231982 - DNA, 639 bp, Klebsiella pneumoniae
atggataagaaagaaacacaatttactgcaacgcctgttccggctgattattgggtcgatgctaagggtgcattaatcccggagaagctccttaaacccatcgacaaggctcgtgatgctttggttggtgagattgtaactaaagctattgaattgaataaactgatggcggatttcaaggcgatggcattttccgacattgcggcgtttgttgacctttcagctaatgaatatggcgtgacggttggtggtaaaaaggggaatgtcaccctctttacctttgacggtcgttacaaaattcagcgggcaatggctgacagaatgcagtttgacgaacgcatccaggcagcaaaagcgttaattgatgagtgtctcaatgagtggacagagaatgccagcaaggaaataaaggcgatcattaatcgtgcgttcgatgtcgataaagaagggaaaatcagtgtcagcgcagttctttccctacgccgttatgagtttgacgacgaacgctggaaaaaagcaatggtgattatcggagagtcgttgcaggttctaaacaccagttcatatatccgtatttatgagcgggttggtgataatggtcagtacaggccgattcctctggatatggcggcggtgtga

SEQ ID NO: 231983 - DNA, 441 bp, Klebsiella pneumoniae
atgatcactgccccacacagtcagcgcccggcaccggtggagggcattaagcgtgcggagaaatacgagcagcgctggtttgatcccagcatccgcctgaccgaagacctgaaggacaatgaggggcgggtgtttgcccgcaagggcgatgtggtgaacccgcttaaaaccgtaccgtttgtccagaccctgtacttcatcaatggagacgatgccgaccagctggcctggatgaagcgtcaggtgccggaaaccctgatgagcaaaattatcctggtgcgtggcagtatcccggacacctccgcagcgctggacagccggatctatttcgaccagaacggcgtactgagcaagcgatttggcctgacggcggtcccggcgcggatcacgccggcgccatccggtgaacgcctgaatattgagaccttccctgtaaaataa

SEQ ID NO: 231984 - DNA, 144 bp, Klebsiella pneumoniae; identical to SEQ ID NO: 208442

SEQ ID NO: 231985 - DNA, 3018 bp, Klebsiella pneumoniae; identical to SEQ ID NO: 224296

SEQ ID NO: 231986 - DNA, 663 bp, Klebsiella pneumoniae
atgggtaaaactgcggtttttggttctgataagggtggcgtcggtaaaacgactactgtgacgaacactgcatcgatgttagtcagtaagggacgtactgtaggcattctcaaatcggataagaacaatgatctgttcaactggaatgaaagacgaaaggagaatggacttacccctatcccgatccacgaagcttacggtgatatcagtaaagaaatcaaaaaactggcaccaaggtatgattatcttctggcagactgcgctggtcacgatagtcaggagtttcgtagtgcgcttacggtagctgatatactcattaccctcataaaaccctcatcgagttttgagagggatacactgaccgatctgactgaacgcgttcgtaaggtacaaacggttaaccccaaattacagccctgggttttgttcactcgtattgaaaccagtaaagccagcaaggtcaaagatgctatcgaactcgataaggtactccgttctgatcaagtctggatacaaccgctgaaaacacggctatcagcacttgatgtatttgagagcgcttgtaatgaaggggcaggggtacacgatctgcagcgaggcccaagtctgggtaaagcaaaaggtcaaatagaactttacgccatcgaggctggattaatatag

SEQ ID NO: 231987 - DNA, 288 bp, Klebsiella pneumoniae
atgtccattaaaattaaaactcctaaaatccccactaccactacggacaccccttccgcgcaagaaatggctcgcttcatagctgacggagataaaagaccaaccaaaagtggtaagagtgtatcaagaacgtatcggcttaaccctgtgttcattgacatcatggaaaccgatgcggccagaacagggcaaggaaataccgatattttaaaagcggctcttgctgcctggcagcatatggatgaaaacaccaaaaatcattggttactggaagccgcaaagttgtag

SEQ ID NO: 231988 - DNA, 531 bp, Klebsiella pneumoniae
atgcagctctttcatggcaccagacagcggtttgaaaaattcgacgtttcattcatggggacgggggaggccggtgagatacccgcttgctggtttactgacaattttaaaggtgcgaggcaccacgccctgcgtgtcaatcacaatcccggacaggcgcttgtttatcagtgtggtcttaaaccgggggcgattattgccgattacagcaaacccctgatagaacaacctgcagtttatgaccgtttgatcgcgggattacctgtgattattagtagcaacctcagtaccggcagggactggcacctactgaacagtccttattacggcaaccataaaggccgggtgtggtatcaaggaatcagaggcaagggcgacgcaaccattattaatcttttcagaaaatgcggcattcatggagttcatgactgggagcttcatactactgatgcgcattatcagggaccaacgattgtgatttttgatactgaggtactagaaattcaggacatcgttgaggttaattactga

SEQ ID NO: 231989 - DNA, 600 bp, Klebsiella pneumoniae
atgatccccccgccatttcaaataatccctgtcttaaacacttacattgaaggtgctatcgaacgacataatcagcctagaaaaatatcaatcagagagaaggtaacgctcgccgcagccatgagaccgagcagagcgagtgagcaggcgaggaagcgaagaggaccatacatgcagatagctcttacgcactgtaacagaataataatccatactcagttgagaacagatcgactttgcggacgagcaggactatgggaaacaggtcaacttggtggacgaccaggactatgggaaacaggtcaacttggtggacgaccaggactatgggaaacacgtaaacttggtggacggccaggactgtgggaaacacgtcaacttgggggacgaacaggactgtgggaaaaaggtcaacttggaggcggccggggttgtgggaaacaggtcaactttgctgacggccaggactgtgggaaacaggtcaacttggggggacggccaggactgtgggaaacaggtcaacttgggggacggccaggactgtgggaaacaggtcaacttgggggccgggcaggtctatgggaaacaggtcaactttga

SEQ ID NO: 231990 - DNA, 213 bp, Klebsiella pneumoniae
atgaattcccaatccgaaccgacaattattattaacggcactacacttactgatgcacaagtaatgactctccgctgcgcctgttctaatttcggctcagatctgcttgagaatggtcttggcaatgatgaaagcggtaaggcaatgagtgctggctatctggccagactacgcgaattagataaattactgcatttacactgtaagtcttag

SEQ ID NO: 231991 - DNA, 264 bp, Klebsiella pneumoniae
atgaatcagaaagtagtgaatttttcactcagctatgagcagctgacccggatagcggaggcgcgtatccgggaatgcgagctggccagccagggcgctaaatacctcagcgaatcgggtaaggccagcgccattctgggattctggtatgaactggccattaccggtacaccagtgaaaaattacgaacaaaccaaagcgctcattgacgccgatcagcagcgcctcagacaactcatctggccggagacggacaagcaatga

SEQ ID NO: 231992 - DNA, 324 bp, Klebsiella pneumoniae
atgaatgggtatatcgtcacaattattattgcattcatttttggtcccattctggcgttaccgatattgatcgtcggtttgtttaatataatggatttgatgctgttttcatttcccatcgtattcttttgcattcagggttataaaaagcaaagaaaaattaaagatgcttttaagggggtaattcctggcctgattgtatctctgatgctgatggctgtagttcaatttgttaagaatgaaaacgactgttcgaataaatatgaatctggcgatctgccagctgcagtgtgtgagacacttaagggaccaggattcagataa

SEQ ID NO: 231993 - DNA, 675 bp, Klebsiella pneumoniae
atgtgcggacgtttttcgcagtcaatgacgcgggaagagtatctttctctcctcgccaatgaagccgatcgaaatattgcctacgacccggaacccatcggtcgctataacgtcgccccgggtaccagggtgttacttctgagcgaacgcgacgaacagctgcagctcgatccggttcactggggttacgcgccagggtggtgggataaaccgccattgattaatgcccgggttgagacagcagccagcagcaggatgtttaaacctctttggcagcacggtcgggcgatctgctttgctgatggctggtttgaatggaagcgtgaaggagacaagaagcagccctatttcatccaccgtaaagacggccagccaatcctcatggccgcgatcggaagcactccgtttgagcgtggtgatgaggcggaagggtttctgattgtcacagccgcggctgataaaggtctcgttgatatccatgaccggcgcccgcttgtcctggtaccggacgccgcccgggagtggatgaaacaggacgtttcgggtaaggaagctgaagaaattgctgctgatggagctgtgtccgctgatcatttcatatggcatcctgtcacgcgcgctgttggtaatgtgaagaatcagggaccagagctcatcgagcctgttggctgttga

SEQ ID NO: 231994 - DNA, 903 bp, Klebsiella pneumoniae
atgttaaaacaaagatataagttaattgagtacaggttcagagccttacggactcttttcgtttccgatgagagttatcgacgcacgaagttcaggaaattatttaatcgggagctggatttatctctacctttaacactgaacgagaagataaactatcgcatggtttttaatcgcgatcttttcttgagtgttattgctgataaaattgctgttcgagactatgttgaaatgatggtaggtaatgaacatctggttccgttgcttgccgtttttgagagaataaaaatccgcgactttgaagctcttccagtttcttttgtcattaagtgcaatcatgatagtggaagttccatcatctgtcatgataagagtgaactcaataaaaggagggtagtgagtcacttcaatcgacggttgcgtatgaacccttattatacaaaccgcgagtggcaatataaaaatatacaacctaaaatattagttgagcgaaaacttaatgtttttgatggcaaagaccaggatgtaacaccagaaatgttccgggtacattgttttcacaaaaaagccatgtacatcgaagcagattttacctgcgtgaacggcagagaatatgttaatatttatgacactaattggatgctacagccgtttacgcttggatatggtaacaccccttacaacattgatcgtccttcctctctagacgacattcttgatattgcagcgaaactggctactgatcttgattactgcagggttgatcttatggttgaaaacgaaagggtctacttcagtgaaattacgctgactcctgaaagtggtcaactgaagttcagtcatgcagaatgggatttacgtcttggccgcttatggaatatgcctataatgaggatcgattag

SEQ ID NO: 231995 - DNA, 777 bp, Klebsiella pneumoniae; identical to SEQ ID NO: 109498

SEQ ID NO: 231996 - DNA, 687 bp, Klebsiella pneumoniae
gtgaaacgtgtcttaatcattgaagacgatctggatgctgcgaatgtacttgaggcatatcttaaaagagatcagttcaatacctcgttagccagtgacgggcaacacggtctggatctgttcttcagctggaagcccaatatcattcttcttgatgttatgttgccatccatgagtggtactgatgtcctgctagcggtacgacggcgtagtgatatcccggtgataatgatcaccgccatcagcgacggggcagataaaatcagtgcgcttcgttacggtgcagatgactatgtggttaaaccttacaatcccgcagaagtcgttgcacgcgttcatgctgtcctgcgtcgttatgccgggcaacgtagcggggatatcctccagttcagaaatataaaagccgatatggactccatgatagtcgtcgtggaaaaagaaggcataccccctcaggcactagagctgaccccaacagaactgtcacttctgatgacattcttgaagtcgccatctaaagcctttacgcgtcaggcgctactggaagcctgccttccggaaagcgatgctcttgagagggtggttgatacgcatatctataatttgcgtaaaaagctggaagctgcgggtcaacctgatcttctgattaatgtcaggggcattggttacaggtttgctaactcatga

SEQ ID NO: 231997 - DNA, 1188 bp, Klebsiella pneumoniae
atgaacagaaaattgcgatttcagaaaagtgaaaacagctctctgtggaactggatatgccgtaaggttatttcgctggcagtaggcagcataatcctgatttctttctgcatgtggctgcgcttttacattgataacaagtggcacgagtacaggatacctgttgaggtcagggccgagctcgctgagttaattaaaaacccctggctaaatattaaccgctatcacgcgatcattgatcgatggtatggcgtggactactggaagccagaaataaggattactgactggctaattctggctgtactcatcctaatcgtaatgcccatcattttcacactgacgctgagagcagcacgccctctatcaaagcagataagtgcccttgctaatgcagctaaatctgttgctcagggtagcttcggcgtaaaagtaaaaatcccggataatcttcctctggaattacgtagtctcagcgaaaattttaatgggatgtcgatgcagcttgagcgttatgaaaaggatctaaaaaaatcacatgttgccatggcccatgaacttcgttctccgttgaccgcagccacaggaagactccagggcatgattgatggtgtatttgagcccagcgaaacccagctgaaaatggtcatgcagcaacttaacgaactgaatcggctggttgaagacctgcatttgctgaagcttgctgatgccggtcagttaaatctgagcatgatatccgccggtcttaatgagattgtcagggaaaaaattgcatggattacaccttctgcagagaaagcgggcgtatccatcagacacaaccagaatatgatgctgagcggagtagcagacccctatcgtttaggacaggttttcctgatactgatggataatgcattacgctatgcagctgatggtggcgtgcttgatatcagttacgacgccactccagataccgtttcggttattttcagggacaaagggcctgccgttccgaatgaattgcttgaagatatcttcacaccatttgttcgtgaagaggtttcacgctccaggcattccgggggctctggcttgggactttctattgcccgggcgatatgtgaagcacatggagggcaactggaggtagagaaaaataaaaagggtggacttgccttcagggtatcgttgcgaaaatcttaa

SEQ ID NO: 231998 - DNA, 450 bp, Klebsiella pneumoniae
atgggcatggggggggaatgttaccgcctgtcagacatgtcacccaaagatatagccagtctgtatgtccgtctgttcaagttgcggtttggtgattctgtccgctgctatgaggaagagaagattgaagagctgatatccgctgtaccgcatctgattttcggtaacgtattgttttatgccgatacgccttgcgctattgatctggtactcagtgcgaacagtgacaatatggtgtattttgacgtgccaaatggcggtgttgaccctaaatattcagcattcagcccgggcagcatgctgatgtgggccaatatttcagatgcgcgcgacttgtgcactacgcaggataaagaaatggtattttcaatagggctttatgagaaagactgggaatataaattacggtgggccgatacagcgaagacagggaaagttatctgcttttaa

SEQ ID NO: 231999 - DNA, 1419 bp, Klebsiella pneumoniae
atggtgtttccggtatcaatagaacttcgtgtgtcagccattacggtgatggcctctttactactttcaggctgcacaatggcaccggcatatcagagaccggaagcccccgtgccattagcctggtcacataaagacacttctgttgaaggtatgtatacaacggcagcaaacgggccttttttcacagacagcaagctgcagcaactgataaaactgaccatcgacaataacaaggacctcgaactttctgcactgaacctgaaaaaatcaggtgttcagtatggggtagaaagactatcctggttgccagcagtcagcctgaccgcagaaaaaaccgcagctcatgagcctgcagggagctttgataccgttgataccggttcggtaacgtatcatcaatacaacgttaaactggtctcagcttcctgggaagtggacttctgggggcgtttgcgaagcctcaaggaagcatccctcaatgaatatcttgctgcgggagcttcatcaagagccctgaagatcagcctcattgagcaggtggtcagtgcctatctgatctatttcaccgaccaggaaaacattagtattgcccgtcagaaactggacaatctccagcagctccggcacatgcaacagcaagcccataatgccggagacatgactaaaaatgcgcttatggacgctgatagtgcggtaaacgacgcacagtcagaattgaaccagacagagttgcaggtacaacaggatttaaactcgcttcagttgcttgtcggcaccccgctacctgactctctgctgaatgtgtcacctgagcatgactgggcttttccgttaattaaagcaggaacgccatcagaggttctgctcaaacgtcccgatattattgctgctgagtaccagttgaaagctgccaatgccagtataggcgcggcaagagcggcatttttcccgtctatttctatcaccgctgaaggcggatcatccacggctgatatgggtaaattgcttgcgggtggcgctgctaactggagctttattcctacactcaatcttcccattttcgatgggggtaagaaccaggccaacctcagtctggccgagctgaataagaaaattgagatcgtcaattatcagaaagcaatacaacaggcgttcagggatgcatctgatgctcttgccggacaggcattcctgaaaaagcaaaccatccagacatccggtatctttgatactgtcaaagaacaataccgaatggctgaagcaacgcggaacgccggacagataagcaacgcaactctactggaaaaaaacaatgagctgcttgctgttcgtaagcaaaaagctaatgcccgtctcaaataccttattcagggggtgaaagtatttaccatcctgggtggggatgattcgatttaa

SEQ ID NO: 232000 - DNA, 435 bp, Klebsiella pneumoniae
atgcgcaagtctggcgcttacgaaatgtctacgccgggagaacggctggccgaccagctggccgcgaaagaaaatccgatcctggctgggcagataaaatcgctcaatgctcagaagaacgcggaagatatggccgcataccgtacccgcgtacagtcccgcaaacaggagaaagctgatatgaagctggaaactatcgaagaactcaaacagcgtggtgatgcccggagagataaagccgacaaagccgaacgtgcagagctggaaaaagcgtctcatcaggcttcactgcagaatgaaacgatcggcgaagagacaaaagaactggagtccggagagaaagagaaactcagcaagcgtgatcaggttctggagaagtttaaagcaaaattcgagagggataagcagaatgaacgtggtggccgtgggcgttag

SEQ ID NO: 232001 - DNA, 420 bp, Klebsiella pneumoniae
atgagtgaagaacagcgcaggcgtggcttcatgaaggctgaggcaagcctgagactggaaggtatagatcccagcggaatcccccgctacgagtcgattaaagcgagagttatttcgggtgagataacctatgagcagggacgagctgaaattctggctttccataccgggaagtgtgcggagccgacaactgcgggggaaatgctcgcagaggaatttttaaaacctctgaacatgtctcagggggaactggcgcaggctacaggaattcctgagcatcatatcgatgatattatcagtaaccgccgccgcctcagtgctcaggagtcttacaagctggctgaacagttccagaccgataaagatttctggctcaacctgcaggctttgcatgacgcatggctgacgcaccagagatag

SEQ ID NO: 232002 - DNA, 519 bp, Klebsiella pneumoniae
atgtcagtcagggcacaaagagcagggaaacgtaaccagtctgaaagaagaatcgaactgataaatacattatgggaaggggaggaaattgaaacatgggatcgtaatgaccgacctcgaaacgatggcttcataacagtacctcgttatcttccattactaggtgttcttatggatgagttatcaaagggaagcccactttcaagtacctacctagcgctgtggttcaggggttcagacgaaggcctgatagagataagggataagactgtgctggctttagaatcaggctttgccagtgcaaggggggtaacaacatggacggggagaatgcggaaattaaaagagctgggatttatatcatgccgggaaggtagctccggtgagttccacaacgtgttgattgttcatccgctggttgcggtaaagaaactactggatgaagggaaaataacgaaagggaaaacctataacacttttgctgaacgggtaatcgaggtgaagtcctcatgggagtaa

SEQ ID NO: 232003 - DNA, 495 bp, Klebsiella pneumoniae
atggcaggtacggtatggaatgatgttaatacagggcgtgaagttttctcgatgacacacctgcaccctcagctgcataaggttgaggtttctggggtgcaggctgagcttgagattagcttcgggtttcatgtatttactgaccaaaagcaagtcggaaaggtaatgaatttcagaggtgaaactcggcatttctgccaggaaagatacgaaggaagtaagactatcgtacagcggatactgtcagcgatagaaaacggagagtacataacggcctttatttccaaggggcaagggcagcgatattaccaccttaaccatcatgatgacttcattctaatggagataagaaagcctgaaggtaaagataattttcttcgcatacatgttgttacagcatatacgcttgatgaatgggggacggtcaacaaaggacggaatttgaggttcaggtatgttttggagcagaggttacaggggaagaaaatagtataa

SEQ ID NO: 232004 - DNA, 2484 bp, Klebsiella pneumoniae
gtgaaaaaaaatatacaggccgggattttcttcgtcacaatgctatttccagtatggcatgcagcggccgaaacattcacccgctgccatccaaatgagactgtctgggcaatgatccaggatgagcagctaaaaaacatcgccagactacaggaaacaaagcggtgtcaggccgttaatgacacttatgaccagtggcgccaaaatttccaggcgatgggagatgcagaaaacgccatccgcagcgcccgcgataatcagaactggaacgccgtaaaatccacgttcgataacattgctccccagattaatagcctgcatgcactggcagaaaaaaattcatcgttactgggcgcgggtaacatcctggcgcttttcggcggcgatctgaattacctgtaccagaatgcagggctcgttgccccggccagcgctgatggactgacagataacgtcagtcaaatgctgactgaaccggataaacaggtcaaagctgcaggtatcgcgcaacagctggtttatcagactcgggttagggcacagagttttatccaaggcgtggcacagaacgccggtaacgaagcccagaaagagtatcgtgagcaaacaaataagattgtcgaggataaagcccataattttaaaggtgacagcgtggaaggatatttcggcggctttcttgcccggataagccaggtatatgctccagttctgctgttccttatcatcgttggtattattggtgcacttaccgcacggcgggtaaggctggatgctttcacggcatcagtgaaagcagttatggccgcagtggtacctgcagtagcactggcgctgatgctgatattcatgcctttcctaccatcatgggtattgtacacggcagcgctggccggaacattcgccatttattcccgcagtaaacaaattcttggagggctggcctctcgctgtgggcgtttccccgcactggcctccgggcttcgctggatgggcggttttgtgtctggcatcgatgctgacagaaagcaggaaacgggcgcggcatccgtcaacccagcatcacatcacactcacggctcatcacgctggggaaccgctgcagaaatgcgggaaaataaccacctgttaccaacggaaaagcaagccggattcaccctggcacgagaactgtccccaccgcccggagtggatggaaaattctgtttcaccgggcacgttgtgactgttgcccctacgggcagcggaaaagggattggcgcagtaattcccaatcttctgacttatcaaggttcagcgcttgtttttgatccaaaaggggaaaacgccgaggtgacaggtcgccgccgtcgtgaaatgggtcagagcgtccacgtaattgacccattcggtataaccagcggcataaaagaatcagtgaacattctggatcgtctcgatgtgaccagcccagattgcgtcgctgaatctgcagttctggccgaaagccttgtggtatcagagaaaggtggtgacagtaatcattttgatgaatcagcccggaccctgttacagggcctgatgctgcatgtttccggattaccggatgagtcccgacgtaatctcgcggaactacgtcgactgatcaccagtgatgaagaaaacctgttagccctgctggccgatatggccgcaagtgaagacgttgctttcggtatccccgcccgagcggccaacacgctcatggggatggcagaccgggaacgaggctcagtattgtctaccgcccgtaaaaacacagcatttctggacgacccgcgtatagcagctgcgctgtcacactcagacttcaacctgtcagccatcaaagctgaaccgatgacagtttatctcgtgctaccagctaatcgcattgcagcaaatacccgatttataaggctgtttatcggttctgtgatctccgctgtaacagaatcgaaggcgaagccagctcataatgtcgcattcatcctcgatgagttcaacgtgctggggtatatgaaatcaatcgaggatgccgtaagcctgttacgcggctacgggctgtctttctgggtattcctgcaggatctgtcacagctgaaaagtgcttaccctaaatggcagacgtttctggccaactcagcgaagacgttctacggcacagacgactatgacactgcaaaatacgtcagcgataccctgggtaaatcgacggttgaatttgaaacccagaattcaggccgcaactctggcagcggtgtttccgggggtggcggctccatgaatcggggtcgttcgtctggatcaagtcagcagtttgctgggagggaattactgacacctgacgaagtcatgaggcttggaccaacccgaccaattgtgattctgaaaggggaatacccttatcagctcacccgtattaactatctgacagacccagaatacgcgggtatggcagatcctaacccctactacagcgcatga

SEQ ID NO: 232005 - DNA, 303 bp, Klebsiella pneumoniae
atggcaaaatcaagagcggaaaagttggaagagttgcgtcagaaagaagctcagataaaggcgcaaattcagcaattaaagcaaagagagcagacagaagaacgcaagaaggatacccgacgaaaaatcctaatcggtggtgccgtactcgcaaaaataaagcgtggggaatggaattatcatcagctggtgagtcttctggacaatgagctgaaaaatgacagagaccgggcactgtttgatgaaatgggtttaaaggcggttgacgccagaaaagaatcttttaaccccggtaataagtga

SEQ ID NO: 232006 - DNA, 321 bp, Klebsiella pneumoniae
atgcagttgaacagaaagaaaaccgtcgtaattcaactgttgccagagaatttgaactcgcatttcctgccgagcttgacggaaaacagcgtctcgatctgcttcgtgagttttgttcttcactggttgagcgtcacggaatggcagtggatgccgctatccatgctccgggtaaagagggtgaccagcgtaattatcatgctcatgttttatgcagtacccgccgactgtcggaggaaggtttcaaggataagacccgtgaacttgatgattttaagagcggcgaagtcaactactggcgttctgcatggtcagaaatga

SEQ ID NO: 232007 - DNA, 279 bp, Klebsiella pneumoniae
atgacaacaacagcagagcaggacatggaagcattgctccagtccctgcacgagacacagggcgagataggagaggagtccgcaccgctcagtccaacactggccgcgctggagccgtcccgccgcccagcgcaaggggtcgcctgcgcaacctgtccgaactcgatatggttcgcttcggagaacgaagtgagatgttattgccgggcaatgtatctcgtgacgtggagcaccagagaaccgacagaaatcagcctctgcgacgggaaaacactgtaa

SEQ ID NO: 232008 - DNA, 1014 bp, Klebsiella pneumoniae; identical to SEQ ID NO: 29928

SEQ ID NO: 232009 - DNA, 426 bp, Klebsiella pneumoniae
atgaaactcattcctgcagcatccgaagcaacagtactgaaaattcctttatttacagaaagctgtgcggccggatttccgtcgccagctgcggactacacagagtctgaactggatctgaacgagtactgcatcagccggcgccacgctacctattttgtcagagctatcggcaactcaatgacggatattggcctctattccggcgatctaatggtcgtggataaagcagaacagccgcggcacggggatattgttatcgcggaaattgagggtgaattcaccgtcaaacgtctgcttctgacgccgcggccagccctgcaggcgatgaacccggacttcccttccctgtacccggatccggaaacgctgcaaattttcggcgtggtgacggccttcattcataaaacccggagggcaggctga

SEQ ID NO: 232010 - DNA, 225 bp, Klebsiella pneumoniae; identical to SEQ ID NO: 201723

SEQ ID NO: 232011 - DNA, 1404 bp, Klebsiella pneumoniae; identical to SEQ ID NO: 32307

SEQ ID NO: 232012 - DNA, 633 bp, Klebsiella pneumoniae; identical to SEQ ID NO: 32308

SEQ ID NO: 232013 - DNA, 993 bp, Klebsiella pneumoniae
atggtgcgcgctcatctccccgccgtagatggcgtcttcctggcgcatccgctccttgatgaacgcatgccccgtcttcgacatcaccggctggccgccgctgcgggtcacgatgtccaccgtgttccacgtcagacgcgggtcgtgaatgattttcgcccccggcagcttctgcaggaacgcttccgccagcaggccgacaatgtagtacccctcgataaacgacgcctcgtcatcgaacaggaagcagcggtcgaagtcgccgtcaaaggcgatacccatgtccgcctgatgtgcacgcaccgcgtcggcggtgtcctggcggcactccggaagcagcgggttcgggataccgttcgggaaatggccgtccggctggtgatgcaccttgataaagctcaccggcgccccggccgccgcgaagcgtttctccacctcatcaatcacgtgccccgccgccccgttgccggagttcaccaccagtttcagcggacgggtgaagttcgccaggtccacgtagcccatcaggtggtcgacgtactctttcagcaccgaaatctggcgcagggtcccgcgacgcgccgggtccaccggcgggaactggttttcctccgccaggcgctggatatcccgcaggccggtgtcgccgctgatgggcttcgcgttctcgcgcaccagcttcatgccgttgtagttcatcgggttatggctcgccgtcacctcgatgccgccgtccaccccgaggtggaaagtggcgaagtaaatctcttcggtgccgctcaggccgatatccagcacatcggtgccggcgtccatcagcccgcgggccagcgccagcttcagcgactcgctggtgaggcgcacatcgccccccaccactatcttcccgggtttcagaaattcgccgtaggcgcggccgatacggtaggcgatgtcctcgttcagctcctcgcccagttcaccacggatgtcataagccttaaagcatgttaa

SEQ ID NO: 232014 - DNA, 477 bp, Klebsiella pneumoniae; identical to SEQ ID NO: 8353

SEQ ID NO: 232015 - DNA, 204 bp, Klebsiella pneumoniae
atgacgaaacaggaatggattttacgactacggcgctgtacatcgaaggaaacgctggaaagggttatagaaaaaaataaatattctctgtcagatgatgagcttgagcatttcaatgccgcggttgatcaccggctggcggagatgactatgggaaagttgtatgaccgggtaccgtcaggtgtctggaaatttgtgaaatag

SEQ ID NO: 232016 - DNA, 231 bp, Klebsiella pneumoniae
atgagttacggctggctcttcgaaaatccggatgatgacatttcggatgataatcatatcagtctggaacacctccctccggagctaaaacaggttgctatccagatagtacagaatcagattgatcgtgatagtgcggagaaaaaactggcagaattaatccagcaactcgagtttgatatcaccgctgccgaactgtcagcgtatctttttaaaccgggccatgcctga

SEQ ID NO: 232017 - DNA, 471 bp, Klebsiella pneumoniae
atgacgggaacaggaattaacacggtacgtatcggcggtgaagtgaagcatatcaccgggctcgatgcgctaacactcatgcatgaatggtcccggctgataaaagagaatgctcacctgtatgactataaccgtcaggttaaccggggctggcgcggctttgtcctgcgcctgatgggtatccatttgcctgataacgaccgtgttcgtcttattatgatgggaacaggtattaacacagtacgtatcggcggtgaagtgaagcatatcaccgagctcgatgcgcaaacactcatgcatgaatggtccaggctgaaaaacgagaatgctgacctgtatgactataaccgtcaggttaaccggggctggcgcggctttatcctgcgcctgatgggtatccatttgcctgataacgaccgtgttcgtcttcagggcattaatgccagaaaagactccatctatccagaataa

SEQ ID NO: 232018 - DNA, 228 bp, Klebsiella pneumoniae; identical to SEQ ID NO: 135571

SEQ ID NO: 232019 - DNA, 441 bp, Klebsiella pneumoniae
atgattaatgccgtcgagtaccttcatcagcgcatcgctgtgcggccgtggctgcacgtcatcgaacagattcagctgcgcgacgccgttcggactgaaatcattgagcattatccccgcttttgcgtagcggtggccatcgagccagatcctgtccagagacctgaccgctgccgcgataatgtcccgggtgtcacgggtaggggtgttcagtttttccgtggccacgttaccgtaatacggctcattaaccgcaaaaggggatgtcttgatgaaggtgctgatatgccggcagtactgtcgctcaccgcgcaacttttccgccgcgcgctcggcatactggcagacggcctggcgcatttcttcgtaggtggtgatccgctgcccgaagctacgactgcagacaatctgctgtttcggcggcggcgcttcctccagtga

SEQ ID NO: 232020 - DNA, 213 bp, Klebsiella pneumoniae
atgaaagtatacggcaatcaacactcatcagaggctttcttccgggaaacttcaccatcctgttttgaaccaaaagcggaaaaaataatcgcttttcacgggaaggacgccagctatgcctacaacgtgctggccgatctgaaagcagcaggtgcttcatatacccgccggaatatcatcgccgatatgttccgccgtcttggtgtggaatga

SEQ ID NO: 232021 - DNA, 1062 bp, Klebsiella pneumoniae
atgcagacaacatcatcgcagccgcgggcgatctactacgtcgtggcgctgcaaatctgggagtattttagcttttacggcacgcgcgccctgctgatcctctatctcaccaatcagctcaaatatgacgataaccatgcctacgccctgttcagcgcctactgttcgctggtctatgtgacgccgatcctcggcggctatctggccgataagctgttaggcaaccggatggcggtcatgctcggcgcgctgctgatggccattggccatctggtgctcggggccagcgaaaccgctccgcttttcctgtacctgtcgctggcgatcatcgtctgcggctacgggttgtttaaatccaacgtcagctgtctgctgggcgagctgtacgaacccgccgatccgcgtcgcgatggcggcttttcgctgatgtatgccgccggcaatatcggctcgattatcgcgccgatcgcctgcggctacgtacaggaggagtatagctgggcgatgggctttgccctggcggccatcggcatggtcgcggggctggtgattttcctctgcggcaaccgtcatttccagcataccgccggcgtcaaccgccaggcgctgtgcgcgcgccgcttcctgttgccgaactggggctggctgctggtgttgctggttaccgccccgctgctgattgcggtactgttctggcaggagtggtcggtgtatgccctgatggtcgccacggccattggcctcgcggtactggcgcggatctacctgcgcgccgaaaccgataaacagcgcaaggatctgcgcctgatcgtcgtcctgaccgccttcagcctgctgttctgggccttcgcccaacagggcgggagctccatcagcctgtatattgaccgcttcgttaaccgccatatcatgagctacgaagtccctaccgctatgttccagtcaatcaacgccttcgcggtgatgctctgcgggatggtgctggcgtggctggtgaaagagagcgtgaacggcaatcgcaccgtgcgcatctgggggaaatttgccctcgtctgggcctga

SEQ ID NO: 232022 - DNA, 1938 bp, Klebsiella pneumoniae
atgcatgatatccaagccaagttatcgtcaaatttaataggtaggctactgggtaaagactgcatttgtgtccagaatgacttcctgatcgcattaaagaatgatatttcgatcgcatcagattcatttcgtgaatgcaaaggttttgcaactttgcaaaatggtatctttggtcaggtcttggtcctcagtattggcaataagtccgtaaaatatcgatttctccaaaagagcggctcagcagaatttctgaaagtcctcaatgcatccattgccgaattcatcaacgactatctttctaaaaccttcaatgaattcgaagcctatgtgattcgtgagtacccaagagacacccgcatgggcagcatttcactgctttgcaagagtttgagtgagtattaccacgcacaagctgatgtatgggatatgtgtctaaaatcagagtccatacaaaaagttaagcaaattgtcggctaccacccagtacaggcggaagttctacgtgaatatcacgagaatttccagcttgaaaaacggatgtcattcttcgatcgggttgaatcaaacccattgactcacgaacaacgtttgggtgtcttgcggtctaatgatatgaacatggttttggcagcagcaggcacgggtaaaacatccgttatggttgctaaggctcttgatcttattgaccgtggcttggcaaacccttcagaaatactagtgctggcctataaccgtacggcagccgaagagctcagagaacgccttgttgacaaagcagaatcaggtcgtatcaagttagaatcattcccacaaatatcgacatttcatgcattaggcaggtggcttctacgtaataccggagtaccaacctacttgagtgaatttactcaagacgaaatgaaattcaagcagtgggttacttcgtggttagaaaaacacctcgaatcaaatagtactaacttactgaacttcataagccttttccctcaacctgtaaacccttttggcttcaatactcaagctgaatatgaaaggtatgttcgagataatgagttcagaaccttaaacggtgagaaagttaaaagttatcaggagcttctgatagctaattttttgtacatgaatggggttgcttatacctacgaagctccttatgtgagtaaaagacgtatcaatattggcttcgactatcgccctgatttttatattcaagacacaaatatttacattgagcacttcggtatagatcgtcaggggaagactcgggcagacattgatgcagcgaaatacaatgaagctattcgtaacaagcgtgtacttcatgctgaatgtgggacatcccttattgaaacgttccattatgaatggattgaagagaatctgacttccagcctgaaaattaaactggagaagcaaggtatcatatgtaagcccataaaatcagaagatgtgttgaaaaaacttcgcgaggaagggcgtatagccgactggagtgacctattgaaaaaggcacttcaagcaattcgagttgagcggttgacggaagagttaatagtgaacaggcttgagagggctggtataagccaacctaaaaatgccgcaacattattggatgcattacatcaagggtacattcaagaactcaaaaatcaaaatgccattgattttgacgacatgattattcgagccattcaggtaattgaaaatgaggactacatccctaagtggcggtacatcctggtcgatgaattccaggatatatcagcggcacgtatggagttcattaaagccattatagcgaaagggcctgaaccatccctgacagtagtaggggatgactggcagtcaatatatcgcttctctggtggtaagttggagctgacaactagatttggtgaaatgatcggtcactacaccgctaccaaatggctttgttga

SEQ ID NO: 232023 - DNA, 1071 bp, Klebsiella pneumoniae
atgtctctcatgctctcccgacacgggatttggtactaccgaaaagttaatctcatgccatgcggtaaacgccgcgagtatcgtcgttcgttaggtacacgttcaaaaacggaagctctaaagcgtgttgaacgttttgcagatcgtcaatggacggtggttgatactcccgtagtagcctcaccattacaagtttttgcaccagcttctcttggctttgatgaattaaaatatcaatctgaacagtacgttactttcaaaagtaaagaagttggggaaagagaaacagcatcaatacgacgctgcttgaacagttacttcaagtttaccaaccaacctgcaagcaaaagccaggcagcagcgtttattgctgggcttgatctatcaattccgacaaagaataagtacgttaagaaaattggtagctttttccggtggttaagtaatcgagtggatttcgaggtaaagaacccatttgatggtttaatgcagaaggataaggagtctgctgccagcaaacgcggaagttacagtgttagccagctaaagcgactaatttcttccctggagtcattgcctgagtggaaacgatggatcattctgttaggtcgttttactgggatgagagctaatgaaatttgtcagctatatcattgtgacataaagaaaatcgatgaaatctggtgtgcagtggttgatgatagtcaagaagggcaaacagtcaaaacagataacagtaaacgaagtattcccttgcaccaggagctgatttctaacggttttcttgagtatgtagagaatgcaaaaggtcgtttgttcccgcaactgacatattataaaggttcattcagccattacttcactcgctggttcagcagtttccggaagaggatttctgtgcctgaatttcactcactcaggcattacgttgcaacagcgttcaaaacggctggcgtcgcagaacaatttgcgggagcatttctagggcatgcaaacagttcaattacgtataatcgctatggtaaatctattggattgtcagagctttatgcgttattggtgcatctttag

SEQ ID NO: 232024 - DNA, 279 bp, Klebsiella pneumoniae
atgagcggtaagcgttatcccgaagagtttaaaattgaagcggtaaaacaggttgttgatcgcggccattctgtttccagcgtggcaacacgtctcggtatcaccacccacagtctttatgcctggataaaggcatatggcccggattcctcaaccaataaagtccagtcagacgctcaggctgagatccgacgcctccagaaagagctgaagcgggttaccgacgaacgggacatattaaaaaaagccgcggcgtacttcgcaaagctgtccgactga

SEQ ID NO: 232025 - DNA, 1869 bp, Klebsiella pneumoniae
atgaaagaaccaaataaaatagatggaaatcgccgcgatctcctcaaaggtctggggattgccgctgtcgtgagcctgttaccagagacgggaaacgccgcacaaaataatgccgccccgaaagcggcatgggatattcctttcaccggcgaaatccctgacacactgcccgaaggctacaatattttactcataacctgcgatcaggaacgttatttcgagcggtatccctttccggtgccgggccgggaacgcctgatgaaaacgggtatcacttttaccaatcatcagaacacggccaacgtttgtacgccatcgcgctctgtcatgtacaccgggctccatatgccgcacacccggatgtttgataatcttggcttcccctggatgaattacgatctggacccggaattacgtaccgtgggccatatgatgcgtgaactgggttattacacggcgtataaaggtaaatggcatcttacccgggagatcgatcagccggtcgctggtaaatcggtagaagaaatggacctgggcgagatcccgacgccgcgactgcatgaaattatggaaaagtatggtttctctgattatcacggcattggcgatgtcatcgggaaaagtaagggaggctatttctttgattcagtcaccacggggcagaccattagttggctacgtaacaccggccgcccgctgaatgatgaaaataagccctggttcgcggcagtaaacctggttaacccccacgatgtcatgtttatcgacaccgatgagcatggtgagcaggtgcagtggaaagggccaatggataaagaaaaccacaccctgctgccaacccaacccccgcacaaccaaatctatcagcaaagctggccagactatccgctgcctgcaaaccgccatcagtcgctcgatgagcctggcagacctgccgcccataaagagtaccagaatgccagggcggtgatggagggacagttccccgatgaagaccggcgctggcgcaaattactggattattatttcaactgtattcgcgacaatgaccagcatcttgaggcgattctcaatgagctggataacctgcagctgacgcaaaatacgattatcgtctttaccgccgaccatggggaactcggtggctcccaccagatgcatggtaaaggttcctcggtgtacaaagagcagatccatgtgccgatgatcattcgccatccggcgtatccgggaaatatccgctgcaacagtttgactaatcatctggatttagtaccgaccctgattggtctgactggacgcgatcgctcgctgcgagagaaagtcctggagggcagaaaaggccgggatatgagcccattactggcgcatcctgagcaagcgggcttaaatgcgctgcgtccgggttcgctttattgttacggcatgatcctgtatatggatgcgcaatacacggcaaaattcagaaagctggctggagaaaaactcccgcacgatcaatttaaaaaagcgatcgcgtcactccatcctgatttttcccatcgctcagggatccgtatgatcaacgatggacactataaatttgcccgctacttttcgctcaagcagcatcatattcctgctaccctggccgagctgctggagaataatgatgttgaacttttcgatctggttaacgaccccgaagaaaatcataacctcgcccgggagccagagaaataccgggatctgttaatgactatgaacgataaactcaatcagctcactgccgctgagattggcgaagatgatggcagctatatgcccccgtttgaaggaagccagtgggatctgacggcggcccagatgcatcaatatatgcgcgattag

SEQ ID NO: 232026 - DNA, 2286 bp, Klebsiella pneumoniae
atgagttacgatttcaaaaatctatcatcggccgactttgaggatcttgttcgagacctcataggacgagaagaaggacttcgcttcgaagcattctgcgcagggccggatggcggcattgatggccggcacgcgcaggctaatggtaacgtcattctacaggcgaagcattatgaaggttcgccgttcggtaagttgatagccactatgaagcgtgagcgattttcaatcgataagctcgctccgattcgctacattttagcgacttcctgtaagttcaccccacttggaaagggtaagctcactccgcttatagggcccagcctgaggtcggaagcggatatttttggtccggaggacctcaacggtcttctccggaagtacccagatattctcaagtcgcacatcaaactgtggctttcaggtgcgggtgtcctagaccgagtcgtacgcgcggcggcccatacctttgcagcgttcacgcgagaagatattgaacagaaggtccgtgtctacgcatcaaacccgagcttcgatcaatcactggctacgctggagaagcatcggcttcttatcatctcagggcccccgggtgttggtaaaacgacactggccgagatgctatgttacacattcctgagtgaggagtgggagctcgttcccatccgtagtctagaggacggcttcgcggccattagcgacagcaataagcaggtgttccttttcgacgacttcctaggaagggttgccctcgaccggcaagctctggcgcacaaggattctgatttagcgcggttcatgaggcgagtacgtcgctccccaaatgctcgttttattctgacgacgcgggggtacatctttgaagaagcccggagggtttccgaacatcttggcgaccagcgcctcgatgtaacgaagtacgttctcgatgttggtgtttatacgcgccggattaaggcgaggattctttacaatcatctactcgtgtcagagacaccacagtcgcatatccgtgcgctattggaaagcaagaagcttgcggaaattgttgatcacaagaactataacccgcgtgtcatcgaggctatgaccgatgcatttcgcattggtgatatcgaacccgcagactatgctgtggcctttattggtgctctgaataaccctagccagatttgggataccgcattccggacacacatcgatcatcggtgcagacacctcttgatggcgatgttttttctcacggagtatggagtgccccttggcacgcttcgcttgtctttcgagaccttacatacagcgatgagcacagcctatggcctaccgcacgggcctaaggacttcgaagaagcccttcgcatcctagaaggtagcttcgtcaacattgtcaacatcagcggaccaagggtttcttttctcaatccttcgctcaaggattatctctcatcctatctgttggacacagagctattaattcgtcttgtccctacagcagtctccatagactggttgtcgagtttgtgggattttgtgtatccgcgcggtcttagcgaagacgatcaaacaaagatcgccctagcctgcactggcatgctggatatgatcgaaacgcgtccgcactggcgcccgcgagctggcgatgcgcggtcgcttgaatacaacgatgctgcaaactccaaacggctggggatgttgatggactggtggcggctcacgaacgagcgggcatttgctgacagcattatggcgattgcccgcaatccacagcagggctttggtgcatggtcggatggagaggccttgatcgacatattttgtcggctaggtgacaagggatatgggcggccattcatatacgaaaccgaattattggagctccttgagaaggcgatcacggacactatacgctggtgttcgagtgacatgctctccacgctcgtggatgcagtggatgcagcgcaagggctgccgtccagcatcaaccatgccttgcaagccgctgtgctagaagagttcgaggagaataccagtcgcatcagcgaggatgatagcgagtcctccttatcggatcgtatcgatgccctcaaaaagttcgcgccccgtttcggcgtgccggaagatgttttgagtcgcgccgtctccgacatcgaggaccgaatcggcgagattgaagaccggagcagtcccgctccctccccgagtttcccaccgtcgaacaagagagagcgggagaagtttgacgatagagctcttcaagaccttttcactcctctcttggatcggtag

SEQ ID NO: 232027 - DNA, 2016 bp, Klebsiella pneumoniae
atgccgggcattttcacgctggggcaggcggaggctgaaacgcttgccaagatcgaagcggcgaacgcccaagtgcaatccctaacccgagacattgctcaactccaaaataccttgggtgacgtaagctccggcaagctcggggaactccagactttaaggactggcatagaacagaaatgctgggagatcaagacagtccacgatccttattttcaagaggcattcactggcttccgaagttcaaaggctaacttttgcgacaagatcctgatggagtgggcgcagaactctgctgagattgtcccgcttgacgagctcaaacaacgtgcgctgacaatttttgagaaagggctcgaacgtcttacacccatggtagtgtttgacgccaacgaccttgtggtccttgaaggctcggcagttctctcgaaaaaaatcgtagggaaagaagacgttgacatcgctgcacttatacgtcgcctcggcaacagcgactgggtgcggcaaggccttggttatgtagacgaagcggggccgcagtgcccattctgccagcaggagatgaacgactctctaaaaacaaaactgaatgactactttgacgaaacctatcttgctgatatcgcagcaatcgaacgcataagggacgaatatgatgctcactccaaaacccttttgtctcggctcgagttgatccacagtgcgggaagcaagtatcttgatgtggtagcgtttcgcgccgatatcgatcgactctcggcacggttagagttgaatcttcggcaaatcgaccgaaaacggaaagaggcaagttcgcaagtcacgcttgagcccgttggtgaaatcgtcgcctcccttcaagatgctatctccaacgcaaatactgagataggtaagcacaatgcgacagttgacaatctggcgaccgagcgggccactcttatatcgcaaatctggagatgtttacttgaggagtcgaggctcgcatttactgaccacgataacgcgaaaagggggcttgatcgtgccgttactggcctgacggccgggcttgcttcaaagcgagcggcgcttgcagaggccagtaacgaacttgcagcgttggaacgcgaagtaacgagtgttcagccaaccgttacggaaattaacgccattctaagatcgttcggctttacgggtttccgcctcgcgaccgctggccaacatcaaaacctctatgaaattgtaagaggagatgggagcgaagctgctaccacccttagcgagggagagcgcaccttcatcactttcctctacttttaccacctcattagaggcagtatcaatgcaagcgggataaatgcggagcgagtcgtcgtgttcgacgatcctgtctctagccttgacagcgatgtgctctttatcgtcagtgctctgatcaaacgtgtgctcgatgaggcttgccgagggactgggcttattaagcaggtctttctattgacgcacaacatctacttccataaagaagtatctttcgatcccaagcgcggcacagaatgccgagcacacgagacgttttggatcgtgcggaaagtgaacgatgtatccgtaatcaccagctacaatcacaaccctatcagtacttcttatgagctcctttgggctgaggtcagatcgccgaaccgatcaaatatcgcgctccaaaacacgctaagacgcatcctcgagaactacttcaagattctcggaaacctcgataaggatgacatctgcgcgagattcgagggtcgcgaccagcaaatatgtggttcgctatttacttgggtgaatgatggatcgcacagtttcaacgatgacctgtacatttctgtcgatgaagcgatggtcacccgttatctcgatatttttcgcagaatcttcgaagtcacaaatcacctcgcgcattatgagatgatgatggggccacaagcgctagctactctagcacttgcgaatgagaacacagccaccgacgcagtggacgaaacggcagcatga

SEQ ID NO: 232028 - DNA, 243 bp, Klebsiella pneumoniae
atgaccgaccatcaaaatgcaaatactgaacgtcgccctcaacgccgtggccgcgcatcgttcgtggcggtagttgatgaggtgcggaaggagcacgaacgcggggtaccgctggtatggatttatgaggcattcgcggaccggctcgaaatgggatacacccagttcaccaaatacgtcacacgatacatcaagcaaggtcagccaatcctcgctccctacaagcacgacgggaagcgatga

SEQ ID NO: 232029 - DNA, 225 bp, Klebsiella pneumoniae
atgaagacagctcaccgcatcagcgcattggccaatcaactcaacgaactgcaagcctgcctcggtcgaaccagtgggcggcctagcaagagcgttatggaagcccagcgcattgcggccgagctggcttctttactcgaagagtggcaccttgaatcgttgcacatccctgaaacagaacgtgacctctatcgcgtacagaatccctattacgcggctcactga

SEQ ID NO: 232030 - DNA, 900 bp, Klebsiella pneumoniae
gtgagcaagcataactttactcacgcccggcacgacccggtgcattgtctggcacccggtctgttccgtagcctcaaacgtggcgaacgcaagcgtagcaagctggacgttgtctatgactacggcaacggcaagcgtatcgaattcagtgggccggaaccactgggggccgacgatctccgcattctgcaaggactggtagcaatggctggaccttctggccttgtgctttctcccgatcctcagacagaagccggtcggcagctgcggctatttctcgaacccaagtgggaggccgtccagcaggatgcgatggtggtcaagggtagctatcggtcgctggcccgtgaggtcggctatgcggatatcgacaatactaggccagtacgcgattgcattgagaggctctggaaagtctctatcattgcgcaaaatggaaggaagcggcagggcttccgattgctgtccgagtatgctagtgatgaacaggacggcaagctgtatgtggcattgaaccctcttattgctcgcgcaatcatgggcgggcagcacatccgcatagacatggccgaagttaggaagctacagaccgaccccgcccgcctgattcatcaacgactatgcggctggatcgacctcggtaagtcagggcgggtagagctggacacgctatgcggctatgtttggccggatgaaccgacgaacccgaataccatcaaaaagcgccgccagacggcacgcaaggcgctggccgagcttgctatcgtgggttggaggctggacgagtatgctaagggcaaatgggaaatcgggcgtcccaaggcatccgactataacgctgctcccccctgtttaacggcaccccatcccctgtttaacagtacccaaccccctgtttaa

SEQ ID NO: 232031 - DNA, 747 bp, Klebsiella pneumoniae
atgagccaatatctggtttttcagcttcatggtcctatggcgtcgtggggcgttgacgcccccggcgaggtccgtcatagccatgagctaccctcccgttcagcattgctggggctgctgctggcggcattagggatccgccgtgaagaagaacagcggttaaacgccttcaaccagcattactcctttttgctctgcgccagcagcgaaccgcgctgggcgagggattatcatactgtacagatgccgaaagaagtgcgtaaggcgcgctatttcagtcgccgcgaagagttacaggatcctgagctactcagcgcgctgatctcccggcgcgattattataccgatgcctggtggatgattgcggtggcggtcacgcctgatgcgccttactcgctggagcagttgcatgaggcgctacgttacccggtatttccgctgtatctgggacgcaaaagtcatccgctggcgctgccgttaatgccgctgctgcttgaaggccacgccgcagaggtacttcgccaggcttatcgccagtatcaggaaagatttaacctgctgaggctttctctgcgacagctgcaggatcaatgctggtgggagggtgagcatgctggtttagtcgccaataaaatactgcggcgccgcgactgtccgcttaaccgccagcattggctgtttggcgagcgctccatgaatcagggaacctggctcagtaaggaggaaacgtgtacctctcaagaataa

SEQ ID NO: 232032 - DNA, 1002 bp, Klebsiella pneumoniae
atgcccctgcgtgctttagtggcggtgatagtgacaacggtagtgatgctggtgcccagggcgtgggcggatacggcctgggagcgctataaggcccgttttatgatgccggatggtcgtatcattgataccgccaatggcaatgtgtcgcatacggaaggtcagggcttcgccatgctcctggcggtggcgaataacgatcgtccggcgttcgacaagctgtggcagtggacggacaacaccctgcgcaacaagtctaacgggttgttttactggcgctataacccggtggcgccggaccctatcgccgataaaaacaacgcctccgatggcgataccctgatcgcctgggcgctgctgcgcgcgcaaaaacagtggcaggataagcgatatgcgattgcctctgacgccatcaccgccgccctgctgaagtctacggtggtgactttcgccggtcgccaggtgatgctcccgggcgtgaaagggttcaacctcaatgatcacctgaaccttaacccttcctatttcatcttcccggcctggcgcgccttcgcggagcggacgcatctcaccgcctggcggacattgcagagcgacggacaggcgctgctggggcagatgggctgggggaaatctcatctacccagcgactgggtggcgctgcgggcggatggcaagatgctgccagccaaagagtggccgccgcggatgagtttcgatgcgatccgtatcccgctgtatctctcgtgggccgatccgcacagcgccttgctcgcgccctggaaggcctggatgcagagttacccgcgcctgcaaaccccggcgtggatcaacgtcagcaccaacgaggtggccccctggtatatggccggcggcctgttggcggtgcgcgatctgacgctgggtgaaccgcaggaggcgccgcagattgacgacaaggatgattattactctgccagcctcaagctgttggtctggctggcgaaacaggatcagcgctaa

SEQ ID NO: 232033 - DNA, 1680 bp, Klebsiella pneumoniae
atgacaaataaaaaaacgaccgcggcaccgcttccgctctggcagtactggcgcggccttggcggctggaacttctactttctggtcaagtttgccctgctgtgggccgggtatctcaatttccatccgatgttgaacctggtatttctcgcctttctgctggtgccgatcccgcgcgaaaagctacaccgtatccgccactggatcgctattccgctgggattcgcgctgttctggcacgatacctggctgcccgggccagagtcgatttttagccaggggtcgcaaatcgccggcttcagcgccagctatatctgggatctgattgtccgctttatcaactggagcatggttggcgccttctttgttttactggtgctatggttgtttatcagccagtggctgcgcgtcaccgtgtttgtctcggcaatgatcgtctggctggcggtcagcccgctgctgccggcctttaccctatggcccgccggtcagcccaccacggccgccgccacgaccgcacaggccaataccggggccaacgccgccgctggcgccgcgtccagccccgccaacagcgatattccgccgcagaccgagccgccgacctcagccaacctgaccaactggctgaacgctttctatgccgccgagcagaagcgcaagacgccgttcccggaccagctgccggcggatgcgcagccgtttgacctgctggtgatcaacatctgctccctctcctggtcggatattgaagccgccggtctgatggatcatccgctatggaagcactttgatattgtcttcaaaaactttaactccgcgacctcctacagcggcccggcggcggtgcgcctgctgcgcgccagctgcggccagctgtcgcatactaacctgtatcagccgtccggcgccgattgctacctgtttgaaaacctggcgaagctcggcttcaaccagcagctgatgctcggccataacggtctgttcggcgacttcctgaaagagctgcgttcgctgggcggcatgcagagcccgctgatggaccagaccggtctgccggtcagcctgcaggcgtttgacggctccccggtgtatgaggatctggcggtcctcaaccgctggcttaagaccgaagaggccagcagcaatccgcggaacgccaccttctataacaccctgccgctgcatgacggcaaccacttcccgggacaaagcaaaaccgcagactacaaagtgcgggcgcagaagctgtttgatgacctggataacttcttcaccgagctggagaaatcggggcggaaagtgatggtggtggtggtgccggaacacggcggcgcgctgaagggcgataagatgcaggtatctggcctgcgcgatattccaagcccgtcgatcactaacgtcccaacggcggtgaaattcttcggcatgaaggcgccgcatgaaggggcgccgattatcatcgatcagcccagcagttatctggcggtgtcggagctggtggtgcgcgccctcgacggcaaaatgttcagcgaggacagcgtcaactggcagcagtatgtcgccaacctgccgcagagcgcggcggtgtccgagaacgccaacgccatcgtcatccagtatcagggcaagccttatgtccagctgaatggcggtagctgggtgccttatccgcaataa

SEQ ID NO: 232034 - DNA, 201 bp, Klebsiella pneumoniae
gtggataatgtatttactttgggtatttcatcattatgggatgaagtgtgccatatgccggtcggcggagtatggtggctcaacgtcgaccgttatgccgatgccgtcagcctgtttaatcagacgctggccgcgcaggcgaaaaacagccacgttgccgcgctggttatggaaaaaaacccaaggatatcatttccttag

SEQ ID NO: 232035 - DNA, 2304 bp, Klebsiella pneumoniae
atgtgcagctggtatccactggcctcttatgcggcgccggccgcggtggcgaacgctgcccctgtcgttcagccgcaggccgcgaccccggctgcgccgatcgtggtgggcgagccgacggcgaccctcgccgaaccgaccgctccggcggcggtggccgagaacgtgccgcagcgggaggtgaagctgagctttgccaccatcgcgccgccgcccggcagcatcgtgctgcgcggctcacggcctgacgcgtcggtcgaattcggcatgcgcagcgatgagctggtcgccaacgcgctgctcaatctggaatacaccccatcgccctcgctgctgcccgtgcagtcgcagttgaaggtctatcttaacgatgagctgatgggcgtcctgcccgtcaccaaagagcagctggggaaaaagatccgcgcgcagctgccgattgacccgctgtacatcaccgacttcaaccgcgtacggctggagtttgtcggccactaccgcgacgtctgcgaaaacccggccagcagcacgctgtggctggacgtcggacgcgaaagctatctggatctcacctaccagtcgctgaaggtaaataacgatctgtcacacttcccggtgccgttctacgatccgcgcgataaccgtccgctgaagctgccgatgattttcccgggctcgccagcggtcacccagcagcaggcggcggcgatagtcgcctcctggttcggcagcaaggccggctggcgcggccagcagttcccggtctatttcaatgaactgccggatcgtaacgccattgtcttcgccaccaacgacaagcgtccggacttcctgcgcgatcatccgccggtcaaggcgccgaccatcgaaatgatcgacaacccgaacgatccctacgtcaagctgctggtgattttcggccgcgatgataacgacctgctgctggcggcgaaggggattgctcagggcaatattctgttccgcggcagcagcgtcaccgtggacggcatcaaaaccctgcagccgcgtcagccttacgacgcgccgaactgggtgcgcaccgaccgttcggttacctttgctgagctgaaaacctatgagcaacagctgcagtccagcggcctggtgccggatgccatcaccgtggcgcttaacctgccgccggatctctatctgctgcgggccaacggcatcgatatggatctgaaataccgctacaccatgccgccggtcaaggacagctcgcggatggatatcagcctcaacgaccagttcctgcagtcgttcagccttaacagctcccaggacgtgaacaaactgatcctgcgcctgccggtgctgcaggggctgctggacggcaaatcggaggtcaccatccccgcgctgcgtcttggggcggtcaaccagctgcgctttgacttccagtatatgaacccgatgcccggcggctccatcgacaactgtattaccttccagccggtgcagaaccacgtggtgatcggcgacgattcgaccatcgacttctcgaagtattatcactttatcgccttgccggacctgcgcgtcttcgccaatgcgggcttcccttacagccgtatggcggacctttccgacacgctggtggtggtgccgaaggcgccgacccagggccaggtggcgacgctgctgcaggcgctggggggcatcggttcgcagaccggtctggcggcgattaatctgcagatgaccgacgatggcaaccagatcaagaataaagacgcggatctgctgctgatcggcgcgatcccgtcgtcgctcaaggacgacacccaaatcaacctgctggtcgaggcgaccaaaagctgggtgaaaatgccgatgcgccactatgacctggcgagcatttatcccgacgatgaggcccgcacgcccaatacccgcaccgacattacctcttccgggccgatggcggcggtgattggcttccagtcgccgtataacgatcagcgcagcgtggtggccctgctggccgacagcccgcgcggtaatgaactgctgaccaacgccctcaacgacagcggtaagcgggcggcgatgtttggctcggtggcggtgatccgcgaatccggcgtcaacagtctgcgggtgggggatatttactacgtgggtcatctgccctggttcgagcgcatctggttcgcgctctctaaccacccgatactgctggcgatcttcgccgccatcagcattgtgctgctggcatgggtgctgtggcgcatgctgcgcatcatcagccgccgccgtcttagcctggatgatgagtaa

SEQ ID NO: 232036 - DNA, 453 bp, Klebsiella pneumoniae
atgcagaacgaatcccggcaggagaaattccacacccgcgaaccgctgacgctgcgccagtttatcgaagagccggacaccggcggctatgccggagtggcgctggatatcctggaagcggtgaacagcaccaccaccaagcggatcgtggtgtcgatccagaataatggcacgctcgattttttacgcccggacgacgtgatcgagatcagctgcgacctgagccgggatggcctcaagccggtgacgccggtgaaggtgccgacagcgcagaagaatatgattgcctgcgtgaaggagtatgagcggctggcggtggcggcgatcctgcagcaggataaatcgctggcggtgcgggcgctgatggcgcacccgctgatcggttcctattcgctggcgaaaaccctggtcgaagcctacctcgacgatgagcagttcgccgcctggaggtaa

SEQ ID NO: 232037 - DNA, 966 bp, Klebsiella pneumoniae
atgcctttagatttaagtaacaccttagttattggcatcagtgcaactgcgctttttgacatgagtgaatccgatcgcatgtttcgggaaacctatgcgaccgatcctgatagcgccattgaaaagtatcgcgcctacatgctggaacacgaaaaccaacctttgcagcctggtacaggttaccccttggtcaaagcgcttctgggtctgaaccagtatcgtcaaccggatgatcaatcaccgttggttgaagtcgttgttatgtcgcgtaacagtcctgatacaggtatccgtgttctaaataccattcgccatgacaaactcgatattacacgttcagcttttaccgcaggcgaaaccgttgccgattaccttgatgcctttgatgtggatctgtttttaacaactaacgttgaagatgcgcaaaaggtaattgattcccgattctgcgccgctgcaatcctcaaagatcctccctccgacgcctcagatatcccggaagggcaggtccgcattgcgtttgacggtgatgccgtgcttttctctgatgaaagtgagttagtttataagactcaagggatggctgcttttcatgcgctggaggatgcacaacaagatatcccaatggctgagggtccatatgccactttgctaaaaaaaatagccaagcttcaggagcgactaccgacaagagttgagtattcccctgtccgtattgcactggtgaccgccagaaacagcccatcggaaatgcgcgtcattaaaacactgagaagctggggggtgtatgtcgatgaagctttttttcttggcggtgtagagaaaacaaaagttttgaaggcatttaaaccgcacattttctttgacgatcaggatgtgcatttgaatactgctgcaaaggtggttccttccgggaaagtaccttacgccagcaattcagagctttttgaaaacaaagcgtcatga

SEQ ID NO: 232038 - DNA, 1590 bp, Klebsiella pneumoniae
atgaatttcaagaaaaaactcgaagagcattttaagcagtttgaggcatcccctgtgttatttgttggctccggagtgtctcgtcgttaccttggtgtgccatgttggcaagaccttttgaagcattttgctgaggcgattggggaaaatcatataaaattaaaaacaaaatctaatggtgacttacccgaatatgcacaattattagtgtcggcatacgctgagaaatggtgggatactaaagaaggacaattagcattaagtgaaaaagaacaggagaaaattttcattaacgaacagtctcctttgaagttgtcaatatctaaatatattgagaatgcacataaaaatattatagaaaatgatgagttaaaacacgaaatttctctttttgcgaaagcaaatattgatggggttattaccacaaactgggatgtttttctagaaagccttttccctaaatttacaacctttataggccaggacgggttgattactggcaggagtcacggcattgccgaaatatataaaatacatggttgctgcactgagcctaactcattgattttaacatcaagtgactatgataaatataggaagaaaaacccctacctatcatctaagttactaactatgtttatagagaggcctgttattttcttaggttactctttaacagatgaacatatagctgaaatcctggaagatatagttagttgttttcctgatgctagtttggattttttacagaacaaattattgtttgttgaatggaaacctgaacttgaagaggccgacattagtgattctgttattcataaaaaaataccagtaaaatatgttcaggcaccatcttataaagaaatatttgaagtgctgagtgaaactaaaaaaaggattccagcacatttattccgaatgataaaagatgaactttatgaattagtcttaactgatgatccgaaagggaaattatatgtgagggactcagagaagattgaagagggcgccaatacaacagagtttgttgtgggatatggtgctatttcgatggtgaaaaaatcagaatcgatggcagcaaaaggattggttgggctggagcgtgtagacctcatccgtgaagttgtattcgaaaatggacattatgattgggaatgcgttgttaatgatgttctgccaaatatttgcaaaggtaatgcgcgcattcctatttttcatttcttaaatcatgctaatttaattaatcctgacgggagtataattaacgagcctgaacttgcaggtggtgttttatcacgattagatattactcctgtaagttttcagtctcaaggttgggataaacgacgttctgaaaacgttcctgaagttagagttggtgtaaatgagttatatcttgcttatgatttcggtttttttttgaggatgatgccctatatggaaccaggtttaattaatcgagatatgaatgaactacataaaatactgaaaaagcatattgatgaagcgatgagcattcaggctctatcaagtaatttttgtagactggtctgtctgtatgattttataaagaatagcaataaattttaa

SEQ ID NO: 232039 - DNA, 1161 bp, Klebsiella pneumoniae
atggtgaagttaggggatgtagcacctgcaattccaattaaaaatgttaatttggacgaagatgaactggtttggcagttaaatcttgatcaagttgaatccaatacaggaaaaatcattgataaagttaaacaacctttatcaagtgcaggcccatctactcattttttcaataatgaacatgttctgtactcaaaattacgcccttatttaaataaagtagttgtcccggatgagttgggtatcgcaactactgaattagtgccaatgaagccggaccagaagagattaaataaaaaatatttatcctactacctgcgttcaaagccatttgtcgagtgggtatctacccaagtctctggtgcaaaaatgcctagggttgtaatgagtattttctggcaacatgaaatgcctcttcctccactatatgagcaagagagaatcgttgctattctcgataaatccgatggagtatgcaaaaaacgtgagcaagctaacaaactggctgataactttttaaaaactacgtttcaaaaaaaattcaatgatgaaacttttttattaaatggttgggagttgaaagatttaaaagacatagcatttatccaaactggaccatttggaacccagcttcataaggaagattatgttgaaaatggtataccactaattaaccctacaaatattaaaaatggtattatcattcccaactttaaactatgcgtagatcgccacaaatatgacaaactaaaagaatatcatttaaaaaaaggtgacattataatgggccgaagaggagaaatgggtcgttgtgcactgattaatgataaagaggatggatggttttgcggcacaggaagcctttttattagattaaaaacgccaaatgaaatactttctttttatttgaacgaatatttatctagcgattcgattaagaactttttacagaaagagtctcgtggggttacgatggcgaacctgaataaagatatagttgggaagattaaaataaacatccccccagaaaacgtactgacttcttttatgaagataaaattaaaagtcgatagcattaagaaaaaaataaaccataacgatttggaagaattactgtcatcattaagtaaaaaacactttcaaattcaaaatctattataa

SEQ ID NO: 232040 - DNA, 576 bp, Klebsiella pneumoniae
atgaaagaaaccattgcccgttacgactatttacttaacacctaccaacgctggttggccgatttaaccaatatcgcagtccgaaacggcatgtgccatccggatattcaatcaagccatcttcttacgctctcaacgttacattttcctgagactggcgcagtggttgcggtcgtgccgcaatgcctctaccggattatttatggtaaagcacgaccagaaccgttgactatccaaaacgatttgcaaataagtcttgaaaccgaaaatgaacttctgttcacccatgccgggatggaaggggttttactgagtgagtgtgtcagattgaagcaaagccgcatagccaataagttgatcagcctttccgcgcgatttaaggcgcgtgagattcgtcataagctgatctggctgtgctggcacgatttgatgcagggggcttcgatgaccgattggctggagaacctgaagcggatgaatcatgtggaaatttgcttctggctggggcaacgacaggagaaaaatgcggcgctgacgaagctgatggatgagtatgtggtttttacgcgttattag

SEQ ID NO: 232041 - DNA, 207 bp, Klebsiella pneumoniae
atgacagttaaaccaaccctacttgaagatcgctttgttgatatggctttcatcacccgcctgctgggggtcagtgataagtggatttaccgactcatcaaaggtggcatattccccaaacctatcaaattggggcgaagttcacgatggctacagagtgaagtggaagcatggctacaggagcgtatcgctcaatctcgtcagtaa

SEQ ID NO: 232042 - DNA, 582 bp, Klebsiella pneumoniae
atgcaaagacattacccacatttaaagaaaatcatccctaacgacttcctgctgaatttgattaatcaccatctcaatcagatcctggcatgtcacgccaagatactggcgtttcgaatggattttgattatcagcgtggtacgaatcgattcattcgtaactcctcgatagaaatacaagatgacctcagagagcttactcaggcaatgatcagccttcctggcgttatcggtagcttctgggtactggaatggacatcagaaggggcagttcatgcccatgctattttttatcttaatggccgggaacatcagaaatcattcccattcatttcacaggcaggagaactgtggcatcaaattacttatggcgagggaaaataccagcgatgcaaaccaaaggaatatcatcaggacaacattaacaatgttgttgaatatcacaataacgaagccataaacagtctcagacgtatagccagttatctaacaaaagaagaccaaaaatatggttatctaatttggggatgtaatgaggttccctcgcctgcaaggcagggtagaccaagaaagttttgttag

SEQ ID NO: 232043 - DNA, 930 bp, Klebsiella pneumoniae
atgaaaggacgatttagctcagattcagattacgatagtcgcttatgcggctacatcagtcaggcgttgaaaagccagtccattacattcacgagccatttaatgaaatcaggggtggacaattggataaggtttctacataaagaaatacccgaaattaataccgacattgatgttgaacaaacaaaattattactggataacatagttagttccgcattagaaaatgtatataaattcagtgatttctcttggattgaggacagtgaccgggcttgttactggatgtggtgtaacatttacacaatgcctgcgctctttttttcaccacctattaagaaaccaggcgtaactccttatatttttttgggctgtgatcccctccctggaaatagcagggcacgattctttaatattgtgaatttttttgatcgatggattaaccctcaaggcaaacgtagatttttaaatgaaatgagaaattcttacagacagattacttgtaaaaaaaacgcactatcatttctgtcgcccaagaaaaaagatgattgtctgtgggcatggaattatcttagtgaaagaaaaatgattggtgaatacattacgcccataatggataacccacatgacgtttatctggctgtcaatgcagcatttgatatatggtgtacttccactgttttacttgatgaaaccattattaattttagtaaaaagataaagaatgcatatgctcagaggaatttcaaattatctgggaaaaataaaaaagacaaagtcaagaatacggttcttgccattttgacgcctgaattacaaaaaaaattgtctgatttatcacaagccagtgaaatgacccggcaagagatgttagagttatgcattaattctgcatatttaaaacttccgaagaatatcagaagcatttaa

SEQ ID NO: 232044 - DNA, 864 bp, Klebsiella pneumoniae
atgaagatacatgaaggtttgcaagatatcacgcagtctgtggctgttcttcctgattttattagaaaacaaatactttcgaatattagcaggcttgcggattatgagccagtgatcggcattatgggtaagaccggagccggaaaatccagcctgtgtaatgcgctttttgccgggaacgtttcgccggtcagtgatgttgcagcctgtacccgtaaaccgctacgcttccgttttcaggtgggtgagcactttatgaccatcgtggatctgcccggtgtcggtgaaagtgaaaggcacgatgaagaatatgctgcgctttacagcgaacagcttccccggctggacctggtgctgtggttgattaaggccgatgaccgggcgctggcagtggatgaacatttttaccgggaggtgattggtgaggcataccggcataaggtgttgtttgttatcagtcagtcggataaggccgaacccaccagcggtggtgaaaagctgtctacagagcagaaacagaatatcagccacaaaatctgcctgttacatgaactgttccagccggtaaacccggtttgtgcggtgtcagtacgtctgcaatgggggcttcgggtaatggctgaaaggatgatccgttgcctgccacgcgaggccagcagcccggtagcggtacagctcagtgccccgcttcgtaccgatgccattaataaaaaagcccgtgacgattttggggaaacggtcggctcggtactggatacagtaagttccctacccctgataccagccccggttcggaccatcattcaggctgtacgcgataccgtggtgtcggtcgcccgggccgtctggaatttcttcttctga

SEQ ID NO: 232045 - DNA, 216 bp, Klebsiella pneumoniae
atgggattctgggatactgccgggaaactcgccaaaaacgtcgctaaagacgcgctcgacagttcccgggaaatgaaggcgattcatgaccgcctagatggtcagagcagtaccgcgttgaagaaaattgtcgcggatgacggttacttcagcggcgcaacagaaatggaaaaacgccttgcacgaaaaactttacgtgaccgtggcgagagttaa

SEQ ID NO: 232046 - DNA, 936 bp, Klebsiella pneumoniae
atgaaaagaaaatatttccctgccagcgtgaaatggggttggttggtactatctgcagcattggtagcacctaccatcgcccacgccgatttcaaaactgcgatggacgctaaaaactgtcagccgcaagcgaacaattgtccgtacccagccgacctaatgaagactgacccggagttcaagaagtctattgaaaccgccatgtcctggaatggactggttggtttgctggggcaggagggagcactcaatggcccacaggggccattggagccgttgaaaatcgacgggaaagattatctgaaaggttcgatgtgtgctgacggagattgtggcgatcacaacctgatcttcctgtacgaactcgaccacgggaacttcatcggattttacactaaccgtaacgacggacagtgggtaaataccccgagtgacggggaagcgaaggtactgcgttccctggtcaaaggagaagtgacgccggcacaaaacagcacgacagcttccgctactccagctccgacagccgccccagcgaaggcagcaccaaagaccatctgggaagtcactggtgatgacggtagaacgctgggcgatgtttgtggtggtaataaacagacgtgtacggttgtgggcagtaccaaacatatcgtggccatctggaaccaccagtctctgaacgggtgtgctttcggtgatatctacatggttgacaaagatgaattgttttggaaacagtacgataccggaacttgtagtccgaatgcttggatacgcaaaggctctatgaacaacggccaatactggactgttgatgttggtgtaggcagtgaagttgtgatgcagtacccggtcgagtattggtcactggtacgcgacttcaccggtaaggatcgtccgtcctgggaaaaagcaaaacaagcggctaagcagtag

SEQ ID NO: 232047 - DNA, 225 bp, Klebsiella pneumoniae
atgcctgaatttgttttgctgccgcccgggccattcacccgggagcaggcagaagctgtcgccacagcttaccgcaacatcgctattgaagatgaccaggacagccattttcggctggtggttcacgatagcgaaggaagtatggtctggcgagcctggagctttgagcctgacgccggtgcagggattaacccgtatctccggcagtacagcatccggcgatag

SEQ ID NO: 232048 - DNA, 459 bp, Klebsiella pneumoniae
atgacctccctgactcagcctgtatttaccccggctaatgagccgcaactcacccttactgtcgccgacgtccccgatgcgctgcgtattcatttctggccgcagcattttggcaccattccacagtggctaatgctggagccgcgcatctttgcctggatggaccgcttctgcgcggattacagtggcggtatctggcagttttacacgctgagcaatggcggtgcgtttatggctcctgatgctgaaggtgacgataaatggcatctgttcaacggcatgaacggcaatggtgcggaaatgagcgcagaagccgcaggtattgctgtctgcctgattgaatacagccaccatgcctgccgtaccgaatgcgatgccatgacggagcactattaccgtctgcgggactacgccctgcagcatccagaagcccacgccattctgcgtatcattgactga

SEQ ID NO: 232049 - DNA, 834 bp, Klebsiella pneumoniae
atgcaaactgaagctgaagtattaaccggtcatagcgaactgatttgctcgactagtattgaacgtatagtgacaggccgcgatacagcactaaaacagatcgaacaactcattcagcaaattgatgccatttcacggctgacctcagaaataggcggtggtacagcgcaagactgggcgatgaaagccgggcaccgttacgacagttggctgactgaaaatactgatagagcgctacctgccgtcacccacaatattgaccgcagtatctggcgcgatttgatgctgaagtccggcatgatggccttgatggatgcgcaggctcgtgaccagtggcataagaacttggaggagggcgatcttcctgctatcagcgaggcgaatatcctcagcacctttgagcagctacatctgaataaaatggacgtcttcgaacgcagcatcattaacgtgttcaaaggcctgtcgtgggattacaaaaccaacagtccctgcagcttcggtaagaagattatcgtcaacaatctggtgaagcatgaccgatggggctacagcctgaactggggctggcggcgcgatcagttagccgatctggaacgtatgctgtatttgctggatggtaaaaccatccctgataaccggcacgatatctccattcggttcatggattttgttcgcgataatccacatcaacaggtcttcgaggatgatttctttagcattcgttattttcagaaaggcagcggacatatcacgtttaaacgccttgatctggtggagaggatgaatgatatcgtggcaaaacattttcctggagcgctacctgcaagataa

SEQ ID NO: 232050 - DNA, 213 bp, Klebsiella pneumoniae
atgactctcacgaaagctcagcccaagcttttgcacgcaacacatggaacccgcaatggactattaatgatgaggctgtattgctatggggccaaaagttgccacaggaaagcatacgaagctaacaagctatgctgctacgcagcaattgcaggttgcagagaacattacattgccgcctcggcaatgtatcagaagcagaagctgcattga

SEQ ID NO: 232051 - DNA, 2070 bp, Klebsiella pneumoniae
atgaaaggtaatgtgcttggcgatattcgtgctgaacatgatgaaagaatgcttgaagcatctttttggcaaaccactgactacaaagctcttttagagtcatacgataggtgcatagtagttggtcgaagaggaacaggtaagagcgccttagtacatatgttatcaaagcactggaaggcgaagcctaagacttatgttatgactatcagtcctattgaagagcaaattattggtcttagagatgttgtatctctttttggtgaaaattatttacatataaaagcaggaagtaaattagcctggcgctatgcaatttatatggagattttatccgaaatagcgaatcattataaaatgaaaaatgatttggactataaaagtgttgagaaacatttgctatcttggggaccaaaaaaacaaaacattagtagtaagataaggaaaaaactcttatcaattttagatatgggtaaggatgtaaaaccttcgacaaggatatctgatttatctgatgaatttgaattagatttattagaagaagttatttttgaagctattgataaatctaagaatcaatttgtgatttttgcggataggctagatgaaggttatactcccgatgatcttggcgttgcgattgtggatggctttattcaatctgtcattgacattaaacaaaatctacaagaaaaggtgatagcttttgcttttgtccgagataatattcatagagcaatatctaaaatggaccctgacttcacaagaaatatcgaaggtcaaattttaaggttacattgggatgaatataatctttttaatcttgtatgtaatagaatgcgagttgcttttggttcaacaatagagaacaacacgcgagtctggaatgcatatacagctaatgaattacaatccaacacgggatttaaagaaacattaaagttaaccttatataggcctagagatattttggttttactgaatgacgcatttttaagagctgcgacacatgcaagatcaaagatagtaatagaagatattaaagccacggcaaatactatatctcaaaatagattgaacgatttacttaaagaatacgagaatgttttcccagcactagatattttcacttcgttattttccaatagtaaatcagattttagtatttcagaagcatcagaagttataaatcaggcatttgaaattaaggagattaataataaattaaaattgcaagatcttcttttgtttgaagatccagtccaagtaataaaaagattgtatagtgttggtttctttggtttatataatcaacaatcgtcatcattcattttttgccatgatggtaaagaacctgataaggattttacttctagctcaagattgttgattcatccatgttattggttggcgcttggtgttcatgaatcagagataacctctgatgcagcagatgacattcatgacgaatacgacatagaggttagttctgtcgccgttgagcaacgaaaacagagaataggttcaatgattcaagagctaaataatattcctgaagggatggaaggtgctgtcgattttgaagcgtgggcattaaaagctattaagatcctttttgcgactaatttaacaaatattgagttgcatcctaataaaaatggcctccagcaaagagatatcattgccactaacctggcagagtctacagtgtggaatagaatattaactgactatggttcacgtcaagttatctttgaaataaaaaactataaagacttaggtgccacagagtataggcaagtaaactcttatctctataagcattatgggcgattggcttttataattaatagagatcatactgaaaacttggaaaaacataaagagttaatgtgggttaaggagctttatgataacaatgataaactagttattaaattaccatctaagtttctggagaggcatttgtcaaaaatgcggagccctcagaaacatgatgaagtaaacaagcagcttagtaaattactcgatcagtatatacgtgtgtatttaaataacaaatgcaaatga

SEQ ID NO: 232052 - DNA, 1731 bp, Klebsiella pneumoniae
atgtcggaaaaaaaatttataagcgagttatttttagagaataatcaatttatccttgtaggtttaactggtagaaccggttctggatgcactactacggctaatattttagaaagtaaaaatgtatcatttccagatttaaatagtttagataacttctataccgggctagatattagacgctattcaatagtaaaagagtttgctgaagagcattgggaaaacttctactcaataaaagtgagtgatcttatctcaatatatttattaattatgcctaacgaaaagttaaagaaatttatattactctgtggtaatggaattagacaaagggcattaggggatttaattaggactggtgtcctgtccactagtttgttaagaagtaaatatatcaatgaaataaagcaactattagaccatcaagctaatatagattatacaaaccctgcatttaaacgttcgttttttagaatattacaacttgttagaaagttcacaagggatttcaaacaagaactggataaacttgagtcgggattatatgtatccgtataccagtccgctggcaaatccataagaagaataggtaaagtggatgatgattacaacaacaaagactttataccgaattcagtttttcatttacctgaaaccatcaatagagttattaaaataataagaaagataaagaatgaaagagcttatattgttattgacgccatcagaaacccatatgaagccaagtttttcaaggatcgctatgcggcatttcaccttgtttcaatcaatgcacctgacgagcacaggacaaaatatttacaaaaattacataaattttcttcagatcgtatcacaaaaatcgatgctgaagaatctggggaaggtgaaagtgaatataaacacttaacaaatcctaatgtaaaaaaatgcatagaaatttccgacatacatttatttaacccaaaaaatgaatttgataataacaatatattgaaagctcaaatcgcatggtatattgccctaatgcaacatcctggattaatatcgcctacatctatggaaagggtaatgcaggttgcttataccgtaaagctaaattctggatgcatttcaaggcaggttggcgctgttataactgatagtgaaaactcgataaaatctgttggctggaatgatgttgctaaaggtcaagtcccttgtgccatgagatcaattgatggtttaatgaataattttcaatctgaagtttacagtcaatatgagagaaataatgaaaaatttaggtgtaaagctaaagtgatttatgaattatataaacctataagtggccaatcatccccttttaaaggaagaaatgtcccttattgctttaaagacattcataatagtatagataataaaagcaaccaagtacatacacgagctctacatgcagaggaaaacgcattcttacaattagttaagtatggaggcgtaggggtaataggagggaaattgtacactacagctagtccttgtgaactatgtgcaaaaaaagcataccagctgggaatttcggaagttatatttattgatccttatcctggaataactcaagaacatataattaatattggctcaactcctccaaaattagtgcagtttagaggagccatagggaaagcttaccatcgactttatgaacaagtaattccaattaaagatgaatttaattatatgttaaaataa

SEQ ID NO: 232053 - DNA, 171 bp, Klebsiella pneumoniae
atgaatgccattcaaaacgtagtagaaaacgctctccagggaatggagacttccggtaatattgttgagagagatggtcctgatttcggaattacagtgcatcatgaccaagaagcatacaaaaaagtactcaaacaaaggaaaaataacgataacgatagcgaaaaataa

SEQ ID NO: 232054 - DNA, 471 bp, Klebsiella pneumoniae
atggcaaaacgagaaacaatttacgataatgcacgtctgcataaagaactgaataatagatcatatacatcattatcatcagaagcccgtaaagcaataactgacactattcagggatgtaaatttttgggtaagtacaaattacccgaaaaagatgtcttctaccttgttcgtgaatgcttcgagattagtaaaaaacttacagaacatcatttgaacatgaatcgtttgaaaaataaagaaaagattattcatggtgaatcatcaattgaaaagtacaaaagagtgacaacactcgttgctatatcttttgagaaattattggatgatggtatcgatctgtgtgggtttgctaagtacagggctggtaaagtaatgaccgaagaacaagagcaacattattcacagatgtctgataataaacttacagtacaggagcgtattgcatacctacgaacattactcgaataa

SEQ ID NO: 232055 - DNA, 939 bp, Klebsiella pneumoniae
atggaaaaaaactacactttatcgattagtaagttagcagatattatcgaaatattatttaaaaataaaaatcaattatcgacttactggtatcgtggtcatagtgattataagtttacgcttcagccttctttgtttagatcattacaaaaagataaaagctgttattacgaagaatcaactataattgaagaaatggtaagacggttcccctctatcagaactgagcatacaaccactcttgagttattaacctatgcccagcattatggactaccaacaagattacttgactggtctgaaaatcttttagtcgctctttacttttgttgcaaagaaaacaccaacatcgacggtaatttattcatattaaacgttgatgcagtccaaaaatatcgtaatagtaaacttgatgatattgaagagttagtaaaatccaactgcgaaattgatgcatataggataatgctcgatagatgttcaaaatttcataaatattttttatccaaattaccgcctaagttgaaggggacatcatacttagaaatgtcagatatgtcggacgttgatttattactccatttttcgcaagaagatgattcaccattagaaatggatttaggaattgaacatataaaagcggtagacttattcacatattatgccccaatgttaaatagccgtttaatagctcaaaaagggtgtttcaccgttcacggcggaaagattattaataacaaagaaatcattaaaatctctaacttggaagatctaatcaggactggtgaaatgcagaaaattagaataccagcagaatcaaagcaaaaaatcatcaaagaacttgatctttgtggtatcaatgagcatacgttgttccctgagattgagcatcaaatagcaagtattaagaaccgttcgctttcaaatggaataatatag

SEQ ID NO: 232056 - DNA, 162 bp, Klebsiella pneumoniae
atgttcggtatattcaagtttaggactgagtatcgttatatcggtaacttcaggatttctgacaatataaaaacgattgccgtaatcaattattgtcaccaattcattcatatcatgcggatctttatcggtagccatctgaatttcagccgaacaagctaa

SEQ ID NO: 232057 - DNA, 573 bp, Klebsiella pneumoniae
atgagtcgcatttttctgtactgtcgtgtgagcacttctgagcaaactgtagacaaccaacttctcgccctttctctgcgaggatattgcgtaccaccggccagagtaatcgccgaaacgatcagcggtagtgtgtctgctatggaacgagcaggattcaaaaacctcgtacaaaataaacttgaagccggagattcactagtggtactgaaacttgatcgactcggaagggatatgatcgatgttcttagtactgtggatatgcttcgagctaaaggtatagttgttaaatccttggacttggatggtgtggatctcaccagttcggccggtcgatttcagatgtcagtattggcagcggtagcaaactttgaaaaggaccgtatacgcgaacgtactatggatggcttagttaaggccaaatcagttgggaaaaaacttgggcgtcctaacgctgtcagtactgagcgtattcaggaatgtaaaagtgagggtttgtcccagtctatggcagcaaaaaaactggatgtctccatcgctacgataaaaaggtactggaattttgccaaatga

SEQ ID NO: 232058 - DNA, 549 bp, Klebsiella pneumoniae
atggggttatttgacttgttcattaaaaaaaataatggcagcgaaaataaaagagttaattacaacggtagaatgaggctagatgatgccgaagttgatatcatgtttattgtgaaggatgaaagtattatgtatgtcaacaattatgttgatgagctttatatagtcgataaagataatgatatgaagctagatggtagagttgttaattttatcttcaagagcggaaatgaggtgattgagatattcgttgcatttgatgatcaagattcttacatgatgtttactgtgggagctggtcgtgatgaaagattgaattatgtagcctcggagattttcaaattcatggctaaaaacaacattaataatgttttttcatcaactggaaaatattcatctcaatactactatacatttcacttatataagaaagacaataagcacttcatggttaataatggccaaacacaggcttatttgttcgacggtgatgtatataaaaataagaatgttggtattattatgtctgagttttggggcgaggtataa

SEQ ID NO: 232059 - DNA, 750 bp, Klebsiella pneumoniae
atgtctgatagtttgtcagagaaaatacaacagtatatggtaagagtatcttcagattttgaaaaatttgaagactactgtgtagtagttgcttacattagcaatgtaaataaaaaaaatccttgggtgtataaattattaaaaaaaacttactttaaatatttaaacataaaatcattaagttcccctgattttaatggtaccgagttatggcattttgctaaaggatactgctcttgtttattagatcaaggcatcagcgaacatgacttaagtattataacttttgaagggattaagtacttgagtgaaaattcagaagatattttctctatctatcaacattgcattgctgaagaattacaaaattctgaaagtgattatatctatgatgtttgtgatcagatctttaatttaattaacaataaaattaagaatgcagagactgcttatcagttcatcttagaagagttagaagctgcatccttaggtaatgacgaggcacaagaatttgtgtccaaaaatgcttttagcattactgaatttgaagctgctatgagtaattcgtctcaagatgtcgatggcccggacgggccacaacaatcgctaacaagagctataatgcatttgccagcaaatatgattacaaagagtaaagttagaataattattgttcaaaaaattatagattactggtactcctcagatgacgcagatcatatagatttacatcatttttttaattgttaa

SEQ ID NO: 232060 - DNA, 555 bp, Klebsiella pneumoniae
atgacccaggctatcggaattttagaactgaccagcatcgccagggggatggagctgggtgacgtcatgctgaaaagcgcgaacgtacagctcctgctctgcagaaccctttgccccgggaaattcctgctgatgctcggcggcgacgtcggcgccgtgcagcaggcaatcgccgccggcaccgcgcgcgctggggagatgctggtggacagcctggtgctggccaacattcaccccagcgtactaccggcgatcagcggtctcaacgtggtcgggcagcggcaggcggcggggatcgtcgaaacctggagcgtggcggcgtgcatcagcgccgccgaccacgcggtgaaagcggccaacgtcaccctggtgcgggtccatatggcgtttggtatcggcggcaaatgctacatggtggtggcgggtgatatcgccgatgtcgacaacgccgtcacggtggccagcgacagcgcaggcgagaaaggattactggttcaccgggcagtgatcccgcgaccgcacgatgcgctgtggcaacagctgatggagggataa

SEQ ID NO: 232061 - DNA, 459 bp, Klebsiella pneumoniae
gtggagaaagaagggaaatccgcccagcagctcagccagctgctgaataatgaatccgggctgctgggcgtctccggcgtgtcctctgattaccgcgacgtcgaacaggcagccgacgccggcaacgaacgggcggctctggcgctgtcgctgtttgccgaacgcattcgcgcgactatcggcagctatatcatgcagatgggaggtctggacgcgctgatctttaccggcggcataggcgagaattccgcccgggcgcgggcggcgatctgccgcaatttgcattttctcggcctcgcgctggacgacgagaaaaaccagcggagcgcgacctttattcaggcggataatgcgctggtcaaagtggcggtgatcaacaccaatgaagagcttatgattgcccgcgacgtcatgcgtcttgcattgccgcaggcgcgcgagctggcggtgtcggcataa

SEQ ID NO: 232062 - DNA, 486 bp, Klebsiella pneumoniae
atgggtgcccgcggccgggccggtgccgccgccgaccatggtggtcacgccggagaccagcgcctcttccgcctgctgcggacagatccagtgaatatgggtatcgatcccgccggcggtgacaatttttccttcggcggcaatcacttccgtcgcggcgccgatggggatggtgacgttgggctggatgtcggggttaccggctttgccgatggcgaagatccggccgtccttcacgccgatatcggccttaacgatcccccagtgatcgacgatcaacgcgttggtgagcaccaggtcgacacagtcggcggccagcatctgcccctggcccatgccgtcgcggatcactttgccgccgccgaatttgacctcttccccgtaggtggtcaaatcgtcctccacctcgatccacagctcggtatccgccaggcgcaccttgtcgccgacggtggggccgaacatatcggcataggcctggcgtga

SEQ ID NO: 232063 - DNA, 561 bp, Klebsiella pneumoniae
gtgtgcgatgccgtgggtcagcgccgggttgatggtgtatttggcgatgtagcgcttcacgcggaagttgtcgttatccccggtctcctccgccagcgctccgcgctgcaccttcatgcgatgcgccacctgccaggtgcggagaatcacttccccgacgcggcccatggcctgcgaatcggaggaggtgagcgagaaggcgccgagatcgtgcagcacgtcttccgcagcgatggtttcccggcgaatgcgcgactcggcaaaggccacgtcctcagcgatgtccgggtccagatggtggcagaccatcagcatatcgagatgttcatcgatggtgttgagggtgtagggcagcgttgggttggtggacgacggcaaaatgttcgggtgggcgcaggcggtgatgatgtccggcgcatggccgccgccggccccttcggtatggaaggtgtggatggtgcgcccgccgatggcggcgagggtgtcttccacaaatccggattcattgagggtgtcgctgtgcagggcaacctggatgtccatttcatcggcgacggttaa

SEQ ID NO: 232064 - DNA, 171 bp, Klebsiella pneumoniae
gtggcggtggggcgtcttggggcgatgagcggcccgctgctggccggcaagatgctggccctcggcaccggcaccgtcggggtgatggcggcctcggcgccgggcattgtgctggccggcgtggcggtgttctggctgatgcatcgccagcagcgcgcggccatggtctga

SEQ ID NO: 232065 - DNA, 1299 bp, Klebsiella pneumoniae
atgacagaaagtagcattaccgaacggggcgcgccggaactggccgatacccgtcgtcgtatttgggcaattgttggcgcttcctcggggaatctggttgaatggtttgatttttacgtttactcattctgctcgctctatttcgcgcacatcttctttccatccggaaataccaccacccaactgctgcaaacggcaggcgtatttgccgccggatttctgatgcgtcctatcggtggatggctgtttggtcggatcgctgaccgccggggacgtaaaacgtccatgcttatctcggtctgcatgatgtgctttggctcactggtgattgcctgtctgccgggttatgcggtgatcggcacctgggccccggcacttctgctgctggcgcgtctgttccaggggctgtctgttggcggagaatacggcaccagtgcgacctatatgagtgaagtcgcggtggagggtaagaaaggcttctatgcctccttccagtacgttacgctgattggtggtcaactgctggctgtattagtggttgtggcgctccagcaggtgcttagcgatgaagatctccatgcctggggatggcgtattccttttgccctcggggcggtactggctatcgtcgcgctgtggctgcgtcgccagctggacgaaacctcgaagcaagagacccgggcgctgaaagaggctggctcatttaaagggttgtggcgcaatcgccgggcctttgcgatggtgttaggctttaccgccgccggatcgctgaccttctacaccttcaccacctatatgcaaaagtatctggtcaacacggcgggcatgacggccagcaccgccagcgtgatcatgaccgcggcgctgttcgtttatatgctggttcagccgctattcggcgccttctcggataaagttggccgccggacctccatgctgtgctttggcgtgctggcgacgttatttaccgtgcctattctcagcgccttgcaaaaagtgagctcaccctatgccgccttcggcctggtgatctgcgccttactgattgtcagtttctatacctcgatcagcggcatcctgaaagcagagatgttcccggctcaggttcgcgcgcttggggtagggttgtcctatgccgtcgcgaacgcattgttcggcggctctgcggagtacgtcgcgctgtcgcttaagtcggcagggatagagcacgcgttctactggtatgtgacggtgatggccgccattgccttccttgtctccctgatgttgcatcgcaaagggaaggggttgcgtctgtaa

SEQ ID NO: 232066 - DNA, 201 bp, Klebsiella pneumoniae; identical to SEQ ID NO: 112537

SEQ ID NO: 232067 - DNA, 1233 bp, Klebsiella pneumoniae; identical to SEQ ID NO: 112536

SEQ ID NO: 232068 - DNA, 237 bp, Klebsiella pneumoniae
atgatgttttcgctcagctatgagcaaatgacgcagatggcagaagaggaaataaagcaatgcgattttcgcagggatggcacccattatgtctgggaagtgaacaaggctcatgacatcctccgcttctggtatctcctggcgctgcgcggacacacgggcctggccaccacgcgggtcgaagcagactataaacggttaaaaacgctcatttctcagaggaacgagggacaatga

SEQ ID NO: 232069 - DNA, 408 bp, Klebsiella pneumoniae; identical to SEQ ID NO: 182227

SEQ ID NO: 232070 - DNA, 258 bp, Klebsiella pneumoniae
atgacgcccgacgagatttggctgcggctgatgaaggtcagtagcttgtatggcgacaggatggtagaggtcgctcagcgcttatgcgcagccgccagcgttgatcgtgaagcgctgcatgccgtcgggatgaccgcggcgcaggcaaagttatttttccggcttgacgagcatgagcttgacgagacgcgcgctggctggaacaaccggatcatcatctgttacggggtgacgatccgcgctatccattgcggttaa

SEQ ID NO: 232071 - DNA, 1449 bp, Klebsiella pneumoniae
gtgccttgcagcgctgcggccactacacgggaagctggcgcgtctggcacgctgaggcgcgcctcaccacgcaagcgtaccgagccatcggactgcgcttgcgcagggaaccacacgacagcgggaacgatctgtccgggcagagagtacgtagcgagcctgtccaactgttcgaccccattctggagcacgcatataaccgtctccgggccagtcaacgccctgagccattctgctgccgcgtcgatttgtgtggacttgactgccagaaagataagatcaaccgtgcgagtgatttgtgccggattcgtctgtaccggaccgggtacggtgataaagcggttgccatcttgcaaggtcaggctatcgcggggagtacgtccacacagcaatggtgtgcggccgacttcgtgtaacgccgccgcgactgttgtgccgatggcacctggacctaaaacagcaacaactgtattgatttcagtgttcatgaatgcggactccttgcaacagaatctaattacgtggtggttgtgcccttcccaaaggacatgtaatatattacatatgaataaagaaaatggtaatagaatttcagagggtgagcagcggttacagcaatggcttggcagcattcacgcccgaagcggcgacctcgctgcaagtgaggctaaagttgtcgatctcctgcttgtcgatcctttatttgtcggtacaagcacggcagcacaggttgccacccgtgctggtgtatcaccgccgacagtaatacgcgctgcacgagcgatcgggttcaccgggttcactgaacttaagatagagattgcccgggctcgtggcactgcccaattctttgccccgcctgaagttcttacagcggatgcgacgctggcatcagtgctggaaacatcaattcgtgctggtgtagacgcactgactgcgctcagcggtgctatcgaaatctccgcacttgatgaggcggtcgatttaatccagagcgcacgccaggtatttgcatttggtgctggtccctctgcgacggttgccgctgatgcggtctttcgtttgcggacggcgggtgtgataaccgtcagtatccaggattatttatcagcgatgattgctgctcgtctactcggtccaggcgatgtcatcatcgtcgtcagttcaacagggcgcacatcatccacactctccatcgctgatgcagcatcctcggcaggagcatcgcttattgcaataactaaccagtacgataccccactggcgacactcgccaacgtttcgctcgttgttggcggaatgccactcccggcacagatggccgctgccgggagtcgactggcccagctcgtcgttattgatacgctggtcgctgctctcactctgcgggataaagaacaaagtcgccgggctgaacgggcgggtattgatttgcccgatatgtcctga

SEQ ID NO: 232072 - DNA, 2163 bp, Klebsiella pneumoniae
atggcatcggtaacgaataacaaacaaacacctaccgaatcggatgatatcgatttaggtaaaattgtcggtgagttaatagaccatcgcaagctaattattgctatcacaacagcttttacggttatagcagtgctctatgcattactagcgaccccaatatatcaatcaacagcactaattcaggttgagcaaaaacaaggtaacgccattttagatagtctgagtcagatgcttcctgatagccaaccacagtcagcgcctgaaatagcattaattcagtctcgaatgatattagggaaaactgtagatgatctaaatttacaagcagaaatcgagccaaagtatttcccgatatttggacgaggtttggcaagattgctgggtaaagagcccgggactatatcagtcccaagattctatttagatactggaagtaatgatgtaccctctgaggttactttaactatcttgggtgagaataattttgaaattgagggggaagggttttctttaaaaggtaaaaagggtgttctgttggaagataagggagtttcaattctcgtagactctatcgatgcccaacctggaagtcaattcaaaataacctatataagtcgtttgaaagctattagcaacttgttagagtcattaaatgtagcagaccaagggaaagatactggtatgttaaatttgacttttacaggcgataatccgactttaatatcacaagttttaagtagcattactcagaactatcttgcgcaaaatgttgcaagacaagcagctcaagatgcaaaaagtcttgagtttctgaatgaacaattaccaaaggtaagaactgatttagatgcagctgaggataagttaaatagctatcgtaagcaaaaagactctgttgatttaacaatggaggctaaatctgttttggatcagatagtaaacgttgataatcaacttaatgaacttactttcagagaagccgagatttctcagctatatacgaaagaacatccaacttataaagcgttaatggagaaaagacaaacattacaaacggagaggaataaattaaacaagaaagttagctcaatgccctcgactcaacaagaggttttgagattaagcagagatgttgagtccggtagggctgtgtatttgcaattgctgagccgacagcaagagctaaatattgccaaatctagtgccataggtaacgtacgtattattgataatgcaattactgaaccgaaaccggtaaaacctaaaaaaattcttgtgattgctttaggtattatcatcgggttattcttatctgtaggttttgttttcgtcagagtattcttgcggagaggtatcgagtcccctgagcagctagaagaaatgggaatcaatgtatacgcgagcatccctgtatcagaatggcttactaaaaacactaataaaaataaaagacaaaaaaatgaatctgatacattgttagctgttgaaaacccagcagatttggctgttgaagctatcagaagtttaagaactagtcttcattttgcaatgatggagtcgaaaaataacatattaatgatttctggagctagtccaaatgcgggcaaaacattcgtaagtacgaatttagccgctacaatcgcgatgacaggaaagaaagttctgtttatcgactctgatctccgaaaaggatacgttcacaaaatgttgggttcggaaaatgtcaaaggtttatctgatattttatctggccaagcgaaagttgaaagtattatcgaaagagtcagtggggggggatttgattatattggtcgtggacaaacaccaccaaatcctgcagagttgctgatgcatcctcgattcaaggaactattatcttgggcatcgcagaactatgaattagtaattgtcgatacgcctccaattttggctgttaccgatgcggcaataatcgggcaatatgctggaacaactctacttgtagctcgttttgaagcaaatacagctaaagaaattgctgtaagtattaaacgcttcgaacaaacaggcgtagttattaaagggtgtatcttgaatggtgtaatgaaaaaagcgagtagctattatagctatggctatagccaatatggctactcatatacagataataaatctaaataa

SEQ ID NO: 232073 - DNA, 2109 bp, Klebsiella pneumoniae
atgaaaagtgaagttgtcagtgtattaaaaaacaaacttgatttaggtttgaaatcacgttttcctatgatccatcaaacggagtcttcggaatgtggattggcatgcctggcaatgatatgtggttattatggaaagaatattgatatctttacgctaagacaaaaattcaatctttcgagcagaggaactgatttagcaagtttaaatgatattgctgttaagatgcatatgtctacgagagctgtgtccgtagagctggatgagttacattcagtgaagcttccttgcatattacactgggattttaatcattttgttgtattaacaaaaattaagaatggaaaattcacaattcatgacccatcagtcgggattgtgaaggttgctaagagtgaactctcaaaaaaattcacaggtattattctggaaatatggcctgacaacaattttttaaaagaaaacgtaaaaaataaaatcagccttagagccatgcttgaaaatacccatggtttatacagtgcactgacgaaaatatttttcctgtctatcattattgaaagtataaacttagtgatgcctgttgcaacccaactggtcatggatcatgccataccggcaaatgactccggtctattaacattaatttgtttcggccttgttttctttgtggcactcagaaccattactggtcttattcgctcatggacagtactgattatgtcatcatttattaatgcccaatggcaaaagggattactgcagcatttactaaaattgcctctagagtattttgaacgccgaaaatttggtgatatacagagccgatttggttcactgaacacccttcaggagacgtttacaaccagtattgtcggtgcaataattgactccattatgatcatcggattattgattatgttggtactctatggcgggtggcttacctggtttgttatcctttttacctgtctatatgtatttatccgggtactaacctacaacagatatcgtcagttatctgaagagtccttaataaaggatgcaagagctaattccttctttatggagacactttatggtattgccactgtaaaggtacaggggctgaataaacggagagaggaaaactggtttaatcttgaagttgactcgattaataccggaataaaagtatccagattaaacctgttctttggaggcattaatacactgattgcgacgatggagcagatactcatcctctggcttggagccagtttagtgatatcgggaaatatgacaattggcatgtttgttgcttttagttcctatcgaggtcagttttctgatcgaattgcatcatttatagattttttactcagacttcagatcatgagccttcataacgaaagggtttcggatatagcacttactgaagtttccccatttaaagatgatattccggtaaaaaatgacatgtgccctgtctcactgtcggcaaagaatatcagttataaatatgatagttatgcatcatatactctaagacatctaaatatagagatacaacctggtgagcatgtagcaattacaggtgcttccgggacagggaaaacgacgctattgaaggtactgtgcggattattcccggcaagtgaaggaaatatacttgtagatggtattgacataaaagaattgggtattaacaactatcaaaaattaatcgcctgcgttttacaggatgacaggcttttctccggaacattaagggataatatctgttccttttctactcaaattgatgataactggctgattgagtgtgccagatttgcacagatacacgatgatatagaaagaatgccgatgggttatgatacattaatcggagagctgggtgaaggtttatcaggtggacaaaaacagcgtatttttatcgcaagggcaatttataaaaaaccatccattctcttcatggatgaagcaaccagttctctggataatacaaatgaacaatacatcaacgatgcgataaaatcgctgaatatcacacgcattgtgatcgcgcacagaaaatccactattaactcagctgatcgcatcatcactttacaggaaaatttataa

SEQ ID NO: 232074 - DNA, 2424 bp, Klebsiella pneumoniae
atggatcatagtgtacataacaagctcatctcatttatttggaacattgccgacgactgtttacgtgatgtgtacgttcgcggtaagtaccgcgatgtgattttacctatggtggtattacgacgtttagatacgttacttgaacccaccaaagaagccgtgcttgaagaggtcaagttccaaaaagaagagatgcaagccacggagcttgatgatgaaccattgaaggcggctagtggttatgttttttacaatacatctaaatggaccctgaaatccctgttcaacaccgcaacgaataaccaacagatattactcgccaactttgaagagtacctgcttggctttagcgataatgttaaagaaatcattgaatgctttaacctcaagtcgcaaattcgtcacatggcctcaaagcaagtccttcttgatgtcgtcgaaaagtttgtttccccttacatcaacttaactcatgaaacggtcgaagacccagatggcaacaagatgccagcccttactaacctgggtatggggtacgtgttcgaagagttgatccgtaagttcaacgaggagaataacgaagaagccggtgagcactttacacctagggaagtgattgagctgatgacacacttggtttttgacccagtgaaagagcagctaccattgaccatgaccgtttacgaccctgcgtgtggtagcggtggtatgctcactgaatctcaaaacttcattgaagagaattacccgaacgacagccgagatatttacctttacggcaaagagatcaatgacgagacctacgcgatttgtaaatcggacatgatgatcaaaggcaacaaccctgagaacatcaaagtaggctcaaccttgtctaccgacgagtttgcggcttcacgctttgactttatgttgtctaacccgccatacggtaagagttgggcgtctgaacagaagtacattaaagacggcagtgatgtgattgacccgcgttttaaggttagcctgaaagactattggggaaatctcgaagtggtggatgccacgccacgttcgagtgatggccagctgcttttcttaatggagatggtcaacaagatgaaagatccgagcgtaagtccattaggcagccggattgcctctgttcataacggctcatcgctctttaccggtgatgcgggcggtggcgaaagtaatattcgtcgcttcatcattgaaaacgacatgctagatgccatcgttcagttacctaataacctgttctataacactggcattaccacttacatttgggtgttgaacaacaataaacctgaggcgcgtaaaggtaaggtgcaattaattgatgccagcttgctctaccgtaagttgcgcaagaacttaggtaacaaaaactgcgaatttgcgcctgagcacatcacggaaattaccgatacttacctcgcgtgtaaggatgttgaaagagtactggatgcaaacaatgatcctgttggcatcgccagtaaggtattcagcaatgacgattttggctactacaaagtcactatcgagcgcccagatcgccgcaaagccaagtttactcaagatgccatagccccactgcgttttgataagcaacttagtgaagtgatggagtacgtgtacgcagagcacggcgaacgtgtttacgaaaaaactggctacgggtcagatcagaaaaagagcttcttaaaatccatcgagaaagacattctttcttggtgtgaagataacgacatcagtctcaatgctaaggctaaggccaaactgcttgatgtgaaacactggctggcgctaaaagcattgcttgaaactgcacaaacgctgatggctgacatcggtagcattgaatttgatgacttcaatagctttaaaacccaagttgataaatcgctaaaagcccatgctattaagctttcagcacctgagaaaaatgccattcttcacgcggtgagctggtatgacgaaaccgccaagaaagtggttaaaaaggtagttaaattaacgggtgataaattaaacgacctgctggagcgctatgagtgtgaagtcgctgacttgccagattttggttattaccccgttccttcagcagaaggcggtaaaaaaggcgagtatatcacttacgagaccaattcagacctgcgagatacagaatctgttccattaaagcaaagcatttaccagtacttcctagatgaagtgaagcctcatgtcgatgaagcatggataaacctagatacggtaaaaattggctatgaaatcagcttcaataagtatttctaccgtcataaaccgctgcgtagtttagaagaggtcgcaaccgacatcatcaacctagaacaaaaagccgaaggtttgattgcgcagattcttggtgcggaagtaaaaaaggttcaggggtaa

SEQ ID NO: 232075 - DNA, 1350 bp, Klebsiella pneumoniae
atgatgaagatttctgaaatgccgaaatatgaggcttataaagattcaggtgttgaatggataggggatattcctgcgtcttggagcttattagctaataagtacatctttcgcttgaagaaaaaacaggttggaaaacgctcaagcgaatatgatttgctatcgcttactctcagaggtgtgattaagcgtgatatggaaaacccagagggtaagttcccggcagagttcgatacttatcaagaagtgcagtgtggagatttcattttctgcttgttcgacgtggaagaaacacccagaactgttgggttgtcgccatttaatgggatgattactggtgcatataccgtttttgaactaaatgacaattttgataataggtttttatactatttttatatgaaccttgatgcaaaaaagatgcttaaaccgctttatcgtggcctgagaaatacaattcctaaagattcatttctgagttttaagacgtttgttcctccccatgagcaacaaacccgtatcgccaactatctcgacaagaaaaccgctctaatcgacgaagcgatttcgatcaaagaaaagcaaattagcctactcaaagagcgtaagcagatcatcatccaacaggcggtgacccaagggcttgatcccaatgtgccaatgaaagactccggtgtggattggattggcaagattccagcgcattgggaatgtttaaactttcgatatctaattgatgtgttgactgattatacagcaaacggttcttttgctgaccttgcaaagaacgttacgtatctagatgaaccttcatattctagactagtacgattgacggatcttaggaagaatttattgaatgatggtgtgtacttaagcgaaaagtcgcacaaatatttgtcaaagtcagaactattgggaggtgaattattgatggcaaacgttggggcatacgctggtttagcgtggataatgccaaagatacaaatgcccgctacccttgccccgaatatgctcatgcttaagctcaagatagaaaaaattagagttgaatatgtttcattgttattaaatagttcgaaatactggggttatatttccacgattgctcagtccgcagctcagccaaagctaaacaaagaaaatgttcgtagcttgcctatagttttaccgcccatagatgaacagtgtgaaattcataaaagtattatgaaaagctcacatgctattgaggaggtaatacgagaacaaaataatcaaatcgaaaaactcaaagaatacaaaactaccctaatcaacagcgccgtgacaggaaaaatcaagatcaccccagaaatggttgagcaatag

SEQ ID NO: 232076 - DNA, 1164 bp, Klebsiella pneumoniae
atgttcacggtaaatcatcagaccaacaggattagtccggttaagacaaagagattcagtgagttgggctttactgagcgcaaaaatcttcaggaatggttggcacacgagccttccgcactgggtgaagagctgctgattattcaaaaagagttcgatggctttgatgacacccgtgaacgcttagatttactggcactggataaagatggcaacttggtcattattgaaaacaagctggacgacagtggccgcgatgtggtgtggcaggcgcttaaatatgcctcctactgcgcaagtttaaccaaagcgcaaatcgttgaaatttaccagcagtacttagaccgctatgagcttgcaacaggagaggttgacttgtttaatacccctgcaagtgcctctgctagaatatgtgagtttttggatgcgcccgatctcgatgagttaaagctcaacctgggtaacagccagcgcattatgttagttgcggcaaactttcgcaaagaagtgaccagcaccgcgctgtggttattgggtcaaggcattagcattgcctgcttcaaaatcacgccttattcactgggtgaacagctactgattaatattgaccagatcattccaacgccagaagcgaaagagttgatgatcggcattaatgccaaggaagcggaagaaaaaaccaccgaagtggtactaaaaaaccgccataccgtgcgtcgcgagtactgggagcgtgccttagaggcgtttcagaaaagctcttgccaactctataacaacattagcccaagcaaagatcattggttatcagcaggctcagggctaagtggatgtccgtataacctgatatttctgcaaaaagagcttcgagtagagctttggatcagtcgtggggttaccgaagagaataaatacctttttgatttgttgagtcagtccaaacaagacattgagcatacttttggtgcagaacttgagtggatgaggctggatgagaagaaatcttgccgtatccagttttcgaccaaagctgacgggtttaacaaagagacttggccccaagcggttgcgtggcacttagagcagatgacaaagttagaaaaagccttgaaaggaccgctgcaaaaagcggctgaagcaatgaaacagaagaattttgattaa

SEQ ID NO: 232077 - DNA, 3018 bp, Klebsiella pneumoniae
atggtcagtcaaaccaatgaacaagcattagagtcggccattgagaaatgtctgactgggatcagtactgaagagcttaaagagggactgagtcagcagtcactgggtgctggatacttcattggtgctgctagtgactttaatatgcaatatgccattgatgaacgttttttctggcaatttctgcaaaagacacaagaagtagagttggccaaactgcaaaagaacaacccctcagattggcaacgtaagttactcgaacgatttgaccgactgattaagaagcatggcattcttcatttacttaagaaagggctaagcgtagacgatgctcatttcaatttgctctatccagcccctttggcaagtagtagtgagaaggtaaagcaaaactttgcagataacgtgtttagttgtactcgccaagtgcgctattccatggtaaatcccctacaagaaatcgacatggtattgtttatcaacggaatccccttgataacgctggagttgaagaacgcatggaccgggcaaacagcacgttatcacggccaaaagcagtatcgagatgatcgggatgcaactcagccattgctgacctttggccgctgcctagtgcatatggcggtcgataccgacgaagtgtatatgaccaccaagttatcaggtagcagtaccttcttcttgccgttcaataaaggtcacaatcttggacaaggcaacccgccgaatccatctggccataaaacggcatacctatggcaagaagtattcactaaagacagcttggcgaatattattcagcattttgtgcgtctggatgggtcaagcaaagatccattacccaagcgaaccctgttctttcctcgataccatcaattggatgtggtgagaaaattagtagaccatgccgcccagcacggtgtcggtcagacttacttaattcaacactcagccggttcaggtaagtctaactcgattacctgggcagcttatcagctaattgaaacctatcctgcttcgtctgatgtggcaggcggaaaaagcttggagcagccgttgtttgactctgtgattgtggtcaccgatagacgcctattggacaagcagctgcgggataacattaaagagttttctgaagtaaagaacattattgccccagcgaacaagtcttctgagcttaagcaggcgctggagaatggcaaaaagattattataacgacgattcagaaattcccgttcattattgatggtatcgccgatcttagtgacaagcgctttgcagtgatcatcgatgaagcacacagctcacagtctggttcggcgcatgacaatatgaaccgagcgatgggcaagtctgaagtcgaagaggcagaagatgctcaggataaaatccttcaggcgatgagatcgcgtaagatgcgcgggaatgcgtcgtacctggcatttacagcgacaccaaaaaacagcactttggagaaatttggtcaacgccaagaagatggctcttacaagccgtttcacttgtattcgatgaaacaagccattgaagaaggcttcatcttggatgtgctggcaaattatacgacgtacaaaagttattatgagattgagaaatcaatagctgataaccctgagtttgataccaaaaaggcgcagaaaaaactcagagcttatgtagaacgaagccagcaaacaattgataccaaggcagagattatgctggagcattttgttccgcatgtcgtgaatacgaaaaagctcaaaggtaaaggtaaaggaatggtggtcactcaaaatattgagacggccattcgatattacaaagcgataaggcgaatacttgaggagcaagggaacccctttaaagttgccattgctttctcaggaaccaaagaagttgatggtattgaatataccgaagcagatattaatggttttgccgagtcagataccaaagatatgtttgataccgatgagtatcgacttttagtggttgcgaacaagtatctgactgggtttgatcagcctaaactttgcgccatgtatgtagataagaagctcgccagtgtcttgtgtgttcaggcgctatctaggctcaatcgcagtgcacctaagctagggaagaaaacagaagacttgtttatcctggattttttcaactcggttgaagatattcaatcagcattcgatcctttctatacagcaacgtcattgtcccaagctacagatataaacgtactgcacgagttgaaagatgaaatggacgatgtcggtgtgtacgagtggtatgaagttgaagactttgtgacgcgttatttcaagaatgaagacgcccaaacactcagtccaatcattgatattgccgcagcgcggtttgaccatgaactagatcttgaagctgaagctaaagtggactttaagattaaagccaaacagttcgttaaaatctatgggcagatggcttctatcatgccttatgaaatggtcagctgggaaaaactgttttggttcctgaagtttttaataccgaaattgaaagtggaagatcccgatgctgatgctattgatgagcttctcgattctgtcgatctgagttcatacggtttgcaacgtgtgaagcttaaccacagcattaaacttagtgaccaagaagcggagcttgatcctcaaaatccgaacccacgtggggtgcatggcggtgaaaaagaaactgacccgctggatgaaattattcgcacatttaatgagcgatggttccagggctggagtgccacacctgaagagcaaaaggttaagttcgtgaacatcgctgaaagtatccgcaatcaccctgacttcgaatcgaaatacaaaaacaacccagatccccataatcgagatttggccttcgaaaaaatgctcaaggaaatcatgctacaacgccgtaaagatgaacttgagctctacaagttgttcgctggagattcagcatttaaagcgtcgtggacgcaaagtatgcgacgaatggttggtatgtag

SEQ ID NO: 232078 - DNA, 219 bp, Klebsiella pneumoniae
atggttgaggttgaggaaataaaaaagaaatatcccggcgcagatgcctggcaaatgggtgacagtccgcaactgggtaacgagcttgctgacctgatcaaaaaagggatcaaacggcctcttgcggatcttttgcctcttaccagcaggaagaatccgccccgagaatcgggagttataacattattcttgatggtcagaatgttccagtctgcgtga

SEQ ID NO: 232079 - DNA, 984 bp, Klebsiella pneumoniae
atgatacataatggtaataaaaaatacctaaatgaacttcttgcgaatggcgtgcctcgtgagaatataattttaattaataccaagccgctcggtttaaaaattcttggtggcgttaaactgtttttcaaatgcatgaccttagcaaaaaaatattcactaatgcattgcaatactttctttgatggtttattcgctatgccttcttttagattacaggctaaaaaaaccatctttcgtgcgcgttgtggaattgacctttctaatcatggcatcgttgataatgtaatttatcacaatgcgtctgtaatactcgctaactcagagtatgttaagacaactttttcacggataaattcaaatcttgcgaaaattgatgtcatttataatcctcttgatctcaagttttatcgagatttcaaaaatataacgaatgaaaaaaagaaaataattgctgtaattggtgctataactgaagtaaaaaatcagatggaagtacttaaagcattttcacttattgataatgaaaatatattcttacggtttataggtgaacctagaagtactgataaagatagattatacaatgatgagttaatgtcttttattaaaaaacataacttagagaataggattgagtttagtggtttcgtttcagacgtaagaacgcaacttcaagatgtggatcttgtttgtgttccatcggatcgtgaaccattaggacgggtcatttttgaaacacaattgtttaacattcctgttttagcatcaaattcaggtggtaatgaagaattaataattgatggtaaaactggatacctatatgaattaggtaatatcgaccagctgaaagaaaaaatgttaaaagtaaattctccaaatgagaaattaatcaatgatgctcaaaaattcgttctagaaagattttcaccagacaaaacttaccttgctgaatttgagctctatgaaagactttctcgataa

SEQ ID NO: 232080 - DNA, 1179 bp, Klebsiella pneumoniae
atgcagacggtaaataaaaatagcattgcgttatcacttatttatttagccattgtcataattacgttaataccctttggacgtgataatatctcagggctagaagtgtcatttcctttttttatttttgctattttttttctgcttgtaaaaaaaaccaaagtgtatgatatttcgttttttgcaaaccttttttttacattatgggctgtatgggtactttgtggtataacctacagctattttacattcccgggggttgttgatcatcaggcgtcatatctcaggtatattcggctgttggaaatgtatttgccaggatgtatgattttatctttccttggtgagctatccaattctgttcataaaaagatagtctatttacttattcttttatttgttattgttactctggaagcgacagttggttttgtatcacaaagtgatttgcttactgctactcagatgtataaataccctggcttcggttatgtatttcgtgctggaggggtcgctaaggattctagtgcttatggcagccttgttttaatattagggatcactgcattaattgagttaaggaaaattagaacaaataatagattgttgtcgtttattataatttcgtgtttattaattaatatatatatatctatgtcacgcagtttaattgtatctgttgcattatactttttgatatatatatggatggagaaaaaatctcgagttaaaacatttcttatcctaggagtagtgtctttagttatttttatgtatggacttacaaatgaatattttttatctattttaaatagattgacagggggagagcaaacagacatcagttccggacgattttcagcttgggcttctttgcttgtacttattgctgaaaatcctattttcggtgtagggtatagattaacttcagaaaaatataatttaatacctgacaatatgtttctttcattattggtagaaacgggaataattgggtttatattatacttttcatttttaacctgcttgctgatttatgttataaaatataatcgagataagttcccatttcttgtggcatatatattctctggcttttttatcgacatctcgactttctgggttagtgttcctgttttattcttcgttttagcaattcggagtgttggcaacgaatag

SEQ ID NO: 232081 - DNA, 1275 bp, Klebsiella pneumoniae
atgagagaagcaatggcactatctgaagataagtatcttatcactcgcagaaaattgctcttattatcattaccttttggttatgcaatagttaatgagagcaaagcaaattctaactcgcctataaaggtacttaatgttttaaatttcggagcaaaaggtgatggaataaatgatgattcttacgcttttcaacaagcctgtaatgctgctagttctttaggtggtgcgaaattatatataccaccagcaaaagaatattatagaattctattccctgtatatattggcgataatactgaattgttcggagaaggacaaacaacaagaatagtctttgaaaatccaatatttaataaagggcggggaggattcgttataggatcaagtttagaagctaatagacatctagcctttaagaggtattctaattttactcaagagacgacgattaatcctgatttcaaaaaccccaaacagaaacaatacttaagagataatcctcattttattcaggcggaaaatagtagtattcatgacctctatttagaggcgagatttactaatagtacaaaaaataaatggggagggtatggcatcaactttgtcaatgctcagaattgtcatgtttataatatatggggaaagggatggactcaattgatcgggatgggatcagatattccacctgagactccctcaaatcatttatgttctgccaaatatttacatgtgttggaaccggatttggtgagaacctattattctataggtttcattgcaaattctacagactgctcaatagaacacgcaatacaatacgtaccgatgacaagcggttcattaaatggaagtggtgctgctctaaatttatgcgaagattgtcttatcagtaatattacgattcctcacttggggaaaactcaaacctcagaagggattatggttaataactcttctggttgtcgcgttaataatattatgattggtgatgctaaaattgcggtttctttattctttagcgacaaatctactcttaaccctgaaaaacctaattttatagatactgtaacaggcgtaaattgtaattcagtaatttcggttttttctaaatataattatattaaaaatataacggcgaaagactgtatttataaagttgttttgaaaaatagaaacgcaactaataaccattttgatttgcctgctagtgaaattgttacagcaaacactaaagatgctggatttttattaaaaaacaacactttccaataa

SEQ ID NO: 232082 - DNA, 162 bp, Klebsiella pneumoniae
atgggtaaaaatatcaaagagcgtaatcaattagctgattttgctagggtttttatggcttttattgttgtggctatccatgttaatattttttatgaacatcctgtcctcaataaaataactgttgatggtttttttgaattgcagttccttttttcttaa

SEQ ID NO: 232083 - DNA, 1152 bp, Klebsiella pneumoniae
atgcaagaattaaatgttggtattgttgccgactggtttataacttatgccggttctgaaaaggttgtcgctgaatttctggatgtttttccagaggctgaattatattcggttgtcgacttcttatcttctgaaaataaatcccatttcaagaataagaatattactactacatttattcaaaactttccttttgctagaaagaaataccaatcatatttgccttttatgcctcttgctattgagcaactagatgtatcaaaacatgacgttattctctcaagttcccatgcagtggcgaagggggttctcacaggcccagatcagttacatataagttatattcattcaccaataagatacgcatgggatcttcagcatcagtacttacgtgaatctaacttgcacaaaggttttaaagggttgttagcgaaatggattctgcataatatacgcatttgggattgtcgcacgtctaatggtgttgatcattttattgcgaactccaaattcatagcgagaagaattaaaaaagtttatggtcgtaatgctgatgttatatatccaccagtagatgttgaaagatttacactcaatgagaacaaagaacaatattattttacagcatctagacttgttccttataaacgcatagatttgatagttgaagcatttagtcatatgaaggataaaaagctagttgttattggtgatggacctgagatgaataaaataaaagctaaagcaacatcaaatatagaaatacttggctaccaatctaatagcgttatggtcgattatatgagaaatgcgcgggcttttgttttcgccgcagaagaggattttggcataactcctgtagaagctcaatcttgcggcacgccagtaatcgcttatggaaaaggtggtgctcttgaaacgatacgacccatcggagttgaaaaagcaactggtgtctttttctataatcaagatgtcaagtcaataatcgatagcgttaatttttttgaacagcatagtgatgaaattattctctctgactgccgtctgaacgctcttaaattttctgagcaaagatttaaagaagagattaaagaatatgttatgaatcggcatgctgaatttttagcctctaaatctatcgtatattaa

SEQ ID NO: 232084 - DNA, 165 bp, Klebsiella pneumoniae
atgcatcgcctgaaggctcactcgatcaaggtttttacccccaatgacgctatgcgttatataaagaaaaggcctgaaggccttgaggggcaagggctggaaggcaaaatgcgcaacttaattgatgcaacgttgattttgttattattttttactaacttataa

SEQ ID NO: 232085 - DNA, 903 bp, Klebsiella pneumoniae
atggctagattttcatctgaaaagacggatcgagacatagctaaacgtcaggctgctaacgtaatgaaagttttgcaggttactgcttttcgctccgtcggaacagtgaggaattatcaggcagcacttacacgtattgctctctatttcagaaccaatggtggagtgaacctacaggacatcacgccggaaatggcaatccaattcctccacagtagggctgcctctgttggccaaaaaagtctggatatggaacgtcaggccctacaggcgatgatgctacacctgacacgagttttacccgatggccaaacattgagagtagttcgttctctgcatgaacagtccttgtcatccagatcctatacatcagaacaaattgaaattattgcatcccaccagtcagacaaaaaccgcttagccacgcgtattgcctataacgcaggattacgcagtcatgagctgttttctctacgtgaatggcggtatcgcgaacctagtgcccggcctgcgtcagataagaagtttatggggcggggcggcgtatcatacacagtccagggtaaaggagggctgctccgggaagtcaatatcgcatcagaattagcagaaatgctggagagcaggatattagcagaaccggtaacggtgacggaccgaggcattcattatcagcaatattatgcgatttctgcgggccaatcttggagtcgatcattcagcaatgccagcaccagagcattgggatggtcagcggggagccatggaacgcgacacagctatgcccaggaacgtatggccgagctacaagattatgggtgttcctatgacgagtcactggaagtagtgagtcaggaaatgggccattttagagcagaaatcaccaaaacttacctgaggtga

SEQ ID NO: 232086 - DNA, 1269 bp, Klebsiella pneumoniae
atgttgctgacagatgcatttatcaaaaaacagctgagagagttaaacgctaaaaaattagctggggagagtatcgaaagagagacgcgcttatccgatggtggagggctatatctattgctcaaatccagcggcagcgcttattggcgattacgttatcgcttccagggtgaggaccgtttgacctcatttggtgagtacaaatatgttcctctggctttggctcgtgaaaaacgagaagaatataaagccaatatagcaagagggattgatccacgcggaataaaagatcaggaaaatgtcttaactttccgagaagtcgccatgcagtggcacgatagtaatcgacagtggtcaccagagcatagtcggcgtattttaaaatccctgatggatgaggtttttcctcagttaggtgaaagcaatattaagtcccttaatgcgcaggagctattacagcccgtaaaaatcattcagacatcagggcgtttagaattagcttctcgtatttatcaacgtattaattctattatgacattggcggttgataatggattattagaatttaatcctattgcccataaatctggcgcattaataaagaaaaatttagtccatcgtccggctctggagttggaaaaacttcctgatctattaaggagaattgatgaatataaggggagggaattaacgaagctaacaattcaattcctgttgcatacctttgtcagatcgagcgaaatgcgttttgcgcgctgggatgaatttgatctggagaatgctgtatggaccattccctctatcagggaggaagtacccgatgttaaattttcatatcgtggttctaaaatgaaaacacctcatattgtgccattgagtgatcaggcactgaaattaattaaaagtattaaggagtttaccggaaacagaatatttgcctttaccagtgatcactatcccaaaaaaccaatgagtgaaaataccattaatcatgcattgcaaacgatgggatataacaccaaaaaagatgtttgttctcatggattccgtacgatggcctgtagtgcacttattgagtcagggaaatggagtcgggatgccattgaacgacagatgagtcatcaggaaagaaataatgttcgtgcggcttatattcataaagccgaacttattccggaaaggatgaaaatgatgcagtggtggtctgattatttagaaaaaatcagccatgaatttcatcatccgtattcttttgaaaataacaaataa

SEQ ID NO: 232087 - DNA, 186 bp, Klebsiella pneumoniae
atggaaaaattattatcatttaatcaggttatggatatcacaggttattcacgaccgcgtatttatgagttgataaagcagggtttattcccaaggaagataaaaataggggcaagtaaagtcgcttttatcgagagtgaagtaaatgactgggttcagaataaaatagccacttctttacgataa

SEQ ID NO: 232088 - DNA, 300 bp, Klebsiella pneumoniae
atgagaacactcgatgatgcgattgccgctcgctctcctgaaagccaggccagaatcaaagagatgtctgatgaaatgatcctggaggtcggcttgcagatgatgcgtgaagagctgcagctttcacagaagtatgtggcggaaatgatgggcgttagccaaccagcgatcactcagctggagcagcggggtaatgacctgaaactggctacactaaagcgctatattgaagcgatgggcggcaagcttagtctggatgttgagttacccactgggaagcgcatcgcgtttcatatctaa

SEQ ID NO: 232089 - DNA, 300 bp, Klebsiella pneumoniae
atgacaaaaccagcatcaaccgccaaaaagccacgcaagcagcacacgcctgaatttcgtcaggaagccctgaaactcgctgaacgcattggggtggccgctgccgcccgcgaacttaacctgtatgaatcacagctctacaactggcgaagcaaacagcaaaatcagcgttcttcttctgaacgcgagcaggagatgtccgctgagatcgcccgtctgaaacgtcaactggcagaacgggatgaggaactggccattctccaaaaggccgcgacatacttcgcgaagcgcctgaaatga

SEQ ID NO: 232090 - DNA, 402 bp, Klebsiella pneumoniae
atgttcgcggtaactgaccggacggaaccggcgcgaggctttcgcccgcagtccctgccgacgcaggctggccgccacggtttttatgttatacacccgtccctgagcacgaagctcatccgtcaggcgtggcgcaccatagcgttgttttgcgtcactgaatgcttcccggacgacgttatcacaaacaaggcggaactgctgacgccggtttatctgatgacgacgctgatgccagacgtaccagccgctacgggcaacctgaagtacacggcacatggctttgatactgaactcagcctgatgtttttcgatgaagacatacttcatttcaggcgcttcgcgaagtatgtcgcggccttttggagaatggccagttcctcatcccgttctgccagttga

SEQ ID NO: 232091 - DNA, 936 bp, Klebsiella pneumoniae
atgacagcacaagatttaatcaacgttctcactattcttaaggccaacgactcaaccagttttagcaagattcaacgcgcgttaaagatgagtatttcgcagttggagggcatcattgatgggttaactgcaatgggaatagtgtataaatcatcattcacttcatacagccttactgagttaacctctaaacctgttgttagtgacggtgtaagaaaggcattcgaagatatcattaccaatcgcggtacttacctgtcagaagaactactacaaaaggtaagtacaccattcatcccactgatgacgcacgaatacaaaaatgccccagttaaagtgatgatcgtggggcaagaaactctgggaatggaagatgctttcagtaccatcgtttcggtcgatgactacattaatgagagcattgaatccttcaataaattcaattttggtgaagatttaaggaatagccacttttggtatgcatttgatgaagtagtaaagtattttaacctatcatccagaaggcatgcttattggactaatcttcataagtttcaattaattgaaaatgatggagatagtgtcagcatttccaaactaccttcaaaagatatcatgacaatgattcatatgcagcgtgaattattcttggctgaaattaaagataccaagccagatatcatcatctacttcacgggtgggcaaacctgggtgttagatcattatctaaacaatggtaaaaaattagcagttaaggcaatagatgaacgctcgcatctggggattatccagacagaatttttgcattgcccaatcgctatatgtaccgaccatcctagtagaaggggatatactcaagccatcgtagatcatagagctaatctgcttaaatatgctgctgacaaatttcatgcaagtgaatcggcacgggtttaa

SEQ ID NO: 232092 - DNA, 228 bp, Klebsiella pneumoniae; identical to SEQ ID NO: 104029

SEQ ID NO: 232093 - DNA, 1371 bp, Klebsiella pneumoniae
gtgttccagatctgtagccttcgagagatgggaagtgaacgagaacgtcgtcaaacattagggcgtggtcttcgtctgtgcgttaaccaagaaggtgaacgtgttcgtgatgacagcattaacattctgactgtcgttgccagtgaaaattacgaagcctacgctgaacgattacagtctgaaattgagagcgaaacgggtatccgttttggtattatcgaaaaagatgcattcgcccatctgatcttctctgattcctcacaaggtgtaggaatcaccggttcgcatgacatctggtctgaactacagactgaaggttatctggaaaaatcgggaaaaatcactaaaaccctgaaagaaactcttctcgatggcacttttgctgttagcgaaaggttccttcctcttcaggagcaaattgaggctatcctgcgtaaatcagcagggcgactcaatataaataatgctgatgagcgtaaagtaatcaaataccggaaagaggtcttaaacagccctgaattcgaagcgttatggcagcgcatttgccaaaaaacactgtatcgtctggcatttgatgaagatgtattgatcaagtcctgtataaaatcactttctgaaatgcagcctgtagcaaaagcaatggtcagtttcagcaaagcaacaatcaaacaaagtcaatctggacttgatgtcaaagctcagtctaatgggacaacaagcgctgttatagatgttgcagagcagccactgccagatattcttggtgttctacaggaaaaaaccggactgacaagacgcagtttaagcaccatcctgaaagagagtggaagactcgctgattttgctaaaaatccacagcagtttatcagtgaagctataggccgaatcaactactgcaaacgcctgtcaattgttgatggtattaaatattatccactaaaaggagaggtgtatgcgcaaagtctctttatggataaagagctaacaggatatgcccgtaatctttttgaaacctcgtctaagtcagtttacgaatacgttcctaaagattctgaagtcgaaagccgtttcgctcaggaactcgaagaacaggatgaagttaagctttatgtgaagcttcccggttggtttaaaattccgactccactgggaacttacaatcctgactgggccttagttattgaagacaatggtgaagaacatatttactttgttgtagaaacaaaaagtaaacacattggtcttggtaatgaagaagatgcgaaaattacttgtggaacagctcatttcagtgctttaaaagaagaaaacactaatgcagcaaaatatatcagagcgacaaatcttacagaagtaataagcagcatttga

SEQ ID NO: 232094 - DNA, 546 bp, Klebsiella pneumoniae
gtgattcagttaagagaagctcagtatagtgatgccaatgcaattgcacatctgcacaccgccggatggcgagatacatataaaaatgtgatgtcttcagacttccttgaaaatcatgcgcagaatgagcgactttctcactggcagtctgttttgaaccaatgtagccgggatgtggctgtctttgtcgcagagaaagaaggtaacgtagaaggatttatatgtgtaatcctaaaggaggacgctcagtggggtagttatatagatagcctacatgtaagttctgcactacgaggccagggtgcaggaaaaaaattgctccatcatgcggcagaatgggtatgcaacgaagattctaactcaccgctttatctgtgggtttttgaagataacattagagctacccaactttacctgaagctggggggagttattacggagcatactgtatccgatatgccttcatcagataatgccccagtgttcagaatcagctggaaaaaatccgctcagcttgcgatgaacacctgctgccccatccagtaa

SEQ ID NO: 232095 - DNA, 237 bp, Klebsiella pneumoniae
atgtcatcttactttaagatgagtgtttatcgaataaaacaagtgcgcaattttacaaatctccacggtcctgagaacgtccgctcctggcacaaagcggaccgcctgaggcgtcgggaggtctactatgagcgaggagctgaagttggcactttttctcccacaaaagtgactgtagaaatagttgcatttcactttttcgtgcctttagacatcaaagcgaagccagcgttctag

SEQ ID NO: 232096 - DNA, 1056 bp, Klebsiella pneumoniae
atgcttaatctcagaattaaaaagttaatatttcatctggaatcaatagagtcaaaacatgaagggataattatatccactcttacaaataaagattctgatttgtatatagcggaacacatccaagaaatagaaaagaaaaaaataaatcaaattattgaaagcattgcaaaactaacaaaaagtacacagcaagaaataagaagccgagttttaaaaaaattctcaatcgctgaaagacagttagtatccacaacaacctatggtaaaattataggaatagatgcaaagcactgtctttttgattttcttctaaaaaaaggagttataacaaaagacaataacaagtacaagttgactgattatggtatggaatatggtgattatttacataatgaaaacggagaacagtttattggttggcataaatcaaagcttgatactataaccaaagaactttcaagcatatatttagaaaaactcacatttagactttttcatatgacgcacatatctaatctaaagggaataatggaagtcggtatattatctcatgacatggctactgattatctagatatcagtaatcataatgttaatagtagaagaaacaaaaatgacaaccctcacaaaataagcttgcataaatacgttcctttgtacttcaatcctagaaatgcaatgttatttgcatgccaaaaaaaatacggtgataatattgttattcttgaaattgataacgaagttatttccaatgattatacattattttctgaaggtaatgcagcaagaaaagactcgaaaataacaaccaacaagttggatgtcaaaaattttcaatggcatacaataaacagttccacttggacgagtgatattgatggtattaatgaagatgttaagagtctaattatgagtgaatgtttaattttaaacaaaatagaaaccaataaaattataaacattcactgccaaaatgaattgataacatctcaactaaatgaagatccaaatataagaacaaaagcaataacaaataaagatctattcttttaa

SEQ ID NO: 232097 - DNA, 1101 bp, Klebsiella pneumoniae
atgaagcctccggtcatcgagattaaaaaaaatgcagtcaaatcttctgctgttttaagagataatgcagagaagagtgttagcggttgggcagataaaattaatcgtacaggtgctgaactaagagcgctctatgagggcaaacaattaccaaagcataaagcagaaattagaaaagctaaatttaaagcgacccaggacatttcctgcctgatctgtaaaacacccttaaaatcttctaatctgaataaacattataagaaagttcatggtattgacatccaaatacaagagcttgaaatttcaggtgtgggtgaattgaaccaagaaggatttatttctcattggtccctgcccgggaccgggaagcaggcacttgagtcatcttgtgaacgtatacgaggtggtaaatttgaagagattgaggaacacttctttgaacactggttgcgcctgtttagcgaaaaaggttacaccgtggcaatggtacaagcttttaggcgtacttcggaaagtaaacacatcagtaagtcagagataaaaagttttctcgaagttgttaaaccaatcaaaaagaaaccacaaatacaggaaacaactgtttgtggtaaagaactttccgaatctgttgaactaattaaggagctacatttatcgagtgtgaaaggggtgaaaaaagctatccacaccgttggccgagatagtcaggagcaagctgcttttcgtaaagctgtcagcatgaactataatcatcgctgtgcaataactggggacgaagtagctgttgaagcttgtcatattcaaacacatgcaaattacttcgataactcactggataatggtgtcctgttatccgtaggcttacaccgcttgtttgatgcagggataatgattatttgccctgaaacaatgactatcagttttacacgtaattgcttctataaaaaatatttggatggggcattagtgaaacaagggcggatcccgattagcaagaaaaaactttccgagaagaactcaggaattaaaatttgccatgagattacgccaggcctgcgagacgttatcgcggagcaggatggtgattacactggccgctga

SEQ ID NO: 232098 - DNA, 579 bp, Klebsiella pneumoniae
atgatggataaaaagattgattttattttttaccctccaataaatgaagcctattcttccaatgatatttttgatactgaagttattggtttggaaatatcagtggaatattacgattttagtcttgataacttccagcgggaaattctgcactggtttaagccacgctttgcggcagggaaattattagcgggtatacagcagttagtgaaaaagcagatccctgagattaagccacattctattgaagtgaatgtgatacctgaggttttgccgtttgatgacgaaaatggcgatatactcagcctgctgcaaatctgcggtttaaggatgactgactggcagcgcattcgcgcggatgtagaagtgactacgttgccgctctggcatggtgaggaagaagagatcgtgcttaatttttcccccaaggttccggcggaggtgatgcagtatgtgaaacgcctgcatggctggacagcctataccggcattacggtaagtgagatagacccaggcattatcgcccatcacggacttttaccgtatatccctgaacgccgacaatcagaaaatttatag

SEQ ID NO: 232099 - DNA, 855 bp, Klebsiella pneumoniae
atggcacgggcatatagtttattcagttttggttcaaagatattcttggccaatctagttggtgtgatttcagacaactcatacgctattcttatcggtaagctattttctagtaaagaagttggtttttttacgcaagggagaaatcttcctgacttgttatctgttaatcttttcaacatattacaaggagttctttttcctgtaatgtcatctgcacaggatgacaaagaaaggttattaaggatatataagaaaagtctaaatatgactgcatttattgtcctaccatctatggttgggttagtaattattgccgagccatttgttagagtatttctgactgaaaaatggttgccgagtgtatttattattcaatggcttgcattatcaagaatgattgttccattaggtgctattaatgcaaatttgctaaattcaattggcaggtcagatttatatcttaaaattgacttaattaaacttcctcttactattctaggattactgatctcctcaccatttgggttacaatatatggtaatcagtaactttatagtagcaatattttattattttattaatacgtattatccaggcaaaatcttcaacttcgggcctatatcgcaactgctaaacatgttcccaattatagtttctacgagtgttatgtttggcgcgacatatttttggtcaatcaacaatggcttattagacattattatcaagatcgtagtcggtgcgatagtatacattatttcctgctttgttctcaaagttgaatctgttaaggaaatttggtcctatatgctaggtaaaattaagggaaaaaacaggagaagtacttgtggctaa

SEQ ID NO: 232100 - DNA, 366 bp, Klebsiella pneumoniae
ttgctggataaagagatctacgccctaaagcgctggctggccattcgcagcagctggccgcaggccgccagcgaatggctgtttctctcccgcaaaggtaatcccctttcccgccaacagttttatcagattatcgcgtcctcagggggactggcggggctgccactggagatccacccgcacatgctgcggcactcctgtggctttgcgttggcgaatatggggatcgatacccgcttgatacaggattatctcgggcatcgcaatatccgccacaccgtctggtataccgccagcaatgcgggacgcttctatggcatctgggacaatccccgtgacaaacagcgatcgtcgctgatccaatag

SEQ ID NO: 232101 - DNA, 141 bp, Klebsiella pneumoniae
atgtaccgggtaaaacagctgttcggaggttcactgacactgcgtgactacgatggtcaggttgcggaggctatggccctggtacgagcgctgaacaaaatgacgaaagcaggtatgcctgaaagcgtgcgtattgcctga

SEQ ID NO: 232102 - DNA, 981 bp, Klebsiella pneumoniae; identical to SEQ ID NO: 119795

SEQ ID NO: 232103 - DNA, 435 bp, Klebsiella pneumoniae
atggccctcgccgcctgtatgttgcatgaacctgttttgctatttctggatgagccgactgctggcgtggatcccaaggcgcggcgagagttctggcaaatgctgcaccagctctctgaccgggggatctcgatactggtgagcacgcattatatggatgaggctgagcgctgccataaggttgcctatctctcatatggtcggctgctggcgaatggcactattgcgtcgattatagcctcccagaatttgatcaccatgcgaaccagcggcgccggtctgacgctgcttgaaagccagctacagcgcttgccggatattgagcaaacggtcatttttggcaatcagctttatattacatccagagatgaagcgaagttaaaatccgcgctttttgcctttacgcaacagggttatgagggctttgttgaataa

SEQ ID NO: 232104 - DNA, 687 bp, Klebsiella pneumoniae
atgagccagcaaaaaatggttttgcagccgatattacgcctctggctggggctgtttagcggactgttgctggtgagcgccatcagcgcctttcacggtgagtactggtatttcggcgataagcaggcgttttacgcggcgaaagccggcgaggtttcggtgcatgaactctatacgccggcgaaaatcctctttgcttttatcgtcagcacgatcccgccgctgctgtggctgctgctggttaaccgtcgggcgccgcggctgctgacccacactctcccatcggtgttactcctgctggcgggtttgctgtttttcttcctgagacccgacgtgattcccggcggggaaacccctgtctatcgctacggcgagcgggagcgctactaccagacgatacgctggcagaaaccggagcctggcgcgtggcggggtacccgctctgagtacaacgtgtatatcgaatatcgtgatcccaggggatatcgcaaagtcgacaatattaaaaacgcctatacctgtgaaacccaccgggagtctcgcttttttaccttaacgaccgaagaggattggtatccggattcgtatccgaatattctcgaggctccctgccaggcgataaaggatccccaggcgatgacggaatatacccgcgaccacgcccgctggtttcccattacgttttag

SEQ ID NO: 232105 - DNA, 2292 bp, Klebsiella pneumoniae
atggcaattactgatacccaacaatctgcgcagtttgcggccagtgcagcggttagcgccgcagaagcaaaacagtatgctcttagcattgaaaaaccgatcattgatattgccgaatccgtatccgaagccaaggatgctgcagtagttgcggggttggcgagagatgaggctaaggacatcgcatctggattatcagcaagcattgactttgagcttgccgcaaaagaggctgagtttgaatctcagatgcaggggcaaagaaccgcattcgaggtctctcagcaagacaaagaaagtgattttttgtcatctcagagccagagggaggctgattttgtcgagtcgcagaccgacagggaaaacagattccagacgtttcttgacagctctggctatgttttccttggtgattacgaaaatggcccgtttcagttcagcgcacgcaatcagtacatccgctataacaaccagtattaccgcctgaatgctgctactgacgtcggctttacgaccaccggaaccgatgcaaccagctttgtgaacgacgttactcacttcgttctgatggatggtgacacgcttcgccaaaacctgggttcaggcgaaggctttgctttggtggggcaggtatcatcatttactgctctgcgctctgttgttccttcatatgaagggcaaagtattttattgcgtgctcatcccgtcgggtgggcggctatgtcacatggacccgctggtggcggagaatttattgccagaaaaggtgcagccgtagatgacggtggctatatttgtgtacctacaggtcagacagagtattactggcaacgcatcccaaaaaatcccggcaaagtttgtgcgacggagttcggtctttatgatggtgcagttcttgacgacatctgggccagggcaattaactattgcattaagaactccattggttacctctcaaccccgtcactgggtcctgccgggtatacgttagttggtgggttggagttcattaactcaacaaactgtctcattattgaaggtccgggaatggcgaccaagggaaccggcccggtaataacccacaccggcgcaaatattgggattaccttcaaacgtaactcacaagcgcagagtctgtttaatgcggtcattcttaaaaatttcacagtagcggggaatgctctcgctactgcgtttgtcaggttttcggatttttatggtgggtcagtatttgactccgtagctcgagattacactgctggaacgattatagatgtatacaacgacaagggctggactgaggttatcagggtagataatgtcgtcgtcaggacgtcacagcgtgggatctggttccactcaaaccctgcatctactgacgatcaaacgctttcgttttatggcgccagcatttccaactttggcttccagcacggaatcactgcggcgtcatatggcatctatgtcggtgacggctcacgcgcagataatttatataactgtgatatcgacatgatggggtggtgggaggtcggcggtaacagcacagctctttatgtggctgataaagcgcgcgttgatggttttgccaacttccgatacgacggttttgccgcaagcccaattacatcaagctctcaaccatgccgtcttgtgaggaaggctggtctgacaggctacattaagctgaattgtaaaaattacaagcaccaggctggacttggattaactgctggagtcactcagttaacaatccgtccatggttagccattgctgaagccaccgccctttccggatctggaactccccaccccacattacctgcagagagtataatcagcgttcctggcatgaagtgcaaactagtcggaacattgtttaaagggcaaaattccgtagtatctgtggtaggactccctgcatggcaccgatataaaatcacgctgcgatgcggattgtcatcgacggccgaccagcaatacattttaaacattcccacacaaaataatggcggtatcacaacccggaccgattctgtcccaaaagcaacgactaataccaatacaaccacaacgattaatgggtcgaccgcaacaagcgcatcaacgtcaacaacggtaaattcgaacaaaaattttgatccgttctatatcaccaatgccgggaaccttccggacaacacctatagcgctacaaatacgatgagttttgatattcatcttgatggtacgcagtctaacgtcgttaatgacgagtatccggtttcgattgaaatagaagctatcgattga

SEQ ID NO: 232106 - DNA, 975 bp, Klebsiella pneumoniae
atgacaagtatagcaattcttgaagcagttaacacctcttacgtgccgttcaacggtcagcaagtgataactgcagttgctgctggtgtgacttacgtggcaatgcgtcagattgtagagaatatcggaatggactggactggtcagtcggtaaagctgcgcaaaatgaaggacagattcaactgtagagatatctctatggttgccgccgacggcaagctgcgcaagcttttgtgccttccattgaaaaaactcaatggatggctgttcagtatcaacccagaaaaagtgcgtgctgatatccgcgacaaactgatcaagtaccaggaggaatgctttaccgttctgcatgactactggacgaagggggtggctgtaaaaaccgcacctgaaaccacggttgatgatcgcacgccattgcgcggaatcgtgaatcacattatgggtaagtacggtatgacgtaccaggcagtgtacaaactggtgcataaagagtttggtgtgaagcatatcgacgagctttcaccaaggcagacagcggaggctgtggaatatcttgccaccaaggtaatcgagggtgagttcctgggtaagcagcaatcagtagcaggcccacgatatcacttcccggtggaaacggcagacccgcacaatcgcaccttcgccaatgactggatttcagctcaggtaattttggatgagaggaatcgcgcccctgagcttgaactgctggatgctctccagaaggacggttgcgacgtacagggtgcaagaatacgaattcatgcgatgtacgacatagcgaagcaattcatttatatgcagtctgaactctcagaaatgaaaaaatacctcagggtcattaacgatattgttaaaggacagacagttgagcgcggaatgaatgtctgcttcacgggcaattcaaagggccacgctattggcgggtatgcaaagcgctgcttgccaagataa

SEQ ID NO: 232107 - DNA, 177 bp, Klebsiella pneumoniae
atgaacggtcgttccatcaacgccgaactggtcaaaatagtgcaagtagcattatctgagccatcgtcagtatcaggataccgcgacgacgcagagcgccttgcagaccagcaggcagagcagtttaaaaaggttgtgtttgatacgcttaaagacatctacagcaaggagtcatag

SEQ ID NO: 232108 - DNA, 351 bp, Klebsiella pneumoniae
atgattaaaaagcccttgctattaacaattctgctaataacaacaactctttcacatgcagagacgctcgaagaattttttaataaaaataaagagcttaacggtgacattgaaattaggttagctataaaagagaaagcctctcaacttgccttatcagaagcatatgatgagggggcaagtgatctctctggtaggagtggcaggctgatgcgggatgatggcggtagttatgctagatatgcggtgaaaactcttattgatgcttgcaataacattggcccttatcaaagcatgcttgacgatcaggcgtgcaaaaggctagaaggcaaggttagagacataaaataa

SEQ ID NO: 232109 - DNA, 165 bp, Klebsiella pneumoniae
atgaaacaggttgacgaatcaaagcggtttcctcgtttaaatgggaagagtcccgaggaaatcgtagaactattcaaaagctacaactttgtcgacgatcatggacatcgactggatacgtgtcaggacttcaaagatttggttgaaatggctagtgaggcctga

SEQ ID NO: 232110 - DNA, 165 bp, Klebsiella pneumoniae
atgacagacgctgtatttctatcggtatatctcattgcggtggcctgcttcctgattagggagtgggttaagcataagaggctcagaaagaagatcggcataaagattagagccattcgatatgcggaaaaataccgaatgctcaaaagactaatgaggggttag

SEQ ID NO: 232111 - DNA, 306 bp, Klebsiella pneumoniae
atggctgagttacgcgcaggtgggctggcattagtgctggcttcggaaaaccagaatgaagttggcaaaaccgttacgttggttcgtgttgtatcaagcggggaatatcacaaattccctgacggctgcagatacaccatgatagagcctgggcagcagatatgggttgtatcaggcgacgtttcgatttacacgagcaagccatcgggaagtatgtcaattttcccagccaaaagcctgatgcccatcgacggcgacgacttcagcaatgaagacgaacatcagaaggagcgggagcatgcctaa

SEQ ID NO: 232112 - DNA, 561 bp, Klebsiella pneumoniae
atgaccagcaaatttaccagagaagaactgctcaacatcattgaaactgaccacgttcaatgcggtgaggcttcagcattggcccgcatggcgctggccgcaatggacagcgagccggttgagatgcctctcgactacctgcagggacacaaagacggcctggagtgggcctcccaactggcagaagccaatcaccctgaaacaggcgactggctttacgatgaccctatcgagctggcaaaggctattcgcaaaggtccagatattccgccagcgcagccggtagcggacagcgatccggtgattattgttggcgatgatggaggggatgcgctttcttatcgccgccttatccagtcctttgagcctggcactaagctctatcgccacgctcagccagcgctggtaattcctgatgagatgacaccagagcaggcctatgaaataggtgattaccacggagacccggtggacgtgtttgcgcgtggagctaactggatgcgtcagcatatcattgactccacattagcagccgcccggcaggaggtgaagcatggctga

SEQ ID NO: 232113 - DNA, 195 bp, Klebsiella pneumoniae
atggctgaaaaatcatctttggaacgcctgcaggaaattaatgcagacaatcaacgcagagtgacagtcagcgtcggcgttctcaaggcggcgcgtagagaaatacaggctcacgtcaagctaaacggcaagggaataatgacggatatggttctcaactccctgaatgcgattatcgaaggagccaaccaatga

SEQ ID NO: 232114 - DNA, 405 bp, Klebsiella pneumoniae
atgagcgacttcgatacttcatcaaaagttaaggctcgcaagttacatcgctgctgtgaatgttacggcgctattaatccaggcgatacctacgagaaagtttttgtcgtccaggatggcgatgctagcaacttcaagacgtgccagaaatgcacagaagcacgtgactggctgcttaacgaaactgattggcctgtcgatatcgacggcgaagggcattcgtatttcttcacgatgctgcgtgaccacctccgtgagcaaggccgtgaaggcgaccgcaaatacgcatttcgcgcatatcggcttgtcgtcctgatggataagcgccgcatgtcttatgccaacgtatacaacgcggagaccgtgaaaatccgcaattctcttgcgcaaggagtctcagcatga

SEQ ID NO: 232115 - DNA, 303 bp, Klebsiella pneumoniae
atgaaaaagaactctggcagacaggctgtaatcaacttcatcgggcagcaccctggttgctcatttcaggatatccgccacggtaccgggctagacccgtccgttgtcaattctgctttgtggcagatgaaccgcgatggacgcgttaagcgcgaaggagaatatcgtagctatcgctacacccttgcagagcagacagccgtaaccgaaagcgatccgtctgttcagtaccgccatcgtcctgacggcgcaaacccaatgaccaaactgtttaactattgcctggcgggagtaagaaaatga

SEQ ID NO: 232116 - DNA, 726 bp, Klebsiella pneumoniae
atgagcagagcagcaacagactgggcgtggggccttgaaattaaggcgtcgcaaaagctgctgatgctctctctggcagatcgtgctgacgaattgcactgctgctacccgagcatacagcgccttgtaaaagataccggaatggacaggaagaccattgggaagtggatcaatcagatgattgaagatggatttatcagtgataccggagagcgtaaaggcaagacaaaacaggttcgtgttctgcgtctcaacattgaggttaaagaagcccaaaaacggaacagtaccaaatttggtaacaataccaaaaacggacatgaaacaagcccaattttggacaataaacgatcccaaaattgggatgcagaatcagtcattgaacccaacatagaaccaactctctctgcgcgagggcagtttatcagcgaggctgcaaagcgacggatcgggatttcacccaacggggaaatacctttccctcctgccttcaagccatcggcagatcacattgcgattgcctcggagaaagggatcaacattgaaaccgaactgctgaactttcgtgattatcaccaggcccgcggcacaaagctgatcgactggaactcggcattccgggtgtggctcaggaacgcgagagttaatccgctttccgggcgccagagaagcgaacctgattccccacactggaacagccctgaaggctggaaggacttcatatga

SEQ ID NO: 232117 - DNA, 348 bp, Klebsiella pneumoniae
atgacacgtcaattttccatgcaaaagaggatttctgtttttaccagagcctctgggaagtgtgcttattgcgggcatgccctctcaatcgaaagaatgcacattgatcacattaagccaaagaaatgcggcggcaataatgatcttagcaatcttaattgctcctgcggaccatgcaatacagctaaaggtgacagggatttagaagactatcgattgcaggtaatgattaaaaaatccgcattcattgacgtaatcacctttaagcaatggcgagacctcaacgaaaggggggtgcttattaacctgcctacccacttatttcattttgaggttgagtctttatga

SEQ ID NO: 232118 - DNA, 201 bp, Klebsiella pneumoniae
atggaaacatttatgtttgttcacatcgattcatcctcagtattggccggggtatcacttgaagttattgatattaacctagaaaagccaggaacttacgacataatattaaagatatttgaagatattgacggtaaaacaggggagttgcttgacgaaaaaactagctccctaatcgccacaacaccgatgagggtttag

SEQ ID NO: 232119 - DNA, 273 bp, Klebsiella pneumoniae
atgcttgaggcgagagtagcaaagcttgaggctgatgttagttatatcagacgcgatgttgatgagttgagggttgatgtaaaaacaatcagccagaatatgactattgctattgagcgccttgattacatcagaaccgctcttgataaaaagccatcaaccgacacggtggataaaaagataacagacgccaagctatcaattttgctgggcgtgcctacgatcattgcaatcggcactggcatatacaaagtagtgcagcactatctgtga

SEQ ID NO: 232120 - DNA, 558 bp, Klebsiella pneumoniae
atggattttgaaaatgaattgaccagtaagatccttgatcccattcacggcactattcgtttgacgacactcgagattgcctttatcaatcacccccttttccagcgcttacgcaacattaaacagaactcttttttatataaggtgtttccctctgcggtgcacagccgcttcgaacactctctcggggtgctgcatttatcaagtgaaatactcaataatttacgcctgaatgcgatacggtatcaaaagaaatatgatgatggccatgtgtttggtcatatcgatcagataccaaaacacaacattcaggagttgagactcgctgccctgatgcatgacatcgggcacgggccggtatcccaccagtttgagagttttatgccttgtaagcacgaattctccgatgttctccccacagcctaccattcgatcattgatgtattaagcaagccagaacagaaagttgaacatgaacagctttcgctgttattcagcctgatgatttatcatgatctgagaaaacaaggtaagattgatgacgaaataaatatttaa

SEQ ID NO: 232121 - DNA, 162 bp, Klebsiella pneumoniae
atgaaaaaatcattggcatcaatgtgtctgagcgctgtattaacggtcgctttttcttatcacgccgtcgcggccgatcttccggaaatagaaaaatccggcaccttgaaagtggcgacggaagatgattatgcgccgtttaactttatgaataatggctag

SEQ ID NO: 232122 - DNA, 762 bp, Klebsiella pneumoniae
atgcctgagtctattgccgtaagcgtcaaaaacgtctccaaacagttcgataatgtggaagtcctgcgggatattaacctgacggtggagaaggggaccgtggtgagtattctcggctcgtccgggtcgggaaaatccaccctgctgcgctgtatgaactggctggaacagccggaccgcggtgaaattcatatcggcggtcagcggctggggattgatgaacagcgcggccgggcgatgtcgcaccgccagctggccaaaatccgcgagcgggtggggatggtctttcagagttttaacctgtggccgcatctgaccgtgcagcagaacgtcagcgaggcgctgctgcgcgttaagggcatgaaacgagacgaggcgaaggccatggccatgcagcagctggagaaagtgggcatggcgcacaaagccgatgtttacccgatcactctctccggcgggcagaagcagcgggtggcgatcgctcgttcgctggcgatgtcgccggaagttattctcttcgatgaaccgacgtcggcgctggatccggagctggttaatgaggtgttgggggtaatgaaagcccttgccgccgagggctacaccatggtggtggtgacccacgagatggattttgcccgccaggtgtccaatgaggtggtgtttctggagaagggactgctgattgagaaggcgccgccggagaagttcttcactcagcctgactccgaacgcgtcaggcagtttctgcaaagcagccgttag

SEQ ID NO: 232123 - DNA, 522 bp, Klebsiella pneumoniae
atgctaaccaccctgatttaccgcagccaggttcatcctgaccgcccgcccgtcgatctcgacgctttagtccatcgcgccagcagtaaaaatttgccccttggcatcaccggcattctgctgtttaacggcctgcagtttttccaggtcctggaagggactgaggaggcacttgagtcgctgttcagcgaaatccaaagcgacccgcgtcatcgcgacgtagtggagctgatgcgcgattactcagcctaccgacgttttcacggcaccggaatgcgcatactggatctccggctgtttgaaaccgatggcgcgctggaggaaattctgcgctttagcacgtttggggtcaccgaaccggtcaacgaccggatgttccggctgcttagcgccttcattgccgacggcggccgctattgcctgcccgagccgctgcagccctctcgctggatgatgatgcccgcgtcaggtacggccgcaccgcagcacctgcccggtcaaccttgccagtttgctctgtag

SEQ ID NO: 232124 - DNA, 696 bp, Klebsiella pneumoniae
atgttcagaaaattagcagccgaatgcttcggcaccttctggcttgtatttggcggctgcggtagcgccgtgctcgccgcggctttccccgagctgggtattggttttgccggcgtcgcgctggcatttggcttaacggtattaaccatggcgtttgcggtcggccatatttccggggggcatttcaacccggcggtcaccttaggcctgtgggccggcggccgttttccggcaaaagaggtcattggctatattatcgctcaggtggtcggcggaattattgccgcggcggtgctgtacgtggttgccagcggtaaagccggctttgatgccgccgccagcggcttcgcctccaacggctatggcgaacactccccgggcggtttctccatgctgtcggctatcgtcattgaaattgtcctgacctgcggcttcctgctggttattcatggcgcgaccgataaacatgcgccggcgggctttgcccccatcgccatcggcctggcgctgaccctcatccatttgatcagcattccagtcaccaacacctcggtcaacccggcgcgcagcaccgcggtggcaattttccagggcggctgggcgctgcagcagctgtggctgttctgggtcatgccaatcgtcggcgggatcctcggcggcgtgctgtatcgcaccctgctggaaaaacgcgattaa

SEQ ID NO: 232125 - DNA, 1590 bp, Klebsiella pneumoniae
atgcttgtatatataaattcatttaattgcattggtgatgatagcttttttagtgtaatacgttccgtatctggctggcttaataaagttgcaaaaatacgcatttcccctgaagacctcctttcaagacgtgattggaacttagaaagagtctatgtcagaacctatacagcggaaaaaatagaaccgaaaatttattcaattatgtatacacacccggatagaaatgttggcggtagacaatggattacagagatagggattaagagagaaggagtcagtacttttgtatctatattattagaaattagtgatgtaagtacaatggttgatgccagaccaatagcaacgcgtccatcacttgtttcctatctgaagaaaaactgtacttttgatcacgatgtaattggccagcgagtagattatattaaaagtcaatacggagactttcaatatttaaagcatgaaatatcaagagatgatagagtttatcctttagtttttattagcgagggagatggtggtttccctgttgtgcctgaaaagttgcaagaacaacttattggtttagcacaagttgtagcaacaagcggtgagatggattcgtgggaaatggaacgtttgttgggaaggagttattcatcctggggaggagcaattaacatcatttaccctatgaatcaaacaggttatattggtacaaaactatttcttcctaagcaactggatgaggttgccgcatcaaaaactccaattaataattatattttatcagttataactcattcgctaaacggttttaataaaaaacgtcatttatcgccagcaaacgttcgtgctaaaaggctaagcgatgataacgtagccttcaggcaaagaatgaaggatttaaaagaagggatgcaatatgaagaattacttgacactgcactattagagtttgaagaatttaagtcagccaaccaagaattagaactagattatttaaaaacaatagaagaacttgatggaaaatatgatgcattactcactgaaagaaacaaaatagagactgagttgaatcgactgaagtttgaagccaaaaattttcatagacaggcaacaacccaaaaccctgatattgatattgaccggctaatatccctagtaggcaacaaactaaccccagagtctgttttgttattattagaaatgctaattcctaacaatgttgaaatactaaaatcagctattagatctgcacaagattcagttgactttcggcatggccctaggcttgtattcttactatataaactttgcacatcatatctcattgaatatcttgaaaatggtgataacactgcgaaacaatttttgggtgacgcctattctgcaaatgaatcagaaacggttgagcgttcagcaacattatcaaaaatgagagagtttgattatgatggtaagaaagtgaaaatgtttcagcacgttagaattggaacggctcgtgcaaaaaacgaaactataagagttcatttccttgtcgataaagataaacgaaaaataattattggatattgtggtgagcatttagatgttaaatcgacatga

SEQ ID NO: 232126 - DNA, 1590 bp, Klebsiella pneumoniae
atgacgataccagccaaaatagataccactaatttactcactatacttggagtgatcgctgccgtatgggcaataattactcctaccagcagactgcgatttcgtttttgtatgactcggtgggacctactaatcattgggctgatttttatactagctaattatttggtttttgcacctgcattaagacaagttggactgtattacagtttcggaccgtggatatggggattggatagttcgagtgcagtatatctattgtttctcttggctgcctcatatcttttcattcggctaaaatcgccaacattaaatcgaggtaaaataaaactatttcttgagctaattgagagtttacatcttaccaaaaaatatgatgagttagtattgttagttgagcctcagttagacgaaataatatcccttgctaatggaaaaccgaaccttattgttcaatggattgataagctatatggcggctccgatcgaaatgcgttattgaatggagaagaacccaaagaacgaaatgtcttggtgaaaggtctatattccctactaagtcctttgcgtgaaaagctatcatcaaattatgaagccagtgataaagcccgagaggttttgctgaatatactaacttctcctgatcttacaaggcatctttcacttgcatatcctcatttttgtttgaggcttattggtgctgatgaggtcgttcgttctgatttcattgatagatttattaattcgctgcttgactcacctggtagtcgtctttatgtagaacttaaaaataaccaaaatacatgtactggaggacgtcttgcgatacctgaaaccaaccgcttgcttcactttttctttgccgactcagtgtatgcaagtaaaagtggcatatatagagctataggtgaatctgtttgctggcgtttagatgaagacagtaagttatcagaaatactaaacaagccccttggctcttaccgtgagcaaagtagatttagttgtcctattaattctggaataacaatgttcgaaattatggtgcatcaaggtattcatcaaagattgcaagatcatctttggctgcattatttcaaacactttgctgaaaaaatattatatcaaatgaaagttcagagtattgactcaatcgcagaacatcaaacaccatatcactatcttctatgtcgcctattcggtattgctatagattgggcagaacaaagttcatatataaaaacagttaataattctaaggaggatagtaggtatatccctaaggaagcgacgaaagtattaggctctatgttagagcatgttattcctagcccgaaattgaaggggtactcaaaagtatccatattacagatggttgtcacctgttacaccaggctcgaagaaaggcagattaatgatataggtgaggcattattgatatacacaacaacgggggaatttaactctacaagtttaacatatcgtaggaagcttctatcgatattcaaacgaatggacccttacttacagggaaatgcaaaaaaattcagagaaaagatagaattggctattcaaattaaacttaacaggtaa

SEQ ID NO: 232127 - DNA, 207 bp, Klebsiella pneumoniae
atggacgtctggacgtctaaatgcctaatggaggcgatttctatcgactttatgccaaatgatattcattatcatttgtgggtcctcccggagggggaggctaccacggggcggcggactcgcggaaaacggctagttttcatttttcatagtcatcatcatcatgtgcacaggttattgattttccagatgtcggattttcaatga

SEQ ID NO: 232128 - DNA, 276 bp, Klebsiella pneumoniae
atggggatactctccgaactggattctttactggaaaaaatcccactgtggaaaaggttaaaaacagtgcccgacgaagtggatcgtctcaaacagcaggtcgccgagcttgaggcatatatcaaatccagcggtggggagaaatgccccagatgctcacagatgagctatagccttgaccgaaccgtagatgacccagatttcattgggttgggagttcagagagactattacaaatgctccagctgcgggtatgaaacctttaaacagcgctga

SEQ ID NO: 232129 - DNA, 204 bp, Klebsiella pneumoniae
atgacaatcgtaaaaacccataccggcaccgttatcaccaaagacggtccgaaggtaaaaaaactgcaccagacagagcggatgtgggtcgtcggcaaaaacgaattttaccacaaagaaaccgggcgccgtcactttgcagaaagtacgcgccgccggttgctgctcgacaccatcaagcctatcgaggtgaagcatgtttaa

SEQ ID NO: 232130 - DNA, 402 bp, Klebsiella pneumoniae
atgagcatcatcaaaggccagcttattagcagtcagcgctatctcaatatgagcattgttaacaagagagcaacccggtttaaacgcttcatcgtcaatgtacatcccgttgttctgcgcggtgttcagtacaccatcctgatggacgggcatcataactatgctgcggcaaaactggctggcgtagatccagattaccgcccggtagccaagaaggtgatgaaaatcattggcggaatgtcagagcgtgagcaagaggcgctattcatcaacaacgttacagatagcgattattactacgtcgaaacaggtgaggtggtagaggaattacgactgccagatacgtcgtgcaagtttcaggctcacgctggcaatcaatggatctttggaggcgcagcatga

SEQ ID NO: 232131 - DNA, 189 bp, Klebsiella pneumoniae
atgaaaatgggtgaacacatggagccggttgtcgagctcctggaagaactgaacggcaacaacaccgacgccaaattgaaactactcgcccttgttatctcggaatacatgcttaatgcggatgttactggctttgaggtcaccgcagggaagatgaaagtttccgtagatataagcgtggaggaatag

SEQ ID NO: 232132 - DNA, 873 bp, Klebsiella pneumoniae
atgcttgatgaattatttaagtggggtttaggggttcttacatccgctggaattatggggtttattggttatgttatgcgtgatgcattggtgaagttcttaacaaaatcagtagagcataaatttgaaaagaaacttgaaacattcaaggctgatataagagatagtgagaaagagttagagcaaattaggtctttcttagtttcatccagaagggaccgtgatttggcacttcaagcgaaacgatttgaagctgcagaagcaatgttgcgagcacgtaatatgcttgctgaattttcaatgctcgtattatatatgaaaagattgaatgttgatgagcttttaaaacgaggtgatgatcccaaggctattgaatttataaatatattaattaagccatttaacatcgaagaaaaactgcgagcttacggagaactagataaggtaaaatttaatttatatataagtgataatacattgaagcaatttaatgcatatgaaaccattatgattaatgttgcaatgatgatgaaaatgcttagcatgcctctcaaggataaggattcattattaaataaaaacacaatcagcaagcccgtcattgaagccgctcctttatccaaggatgggtttgaaaaatatggcgatgaatatgctttgcattggactgattattttcatgcggagattttaaaggcgctacgtaaagaactacatggcgccggtaatatggataaagacactgagtcagcaactcgattggctttggactcaaggaatgctcatttgaaattatattcagccatgaatgaaacaggtctttcaaagacatttcttaaaccaaccgaacgagaaagtggtaaagtttcttga

SEQ ID NO: 232133 - DNA, 684 bp, Klebsiella pneumoniae
ttgacggaaaccatcggtattaactacacagacgtcggcctggtttattctttcaccgccattgtcgccgtctgcgttcagccattattcggcttcatctccgataaactggtgtatcgtaagaatctgatgtggatgctggcgattattatcacgttattcgccccttactggatttatgtctttgctcccctgttaaaaataaatgtgttcctcggcgcgctggctggcggcctttatattggcatggcctacggcgccggctgcggggtttgcgaagcctacattgataaagtcagccgcgcctccggtttcgaatttggccgggcgcggatgttcggcggcatcggcgccgcaatcggcacctttgcggcaggaaaactctacggcattgatcagaatatgattttctggttggccagcggcgcaggcgtctgcctgctggtcattgtctggaaaatgcagatcagcgcccacccgcagcagggattgctgtctggcaaagcctcgccggttaccctccgcgatgccgtctcgctgttaaaagttaaaaaattctggttcttcgccctctatgtcattggcgtcggggcggtctatgaaacctatgaccagcagttcgctatctactacagccatttttttgagagtaaagcccgggtgcagaagtcttcggttatttaa

SEQ ID NO: 232134 - DNA, 1230 bp, Klebsiella pneumoniae
atgagcgagttgagttatctggaaaaattgctggatggagttgaggttaagtggttgccattgggtcatattgcagctataaaaactggacaatctgtaaataaaaatatgatttcaaaaaatcctggtgtctatcctgttattaatagtggacgggaaccattaggttttattaatacatggaatactgacaatgacccaattggtattactaccaggggagctggtgtcggctctgtaatttggcaggaggggaaatattttaggggaaacttaaactattcaataactatagataaaaaaagtcacataaatataagatatatgtatcatgccttgcttcacatgaagaatgatatccatgagttatgtacatttgatggtattcctgctctaaatgccggtagtttaaaaaaactactcatcccaatcccctgcccggacaatccggaaaaatcccttgccatccagtctgaaatcgttcggattctggataaatttactgcacttaccgctgagcttaccgctgagcttaccgctgagcttaccgcgcgtaaaaaacagtacaactactatcgcgaccagttgctgagttttgatgagggtgaggttgagtggaagacattgggggcgataggtaaatttacttatggatatgctgccaaagcgcagatttctggtgatgctcgcttcgttagaattacagatataaatacaaatgggaaactatctccttttgaaccgatgttcgttgacatatcagctgaaaatgaaaagtacacattaaaaaagaatgatttacttatggccaggactggcgctacgtttggcaagacaatgattttcgaggaagattatccagcaatctatgctggcttcttaatcaagttaagcctggatagagacatcattgaccccaaatactattggcattttgctcaaagtgattatttttgggagcaagctaataagttagtttcaggtggcgggcaacctcagttcaatgcaaatgcacttaaacaaatcaaagtacctattccttacccaaatgaagcgggaaaatccctttcggagcaggcacgcattgtttctgtcctggataagtttgatattttagccagttcaatcaccgaaggcctgccccgcgaaatcgagctgcgccagaaacagtacgaatactatcgtgatttgctgttcagcttcccgaagcctgaaattgccagttactga

SEQ ID NO: 232135 - DNA, 468 bp, Klebsiella pneumoniae; identical to SEQ ID NO: 185229

SEQ ID NO: 232136 - DNA, 135 bp, Klebsiella pneumoniae
atgaaaagtaccacctatgcgcttattgctgtcgccgcgattgcggcatttgccctcctgcgcgaacactggtcacatgtgggtaagcgtcgtctcagcaccgtctggcagatcctgaaattcctgagaggataa

SEQ ID NO: 232137 - DNA, 1215 bp, Klebsiella pneumoniae
atgagttcagccgcgataatgcgccccccgctgaagcttcgggtgcttggtacatcggtgacgttgctagagatactgcgcgtacgagcggagcaagagctggggattaacatcgaatacctgctgcacagcgttgaggatgcgcagcgtatcgcagtcatgcagccggatagttacgatctgtacgatcagtggtttcataacatcgattttgtctggccagcccgcgctattcagcctcttgagattaaacggttgaaatactgggatgaggtcaacgagttggctaaatttggaactttaaccggtgagcttgctgacggcagcgtcccgtcccagcgcttgtacgtccagcgcgatctccatttgagcagccaaccgagcgatcgcattagcatgctgccgctgacgcataacgccgatagttttgcctatcatgtcgaccgtcttcctgatgcgctgcgcggtgaggaggagagctgggggtggcttctgcatcctgcgctcaccggggcggttgcgctgcaggaggatgcggcaatgggaggcattgatgcggccctggctatgcaggggggcgggatggcgcggttttcggatataggcaatctttcgctggaagagattgatgttctgacggaggagctgacacagctcaatcaccaggggcactttgcggcgttctggtcgactcaggagcaggcttgcgacttaatcgataaccggcacgtggaggtccagagcctgtgggcccctatctatttccgtcgccactttcaccagcggggctataaaatggcgcacccaaaagaagggtatcgcgcatggtacggcgggatgtcgttatcacgctgcgttaccggcagcataaaagatgcggcatacgaatacctcaactggtggcagtccggctggcccggcgcggtgatggcccggcagggatattacatctccaatccacagagaagtcgcgcccatctatcactggctgaatgggatttttggtatggtggaaaacctgccgctgacctgttatttgatgcgcatggcgcgccgctgattcctgtgggggagatccgtgacggcggaagttacacgcaacgtatggggcatattgcggtgtggaattcggttatggatgaacataattatctgacgaggcgttggcaggaggctatgttaaagggttatgcctctaattggatgtctggataa

SEQ ID NO: 232138 - DNA, 1023 bp, Klebsiella pneumoniae
atgtcttacgatgaaaaattacccctacatgtattgagcgggtttcttggcagcggcaaaacgacgttgcttaaaggctggctggatcagcagaatctcaacgatgtcgccttattggtcaacgagtttggcgaggtcggtatcgaccatcatctgttgaatgaagttgcatctgatacggtgctgctgccgagcggctgtgtatgctgccagattcgcggcgagctaaaggttgccctgttggatctctatgaacgccggatccgcggccttatcccggcatttcatcatgtggtgcttgagaccaccgggctggccgatcctgcccccattctttctacgctgcttcacgatcggcagctgcggaaccattttgtgcagggaacgctggttacgctcgttgatgcggaacatgctcgtcatcaggcagatagccaacccgagtggctggcgcaggttagcgcagcggataaattgctggtgagcaaaagcgatcgcgtctcgacggaagaggcggccgccctgcggaagtggctgcggcagctgaatccgctggcggaattgggggatacccggcaggcgctggatgcgcctgcgtggttattccgaagcgaagtcgttcgcggctcccccgagcagcgcgttcgctggctgggcgcttgcgcggagaagacatttacgctgatgccaaccccctacagtgaggcgcatccggcgacgcagacctgcgtaatttcgcttaaacggtcgttaaactggccggcatttgctatctggctgtcaatgctattacattgccatgggagtgcagtcctgcgggtgaaggggattttgcgcgtcagcgacagcgactcgccagtggtgatccacggtgtacagcatacgctgcatccgccggtgcatttacgtgactggccgggaacgctggaaagttcaacgctggtctttattttgcggggacttgaggccagcagtttacaacaggccttcagccgctatatgcatttattacaggagtcctga

SEQ ID NO: 232139 - DNA, 315 bp, Klebsiella pneumoniae
atgtgtggtgtttgcggtctgcttgactacggcccgcagtggagcgatccgctgcggcaggatattccccagcgccagctgcgtttgcagcagctgacgctgctcaaccggactctgaagccctggcgcctcacactgacggagtttcacggcagctggctgctggccagcccaacggggcagcaggtgctggtgtactcgcttgacgtattgtggaaagaggccgaaaaaatgctccaccacgcgatcgacccgctggatgtgggctggctggccgcgctggatgcgacggggagagatgatgtcttacgatga

SEQ ID NO: 232140 - DNA, 747 bp, Klebsiella pneumoniae
atgctactgcaaaacagacgttgcgttatcaccggggcggccagtggaataggcgaggcaatcgccatgctgtttgcctgcgaaggagcacggctggtgttgaccgaccgcgatagcgataaattgtccgccgtggttgaacgctgccgacagtcaggtgcggcatgccagggcgtcgtcgctgatgccggcgatgtcgccggggctacttcgggggttgatgcctgtcttgaatactatgaaggtattgatgtgctggtcaacaacgcgggtatgctgacccaggcgcgctgtagcgacatcacgctggagatgtgggaaacgatgatggcggtggatctgcgcagcgtgtttttggcgagccagcgtgcactaccggcgatgctggcacagagatgggggcgtatcattaatatcgcctcccaactgggcattaagggtggggctgagctgtgtcactatgcggcggcgaaggcgggagtgattggcctgacaaaatcactggcgctagaggtctcttccggcaacgtgctggtgaacgctatcgcgcctgggccgattgatacaccgctcatcgacgggattaaccaggcctggaaggcggcgaaagcggcagagctgccgttgggccgctttggacgagcggaagaggtggcgccggtggcgttactgctggccagcgaacccggcggcaacttgtttgccggccagacgctgggtcctaattctggcgatgtgatgccctaa

SEQ ID NO: 232141 - DNA, 777 bp, Klebsiella pneumoniae
atgaacatgacgatttcaagccaacctgtcgccgccatcagcggtgcagcgagcggtattggtctggcgttagcgacgctgtacgcccggcgcggcgttcgcgtgattgcgggctactaccctgacgatccgcatgaccctgccgctgccgcagctcaggtcgaggccgccggaggggaggcgctctggctgccgctggacgtggccgacaccgcatcggtggatgcgtttatctcccaggggatgaaccattttggtcgtcttgattatgttattgccaatgccgggattttacgctgttcgccgattgaagagatgagcgacgagcggtggaacgccatgcttaatgttgatttgacgggcgtgatgcgttgttttcgcgccgcggcccgacatctaggggatggcgctagcctggtggctatttcgtcgattgctggtggtgtctacggctggcaggagcatgcgcattatgcggcggcgaaagctgccgtgcctgggctctgtcgttcgttagcggttgagctggctccgcgaggggtccgctgcaatgcggttattcccggcttgattgaaacgccgcagtcgctggataaacagaactctcttgggccggaggggctggcgaaagccgcgaaatctatcccattgcagcgggtagggcgtccggaggatattgcccgggtggtggcctttctgaccagcgtagagagcagttatctgactggacaaagcctcattgttgatggcggcctgaccgttcgttggcctgattaa

SEQ ID NO: 232142 - DNA, 1386 bp, Klebsiella pneumoniae
atgaacgccaacatgatccgccagcagttcgagcagggcctactcgatgcctgctctattaccgcactgtttgccaaaggccagctctcaccgcttgatttcaccgacgcatgcctggcggcggcggagaaatcaagcggcattttcataactctaactcccgagcgcgctcgtaaagagtcggcggcgtcggcgcggcgctggcagcaaggggtgccgttgagcgcactggacggtatccccgtagcctggaaggatttgtttaatattgcggacacacgcacgactgcagggtcggcaacccgccgggacaccccggcggccgtttgcgacgccgcgctggtggcgcgtctgacccaggcggggatggtcacgatgggtaaaaccaacctgagcgaatttgctttctccggactgggcattaacccgacgttcggcaccccgactctgcgggcggctaatggtgaagaactggtcccgggtggttcttccagcggcgctgccagagcggtagcgctggggctagcctgctttgcgatagggacagataccgcaggttcggtacggatcccggcggcattcaacggcgtggtagggtatcgctccagccgtcagcgctataacgcgagcggggtgtttccactcgccgattcgctggacacgatcggtccgctgtgccgtagcgttcgcgatgctcgcgcactggatgagatactctgcggcgtggaagaggagacgtacccagctccagcgctgattgttgatactcaactgatggacgccgctgatgctacggtccgggaacagggctatcgcctgctttcgtccctggctgccgcaggtatcgccgtggagtatcggcgtctaaacgccttccatgatgcgctcgcctggattgcggcgcacggctggccgggggccgttgaggctttccagctacatgctgcgttgctgtcatcgcctgcagtggaaaatatcgatccgtttattcgtcgccgcctgatggcttccgggcgcattgacccggcggtgctaaccacctttttgcgccagcggccactgtggcagcaggcgctggccgatgagctcaatggtgcggtgctggtgacgccgacggtggcgcataccgcgccgcacctagcgccgctggttgcggatgcggaggctttcgccgtcgttaatgacgcgacgctgcgtttgaccatgcccggcagtttgctggatatgcccggcgtcgcgttgccgagcggtgtgacgactaacgggttgttcaccagtttgctcttctcactaccgaccggcgaggatcgccgtctcttgatggccgccagtgcggtctccgaccttcttgcgcagcggcatgccgtctgcgctgaccctttgtaa

SEQ ID NO: 232143 - DNA, 1011 bp, Klebsiella pneumoniae
atggtcatgcagacaaacccttcgtatgcggtaacggaagaaaccgcctctgcacgttatgaagtcattcggcagtttttacgtcactccttgatagagcagcgagtgcctaagggcttggtgctgctggaaggtccgttagcgcaactattcggcaccagccgggtaccggtgcgccgtgcgttaagtctgttacatgaagaaggtctgatcacccgatttgaggggcgcggctttatcgtggcgcaggatgcggaagccgtagaacccttgcgtattgccttaacgcgagaattgttcgggcttaacgagcaacaagcgctggtggacactcgctccagcggggagaaggtactggaagggctgcagatcgtgctttcaaccgcaatggtgttcggttgttatcaggttaatgaacaaaaggcggcgctgtactacaacgtgagtcggtcggtggtccgtgaaagcctgatgcgcttgcgcgataagggactggtagaaaaagaaccctattcacagtggttgacgggaccgcttaccgctcgagaaatcgccaatcactttgagatccgcgccagcctcgaacccgcagcgctctgcaaggctggccctctcctccaggcggagtggattgcttccatgctggaaaagacgcataaatacaaaggccagcagctgacagctacggagctggaattacttgaagaagatttgcacgtccgttgcctcgaacctgccggtaataagttgatgatgcaaattctgcgtcagaatcagtcccccttcatcgtcacgcgcatcttctacgatttacttgctatcccggtggaaacaaccacgctggaggaacacgctctggtatatggtatgttgctgaaaggaaactggcccctggcggcagcctgcctgaaagatcatctcgaacgagctcaggtccgaactttgcagcgtttaaaagtcctttccgtgctgccggtacccgttttaccggattttatggaaccaaagtaa

SEQ ID NO: 232144 - DNA, 1077 bp, Klebsiella pneumoniae
atggccaatgaaagtgctcgtttacgaagcccaaccgtcgccgacgtcgcccgcgcagccaatgtttccaaggctcaggcggcacgtgccttggggggatatggttcagtgagtgatgaagtgcagatccgggtgaataaggcagctgaagtgctgggatacaggccaaacgagttggcccgcagtatgaacaccggccgatctaataccattggggtgattgtcggtgatattgaaaatccacactttggtctcgcgctgcgcggaatggcagacgtcgcccggcaggcgggattccacttgttacttagtaacagtgatgaaacgctggaggaagagcgggaagcggtacgtgtgatgctggataagcgcgtcgacggtatcatcgttgccccctgcagttcgttatttaaagacaacgaacatctccggcaagtactggcggaagggcgttcattaatcatgttcgaccgggcagtgcaggggatggaggttgaggccatccaggccaactttgtttccgtggctaaacaggctacagagctattactgacggccggtcatcagcgtattgcttatatctccagtatgcacagcgctgaaccttattcatcagtaatatcgctgggcccaacgccggttgcacaacgtgtcagcggaatgattgacgcctaccgtgccgccggaaaagaactggatccggcgatgattcagcttaatgcgcttaatgaggcctctatcgaacagattctgactgggttactggcgcttccagagccacccagtgcgctgattgcctcagataatcttatttcggtgggaatactgcgtgctcttgccaaacgcggtctgcgcgtaccagatgacatctcttttgtgatgtatgacgattttccctggaccgagttgatgtcacccccgttgaccgtggtcgcccagccggtatatgaaatggggcgcgaagcggcacggcggttgatttgccacatccgtcagcaatctgctggccgtttgcccgagtttaacagttgggtagttgtacggggctcggtgcgggaaaaacctcacgttacataa

SEQ ID NO: 232145 - DNA, 1383 bp, Klebsiella pneumoniae
atgtacatcgagaaatttctgactgaatacgatgactcgctaacgggtgagttgaatgtggatccgcttgggcaattagtcatctggtcgtcctgggggcaggacatctttcatagccgtattacttctatcgcaaatgatgtacggcaatatacgctgaatctgctgcatcacagcgtattgcgccagatactggtcgatgaaaagctgcaaacttcaggcgtgatgaaaggtctgtatcccaaaaagcaattacatgagtttagagttgcctgtctgatccatttggaaaatatttatatctactccatgctggcggctgaaaaaagaggtgtcactctgactggtgttcagggtattaataaagccagatctaaatggaacgctgcaaataaaaatcctcagatactttttggtcatgagaaaagtagtgagttactgactaatcagatcgctcttggtaccaatgggcgctataaatcgccaatgatgaaaatgcattttttctctactgattatcgctatgatctgccggaaagcaagccagtgtggcaggcagcagaggcatttattcggaatgtaccagagctgaaaaaattacatgcagcggcattgacttacatgcaattgaaaatgcaggcctcacataagcgcgacctcaacccatttttcgaagatattcctgtcggcctaaaaaaggcgtatgtaaaggcattccgcgacccgaaaatggtcggggattattcgcgaatattctggctacaaagaacggggttagataaatatgcagcgggtgctatttatcgggtactcaagcaggaacgtttggacgagttagagcttacagatgctgaagttttcaaacgtgccatgcatcaggcgaaaagtatgcctgaaatgaatgaaagtgacctcagggcgttacaacatatcagtcaggcggagccatttttatccctgatcgacctgatgttttcaggcttacgccgacagagtagtcagactttggcagaatttcgtcaattctggcagtcgcgcggtcttacggaacttgatctgccacaaaaggcggctcaacttctggaaaatgatgtgctcctttcctcgctttccggtacgcccgccagacgttttcagcaactattagcactggcctgtatgccgtcgctggaagatcaggttcgaggcttgctggattatcatcacaagataatggagtcaagggggcagttcccgtggctcctgcttgaaggtgatgatattttgctgcaggtaccaccatgttcgctacgcgaagatcgtcagaatagcgactgggtaaaccgttattatctaccacagttcagacatttgctgaacggtttatgggggcattctgcatga

SEQ ID NO: 232146 - DNA, 4923 bp, Klebsiella pneumoniae
atggcgctggtcggtattaataacgaaaacgaattttactccaaccactatctgggcgaagtctttaccagcgatatccgcgatgtactggaaccctggattaaccaggaaaatgccgctcgtgaagctgaacgcgctgcccgtgaacagggcaaagagattgaggcgggctaccgcgcgccgtggaaccagcttaacagcctggcgacagagtttttccgtaaactcactgaacatgaaaaacagcgccagatcccgcagcgtctcgccgatcagcgcagtcgctggcagccgctgttaaaggcattgggttatgaacttaatccgcacattcagatgctggatgacgatacaccactgccggtactggcgcgttacaacagcactgacggtagtccgtggctgtggatcgttgaagcacacgatcaggaagagggaacgctggacccgctggcgctctccttactgaccgcgcaattcccggcagataccgataaacataagcgcgacagtctgcgtaaaaaagcgaacggcgaataccgcagctggcaggatctgctctccacggtggtcttcacgcaaaatgaaccgccgcgttttgtgctgctgctcggtaaccgccagctgttattgctggatcgtactaagtgggcgcaaaaccgcctgctgcgctttgattttgaagaaattttaagccgtcgtgaaacggatacgttgaaagcgacgtcggtgttgctacacaaagattcgctgttgccaggcagcggtgcaccgtacctcgattcgctggatgacaattcgcacaaacatgcgtttggcgtgtcggaagatctgaaatatgccctgcgtgagagcattgagctgttgggtaatgaagcgatgcgttatctcatcgacaacgagctggcttattataccgggaaacgtgctattaacccggatgagttgagccgcgaatgcctgcggtatatgtatcgtctgttgttcctgttctatatcgaagcgcgcccggaactgggctatgcgccgatgaccgccaaaacctatctgcagggctacagcctggaaacgctgcgcgatctggagatgatcccgctgaccagcgaagaagatcgcaatgggcgctacttccacgatagcctgaatatgctgttcaaactggtgcgtgacggctacagcggcggcgtgaaaatgcagagcgacctggagagcggcgacctgatcactattcacagccatcagttcagcgtgccgcgtctggaaagccatctttttgaagcgaataacacccgtattcttaaccgtgtggtgttccgcaacgaaaccctgcaacaaattattcaggcgatgtcgttaagccgcccgggtaaaggacgttttaatcgccgggggcgtatctcctatcgccagctgggtatcaaccagttaggtgcagtgtatgaagcgctgctctcttaccgaggattctttgccagtgatgacctctacgaggtgaaaaaagccggagaagagtttaacgaactggaaacgggctacttcgtcagcaaagacgagatcggcaaataccacgacgacgagaaggtctacgaaaaagacggcagcctgcgtattcatcgtaaaggcagctttatctatcgtatggccgggcgcgaccgcgaaaaatccgcctcttactacaccccggaagtgctgacccgctcgttagtcaagtatgccctgaaagagctgtttaaagagcagattgacccgattaccgatccgcacgccaaagccgatgccatcttaaacttcaccgtgtgcgaaccggcgatgggtagcgcggcgttccttaacgaagccatcaaccagctggcggaagcttatctgttccacaaacagcaggcggaaggtcgccgcattcctcaggatcgctacacccaagagctgcaacgggtgaaaatgtacattgccgataacaacgtattcggcgtggacttaaacccggtggcggtggaactggcggaagtgtcgctgtggctgaacgccatcagcggcgatgcatttgtaccgtggtttggctaccagctgcactgcggcaactcgctggttggcgcacgccgtcaggtgttcaacaagagcgagctgacttacaaaaaagcgaaagatccgagctggcttaacagcgaaccggccgagctggcgatgaatattccacgcgaagagaagcagattttccacttcctgctgccggacagcggcatggccaactacagcgacaaaaccgttaagcagcgctatccggatgatttcaaagcgttggatagctggcgcaaagagtttactaaaagctttgctccacatgagattgttgatgtgcagcgcatcagcggcaaagtggaagcgctctggaacacgttccgtcagcagctgaaagccgagcgtcagaaaaccgccgacaattacccggtatggcctgcggaaaatacggctcaagttcgctcttctttaagcagcaaagatgaaaccttcagcggccgcctcgaagataacagtacctatcagaaactgcgctgggtgatggactactggtgcgcgctgtggttctggccgatcgacaaagcggatgaactgccggatcgcggtatgtggctgatggagatggagactctgctcgacggtattgtcgtcacggaaagagtgatagaaagtacagaacaggccaccggcgatctgtttgccgacgagggcatggtgcgtgaagagtcttcgctgttttccggtgcaggtcgcctgaaaaccgatgtgctgttccgccatttgccgcgtctggcgattgttgatgcgctgaaaaagcagcaccgtttcttccattgggatctggaattctgcgatctgtacgccgagcgtggtggttttgacctgatgcttggaaacccgccgtggctgaaagtggaatggcaggaagcgggtgtgctgggcgactacgagccggagtttgttctaggccgattgagtgcttcgaagttggcgacattgcgtcatgaaaccttcaatcgaattccgctgctcgaaaatgcctggcgcagcgagtatgaaggctgtgaggggatgcagaatttccttaatgcgcagcagaactacccggtgctgcgtggcgtgcagaccaatctgtataaatgcttcctgccgcaggcctggcgcttagggtcgcagaaaggtgtggctggattcctgcatccggaagggatttatgacgacccgaaaggcgggcaattacgtgcggcggtgtatccgaggttgaggacacattttcaatttcataacgaattgagtctttttgctgaagtgcatcatgcaacgatgttcagcattaacgtatatggaccgcagaatacaacgccgtcctttattaatatgtcaaatgtttacgcagtaagcgctgttgatgcctcttttgaacacaacaatgcaggccctgttcctggtatcaaagatgagcaggaaattgaaggcaaaatcaaagtttcctggaatacgtcgggccaccgttcacggctaattcatattggtttgaaggagctctctttatttgctcgtctgtatgacagcgaaggaacgccagcctggcaggcacgtttgccagctttgcacgcagaacaacttgtcgctgtactggaaaagtttgctaatcagccgaagagattgggtgatttacaggggcaatatttatccctggaaatgtggcatgaaacaaaccagcagaaagacggtactattgaacgtaagacgcagttccctgaggatgcatcacaatgggtattatctggcccgcacttctttgttgggacgccgttctacaagactccacgccaaaactgtacgttaaacagcgattatgactgcctggacctgctaacattgcccgacgattatctgccgcgcactaactatattccagcatgtgatgtgcaggagtatgccaaacgtactccacgagtgacttggactgaaccaggtgaagacgagccgaggaaggtgacggattattatcgttttgtgaatcggagaatgtttggagcatcatcagaacgttctatgatctctagcatagttccaaagcacgttgctcatatacaccctgtactctcaacgacattcagagagccaaaaagcctgctaagcttttcagcattttgtcattcaatagtggctgatttttatttgaaaacaacagggcgggcggatgtttatgaatctacattgcgttgcttcccttatgttgagctaatgagtgcagactcaagagcattagctttgaacgtgttaacgaaagattatgctggtctctggcaatcctgctataacccagatttcaacacccagcgctggagccgcaatctcccgcaacttccacaagatttcttcgccaatctgacccctgagtggcagcgtgattgcgccttacgctctgactacagtcgccgtcaggcgctggcggaaatcgacgtgctggtagcacaggcgctgggtttaaccctcgaagagctgctgactttatatcgcgtccagttcccggtaatgcgtcagtacgaagccgatacctggtacgatcaaaacggccgcattatttttaccccaagcaaagggctggtgggcgtcggcctgccgcgtaccgcgcgtaaagcggacctgaaaaacggttttgtctttgatgtcgacagccctgaatggaccagcggcgactgcaccgatcaagccatcggctgggatgatgtcaagcatctgcaaaccggtaccgttagcgtcacttttgatgactatacccgaagcgacgaaggcgagcgccgaaccgtcacttggcaggctccgtttatcaaacccgaccgcgaagatgattacaaagtggcctgggcattttttgcacaagataaggagagcgcctga

SEQ ID NO: 232147 - DNA, 432 bp, Klebsiella pneumoniae; identical to SEQ ID NO: 219212

SEQ ID NO: 232148 - DNA, 1626 bp, Klebsiella pneumoniae
atgaacctgcctgattatcaacacgtttttgatgtttaccatcactgccaggagacgctcgaagtgggtttacctgcgggtgaagcggccttgctgggcaaacgcctgatgacgaaaagcgagcaattgcagccagtgattatggtttacggcgtctataacgccggaaaaagcaccttgctgaacgcattaatgggccgggctgatgctgagatggcagacaggcccatgaccgatcaggtgacgggctatcagtggcgcggctatacgctgtatgacacgccgggcatcgatgctccgcaagaacatcagcaagtgacggaagcgcatttgcgcgaatccgatgtcgtgttgttcgtcgtcgccacgggaggcgcggtcgaggagcaatcgacctggcaggcgctgatctcgttggtcgaaaaagagcgacgggtcatgctgatcgtcaacaataaaaccggcctcaaacctgaatcacatgaatatattcatcttgtcgatcagctcagacagcggcttcagtatgccgccgacgaggaacagatcgacgatatactcagcaaagtcagtattcatctggtgaatgcccgttcggcactcaagggaaggcttgagcagaagtcaggactaatcaactcaagcgggatcaccttgctggaagagcaactgtcgcaatttttgcaggaaaccgatcagtacagcgtgctcgatacctgttacagcgacctgcgtcaggccattgataccgccctgctctcgctcgcgaaaatcgccgccagtccggaaagcgaggccttgcaggacgccagactgcgcgtagagagtgagtgcgagcgcctgagcctgcaactccatgatcatttagagaaaaacattcagaagcatcagcatgtcctagcaggcaccattgatgacctgctggaaaactgccgctctaagcacgtctttgaagcggatctcagccgtgaactggaagtggtttcagataagattttccagcaacagcaggcattactggaaagtgaactgcccaaaacgcagcgcaagctggaggacattggtgaaaccttgcaggtcgccgagatgcggcaggctcaggccgaaagtcccgacgtaaaagctttccagagtgaagacgaggaatctgcctggaaacagggcttgaagcaggtgatgggccacagcgacaaactggatgtgaatgcccttgccgaagcaggcgccaaaaaagggttagtgattgccaaagatctgttgccaaatctgtttaaagggattgggaaaagaaccatcgagcgctgggccgctacggcaggacgcttagcaggccctgctattgctctgggcgtgggagcctggaacatttatcaggccgtgaatgaaaatgaaaaattaagacaggcaagacgtcgccgtcgagaagccgcagaagacaccgccgccacgctgatggatgggctgaaacaggcgtggcagggggtgattcgcgaggtggtgaatgagattttcgaaccagtagacgctttcctgaaacagcgaaaaaacgagcatcagcagcagagcgatctcaccgcaaaacgcattgaggaattagaaacagccaaacgggctctgtcgcattaa

SEQ ID NO: 232149 - DNA, 1839 bp, Klebsiella pneumoniae; identical to SEQ ID NO: 197524

SEQ ID NO: 232150 - DNA, 459 bp, Klebsiella pneumoniae; identical to SEQ ID NO: 197525

SEQ ID NO: 232151 - DNA, 864 bp, Klebsiella pneumoniae; identical to SEQ ID NO: 197526

SEQ ID NO: 232152 - DNA, 759 bp, Klebsiella pneumoniae
gtgaaagttgtctttaatgttaatggtaaaaaagttccgctcaaatctctgcaatatataagtaaagcaaatcaacttgaagtaatgaggaattggttttttgaaaatttcgaagaccccgcaaactcttgcccgtatgaatcccgtgaaggcggatatgcttacatttatggtggcccatatgaagcaagtgaagagttacaagcgatgtttgaagggtacgtgaaatttgattatatccaagaattagttagtgatttacaagaacagtgctacgagtggtctggcaattcaaataatattaatgattggtacgacgaagacttgtacgatgctgttacatcttccgaacagcctttttctaagttcgttgaaagcattgatggaataaaatcgctggctaaaggtgattttaaagataagcaaaaagaacatctgcttagcatcttatatattaacgtcattacagccttggaaacgctttatgttgagttatttattaactctatagataaaaatgactcataccttacagatttcatagaaaaaggtaagacggaatttaaggtaaataaagaaattttggctttgccattcaaaggagaaactattgaaaacatgagggcggaattgatcaaagcaatcaaagaacatttgattagtgcaagttggcatagtacaaacaaagttgtagggcgttataaagctacatttgacattaatgtacaaaaagagtggctgacctgcccccagagttag

SEQ ID NO: 232153 - DNA, 1113 bp, Klebsiella pneumoniae
atgaaacgcgcatataaatacaggttctaccccactcccgatcaggttgagctactggctaaaacgttcggctgcgtgcgtttcgtctataattcaatccttcgctggcgcaccgatgcttactatgagcgccaggtgaagatcggctacattcaggctaatgcccggttaacagccctcaaaaaagagccggaatttgtctggctgaatgatgtttcctgcgtgcctctccagcagtcgttacgccaccaacagaccgccttttctaacttcttcgccggacgtgccgcatatccggcgtttaagagcaaacgccataaacaggcagcggaattgaccgccagcgcgtttaaataccgcgatggcaagctatacatggctaagagcaaaacgccgctagacgtgcgctggtcgcgccctttgccgtccgttccttccaccgtcacgatctccaaagatgccgccggacgatatttcgtgtcctgcctttgcgagtttgagcctgtatcactgccgatcaccgcttccacggtcggcattgatgttggcttacatgatttgttcgtcactgataccggattcaaaaccggcaatccccgccacaccgctaaatatgcgaagcaattagccctgctacagcgccgtttgagtaagaaacaaaaaggctcaaagaaccgcgccaaagcccgcgccaaagttgcccgcctccacgcgaaaattgctgattgccgcatggacaacttgcataagctgtcccgcaaactgattaacgaaaaccaagttgtttgcgtcgaatccctgaaagtgaagaacatgatccgcaacccgaagctgtctaaacacatagcagacgcgagctggggcgagttcgtgcgccagctccagtacaagactgaatgggcggggcgaacgcttgtcgcaattgaccagtttttcccgtcctcaaagcgctgtagtggttgcgggtacatttctaaatccatgcctcttaatgttcgtgactgggtatgccctgaatgcggcacaaaccatgatcgtgacgttaacgcggctatcaatatcaaaaccgccgggctggcggggttagcttgtggagagtctgtaaatccttaa

SEQ ID NO: 232154 - DNA, 291 bp, Klebsiella pneumoniae
atgaatactgataataaacagtacatccgggagctgatcgaggccggagagtttaacggctatacgctggtcagtggagaaaactggaagccacccacggtggacgatatcgcagtcgtccgtgggctgatccccctgactgatatccggctggccaaccggctggatgtagatgaacgcaccatccgcaagtggaaaaccggccagactcggatggtgttcaccacctggtgctgcctttgctgggtggccggactggggatgccgctcgataacattatcagtggctga

SEQ ID NO: 232155 - DNA, 1128 bp, Klebsiella pneumoniae; identical to SEQ ID NO: 202636

SEQ ID NO: 232156 - DNA, 1593 bp, Klebsiella pneumoniae; identical to SEQ ID NO: 202635

SEQ ID NO: 232157 - DNA, 780 bp, Klebsiella pneumoniae; identical to SEQ ID NO: 202634

SEQ ID NO: 232158 - DNA, 501 bp, Klebsiella pneumoniae; identical to SEQ ID NO: 202633

SEQ ID NO: 232159 - DNA, 1734 bp, Klebsiella pneumoniae
atgtcagcagtcctatttccggcgccgctgctctcggtcgagcgcctgtcgatccagtttggtacacagcgggtggtggatgacgtcagctttgcgctctggccgggaaaaactctgtgcattgccggcgagtcgggcagcggtaaatcgctgacttcgctggcgatcatgggtttgcttccggaggaggcacagattccaggcggcgcgattatttttgataaccaggatttgctcagcctgccggagcggcaaatgcagctgctgcgcggcaagtcggttgccatgatttttcaggaaccgatgacctcgctcaatccgctgatgacggtgggccagcagctggaagagacgctgcaacgccacgaagtgctgggccgccgtgaacggcgcagccgggtcagcacgatgctggacgcggtcaaaatcagtcatgtggagaagcgcctgcaacagtacccgcacgagctttccggcggtatgcgccagcgggtgatgatcgccatggcaatgctgtgccagccacaggtgctgattgccgatgagccgaccacggccctcgacgtcactattcaggcgcagatcctcgagttgatgcgcgaactgcagcaggcgttttccaccagcctgctgttgatcacccacgatatgggagtggtggcagaaatggccgatgatgtgctggtcatgagtcacggcaaaatcatggagcaggctccggcaaaaacgctgtttacctcgccgcaggcggcttatacccgccagctgttgcaggcggtaccggtgctgggccaggcgcccgcgctggcgccggtcgaggcgacgcgaccgttgctcagcgtccgcgacctcagcgtgcgctttccggtgcgcggcgacggcctgcgcgtgcgtcgcgaagtccatgccgtcgatggcgtcagcttcgatcttttccccggcgagacgttgggcatcgtcggtgaaagcggctgcggtaaatcgacgacggcaaaagcgctgatgaatatggtgccatttagcggcagcgcgcagcttaacggacaggagctgcacggcctgaaggacgaggcgttaagagcggtacgccgcgatttgcagatggtgtttcaggatccctgggcggcgctcaatccgcgcaaaactattttcgacctggttggggagccgctgctgattcatgagcagatgcccgcagtacagcgcacggagcgggtggcgcagctattgcagcaggtcggcctgccagcggaagcgatgcggcgttatccgcaccagttttccggcggccagcgccagcgcatttgcattgcccgcgcgctggcgctgaacccgaaagtgatcatcgccgatgaatcggtttccgcgctggatgtttcagtacaggcgcaggtgctgacgctgctggaagatttgcgtcagcgctatcggctcagctatctgtttatttcccatgatatggcggtggtggagcgcatctgccaccgggtagcggtgatgtttggcggccagctcgtggagatcggcccacgagatcgagtgttgcaccatccgcagcatccttatactcagcacttgctcagcgccgttcctatacctgacgttcagcaaagacggcaaccccgagccaccagcgcaatgccgataagaccagaaccgatcaaacccatcggctatcagagagtaccgcagcgctttaccgattttggcgacgggcacctcgtcgcctgctga

SEQ ID NO: 232160 - DNA, 879 bp, Klebsiella pneumoniae
atgagcgatcttgttattgaaaatataagattaaaagagttgatgcttgttgttaacaaaaataagcctttttttgatgaattcaaaacatttctttttattaatggatacgatacagtttacagttttataaatgacccagacgaaatcagaataaaaaaattcatattgaattactttaatagtacgtttaataattttttatatgacggtatagcaagaccatactctccagctcaatccaattggttatttatctcatggttacttagagacgccccccagcaaaggcttaggcctatactatcaactttaacaggccctatgccacaaagaaaaacggacttaatatataaactagtagtgtttgttagagatatatttacagacccactgcaatgggaatggccagccatagccgaagtaatgctagatagattggagggaagcaggagggcattaaaaggtagtttattcgaagcgatagttagagctaatttatctgagttatttaaaaaatatagtttaaatcttatgataagccctggcgaagtaagaattaatgatgaaacctatgacgtcgtaatacattcatcaaaagagaaaatcctaatgcccgtaaaaacaagagaaacaatgggtggagggcatgccctattgttcactagagatatttataaatcaatatctgtagcgcatcaaaatggctataactgcatccctgtagtcatagctgaatcttggggtggaaatctagataatttaccgtgtgaaaactatatatacatcccactaaatccaaaccaagtggaaaaactcacccctatattacaacaagagttggaagctatggttggcattttttctagactccaataa

SEQ ID NO: 232161 - DNA, 912 bp, Klebsiella pneumoniae
atgactgatgtaaaaaaccatgtgtattgtggcgatgcattgtcgacgttaagaaaactagatgctgaaagcgttgattgtatagttacaagcccaccttatttcggtcagagagattatggccatccagggcagatcggtatggaaatgaatccaaatgaatacattgataatttaacgaatatatttaatgagtgcaaaagagttttaaaggatacagggactctttgggttaatttgggggataagtataaagatggtaatcttttggggatgccatggcgcgtagcaatatctttgcaagatagtgggtgggttcttaggaatgatattatttggtataagccaaatgcgatgcccagtggagttaaaaacaggttgaccattgatcatgaatatatattcttctttacaaagaagaataatggttattactatgatcaagactctattcgtgaagaacatgtcacatttagcgataaaagcaagatgaaaggggggcgtgctcattttggtaaggttaatggaacacctgaagtaggaaaaaattcaggtaattcaaacttacacgatgggcgttgggatcaagccttccatcctaatgggaggaataagagaactgtatggaatgttcctctttcaaaatatagagatgcccatttcgctgtctttcctgaaaggttgattgagccttgtataaatgctgggtgccctgtaggtggggtagttcttgatcctttttttggagcaggaactaccggtgttgtagcacttaaacttgatagaagttacgtagggattgaattgaatcctgactatattgaacttgcaaaaaatagaataaaaaaagagcagagtgtgttattggagtctagaaaaaatgccaaccatagcttccaactcttgttgtaa

SEQ ID NO: 232162 - DNA, 2655 bp, Klebsiella pneumoniae
atggcgaataagttaaaacagatcattaccccggttgaggtttcagccgtgatgaatttcgatgcgactgatacgcactggcagtatcaatccggtgcttccagcatggcgacgaagcaggcagagggggtggctgggttgtggaatttgctgaataaacaacgactggcactccttgctgatgaagtcggcatggggaaaacttatcaggcgatgggagtaatgttgttgttatggcaggcaaaacctgatgcacgcattctggttatggcacctaacaggacgctctgtgataactgggagagagaatttagcattttcacagagatacactatcgggctgaacataatgcctttaccactttagagggtaagacaaaatatgccccacaaatttatggcagactggcggagctggcggccgctgtggagaaaaaatctcaccatttttaccttactactatccattcactaagcggtctggtccctccagatgaaaaaaaagatgctttaaatgctgccgcgtcttatggcgtgttatatcgtcagcagattaagcaagctcttggaaaaggagggtttgacttaattataatcgatgaggctcattactttcgtaaccgaagcggatcacagcgtgccgccgccgctcaggccttctttggtgatgcgcaggaccggctggggagcaatgtactgttgttgacggcaactccaaatcactcagcatcgcgaaatgtttatgacatatttagctacttcagtgacatgccaaaacgttatgcagaggatgatgtccgtgcgctgatgaatgattttgccatccgccgactgcgcaaaatgcagggcagagagagcagccacagcaaatatgaatatcgtcatgagcgcgctagcatttccagttttactaataagatggatgctgagttgttttttgctctatatcagaaacaactcgtggttcaactggacaaagagaaaaaggcaggtggcggcaggcgcatgctatatggctatcttgaagggtttgaatcaacgggcagtaccgcaagtgagcgggataatagtagtgatgaagaggggcaaatccataatgacttcaaccacgcgccggattctgctctgctcaatagcttgacccggcagtttcacgatatctataaccgctttccagatcatcccaaatacgacactctggtagaggcctgctttaccagtgatccgttcaagcagtctcagccgctacattgtagtaagcatttggtttttgttcgtcgaataccatctgtacgcgaaattactcagcgcatcaacgcacgttatgatgaaataatggctgagcgattgatgaatgtctggcagctacctgcaaaggcgctggcagaatggcgagagtcgggttggtcccgagatatttttgttaagcttttatcggaaaaatccaatgaaaagtccgattttgatgagcatatgctggaggacggggagacagatgagcctgaaacggataacgagctaaagctttcaagtaaaattgccgagctatttgttatgaagaaaacgggcctgcgcagtaccgactgcgccaacgttagtttgcgtttccgtcgccctgaaagcctcttttcattatttcttgagcctgcattggatggtacgaccgggacctatcattatcattaccgcaaagagtctggtgaacgtcaacgtgacagctatggtgatgccgcgagagatgcccggctgcagcagtcgacaacagctcagaaaatcaaatatatcactgctttgcccacagcctggggattgatgtttcatgagctgccgcggccagcaaaagagcaattgattaagtggcgtgaccagcctaacggtatggcaattattgagaactttgccaactatcttcgcacgggttacctgtttgccagccctgtgatcattgagctctattgctggtttacagagttcaaccgtcgacctcaaacaggtgaggtccagcagcgatatcagcattttgtagaatgggtcaccccaaaattgaatggatcactgatgctacgttattttgtggctgccattgaaactttcgaaacgctatgtgtgaaaattgttggccagaaactagataatactcaatatacttggcgcgagttcactagcttgagtagtccaagttggtatgccagcgggcagtcaaaaaatcgcgaacgtttaattcgtggatttaattcacctttcttccctaatgtgctggtagcaacctctgtgttgcaggaaggcgtgaatcttcatcttcaatgcaatcaagttcatcattatggcatcgcctggactcctggtgataacgagcagaggaatgggcgggttgatcgcctctttggtcgaatcaatacaatgcttcaagtccagggggcggctgagatgattatcaattatccctaccttgcaggtaccttcgaccaggatcagttggcatcatttatacgccataaacacagtgttgaagagaagttagatagttgcgagctggaggattttgacagcgaaattgatattcaggaggatcctcaaggttggcaaaaatggctacggcatccttgtaaggataaagataaagaagatccttacccagccaagtttgatcagtag

SEQ ID NO: 232163 - DNA, 303 bp, Klebsiella pneumoniae; identical to SEQ ID NO: 96991

SEQ ID NO: 232164 - DNA, 525 bp, Klebsiella pneumoniae
atgtcattaatctttagctctcgcagagatggttgttctggacggtgtttatgctatcttttctgtatgtctctctatcaacatgcaataggacaaaaaatgaatgtaattgaatctaaaattgctggattagggttcctgcaggcaattattgccagaatggctaataattccttttatattaaagggtgggacctaacattatttgttgcattagttgcattaaaaaaagatgtatcacaatattcgagctatttactacttgcgttaatagtgagtaccatagcgttctgtttattagatgcttattatctacaacaagagaggatttttaggaaaatatataactatttggccgaatcaacttcagaatccattaattatttcagcattaaccctgcgctatataaagataaactaaatggtgaaattctttcatataaaagctcattaacttccacatctattcttctttttcatataccaatgtttgttgctgtttttatcttttttgtattgttttaa

SEQ ID NO: 232165 - DNA, 864 bp, Klebsiella pneumoniae; identical to SEQ ID NO: 162747

SEQ ID NO: 232166 - DNA, 375 bp, Klebsiella pneumoniae; identical to SEQ ID NO: 101190

SEQ ID NO: 232167 - DNA, 867 bp, Klebsiella pneumoniae
atgagttttttaggttcaaccagcgtagagcatattcccagacgcaggattaatgtccccgccgggttgctgcacatcaaaacaaaagttgaactttctttcggcccttttgcattatgtggtgagggaatattccagactgtctttgccatacatccaggcgcagagtcagatgatgattatctgtttgacttcagctccgccggatggagtgcaaccggaagggtcaggatatccgagctttatctgagtaatttctcagtgcttggggaaactgcaaactggatccgcaaaagaatctttaacttctatggtgttggctgggactttgttgtagagaacgtgcaggtctggtcgccacctctttcgtcatttgatatgacagatgttatggatggggtatttaatcaggtccggataaattccggaggccgtttactcagtgcaggctcagaagtaacgcatcagattaacatgctgaatcagcacgatagctgtaatgcaataagatttatgagctgccatcttgaaaacaactattcaggcgtgtcttatattcgcggtgggtcaaacaacattctctttggcggaatgtgtaaatttgaaaataacagcagaaacaaccttgtacctgttaaccagatttacgggtccacctcagatagtgtcaaatttgaaaatatcttcgtaagccacccggctaatatcacagtttactggctggacagcaatggccgacatgtgtcaattcgcggaggatcatttatgagcccgtcggaagtggggggggtataccggtctgaggtggttccgcatccaacgtataaactgggcgagtgcgactgcgtgcgttcagctggtcgctga

SEQ ID NO: 232168 - DNA, 282 bp, Klebsiella pneumoniae; identical to SEQ ID NO: 192893

SEQ ID NO: 232169 - DNA, 336 bp, Klebsiella pneumoniae
atgagaaaaataacattactgctggccgccctctccttctctctgctggcggatacccgaatttaccaatgcgatatgaccgtatcgcaggtgaaaaatgatcaaatcagcagacctactaaagctgacttcggcgcgctggtcgttgatagcggagatcagttctatgtcgtccgcggcgatgaggttctctcatctccatatctggctaaacgcaacggtaaactggttggcgttggcgaggacaagcttatctacaacaaatcccacgacgtctacggcgttcatagcaaaaaccaaagtttctttttcgacggatgtaaggaggttggttaa

SEQ ID NO: 232170 - DNA, 1284 bp, Klebsiella pneumoniae
atgagtaaacttgaatatactgacaacttaatgctgtcgcgccagttaccgcttaaatccgtggccctgatcctcgccggcggacgtggcacacgattaaaagacctgaccactattcgcgcaaaacctgcggtgcatttcggcggtaaattcagaattattgattttgccttatcaaattgtattaactcaggaataagacgtattggggttattacacaatatcagtcgcattcactggtgcagcatattcaacgcggctgggcattctttaacgaagaaatgaatgagttcgtggatttattaccggcacagcagcgggtgcatggggagaactggtatcgggggacggcggatgctgtgacccagaacctggatattatccgccgctatgatgcggaatatgtcgttattctggccggggaccatatctataaacaagattattcgcggatgctgctcgatcacgttgaaaaaggggcgcgctgtaccgtggcctgcctgccggtcccggttgaagaggcaagcgcttttggcgtcatggccgtggatgagaatgacaaaatcattgaatttgttgaaaaaccggctaatccgcccaccattcctggcgatgaaacccgctcgcttgccagtatgggcatttatgtgtttgatgcggaatatctctaccagctgctggcagaagacgatcgggatgaaggctccagccatgattttggcaaagatattattcccaaaataacggcggcaggtgaagcgtatgcgcatccgttcccgcgctcctgcgtacagtccgataataatgccgagccatactggcgcgatgtcggaaccctggaggcgtactggaaagcgaatctggatttagcctctgtggtacctgaactggatgtttatgatcgtaactggcctatccggacttatgtcgagtcgctacccagcgctaaatttgttcaggaccgttccggcagtcatggcatgaccatgaattctctggtctccggcggctgtattatttctggctcggtggtggtgcagtcggttctattttccagagttcggattaactcgttctgtaatattgattcgtcggttttattaccgggcgtctgggtcggtcgctcctgcaggataagacgctgcgtgatcgaccggggatgcgttattccggaggggacggtgattggcgaaaatgccgttgaggatgcgcgacgcttttatcgttcggaagaaggcatcgttctggttaccaaagaaatgctgaaccgacttgaactatga

SEQ ID NO: 232171 - DNA, 258 bp, Klebsiella pneumoniae; identical to SEQ ID NO: 143786

SEQ ID NO: 232172 - DNA, 663 bp, Klebsiella pneumoniae
atggttatcggcgtggcggcgccacgagccaaggtgcacttcataaatcgaaatcggtgcatcaaactggttggcctgctgacgggactgtggctgttcgaccttttccggcatgccgcagataagcgacgcgctttccgggcgcatctgtgcctcaaaggcatacgggtcggatttcacccgcaggtggccgtgggcgtcaatcagctcgaacttatacagctggccgttatgcgcgccggggacaaacagctcccagatgccggactctttgcgcagacgcatcgggtggcggcggccgtcccagtagttgaactgtccgaccaccgacacacgacgggcgttcggcgcccagacggaaaaacgcgtcccggtgacgccgtccatggtgtcggcatgggctcccagcgtctcgtagggccgcagatgagtcccttcagcgagcagccaggcatcaagctcctgcagcagcgggccaaagcgataggggtcgtcaatcaggttttgctgaccgtgccaggtgacggccagctggtaacgaaaaggatttttccggcgcggcagaacgccgctaaagaacccgcgtgtgtcgaggcattcgagtttaccgactttgcgcccggttttcggttcaatcacccatacatcggtggcatcgggtaa

SEQ ID NO: 232173 - DNA, 684 bp, Klebsiella pneumoniae
gtgccttttggcggactgtcagctattcgctggcatgaaggcgagcagcgcttttacgctatttctgacagcaggaatactccggcggaaggtaagccacgtttctataaattgaaaatagatctctcttcttctggcattaaagatgtcatcgttgaacagcagtacgatctgctggatgccgatggcgaagcgtttaaaaagggatttgttgacgctgaagggctggtcattacgccggaaaatcagctgctttggtcatctgaggccggaagtccgttacgaaaaagtacgctaaccggcaagttcgttgaagatctgagcgccattttccccgagggctattcggttgatagtaaaaaagaggatcccgaagggtttcgcagcggcatttcctgggaaggactttcgtttacgccggataaccactatttgtatgtagccgctgaaggggcattaaaacaagatgggccgctggcttcgccggtgaactctagtccagcgcggatcctgaagttccgctataacggcggtgataagaaaccccagctggaaaaatctttcctctacaacgttgaccctgtttcacatatttcaaagtttgctatcaacgataacggcgtgtcggaagtgttagggaaggtgcgaataagcaggtcatttcttcccaagctgactcgctga

SEQ ID NO: 232174 - DNA, 756 bp, Klebsiella pneumoniae
gtgccttgtaaaatcccatttttcactaattttttgaagaatatatttataaattattttaagcgattcaacttttattattgtggcatttctaaaaaatcatgtgaatcattaggcttacatatagctaataaaaatcgaatttatacgatccctcatgctgtagatttgtctattttcaaaggtagtacagctttaagtctcgaaaggaaatctattaagatagcttttgtcggaagaatggttaaggaaaaagggatccatgaccttatcactttggttaaaaggtgtgattcatattttgagtttacatttattggtgacggtgaattattagatctcgttaaaagagagttgggtgaatataaaaatgttaaaataacaggaagaattagtgataaaaataaaattgctaatttactctcattatcagacgtctttatacttccttccagaaaaattgaagggtgggaggaactctttggtatttctttaatagaagcaatgtctgccggactagtagtaatatctaccaatcatatcggcccaacagagattataactaatcatgttaatggtttcattgttaatgatgatgagaaacttgtagataatatttatgatttacttaaaaatatggactttaattcttcttgtatccaggaagttaaaagacaggcaagattaaaggctaatgaatattctatagatagcatatcgcgtaaatggggtgatttatttgattctattaaatga

SEQ ID NO: 232175 - DNA, 369 bp, Klebsiella pneumoniae
atgaaaacagcggtatgggtggtggtgtatttcgcgatgtgttttctgcttttcacaggatggatgttcgcttttgcgcagtatgcgccctataacgggcaggaacacgcgttttctctgacgtatctgcttaatttattttttcttcatgttgtgatggtaccttactacgagtttattcagactgaaacatacagcaatgcattaatgagtctggcagatgaatccggtcagatgatacgttttcatcacgtagtacctgttctctggatatatagtctgtccgcactcttaacttttgtggtttacattatatatgcaaaatggttcactcataaccgactgaaagaaaagcatcttccagaatga

SEQ ID NO: 232176 - DNA, 270 bp, Klebsiella pneumoniae
atgtcattcaccctcacgcaaaaattgaagtcgtttcgtaccatcccatacctgaatctcgttgagccgcttagtgccgcgcctgtagctgtgacatataccgccaaaggggtcgacagtatcaacgggactactgcaacggtgctgtttgatacgcaggctgaggggctggaggctacaggccagctctactactctttcgaatttactgaccttgcaacaatttttgaggatgcagaaacggcactaaaaaaagagatttcagagtaa

SEQ ID NO: 232177 - DNA, 1659 bp, Klebsiella pneumoniae
atgatcttttttggcctcaatgacgttgcagaaggtgatctatttgatacagcactcattgatgatgcggcagattttgccaaaatctcggctgaaattcagagcaaaattgcacatcaacgattaacgcgtagggagtggctggcgttatgtaccagctattttggacttgtcagcgatgctcccgaagaaaatccgcagtggcttcagttacgaatgcagattgtaagcgggtttaaacagttaaaagagagttcgcctcgcccgttgtcatggatggcggtcatcgatacctacggtgatatttttaccgacaatgcgggttttctgcttgggcaacagctcggccgtggggaaataaccgatatctccgtgctggaaaaagtggcacagatcccccagaccagttggctatggtgcaaaattgttaaccatctggtgagcgagatttttcgtcagactgacgatgagtttgaacaaaaaattaatgaactgatcgcgttgagccgtcagctttctcgttttaaagataacctgttggccgcgatgttaactcgttattgtcattcagtttataaacaaaaaacacatcttgagcttaagcaaatttcgcttgaatattggggaaatcctcagcttatcgcgcgtaacaaagggtggcttttgcatgtagagaagccagtactcttgatggtccaaagttggtttgcgaaggatgaccttaagttattctttgaattacttaaagggaatcgggatgttgatgaagctcgtttattttactggttacgttatacaaaccagatgagttatacgcggattgtgttaggcaccgactctcaggagtcgaaagatcccgcctttgttgagtttcgtaataaaaatgcgtgtcgtttaagccaactgacaggtactggcgcacgagataataatgctatcattatgcaaattggtgattatctctttgttgaatattctaaagttggtgcggtttatccttaccatcatgcaaaggctccttttgatgcagaaaaacaaacgcttaacatagagcgtgaactcaaaagtatgagtaaaaccgtaggggagcgtttaatacaccgttcttctgtcaatgactgggagcacaatcctatccatggctggatgaagaactttgatgatgctctgaaccgtttgggtatttattatcaggcagaggacacgacactggtaaactcgaattccgtggattactcacgttttgaaattaagcctctaacgacaacctctgttacggactcagttattgaatccgtaaatattcctgaacctcctactgccgctgaacctatagcacctcctaaacaggtccgttcttcacttgcggcatcgatgcttgaacgtcatcagcgtaacgatgttctggccaaggaaaagcgccttaaaattattactaaatcacaaaaagccagacaggctcgtgaagccgagctatccagagaacaacaaataaaagaaattattcgctctgcgggttgcaaggtcgaggatcggagaggtatgggaggagtacttcatattcaatttttgacccctaattacgacgccaccaaagaattgctcaggctaggttttaaacctgtctcaggtaaatatcttcgctactggagcaaatga

SEQ ID NO: 232178 - DNA, 738 bp, Klebsiella pneumoniae
atgtttaaccgggcattcaatggtaggcagcgtcgtagtgatgaagcggaaaaaccattctggatttcctatgccgacctgatgacagccatgatggtgctatttttggtcgtcatggtggcatcacttagttccgtcacacaaaggatccagcaggcagaagcaggcgaaaagtcccgagggcatgatatcgcccgtctgtgtgaaaaacttgagctacaggcaaagaacctgaataaaacgatacatgtcgactgccatgataatcgtattagctttggtgaggcaggccgttttgagcataatcgcttttcgctcactcctgaagggttgaaggctctacaggatgtggtgccgttagtcctggatgcggcaaatagcgatgaaggtaagaaatggtttaaacagatcgttattgaggggtttactgataccgacggttcgtatctctacaacttgcatctctctcttcagcgctcggaatgggtgatgtgcagtctgctggatagcagaagcgcgttacagcaaagaattaccgcagaccaacaaatacagattcgaaaattatttttggcgggtggcgtgtcgttcaacaacgcgaaagagagtaaagaagccagccgtcgtgtcgagttacgcatgcagttctttggcttaaaagataaaaaacaagacgagagtatggatgtcgtcccgagtattagtcaggaaacctgccaactgggtgcagtgcaatga

SEQ ID NO: 232179 - DNA, 2556 bp, Klebsiella pneumoniae
atgttttcgctgacctcgttcctcgacacgttaacctctgttaatccagaaaatgtgccgaaatatgtcgctcttgttgtcgtggttctgttggtgtgcttcattgctcgctatgccatcccttcctttgtgatttcagcccgcttcaagaagaaagcgagagaaattcaactgattgcaaaagataaaccggctcagcaactggaaaaactggatgcctttttttccggaaagttctttgcgcatccctggagtgaatttaaagagtcgctccatcggcagtttgagttagacggtgacgaaggtcaaaagcggatccatagcattcgttctactgcaccagcttccgcctggttctctgaacccttactggtagagattccactctatacggaggcctttaagcatttgcctggcatcctgaccgggattggaataataggaactttctcaggcctgatgatcggcttgcaccacttcgaccccagtacacccgaacaagtgagcgccagcgtagctaaccttttgcgtgatgttctgtacgcgtttttaggctccgcctttgccattactttctccatcctggtcaccatgtttgaaaaatggcggctggcgagatgctataaaaaccttgagtttctgaccgccagtatcgaccagctttttgaaggcggtgtcggtgaagattatctttctcagcttctctccagcaccaaagaaaacaccattcatgccaaacaactaaaagatggcctcgtcagtgatttaagagagatgctgcagaacctggtggacagtcaggtgcgagaaaatcagaaaatggcagagacattgtcttctacttatcgggaatccggtcagcagattgcggagcaggttagcggtgccatcgaaactagtctgaaaaatccgttggacaaaattgcgggcgtggtgcaaaccgcctccggcgatcagagtcatcgagtgcagtcgatgcttgagaacgtccttactgcttttatgaacaaaatggataacacgtttggtcagcagtttaccacgatgcaggagatgatgggccgttccgtggaggcgatccagagcatgcaaagcggtttcgctaccctgctgcaggatatgcgtcaggctggggatgattcgcgtcagggcagtgcccaactgatctctcagttactcagcgaaatgaaaagcggccagcaagagatgcaggcgggtatgaatgacatgctgcgaagcctgcaggaatctgtagcccgcattggcgcagaaggtgaaggtgctggcgaacgcatggcccaacagctggaaaaaatctttgccgacagtgaagtgcgtgaaaaagcgatggcagaacagatgcgtgcctttattgaagccattcagtccagtgttcaacagggacaaaatgaaactatggagaaaatggcggcctctgtggatacgcttggcagccatatggcaaccttgttcgcacaactggaaaatggtcagcagcaactcaatcagcagcaaaaccaggcgcaaaatctgttgatgagcaatatgagtaaaggtgttgaagatctgactcaaagcctggcaggtgtattcagtcaactggagtctggacaaaaacagatgagccagactcaggaactaggacagcgcgctctgcatgaagagactcaacaactattggcccgtagcgaagctcgtgaacaggcggccgccgagcaacaacaagattttatggctgccctgcaaaaaactatgcactcaggtcaggatgccctgcgtgagaaaatgaccagcggtattgatcagttgggtagccaattgggcagcctgtttgggcaactggaagaaggccagaaatcactgagccagcaacaacaatcggctcagaatgctctgcaacaggaagctcagcgaatcatcggccagcctgagagtcaggttcaggcattaatgcagatgctgcgtgagcagcaatccgcatcaggcgatttactgcaacggatggcgcaaaacacgacgcgtcacctggaagaaattcagacgggtgccgataaaatgcgggttgctgccgatcgctttgaagcagcggggaatcgtgtcaccgaagctaataatctgactgcagaagttctgaatggtacccagcaagcaggcagaaccctttccagtgccagcgctgagctgggcgcattgatcgctgattaccgcaacacccgtgaggttgtggcgaatgccatcagtacactggaaacgctgatcaatagcagctatgacgagcaaacatcccgcagccggtttgttgaggatctgaaatcgtattccgagggtctgcaacaatataaccgtgaggcccaggagttcctccacaacatcgctgacgtgatgggcaccagctttgagtccttcaccaccggggtagtaagcggtctgaaccgttcgctccaggagatggatacgcaactgacaaaagcggctggggcgttaagttcttctgttgaaatcatcggtgaaagcgtggatacgctggaaactgtgctccgtagtcgtcgcgcgtaa

SEQ ID NO: 232180 - DNA, 735 bp, Klebsiella pneumoniae
atgaaaaaaataggaatattgcttaaggtattctcttctgaacagtataaagaagattttcttaacgggaatctttatatgaatactattaattattttcgtaaatatgaagaagaggctaaaggtaacataggtgataaatatgaggctttaactggatggatgcatcctcatgaatttagattcgaaatagaaataaatggggttaagcacacaataaatcctgatgacattgttgggcctatcaccactagcatgaaagtccatgatcatgccaacgtcttttgtatgacacatttgcattctcatgatgtagatatgggtaacatcaaaagcgatgaagaatatgaacttgttaaaaggtatttcactttacccgacgatgtaagaaacttgggcgaatacatggttgttatcactaaccccatggagtttgtcggaagggcgcttgcagaagggaagagactactgaatgctaaggaagctttagattatcagtctaaacaggttatttattatgatgaagcagaaaaaagccttatgcttgataacagtcgagatgctcctttttataagcagagtctttactcacatcaaaatgaataccgcctctgtttaacaagggataatccggatgatgagccatatgtaatgcatatcggtgaccttaggaatatatcaatggagataaatacaagtgaatttaactccttgattgatctaaggaaaaattaa

SEQ ID NO: 232181 - DNA, 258 bp, Klebsiella pneumoniae
atgtctaactacaacatagcatccaaaggcctagaagagcagaacaaagtcaacgttgatctcgcagcctccggcgtcgcctacaaagagcgcctgaatcagcccgtgatagcggagcaggtagccagagagcagcctgaacacctgcgcgagtatttcatagagcgcgtccgctactaccgcgagcaaagcatccatctaccccgcgcatccgatccgcgctatctggaaatggccagtcagaacgagaaaaaatag

SEQ ID NO: 232182 - DNA, 213 bp, Klebsiella pneumoniae
atggtgaactcattacttgaggcctgcaataactggcagattcaacgtgctgaaatactggcccgcaaccctgacatggccatgacaattcagaagctggacatgatggttgagtatgccgtgcggtcggcaatggatatcgcccaccgcgttgactgggattttcgggaagctgaacgcctggcgaagcaggtgcccggggaggctgagtga

SEQ ID NO: 232183 - DNA, 762 bp, Klebsiella pneumoniae; identical to SEQ ID NO: 112072

SEQ ID NO: 232184 - DNA, 204 bp, Klebsiella pneumoniae
atgtcgaatgaggatgagtttttcgcagagatgcacccgcagattgcgcaggttatcgggatagcggttatgcaactgctggttgagaggcgcgagccgtcaagagaggcgctgatagagatgattcaggtgctgtggcagggtgaccaggtagatctggcagtggagctggcactggacgtgctgatgctgagggaagagtag

SEQ ID NO: 232185 - DNA, 219 bp, Klebsiella pneumoniae
atgagcgcagaaatcatcgatcaggccaacgagttagaggaactccagcgggaagccgccattgcgaaatgtcgcatcaaccatgcggcggtatcggctactcactgccgcgactgcggggaagagatacccgagcggcgccgggaactggtggcgggctgccagcgccgcgctgactgtcaggaagacgaggaattacgcggtaagcatcggaggtga

SEQ ID NO: 232186 - DNA, 1023 bp, Klebsiella pneumoniae
atgatcgctattgatgacctgcataaaagttaccgcacggcggatggccggctcagcgcggtgctgaaagggctgtcgctgcaggtgcctgagcgctccatcaccgcggtggtggggccgagcggcgccggtaaatcaaccctggcgcgctgcatcagcctgctggagcaaccggacagcggcagcattcgtatcaatggccaggatctgtcggcgctgtccggcgaggcgctgcgccgggaacggcgggcgattggcaccgttttccagtcttcggcgctgttgagccgcaggaccgcctgggagaatgtcgccctgccgctggcgtggctgggtgtggtggagcgcgatatcaaggcgcgggttggcgagctgctggagaacgtcggcctgagccacaaagcggatgcctggccggcccagctctcaggcggccagcgccagcggatcggcattgcccgcgcgctggcgctgcgcccgtccgttctgctggcggatgaagccacctccggcctcgatcctcaggccacggcctcggtgctggctctgctcaagcggctgcgtgatgagtaccagctggcgatcgtcctgattacccatgaaatggacgcggtgcgcacggcggcggatgcggtggcggagatccgcgacgggacgatcgtccagtacgggcggatcgaagatctgctggcgcgtcccgattctctgctcggccagcagctgttgccgctgacgccggcggcagctacccacagcgatctgctgctgcgtctgagctaccgctgggatgtgccggtggccaccgactggatcagccgcctgagccagcaatgggcgctgcagatcgatctccttggcggtcacgtcgaggtgattaatggtcggctggccggtcgcctgcaggccggagtgcgctttcagggcgaacgcctgtcgcccgcgcgactgcagggcctgctggcgcagctcggcataacggcggagatcctcgacagcgcgccgttgctcagggaggcggtatga

SEQ ID NO: 232187 - DNA, 3864 bp, Klebsiella pneumoniae
atgaataaattaccgaaggaaagttcaagccaagaaattggtcgacttgctggtcgcgcaatatcgagcaaatttccagcatcatggattgaaacacctcagtcaggtgatagtgattttggaattgattatctaatccaattaaaagaccttcaaaacaatgtatgttattccttttatctacaattaaaaggcacaacagttccaaattacataacaaatggtgaatttgtaagctttagtttcaaaaccagtacgttagcgtattattacgctcaggaacctcttgttatggttgctcttgtagatttaagcattcatctagatgatctatcaaagtgcccaatttattttttgtggctggatgacgactggtttgacattaataaagaaaaaattgaagagcaagaatatctgactttaaacataccaacaaatcaagaaattaataataagttggatgtttttagcttctatgaaaaacgcataatggagaagttggcagtacaaggattgaggaaagcaataaaacctcattcggataacgtaagtcgtagcattgtaaaattttccgaatatattgaagaaaagccagttcttataaaagctgttgaagaaagtggtgatgagccatggatatcaaatccaagcggggaagctgtaactcttctaaaagaatgttcagatgcactgaatgaaaatctcataaaaaaagcacaagaaatactatcgcgacttgataactggccaaaccaacttagtagccatgaaaatgcagagttaatattacagaaatcaattctatgtgaactgcagggagaactacctgaatcattagaaatccttcgaaatgtaaaggactatagcgacaaacctcgttataaactagcttttctcgaggcaaaaataaaaaatggacagacattgaatcaagaagaacttgctgatattgagcgagaaatattagctggagatttcagggcgacatttttaaaagcaaaattcttggcaatctctggccatttgaaagaagccactgcgataatcgatgaaaaacaaagtaaaaaatttacagcaaaattattattactaacactggctgaaaatactgaagaattcgatgaagaaataaataagattgatcttgcaatgcttaactctgatagagataagtatgtttattatgctctctcagcaagaagattctttctaaaagcacatggcgatatttttaattatgatcagattctaccatttacgggaaagtcaaatatcaatttcgaccatatgaaaacctcatatgaactctgtgataaagcatggtattacgcaaaaaaattaggttacccatcagactttgtgatactcattgacatatccactgttttgtattcttatttcaacaacataagcgtcttattcgaacgatttgatgaaatcctcaaagaaagacctaatcacaatgaattatgtttgttatattcacgccttttatataattgcaatgaatataaaaaagtggtttcattactaacacgggtgaaatctgaattaagcttagatgataaatctattttttttgcatctaacttctaccttaaagaatatgatacagcacttgatatttttttgaacattgaaaatgaattgatagagaaaagccctgaaaacactcctttcatactttgtttggctattgaaattgcaaccgccaaattcgaggatattttagccgatagacttagagcgactcttcttagttatgaaaacggagaggctttttgggctgttagttcatgcgtaagaaaaatgatagaggaaccaaatagtcagcccgactgtgttgaaaatctttatcagaagtatattgaattaaataagcctgtagttatagcagaacatttattaaggtttttcaatgttcgcaatgaaaatacagaatacaaaattattgaagttgctgaaagaatcttaatagataaagagttagatgaaagttgctcattaaaattggctgaggcatatctaaaaactggagattcaaataaagtttttgaaattgtggctaagaatctggagaaagttaatgtagacccacattggcatgtcatcaaaacttatgctttagagctatcaggaagagttggagaagctgtagatgaaattgaacaagcgctgaaaggatctaactattcaacagaacatatgagaatatatgttaacaagtgcttaagttttgggatgttcaaacaagttgaaagtgttttacagcggctgttatccattgaaagttcacgaaaaaataaattagaatatctgtctaagctagcaactgtatattcctctaattcggaatatagcgagaaattgattagcagcataaaaagaatcggtgaattggttgacagaaatgattgtcatgaagaaggacaatatttagcacttgtattatccacgcagattaatatgaatgatgaaattagatctgcattcaacttgagaatttcagactatttcaaaaaattccctgaatctaatatgcttagaaaagccaatattgatattaataatggtcccgaggcattacttaattcaattcgagaaattgctggcataacggatgagcagattgcacaatgggagaaaaacaaacgctctatcaggaggggggctttaccaattccattttctatgcttggtctatttttgaacaatactagggatgtttacactagttggaatattgcaaaaaatacgcccgaggaatctttggaatttaagataaatcaagcaccacaatcaccacaggcaatatttgatagttattttaaccaagagccaaattttcttatcgaagaaacatctttaatattgatgtacgaacttggcatcttagacattttcttagaaaatattaaaaaattcactattcttaactcttgctttgaaaaaatgaatatttcaaggttatttaatttatctctgggcacaaacactcttcaacaaaatattctaaacacaatcacaaaacatagagcaaaactaagagttgaacatgattgtaaagacaatcttcttgagtcatatcgtaacttaacatctaaggacggagagggttatgtctttttaactgacgatgctaatatgttaatgctctgtggtagcaatgccgaattcctgtctcatggtaatatatataacattcttttatgcttgaatcacaatgagtccattaaagaggctgaattatgtgaattaattgcaaatgtatcaatctatggtttcaaatccattaatatggacataagcataatggctcgcgttttttgttacttcacaaatgaaaacgaagattacacgaaaacagcattcaagagtctttttgacaaggttttcaattcaagacgtaaatttaatgaaacgataggtatcttatataaattcttgagccacctcattgatgaggagaaaataaaaatcagcagcaatgttatattaccattattcacaaacttcttattaagatatccgcaagatagcaaggtcgatttcatcctaaattggtttttatatcaatgtacaaatggaagagaatgttacatctctgatttactaccaatgagtgtgactcatgcaactttatggaatgtttgttacgaaatgtgttgtatctcaacggagagagaggtagatcagcgcgaactattctgtaagatctctaatttcattctacaacagaacccaaattctcgtgaaaaaatatataaaaacgtcgttaagtgttttattcccggaactgcaaattacgattcatttgtaaaggcttacaaagatttatcacaaaccagaaaaatgcctaattaa

SEQ ID NO: 232188 - DNA, 1017 bp, Klebsiella pneumoniae
atgaacgccgtgattaattttgaatatttagtatcaccaacgctgagtgatgacatttattttgataaagttgttgataatctaaggattctgtctgaattattatcttcagggatttactctatttacttagagagggatatagtttctaaaatgcattcttatgattattttcctagtgagcgtatttttcaacataaaatatcacaactaagagagggaacggctttttgttcaagtgatattgttcgtactatacatacaattatcaaacattcagaggagttagaggaacaacatattgttgagtgggataaagaaccagaagttgagagtgatattgtgtctatttctcaatgtcgaatgaaagagttgcaggaaatatattgttcgatggctattgatggtttctttaatcaatcacaattagttccagtatattatcatcctctaaatccccagttaactcaaaggataagttttaaaggtgttattaaagatgtagagcctgcatgtgtacatgtattaccactagaattttataattgtctagatgtaatatctaatattgatagcatcttctcagaaatggatggttatgaattatataaaaaagctgagactgagcttgaatataagtttgcattttatgttggtgtcattggtttaattaaaatgagtgcattaacaaccactattgattgggatgactttaaaattggtgatggttttgtaaagtctttgaaggaaaatcagtctttccaagggcagcaatatagttctgttgtatataatgcaattgtcaatttactggctgatacagaggtaaatgaaataaaacccttttatacaacagcaacaagcggtgtgcagagagtatatggtgagttctacgcgtatcgagttcatattactaagtcaggaagggctttaagattactattttggaaagatgactatgaagttattttgtctaatataggtaataaaaatgagctgttaatttatgaaccttga

SEQ ID NO: 232189 - DNA, 900 bp, Klebsiella pneumoniae
atggaaagggcaaaagagcgggacaaagcgttgtcacttgtccgcaagcctccacaaggcgacgctcagccagatttttttgcgcccagcctttatgacgtgggcggccgcgacaatcgcagcgtcatggatgtggccgtgttccgtttatccaagaaggacaagcgagccggagaactgatccgctacgacctgccggatggatacgtggaagtgtccgcaggagcgcacggaatggcctccatttgggactacgacattgtgctgatgatggtgtctcacttgaccgaagctatgaaccgctatcgagaaggaaagggtggcaagccggggagagtgtttcggctgcatgttagcgacatcctcagatttgcccgacgtggtaacggtagtagtcaggttaagggagtggaagccgcgctagatcggttgcggggtactaccatcaagacagtgcgcgaaagcggcaagttccggacaaccgaagccgaggggctgatcgcgcgctatcgtgttctgtcacgcacggacaccaagaagataagttctgtcgagattgaagccccggagtggatttatcgagaagtcaccgagggcaagcggccggaggtacttacagtacaccgggactactttctgatcgagccgggcataggacgctttatctaccgactggctcgccgtgccgcaggcagggatagcgctaaatgggctttcaagaccctttacgaacgcagtggaagcggtggctcgttcaaaaaattctgtttcttccttcgcgggatcatcaaagccgatgacctgcctgaatatgccttgtgcgaagaagcggggaaggatggccctctactggtcatgaggcaccgcaattcctcgtcggaaccgctgggcggttcctaa

SEQ ID NO: 232190 - DNA, 1008 bp, Klebsiella pneumoniae
atgcatctaataatgctcgatacatgtgtttggcttgatatttcgtctcaaaaagctgaattgccgatgcttactgccatagaacatctggtgcaggatgggagtatcaaaatactactgcccgatctgatacgtgccgagtacgaacgaaataaagatagggtgattgaggctacgcgaaaacggctcgccagtgaatttcgagtaattaaaggggtggttgagtcgtttggcggtgaaggtaaagagactgcgctcaaaaccttggatgatgttaatcacaggctgcctattctttccgaagtaaatcaaaacacagtaaatcgtgttaccaaactttttgacatggcccacgaagttgtgatctctgatgtcgcaaaaatcagagcagcagagcgggctatcgctaagaaggcaccgttccataagcagaagaatagtgttgctgacgcagtgttagcagagactttccaagagtttcgggtgtcacacgcaagtgagtacgaaacctttagatttgtcactcataatgtcacggatttttccggcaaagaccacaggcagccacacgacgatttcgcagatatttttgacggcagcagctctttattctttaacgccacaagctctgccatcgaggatttgctcgatcttgaagaatttcactatgagaatagctttgcttgggaggacgaaactcgtgggcttcaggaaatcatgtctgcgatggacgagttgttcgataaagtttggtacaaccgccatatgaacatgatgtatcacctagataatggtgacatagaggtcgtccccgctggcacaaaacgctacggcaatgatgtgattcacgaagatatcctcggccaagcagaaattgcagctcaacgggtcagggataaatatgaagatactgggccttggagcgactttgaatgggggatgctcaatgggaagctctctgccctacgatgggtcttgggggatgagtgggacatgctcgacacgtaa

SEQ ID NO: 232191 - DNA, 825 bp, Klebsiella pneumoniae
atgggcaatgtaacaatcattaccaatgctattgggcgttttgccaacgccatgcggctctatggtgaagccttcatcagatatcgagggctggcagcaatcgaccgtgaagaggctatccacaacctcgaccgagcatttgagcaaaatcttgagagttttcatacgttatatgatgtatcgcaaggggtgtttgactttcatgctcatccggataccagtctcctaattgctattcgtaatgctcttcatcatcgtgaccatcctttattccatagtcttcttcagactatttggttggacggggagccagagcgtctgcttggagcggagtatttaatggctaggcatcgaacgacgggtggcaatcccccgccgatgatgcacttgatcaagttggaagatatatacagtcggctcgacccacgtcgtgaatcggtgcacataaatccaatgggtaagagcaatgctttatctagatttatcactctggaaaatggccttgccttcgagagagtgtgggccaaagcaaaaaaagatcgctatcctaccaagcaggtgtatttggacttgttgccgatatttaattctgcggtttcgagagtttttgctgcattggatacggcgggagtgccgtttcaagggtttgatgcaaacgcctataaatctacatttattgatgaattagagacagaccttcaacatttcgatttctttggtctgcgtatgcatgcgctacagatagaattaggcccgaagttcacaatccaagaggcctctatcagacggggctgtacctacgaaaaggtgatggaggacgaatag

SEQ ID NO: 232192 - DNA, 162 bp, Klebsiella pneumoniae
atggccgagtacttccgagccgatccgacctatgcagcggagttgcttgccgaagtccgtcgtgacggcaacccgaacgagctggcaattctgttgcggcagatggacgaggcgttcgggagcgactgcaaacgttcgggctctccggtgagacaactatga

SEQ ID NO: 232193 - DNA, 699 bp, Klebsiella pneumoniae
atgacgcaagcagcttggacactcgacggacggccggtagatgcggcttccatttccggcgccgagtgggaggcgttgaaacagacggcgcagttaggtgactttgtcatgccgtgctgcaaggcaccggcagtactcaagacaagcatcaatggtttacctttcttcgctcatctgtcggaggagtgcggcactgcgcccgagactaaatggcataagtcgggtaaggcagcagtgatggccgccttaaccggcatgggtatcgaaaaccgtgacgaggtgccgggccgatcaccaagcggcgacaagtgggaggctgatgttctcttctcggtttccggtcgcactatcgtcatcgagctgcaacgttcctaccagcatctacgcgacttcacgcgtcggcaggagcggtacgttgcatcgggcgttgagtgctactggctggttcgcaaagagatattcatgaccttaggaaaggccacgtcacgcctattgttgaagcgtgatttcggcaacgtgtttccggctagtggaatcggtactggcatgctgcccgagttgccggtggcgatactggacaccgagggcgagcaaccggttcagttcggcgggtttaagaccgcgactgtgcctgtgtggttggctggcatccttgatggtgcataccaatatcgcggcggctcttggaaccttaattga

SEQ ID NO: 232194 - DNA, 1239 bp, Klebsiella pneumoniae
atgtctgcatttacgattcagataaaaaactgcaacagcatcgaaagtgctgagattcggatcaataagggcacgcttaatataaagtacggccctaatggattggggaaaagctcaatagcgaaagcaatcctagcatccgttagcgatgatggaacgcttcaaaaattgaagccctttaaacatcgtgcgtttgcagggcagtttgatccgtctgtggttggggttgaagatataaagtcggttttggtttttgacgacacctatgtgtcgcaatttgcattccagcgggatgaagtactcaagaatagttttgaaatattcataaagacagatgattttcttgctgctatgcaggagatagaaggactattccaaggaataaaggcggctttcgacggaaatgagaacttgggcaatgctatatcagacctgaaagaacttcgtgatgcatttggagttacaaaaacgggggcgctttccaagtcaagcaagggatataaagcatttggttccggaaataaaattgcaaatattccagaacatctcaagccatttgaagaatttataaaaagtgatcaaccggcgacgtggatagcttggcagactaaaggtaattccttcttggaattgtcggataactgcccttattgttcttcgagttttcaaggtactgataagaaggacgtggcgcaagcagttgccaaagaatacgattcaaagtccgttgagcatttgagtgcattacaggcaatcattgcaagattgggaaaatattttgatgatgcctgccgtgagagcttggagaaaattacaaaatcaaaggttgagctttcgttagaagaaactaatttcctaagcgcccttagaggcgacgttgaaacgctcattgcaaaactcgaagggttgcaatctatctcgttttttgcacttcgagatgttgagaaaattgaagacgaaatcagcaagctaagaattgatctcggccttcttgggaggcttaattcggcagatactaaatctgtggttgatcccgtaaatgctaagctccaagagttggcggagaaggtgggagaacttaaaggtaagatcaacaagcataaaaagctaattgagagaaccgtcgcggaaaatcaagatggcattaatggatttctgaagtcagctggctacaaatacagcgttcatggagtgccccccatttcgccggacaaatcagctattgagacaatgctttga

SEQ ID NO: 232195 - DNA, 828 bp, Klebsiella pneumoniae
atgaagaccgtggctgacgtccttggcgtatcgcggtccaatctggcggagcgccttaaaggcaagtgcaagccgcgtggatcatacctcaaagcggacgatgccgagctgctgcccgccattcgtaaactcgtggatgctcggccgacctatggctatcggcggatcgctgcccttctcaacaggcagcggcgagccgccgatctgcccgtcgtcaatcgcaagcgagttcatcgcatcatggccaatcacgctatgatccttgagaaacacacggcggcgcgaataggccgtgtccacgacggcaaggtcatggtgatgcggtctaacctgcgctggtgctcggatggccttgagttcacctgctggaatggcgaggtggtccgcctcgcgttcatcatcgatgcgtttgaccgggaaattatctcatgggcagccgtcgccaatgccgggatatcaggttccgacattcgagacatgatgttggaggccgtcgaaaagcgcttcggcgcaaccagcgccccgcatgcaatagaacatctatctgataacggcagtgcatacaccgcgcgcgagaccaggctgtttgcccaagccctcaacctgatcccatgcttcacgcccgttgccagcccacaatcgaacggcatgtctgaagccttcgtcaaaaccttgaagcgggactatatacgcatctcacccattccggacgccgatacagctctccggaagatcgacggatggatcgaagactataatgaaatccatccacactcagcgctgaaaatggcctccccaagggagttcatcaaagcattgtctcaatag

SEQ ID NO: 232196 - DNA, 390 bp, Klebsiella pneumoniae
atgtctaacgagtttcgacaggttgatctgatgatcggtgacgtccggcggcgacgctggacaacggaacgcaaactgcagatcatcgaggaaagctatgccgccggggagaccgtttcctccgcggcgcggcggcatggagttgcgccaaatcttctgtatcgctggcgcaggctcctgagcgagggaggtgcggtggccgtggattctgacgagccagtgatcggcaattccgaggtgaagaagctggaagatcgagtgcgcgagcttgagcgtattctcgggcgcaagacgttggagaacgagattctccgcgaagctctttccaaagcccactcaaaaaaaccgatatcgcggccgatcttgttgccgaaggacggttcccgatga

SEQ ID NO: 232197 - DNA, 894 bp, Klebsiella pneumoniae
atgaagctggtacaccaagaccatgacgaacatattgagacagcggcccagcacctaagctatggagaaaggaacgccttcgctcttattctattcatgtatcaggttctgagggaaaagcctgggttggcggtcttggacgatcctgtctcaagctttgataagacgaaaaaattcgccattctgaacgagttgtttagaggcaaggcaagtcttcgtgatacgaccgtccttatgctgacacatgatattgaacctgcaatagatgttatacgcggcgttaagcgattattccaacatcctaagccaacggcatattttctggcgtcgaaagcgggtgtagtgtccgaggtggagattagagaggaaaatattcaaacattcgcgcagatatgtagtgataatattcacgaacttgatgatgaggtcataaagtgcatatatttgcggaggcattttgaaatcatcaatgatctaggtgcggaatataattatttggccaatcttttacacgctagggacgtgccaattctaaaatctgccgtgggcgatatcgctatgaatgctgaacagattatgaacgctgaagctggcatcaagaaattcatcccggcttttgattactcggcggtgattgctgcgattaaagataaagcagagatgaagcgtcgcttcacagaagctaccgttgggtacgacaaaatccagcttttccgcatctttaaggaagtgcatggttccgccaatggggagcaggatagcattcttcagaaatttgtgaacgagtcattccacatcgagaacgaatatgtgatgcagctaaatccccacaagttcgataatgtgccggagtatgtcgttttggaatgtgatagggccattctggcgtcctaa

SEQ ID NO: 232198 - DNA, 1188 bp, Klebsiella pneumoniae
atgagcacttccgtcagcactacacaactcaatttgcgcattatttcgatcgttgtttttacctgtatctgctatctctccattggtctgccgctggccgtactgccgggctatattcactatcagctgggctacagcacctttgtggccggaattgtgatcagtctgcagtacatatcgacgctgataagccggccgcacgccgggcgctataccgatatctgggggccgaaaaaagtggtcagccttgggatcgtctgctgcctgctcagtggcgccttcacgctactggcggtagtcctgcaggcaacgccgatgctggccattgccgcgctgctggcgggccgggtgtttctcggcgtcggcgagagctttaccgccaccggcgccaccctgtgggggatcaaaaccgtcggcgcgatccacacgtcacgggttatctcctggaacggcgtggcgacctatgtggcgatggcggtcggggcgccgctgggagttaccctcaatcactattttggcatcagcggctttgctacagtggtagtactggtcgcggccatcggtctgctgttcgctcgtacccgccaggacgtcaaggtgaccgccggcgccagagcgccctttcacgcggtggtgcgaaaaatctggccttacggcctggggctggcctttggcaccgtcggtttcggcgttatcgccacctttatcaccctctacttcgccgcgcacagctggcagggcgccgcgtttaccctttcgctgttcagcgtcggctttatctgcgttcgcctggtgctgggaaataccattacccgctttggcggagtcccggtctccctggcctgcttcatcatcgaaagtctcggcctgctgcttatctggctggcgccatcagcatggatggccggcgtcggcgcctttctcaccggttcgggtttctcgctggtctttccggctttaggagttgaggcggtaaaacaggtggaagagcaaaatcagggaaccgccctcggcacctactcggcgtttcttgatctggcgctgggcctgaccgggccgctggccggctgggtcgccgggttctacgatctcgccacgctgtatctgctggcggcgatcgtggtggcgctcgcattcctgctgattttccgcgtacatcggcaacagcggcttgtcgccagagagtag

SEQ ID NO: 232199 - DNA, 1344 bp, Klebsiella pneumoniae
atgcgtcagagagagcttgcagccacagctaaggccttcatgttggatagacctgaagtctcgctacaggagcttacggaccacctccggtctatggctgagcagttcctgacagacgctagtgacgattactggaatggacttgaggtcgctactttggtggacgagaagtccaacctgaaggagctagccgctacgcaagccttaagtctggaccaacagaagggcataaggttagcgcttgaagtcctgaccgcagcacagcagagggtagacactggtgatacctctggtctgattaagctgattgatgataataaccatactgattactcaactataggcgactctacgtcaattctgaagaatgagcagggggatagaccagtagttttcacacaggagcgccaacctgaggtcactatctgtagtttttctgagctagtgtcctcgctgctggctgagaaggtccagaccctgaagtcctccagctacaaggacctctcgtcctcactaaatactgtctcccggttcctgcctgaagacatggacctgatgtctcgctctgagtggctggctgtcagggacgctatgctggcttctgaggtgagaccgtcgacgattaacaagctgctgactaaggcgaagatgtgtctggactatggcctgatgaatgggcaacttgagggccgcaacccgattgagcgcatgaagttaactaaggatgtagactccaagcgtagagcattcactgacgaggagctggagagacttcttgtccgggtagaggctgagtatcagttcacgcgacacaccgctcacacgacctctgaggctcgcagatgggcgactctggtatctgtggtcactggagctaggtctgctgaggtctgccacctgattaaacgtgacattgtaacgattgagaagatggtctgtatcgacatcaatgaagatggggacgggaagtccgtaaagaacaagcattcagtccgacttgtaccgctaaccgatggcgcttatgggtttgacctgacgtcctttctgtcgtgggtagacgctcagcctgatgatggtcctctcttcgggatgacaccgagcgcctactctagctggtttaactctcgggtcctgactgaggccctgccagacgccgataacgtctcgcttcatagtctgaggcattggctggcgacccgtatgaaagagcgtggtgtcaatctggtggacgctcagggcatcttaggtcatagctcgcagtcaatcacttacgacctgtacgggaaggggcacgcggttggacgtctggctgatgcgctaaatctggcactggtagggatgtga

SEQ ID NO: 232200 - DNA, 609 bp, Klebsiella pneumoniae
atggttaaagagtttaaagtccgtaaagaaaataagccgtcatatgaatgtatgattactgctgaaacctgtttggggttagcaggtctggcgaccgaggagtgggagcgtgagcaccattatcgtacaggtatcatattcactgcctttgctattgaggctatgttcatcttctatagaaaacaggttgaccccggttacgataagacgaaaccagagtgcagaaagacaatgcacaagaaaacgttaaaattgtgcggctttactaattatatggggacaaaaccttatcaaattatcaaagagtgtcttgaggtaagagatgcaattgctcacggcgattcgtacacttccagctttaatttctcagcggatcatttggataaccaagacgatactgcaagaggtgtcttggcggtaaactccgaacaattccggggattaactgccgacctccttaagaaatacattgagatggcaaagcatattgaccatgagatttatgataacggttacaggccttctgaagaggacctcccggcagccgagcgtagaaacctgatgttagctttcggggtcagtggggtgtcaatgtggcctagcgtctga

SEQ ID NO: 232201 - DNA, 183 bp, Klebsiella pneumoniae
atgagtttgtcttgttatggattgtgttatcacaattccaataagaagaactttaagtccagcctccagtcctgtcagcccgaagtaaactatggtcgctatgatgtggtctccatgcttcgggtctcactggaagtactgaacactttcgcgtcaagttctccgaagttcattcctgattga

SEQ ID NO: 232202 - DNA, 723 bp, Klebsiella pneumoniae
atgtctcaacaagtagtcatctttaacaatgaattctctatgtcttcctatgagtttctgaccgaaattatcaaccccgcccgtgtagaagctggtgagagtccagtagataaccgtaagttcttagcacgtgtccgcgatgagttaggggaagacggtttgccagcaggaaaagttttccgtctggctctcccgcagggcggctacaacgagttgacgagctacgacctaagcggggaccaattgttactagtcggtatgcgtgagtctaaagctgtgcgtcgcaaagtccttgaatacatccgacgaattgagaaggacaagcagttactggaagaccagaagaagcgagcagccattcagtccgctaaccgccgaggcgtgacttggggcgactactgcaaaacctatggtctacccgctcagaagctaatgaccgcacttcttcagcatcgtggtctctttcgtaagaacccaatcagtaacgagtggtctgtaaatccgaagtattccgactgctttcgtatcattaagccgtcagaccagaagttctcagcaggtgggtataacttccggttcaacgctaaggggctggaggtcttcggtaagcctgagatggttgacaagatgcgaggcatccttattgcattcactggcaccgaccagcagaagcaagagcacctcctgaagcaggcccaatccggcaagctggagggactctaa

SEQ ID NO: 232203 - DNA, 510 bp, Klebsiella pneumoniae
atgtctagcaaagctagtgcgttattcaataaccaagactggaaactgtcagtcaccgacatcaatctctatgaaaatactgtgagtctggacggtcagtcctatccgttgtcgctcgctatcaagaccctcattccgggctacctgtcaggcctgccgcccaccagccgtgagtctatggagttactggaagctctggctgaagctggcgtgacaatcggtaacttcttcagtaatgacctaatgaccgcctaccaacgccgccagatgaataaacgtgtcgaggctgagcgtatcgctaaagagctggcgtctcagaaagagcgtacccgcgaaatgttcatgaccgaggacgaatggcagaaagagctacagcgccgcgaacaggtcaaagctgaacgccggacatatggtgagaacctccgcagcgctacccattctgctggtcgttccaaggcttcaattatggctgacctcgatagtggcgctaactggatggattccatctaa

SEQ ID NO: 232204 - DNA, 990 bp, Klebsiella pneumoniae
atgactctgactaaagacgctttacagtttggcattgagcctgttcgtatcaccgacaccgacaacctccagattaacgaaggtctgccgaccaacgcagacccgcaggtctatgccttccagttagctaagctggtgaagaccatgctcaattctgtgcttaaagacgctcaggataacatcccgttcccggtagaagttctgccgacccgtaacagcttaccgactccaatcattgctcacactctggctgaccgctctgtgctggtccctgtccgtggtggcaagcgacctgaagtcgtgaccgctccgtctggtactgaaatcaccgtcgagccgattgagcaagctatcctcgtgtcccaccagaccaagttatgggaccagaagtcctctactggtttcactcaggggacgctccagcaggacgctctgaacatctgcgataacgtggtccgtaccattaactctaaaatggttgacgttctggagtcctctaagctgctgaagaccgtcgagcttccggtcctgactggtagcctgaccgctaaggcagacactatcatggacgcgctgtatgagaacaccgagtcctctttcggttctgaggttactgactatggcatcattgcccatgagtcacacctcaaggctctctcccgtctggctgctaagcagggcttcggtggtgaagacgctatcgtcaatatgctggggacagacatcgcctattacaacggtgaagaccgtggcgtcttcatgatggctaagcgcttcacggctctgagcttcggttgcttccgtcacgatggcgagaacattactgtggtcctgtcccgtgatggcgactctcagtcccatgacttggaaatcctcggtaaagtgttcgttgtcgctgaagctgctacgaccgtcaagatgggcactggctcagctactgccgtcctgcctgtagtcaaacgcctgaagttcaccaagaccgaagcgtaa

SEQ ID NO: 232205 - DNA, 1035 bp, Klebsiella pneumoniae
ttgaagttcctgtggaactacgcgggcaacaccatcatcaaccagcactccgacatcaataagacccacgaaattctgcaggatgaaagcaagtgcgaaaccattgtggttatcgacaactttatgacctcgtcggcgaaatacgccgacctgctgctgcccgacctgatgaccgttgagcaggaggatatcattcctaacgattacgccggcaatatgggctatctgatttttattcagcccgccacctcagcgaagttcgaacgcaaaccgatttactggatcctaagcgaagtggcgaaacggctcggcgacgacgtgcatcaacgttttaccgagggacgtacccaggaacagtggctgcagtatctgtacgccaaaatggtggcgaaagatccggcgctgccggcctacgaggatctgaagcgaatgggcatctacaagcgcaaagacccgaacggccacttcgtcgcctatcgcgacttccggcgcgatcctgaagcgcatccgctcaaaaccccgtccggcaaaattgaaatctactccagccgactcgcagagattgccgcccgctggcagctggagaaagacgaagttatcagcccgctgccggtctacgcctccacatttgaaggctgggacgatccgctgcgtagccagtatccgctgcagctgtttggtttccactataaagcgcgcacccattccagctacggcaacgttgatgtattacaagcggcctgtcgccaggaagtatggatcaatccgcttgacgcggaaaaacgcgggattaaaaacggcgatatggtgcgcgtttttaatcagcgcggcgaagtccgtcttccggcgaaagtgacgccacgcatcatgccgggggtctcggcgatgggccagggcgcctggcacgacgccaatatgaccggagatcggatcgaccatggcgcctgcatgaataccctgaccacccaccgcccgtcgccgctggcgaaggggaatccacagcataccaacctggtcgatatcgagaaggtttaa

SEQ ID NO: 232206 - DNA, 2481 bp, Klebsiella pneumoniae
atggatgtacagaacttcgaccactcacaccacgcgttaaaaatccgcggcctgagcagcggcgtggacgtactgtcctttgaaggcaaggagcaattaagcgccccattccgctatgacattcagtttaccagcagcgataagtctattgcgccggagtcggtgctgatgcaggacggggcattcagcctgaccgccccgccggtgcaagggataccgacgcagactcccctgcgtacgttgtacggggtgatcaccggatttaagcaattgtcttcctcacgggacgaggcgcggtatgaggtgcggctggagccccgtctggcgctactgtcccgcagccatcagaacgcgatttatcagaaccagacggtgccgcaaatcgtggagaaaatactccgcgagcggcatgagatgcgcggtcaggactttgtgtttaacctgaaaggcgactacccgtcacgcgagcaggtcatgcagtacgacgaagacgatctgacattcatctcacggttgctgtcggaggtgggtatctggttccggttcagtaccgacgcccgactgaaaatcggggttatcgagttttacgacgaccagagtggctatgagcgcggcctgacgctgccgctgcgtcacccttcggggatgagcgacagcggaaccgaagcagtgtgggatctgaacacggcctacagcgtggtatcgaggtccgtcacgacgcgggattacaactaccgtgaagcgatggcggagatgacaacaggccagtttgacgtaacaggcggggataacaccacctacggtgaagcctatcattacgctgacaattttctgaaaacgggtgacaaagcgacgccggagagtggtgcattctatgcgcgtatccgccacgaacgctacctgaacggacgcgccatcctgaagggacagagcaccagttctctgctgatgccggggctggagataaaggtcgagggtaatgatgcgccagaggtattccgcaagggcattctgataaccgggattaccgccagcgcagcacgagaccgcagttacgaactgacattcaccgccatcccctattccgaacgctacggctaccgccctcctctcatccgcaggcctgtgatggcagggacactcccggcgcgggtgaccagcaccacggcaaatgatgtctacgctcatatcgacaaagacgggcgctatcgagtgaacctggactttgaccgggatacgtggaagccgggtttcgagagcctgtgggtacggcagtcacgcccctatgcgggagatacttacggtctgcacctgccgctgctggcgggaaccgaggttagcatcgcgtttgaggatggcaacccggacaggccatatatcgccggggtgaaacacgactcggcgcacaccgaccatgtgaccatccagaactataagcgcaacgtgctgcgcaccccggcgaataacaaaatccggctggacgatgagcggggtaaggagcacatcaaggtcagcacagagtacggcggaaagagccagctgaacctgggacatctggtggatgctgggaagcagcagcgcggtgagggtttcgaactgcgcaccgatatgtggggtgcgataagagcgaaaaaaggtgtctttatcagcgccgatgcgcaggaaaaggcgcaggggcaggcgctgatgatggatgaagcgttaagccagctccaggaagcgctgtctttagtggaagcactacatagcgccgctgaagtggcaaaatcagagctggcggatttacagacacaaaaaacgctattgtcagaaacactgaccgagctgaaaaaatcagcgctactgctttctgctcccgcggggattgcacaggttacgcccaaaagcctgcaattatcctcaggggaaaacctgattagcaccagtgggaaaaatacggatttcagcgtatttaaaaaattcactgtagctgcgggagaagcagtaagtctgtttgctcaaaagcttggtattaaaattttcgccagcaaaggcaaagtggagattcaggcacaaagcgatgaaatgctcctggatgcatgtaaagatctgcgcataagcagtagcgacggaaaaattcttattagcgcaaaaaatgaaatcatcctaaccagtggtggtggatatattcgaattggaggtggcacggtggaatgtgccgcaccagataaaattatagagcgtggagcggtttggcaaaaattcagtggtcagagtatcagtcaggccatgcaggaatgggattccactgattttgccatcacccctgagatcctctggaagcaaaccggcaaaccggcaaagaatcaaaaggtacgcgttacccgcggcgatggcactaccgttgaaatgacgactgacgatcaagggaaactacctgtgcagagcgggctttttgttgaatcaataaaaattgatctcttagataatcaggaagattaa

SEQ ID NO: 232207 - DNA, 243 bp, Klebsiella pneumoniae
atgcttggccttgtacagcgcctcgtcgactttacggataaacgtctcctgcgcttcgcctggccgccaggttccgacgccaatgctgatcgacagcggcgtctgatgattgatcaggatggtgcgggcgttagcaaggatcgcctgcgccagagcgtgcagctcgggctccgacaggccatcgacgataatggcaaactcttccccaccgatccgcgccggctggacctgctcgctggttag

SEQ ID NO: 232208 - DNA, 441 bp, Klebsiella pneumoniae
atgagcgacaaagatatcgagcagcaaatcaaatccaaaggtttaaccgcggcccgcgttacgctggatgattttaaagaaaacatcgtcaatacagagatcgttaaacacgtttccgtatcaggtcaggtactccgttgggccgtactgaccacgaaaaatggttttgctgttactggcagaccctcatgctcagcctcttcagaaaacgatgacgctgaaattggtgagcagatagccatcgaaaatgcagaaaacgagctgtggccgcttatgggttacgccctgaaacagcgcctgcatgactctggcggtcataccgaagaggaaaacttcgaacacttcctttcctattctggattccacagcgaaagcgatgaagtgatcgagaagctgcgtaaagccttttctgatggcggctacgcactgcagtggaaataa

SEQ ID NO: 232209 - DNA, 654 bp, Klebsiella pneumoniae
atggaaattttttgggttgtggtgggcgttgtggttgtgattttgtacctcatcaaccagaacaaaaccagagtgacaaacagaactgagataaccagagatcgcaagataaaaacggatgacggcgaaatcagcatacgtgaacgacaggttatagacagtgtatcaacccaatacactaaaccaaatacagtgaacgtcgcacagccggattatgacaacgcggtgatatctgattactacaaacaactagctaagcaaaaagctattgagtctctaaggcaaaaccaaacacagcctgttgcatcaagcagacctgtggagaagatagtcaacccattgccaagagttgagcagaaacaagtcacacctaaaaccgaatctgcgccggtggaacacagaaaagtgtgtaccagatgcagtcgcaatctaccgatggataagttcagaaagtcgagcaagtcccatcatgatggttacaccacatggtgcgcccattgtcttgatggccccaaaaacactaggcacaccaaatggtgtccaatttgcgagatccgccgcaaacgaaccagttactataagaatgctaacaatgcggacggattgatgtcatggtgtaaaagttgctgggattcttatcgaggaagaagttaa

SEQ ID NO: 232210 - DNA, 234 bp, Klebsiella pneumoniae
atgagctacaatctgattccattccctctcgatattacaccagaagaagcgttaaagattgtggaatctaatttcattattctgtctggagcttccattaaagctattgtggagcataacacagagactttaaaagatatccgcaatcttagtgaacagctcacttacattgaacattctctaaaggctgctttagctggcacccttattgattctgactacaacttacattaa

SEQ ID NO: 232211 - DNA, 324 bp, Klebsiella pneumoniae
atggagaaggccaagggcaacgcaggggcaagcccccgcacccccatacgcaacaatctatcctcatggctagggccattcgtctatcttgagcaaaagcatccatcttttctgcgtaatatgtatgatgtgtgcagctatgctgcgtctataggagtcaagttaacaggcgactctgcaatcaattcaatgacaaaaatgagaaaaggtattccctattatcctaaggctgcctataggctctctgagagcgttttagagggggtctttattggtactaatttcgccagtcattttgtatataaacttctccgtagcatctaa

SEQ ID NO: 232212 - DNA, 171 bp, Klebsiella pneumoniae
atgagtgaatataactacgaagaagagcttgcacgcaatattattatccaagttgactccataaccaaatgtaaacttcttggcaaaaataaagccgcgtttttagatgctacggagaagtttatatacaaaatgactggcgaaattagtaccaataaagaccccctctaa

SEQ ID NO: 232213 - DNA, 984 bp, Klebsiella pneumoniae
atgaataaatcattcttacatgccaatacagataaaaatatttacagccttaattcgttaaaattaacactcagcatcatggtcgtttttattcatacaagaatatttttggataacagcgtactgcttgatacctttacgtcaaatggtttttttagaatagctgttccagtattttttataatgaacggatattttttaccatccacaaaaaattcattcaagaaatggttaattaagtcaacctgcatttatttatcgcttaccgctctttacgcttttttttggttagattattcaacactcaccacatcaataaaaacaatagctcatgcattgttggctggttactcacatctctggtatatacaggcaatgataatcgcaggattgataatattttattttaaaaatagcacaccactattaataatatccgtttgtttttttcttttcggcctcttcattcaaatatatacatcatatcaacatgcaataaatccagatctcccacagcgttattctatatacagaaatgctttcactattggattgccttttatgttaataggatatctttttagaactaaatggatacatacaccacagaaaacaacaataataatttgtttattttccgccatattacttggaattgaggtgtttattaattacgcaaaatttacatctaaccagtcgctatcaaaatcaatatcattcgacatctacctttctctcataatgttatgcccagctatttttttattatttaaaaacatggaatcaggaataaaaataaacaaaaacattccgaactacatttatttctttcacccaatacctattttactgctaaacaaaaaattatcttctgttaataatataatttattcggccttgataattatcataacattaattatatcgctacttgttataaaaataacaaaagaactacgtaaaaataacatccttagagcttga

SEQ ID NO: 232214 - DNA, 288 bp, Klebsiella pneumoniae
atgcttgccaaatcatttattgctttagatggcaacggtcgcctgaccggagccagaaccgcacagactgccccctatgaccgttacacctgtcatctttgtggcagcgtcctgaattattatccggagtacgatacccatcgaccatggtttgaacacgccacgcccaccctgactgaaaatggactacgacacattttaatcattagatcccgcaagtgtaatttagtcaggctggcagctatagcatcatatcggggctttagtacccctatgtacaccggataa

SEQ ID NO: 232215 - DNA, 489 bp, Klebsiella pneumoniae
atgcaaatgaccccgcaataccttgccattaacgctgttggaaaatactccacctcatggaacgctatcaatgccccaaaacaaacttggttttgtacatcctgtctcagtgagcttcgtctgcataaagcatctaatggactcgaagcgtgttttacccatgaccttatgtgcctaacgcctgcaaaagcggaaagttgcccctacatcgcagaagaaagaaaaaagcatgagcgcttagcttatctgcgacaaatcgtggagcagctcccactgtatacaaatcagggcaaggactggcgttgcgtgctttgccagcaggattaccacgggcataaattctgtgtgatttgcggcagcggaatttacagtatcgaagacgtatcgacggcattgccggtatacagccctcgcccctgttcacgatttatattaaccggcgaatcagacgatctggagaccccggacattctgtcatcgctgtattga

SEQ ID NO: 232216 - DNA, 642 bp, Klebsiella pneumoniae
atgaattcaacatacctgcttaatgccagttacgcagagcgcacccgtcaggtcttttatgcggcaactgagcagtatcctcggctggctgtatttcgtgctgacttacgtttccctgttgacggtacaggacgcagggatgagcgtgttatctcacgcttcatcgattcactgaaaacccatatggcatcacagttcagtgccaaacgacaggcaggcatcacctgtgaccaccccacttcactgcgttatatctggtgtcgtgaatacggactgcaaagtggtaaccgccattatcatgttgtattgctgctcaacaaagatgcctttcaccagttggggagctttgatcctcctgagagcgggaaattgccttccctggcgaacctgattcagaaggcctggtgcagtgcgctgtcacttccctggccgcagtacgcttcacgggtccggtttccggatggtcagcccatctggattaatcagctgaaaaatcaggagaagcccccggaatacttcaaagcgcttgagtgggcatggtatctgagtaaggaggccagcaagcgatatggtgacggacgctccttcggttgcagccaagataatccctcgcttatcggcagtcgtcgcaagcctcgctaa

SEQ ID NO: 232217 - DNA, 228 bp, Klebsiella pneumoniae
atgccagcaccagtcagtctgctcagtgaccagatggtcgacatgaaattcatcaccgccttcaccggtctcacagataaatggttttacaagctcatcaaagagaagaagtttccgaagcctataaagttaggtcgggcatcgcggtggtttaaaagcgaggtggaaaaatggctgaaagaacgcatcgaggaatcacgtgaagaggagcagcccgaagaaaaataa

SEQ ID NO: 232218 - DNA, 234 bp, Klebsiella pneumoniae
atgtcgagaaataaaaaacggaataaaaaagcacaaaacagcagccagagtgatggtctggcacaggcggtaaacagtgctcagaaggagcgggttatcacttacccgcatgtccatattccatccccggcagagctggggctcgaactacccgaactgaaaaaaaatctgacaacatcggtcttgatactcaatctgcgacggatgaagcgccacagattgatgacagcgtga

SEQ ID NO: 232219 - DNA, 930 bp, Klebsiella pneumoniae
atgtctgatctcgtcttcattaaccccagcaacagctctcctgcacgggaaagaaatcgctacctttttattcagcagccgtacaacaatcgcctggagttaatcatgctggtgaagcgctatgctagacgcagccgtttcagggatgaagggatgcaggcgtttaatcaggcagtgaaagaaacatcggcttcctatcttatcgaggagtcagccctgtcatggctgaaagataaaaaagcagcctgttgggcgtggtgctatatcaagaatcaaaacaaaccgttccccttgcctcccaattcacactggcaggggaatgccagtgtgaatcacctcgactttgtcagttcggagtacatgcctgtggatattccgccattttacagcgacaccggtattcctgatcctgaattaagccctaaagggttgctggaagcggtctctgccttttttgaccagtggcttgttgaacgccatatcaagcacggcgaagcggataaactccggcgtatgtggggagccctgaaccagcgggcggcaatgaaaaagtcgccttttgatttccttgatggcggcaacagtgacgccattgagtggtgctggtcgtatgtaacaaacaaaatgttcggtataaactggtacagattcagtgcaacatccgacagcgatcgccgagcactcctggatagcctgtaccaggtatgggaatgcccaccggacacccgaaaactctttatgcatgaactccggcgagcctggagtcagcggaagtttcgggctgaacaaaagcagcggaaattgttccaggcgtatatcgctccccgtacaaaagagaaactcagccagcttgctaaagagcgggggatgaaaatgaatgaaatactggaacggctcatcgaagatgcctacagtctgatgaaaaagtag

SEQ ID NO: 232220 - DNA, 531 bp, Klebsiella pneumoniae
atgctggctgacagctaccggcagccaggcaaaagcccccatgatgtggcggaatccctcgttatgtatgaatctctcaaagcatgtggctctggttttgcctgtggcctggcgggaagcgcgttattgccactgagcgtaaccgccgatgtctgctcttcactgttttttcagatgcgactatgcgcggcggttgccatcactggcgggcatagcacagatgacccacgggtacgactgctctgctggggtgcggttgccggagatatctgcgcggatgccatcggtggtattgccactagattgttgaatcaaacaatgacattaccagaggctgaaactgcactgctgaccagcatgcgcgatgaactacgcgtcagttatggcggtctttcactgaaagaaagtctgttggtctctttgttgggtggggctgtgaacggcacggccgcctggttggtcacccgtctgacagggcaactggcaatccgtctgtttcttccaccaccagcaccgccctgcgcagcataa

SEQ ID NO: 232221 - DNA, 738 bp, Klebsiella pneumoniae
atggccgtatatcgcgatgacgttgaccttcagttcctggggcgctgtgagaatgaggcgctggatttactggtcagcctcattacccatgacccacgtgataataccctgcggtggactgaaacactttccgacagtgacaactacaaacgcttttatccggcccaccgtaattactggcaggagatagcggctgaaatccagaccttcggtgccagcagtatcgccagtgtgttcaggggggggaaaggtgtgctgtatcgggaagtgttatgcgatgtctgtgaccatacaggcgtgaaatacaggaaagaggaggcaaccgaaaccattgagctctccctgctgatgaagatgctcgaaaaaagcctcagcgaaatgtcccgggctgagctgcgggagtttgctgacagcatgggcacggaactgaccgtgccgacagtgccgctggtactgatggctatacagactgctgtccggtcttccggttttgcagcctatcgtctgtcggtagtgatgctcagtacgcttgcgaaggttgtactggggcgcacactccccatcgcgacttacctgaccctgacccgctcaatcagtgtactggccgggccggttggtatcgctctgagcaccggttggctgatggccgatatggcaggtccggcacgtcgggttacagttccggcctgtctgctggtcgcttgtctgcgtcatcagtatctatacaaatctctgtaa

SEQ ID NO: 232222 - DNA, 687 bp, Klebsiella pneumoniae
atgtctgcggaagaaaaacagcacgatcgcatggcatcacggctggcgattatcatcagtcgcctgctgatgggggaacggttgtcagttatgggcttgtctcaggagtttcgtatctcggagcgcactctgcgccgggattttcgtgaacgcctgagctgcctggaactgacataccagcagggttgctggtcattgtcccaccagcacgaaggcctacgtaccaaccgggatattttgcactttgcacgggtaacccgcacagagcagctattcccggcgatggataaccggctgatatcggtgctgactgacagctccgtagagccaccttttatcgtctggcaatctccaccggagcgcaagcccggtcccttcggcagtttctggcgtatcacacaggccattctggagcgaactctgctggatctgacagcagaggggcagcagtaccgctggttcgcaccttaccgcctgatttatttcgagaacggctggtatctggtcggtgagcatgcccggcaactgcaggtctttctgctggagagtattaccgatgtctgcctgacgccgaggcagtttctgcgcagaaggcaggtgagcgaactgaccagtgatccgcatttcattcactctttgccgcacttccggtttgttcggagagtgctggctgaaaccgataattaa

SEQ ID NO: 232223 - DNA, 441 bp, Klebsiella pneumoniae
atgaaaaaaaccgtacttatgatgatgctactggcatctgctcaggccagtgcagccgctaatatgtggacccgcgccagcgtgcagggtgtgacggaatatcggatacaaaacaaaaatggcgctgagctgctgctgacctgttcgccggaggacaatgtcttcgtacagtacacatcacccgatggcaaaactctcgccagcggtggagatgatggacgcagcgttcaggcgcagaccgacaacagcgacacgtttctgataaacgatacagtttctgatgccgggggcagtaactttgaagcattctgggatgcagccagaaaatcccatcgtatccatataacggcgaccggactgacctccaccaccttcaccttcagcaatgtcgcaaagattctgccagagtttgataaatcaggatgtctgacccgcatgtga

SEQ ID NO: 232224 - DNA, 285 bp, Klebsiella pneumoniae
atgaaaacagcaatgagtgccctcgccgtggcactgatggtctcacctttgctgcacgccgcagagactccggtcaggattggccttgagcaggttaagaatccgtattacccgaatctgcatcagcagcgtgttcatgttcagtcactgactgacagcgtcaccattaacgatgttgtcgttaaccggggtaactgcccgattcagaagttgcccacggtttacgcaggtagtaagcctgtagcactggtaccttcaacgttgccttacgggaaagagatttga

SEQ ID NO: 232225 - DNA, 273 bp, Klebsiella pneumoniae
atgaaaaaattatccactctgtttctcacacccgttatgactcttgttttactgaacgccaacgccgccgtggcggcggagaaagcgtcggaaaccacaccgcaaaacatgacttgccgggaataccttgatatgaaccctaaggcaatgaccccggtagcttactgggcaatcaataatgagaccgtctataaaggtggagataccgttgactggaatgaaacggacaccgtctcggtaccaaagttaaggaaggtgcgaacaagttcctga

SEQ ID NO: 232226 - DNA, 588 bp, Klebsiella pneumoniae
atgcaagaaaatgataccaaggatcagcaggaacctgaaacacaggatttcgatttttcagctgaatttgactctttgattaacgctaggggaaaaattactccttcgttactaatgtcggttaatcgctacttcttatacttttccttctttgaatcccttcttttgaattgtgctggaagccaagggaaaagctctcaatacgcaacgagactcttgcagttgaaggttgtagatctggacgttcttaagcaaacgtaccggttttttgctaagcgttatcttgatgatagaagtaagtttgaaagtttgtgcggggaaccagaacatacatcaaagaaggtcagggaagagtacatttatgctatggaaaccaagacatccgatcctcaagtccaattgatggtttgtttgttcgtatgtttcaggttacgaaacaaccttttccatggtccaaaatggcgtcattttcttgagggccaagaagagcttcttttatctgcgggagatctgatccattccattctctctaatgtaccaaggcaagatgactgggtcttccatgacattcttaacccaaaagattaa

SEQ ID NO: 232227 - DNA, 291 bp, Klebsiella pneumoniae
atggtcaacctccagcttgctgttaagggtgagtatttcgacgtgatgaagcgaggcgagaaaactgaagagtttcgcctggttaatccgtattggggccgtcgcatctttgggcgcgactatgatcgcctgattattacgcgaggataccccaaaaaggacgataccagccgccgcattgatatcccgtatgacggatttgaaataaaaaccattactcacaaacatttcggcgaccagcctgtgaaggtattcgccatcaaggtgaatatcgaaggagccaaccaatga

SEQ ID NO: 232228 - DNA, 183 bp, Klebsiella pneumoniae; identical to SEQ ID NO: 185841

SEQ ID NO: 232229 - DNA, 237 bp, Klebsiella pneumoniae
atgttttacgcgctgacggcctacaactacgcaggtgagcccagtttcagggtctttccagacgatgataggttccagtacacccagctctttgatgttcagaaccatcccttcgtcgataggaaggtggatgcgctcatcgtaaagcgggtgcgttttgtcggtaaccaggtgcaggttttcaggttcgaacgtcaaaacgttggtttttccgttggcgccgtatacaagctttga

SEQ ID NO: 232230 - DNA, 777 bp, Klebsiella pneumoniae
atgccggtcaaactaaaaggtatcactctgccatcctccttgatttatccaaagctggatggctttaagttatttgatgtaatggctgaggttccggtcacggatggcttagttggttcatatttccttggctcaaaaaatgccgacccatcatataattttgcgaacccatcattacctctttctgtaaatttaagccctgatttctctgatgcaaggttttccgtggtaagtgtactgaagggtttttttgatacaggaataacttccacagcacagcaaaccattatatcgattgcaaaaatgccaaatcagaccgctgcaatagtgtctaactaccttaaggacagttcaggtggtgtttccggtgattccatattggaaagaataacttctaacaaatcacttaacacatatgcgcaatcgagcagtaacgcagtaacacaggcgcaacgagataattcctcatttaacgttgatgacttctttgtttctggtggtgtaattactggcgccccatcagtcggttcttggataatgtctgaaactgcagctcccgctggtacttacataaatcttccaggaagagtggtggcaagtagaactttacgtatcggcgccagttactcttctaccgaatttactgctgatatcggaatttcggcagttattatttataacaaggatataggcagtgataatatcactacagttatgaattggttgcgtaatatcgtaggtgtagaagcgggaatatggagcgcaccgaagagctga

SEQ ID NO: 232231 - DNA, 1707 bp, Klebsiella pneumoniae
atggccgaacttaacccgcctttgggaacgacgacgcctgaaatattcctggataacgtcaagcgcgctgacgagctggttaacggtccggtcggaacggttaacgaccgcgcaggcgaaccgctcgatacctggcgccagatgatggctaagaatgacgaagttcggcaaaacatcatcccgctcagtaagcagtatcaaacgctggaggctgcgcaggcggatatcgcgaatataccggtaaactccacaacctacgtgcgtagccaggacggaagcgcgctggctgacgagtacatgaatgtggcaggcactctcacggcaacaggccgtaaaatgccatcgcaggccgctgtcgatgaaatcagcgacagaatcccatatgttccaagtcctagtgaaaaagtgccgttatttgtagatgaagatgataatgttcctgtctggctggaaggcggtaagctgaatgcggtaggtctgtctgatgagctaagggatgtttcggataccgactacgctccaaaagtgccgttatttgtagatgaagatgataatgttcctgtctggctggaaggcggtaagctgaatgcggcaaaattgcatgaagatttgacagacggttttttaacttactcgcaattaaatgattttttagtatctaaaatcctgaatacttcagggtcaactatttggaagtttagagctaaaaaagcaaagcttgacttaggcattagcagtaggttgaaaattggttttaccggtgactcatggacagagcacaacactatcccacaggtgtttgctgactatttctatgaaaaatatggtaaatctggagatggatggcttcagttaaatatagacaatccaaaccaattaaatggcataactttgtcaagaagtgggtggtcgatttatgacgcatctcaaacctcatctaatccaacattcccgacagcgatggacggtcagtacatttatgcgacgggtacagctgcgacgctatctatcagcaacctgtttgatacttcagttcagattttttattacgacggtactggaacgttcagatactccgtgaatggaggggttccagtcgttgtaactggagcagggacaaacaaaattgtcagcgtgacggtatctggtctgaattcgtcttccgctacaactttaagtctcgatctggtgggcaatggcgggactgtggttatttacggattttatgcaaacggcaccgggaacggcgttgaaattaacaaaatgggaaatggtggcataactgcaccgcagtatactaaaacgctgccctacctctcacagactggaacagttgtcgcgcctgatgttctgataatgatcattggaaccaacgattatagaacaagtgttagccttgatgattttcgtgccggtttaacacaatggcttgccgcatggaaagccattatcccggatagcggtataattcttattgtaccggcacaatgcaatgctacaggatctaaccctctttcatctttcagaaatgttatgcgcgaggttgccgttgataatggtgttgaattttatagtctatatgacttcatgaacactacatatgcaaaaagtaattcagaggggatgtgggtagatggcttgcatctaagtaacgcaggtgctcattttttacttaatcaaattaataattatttttttggagcctaa

SEQ ID NO: 232232 - DNA, 1416 bp, Klebsiella pneumoniae
gtggtggatgcattcgaggtgaatttctccttcccgaacggcatctgtggctttgacagtaagggcaaaaaacggatccgccacgtggagtgggagatacagtatcgcgactacggttccggatcggggtgggtgagtcaccagggcgagtatgcgctgaaaaacgtcaacgggttaggtttcactgagcggatcaccctcagctctccggggctggtagaggttcgctgccgtcggcgcaatgagcagggctcaaacaacgcgcgagacagtatgtactggcaggcactgcgcgggcgactgctgacgcgcccttcatcctatcccggcgtgtcgctgatggcggtgaccgttgagacgggcgggaagctggcggtgcagtcggaccgccgcgtaaacgttgtggccacgcgggcctacgactcaggaacggctagaaccatttcgggagcgctgctgcatgtcgggaactcgctggggctggagatggatgtcgacaccatcaacgcgctggaatccgcgtactggacgccacggggcgaaaatttcgatttcgccacgggcgacagtatctcggcgctggaaatgctgcagaagattgccaatgccgggaagtcacgttttctgctgagtgatggcctggcgacggtcaaccgcgaggggattaagccatggaccggtgtgatcactccgcatgagatggtggaggagctgcagagcggatttaccgtaccgtccgacgatgattttgatggcgtcgacgtgacatacatcaacgggactacctgggcagaggagaccgttaaatgccggacgtcggacaatccgacgccagtgaaaatcgaaaactacaaactcgatggggtactgaatcaggatcacgcctaccaaatcggcatgcgtcgcctgatgaaatacctgcagcagcgggtgacgttccagaccactaccgagctggacgcgctgtgctacaacctgggcgatcgcattgtgctcacggatgatattccgggtaacaacacgatttcctgtctggtggaggcgatgacaacggctggtggcgtgacaacgttcaccgttacggagccgctggactggtctttcgaaaatccccgcgcgctgatccgctatcaggatggttctgcatccgggctgatggtggcgagcaaggtaggcgattttcagctgtcagtcccgcacctgagcgagtttgatgacccgatgaaggttgacctgtcgtcggcaaccatcgagccgatccgcctggtgttctgcggatcaacgcgccacgtctacgacgccattgtagaggagatcgccccgcagtctgacggaacatgccaggtcaccgctaaagaatatctcgaatcgttctaccagtacgacgacgccacataccccggcgacgtcgcttaa

SEQ ID NO: 232233 - DNA, 486 bp, Klebsiella pneumoniae
atgagcaaatcaaaatcgatcgcgactctggttatccatgccggagatcaagttgaccggggcaataatgctatttttccaccgattactaccgccagttccttcattcagccaaatttaggcgaagaaggggagttttgttattcccgttgcagtaacccgacaagatatgcatatgaaaccgccttggctgagttggaaggaggtatctatgctacggcaaccgcttccggtatggcagcaactgcacttatattggaattgctacctaaggattcccatgtattagtaatgaaaggggtctatggcggtacttatcggttgtttgaacgtctgcgtaaacaaacttcaggtacgacattcagttatgtcgatcttaatgatctggcgtcagtagagcgccatattcaagagaatacaggtctaatctggatcgaaacgcccactaacccactgttggaattagtggcactgttgcaaagttag

SEQ ID NO: 232234 - DNA, 1278 bp, Klebsiella pneumoniae; identical to SEQ ID NO: 112540

SEQ ID NO: 232235 - DNA, 642 bp, Klebsiella pneumoniae; identical to SEQ ID NO: 112541

SEQ ID NO: 232236 - DNA, 939 bp, Klebsiella pneumoniae; identical to SEQ ID NO: 112542

SEQ ID NO: 232237 - DNA, 792 bp, Klebsiella pneumoniae; identical to SEQ ID NO: 112543

SEQ ID NO: 232238 - DNA, 729 bp, Klebsiella pneumoniae
atgataagtttatcaccaccgactatttgcaacagtgccctttttcgcccctcccgctggcgcattacctcattaattgccaatattcaacagattggcctcaatgctgtgccgatcattatgttgctcacctttttggtgggggcagttatcgcctttctcggtgcaaccgtactcactactttcggcgcgggcatttttaccgtcgatttggtggtattttcttttctacgtgaatttgcggtactgcttaccgcgatcctgatggcagggcgaacagccagtgcttttaccgctgaaattggcttgatgaaagccaatgaagagattgatgctatccaaacactgggcttgaatccggtcgaactgttggtgctaccgcgcgtcttggcactattgatctctctgccgatgctaacctttattggcatggtttgcggtattttcggtggcatggtggtgtgtgccttaacactggatatctctcccactatgtttttgtcgattatgcaaaacagtaatgggttgcagcattttctggtgggaataagtaaagcccctatttttgctttcctgattgctattattggctgtctggaggggttcaaagtaaccggtagtgctgaatcagtcggggttcataccaccaccagtgtggtgcattcgatctttgtggtgattttgcttgatgccgtggcagcgctatttttcatggaaatggggtggtga

SEQ ID NO: 232239 - DNA, 684 bp, Klebsiella pneumoniae; identical to SEQ ID NO: 193790

SEQ ID NO: 232240 - DNA, 990 bp, Klebsiella pneumoniae
atgtatcgcaactttcgttcaaagccaagacttttgcaggtacagaacgatatcattcgtcaactcgatccagcatctgttatgccagatgagctgttagaaggtgacgaaggcgaagtttacacccaccattttactgacagtcgggaagaagcggtttgtttagcgaatgttatacatgattggatcgaaactgaacgattaccgccagctgaaatcgcgattcttgtctccaagcagttggatctctacgctgaccatcttatggctgagctggaaattcgcggtattccataccgtaacgaacagcaaatgcaggatattacggttgaaccggctgcacgcttaattgtcgattatttatcctgtctttacggccagcgggaacctaaagcctggattcggttgatgaaccagctaattccctttgccgatgaagaaatccagtccagcgcgcgaaaagagcttgatcgtttaattaaaaatcagcgcaaagaagcagatattgcggagctgattgactcacgcttctctgattggcgggaatgtgttagcgccttcttagcacatatcagttccgaaacgttgatggcgctatcgcctgactacgaatcacaaacgcgcctacgagaagtgattcgtgatactaaagtacggattgaagagctgctccaaatagaaccagatttgcctaaggctctggagcggtttgtggatgatcaggccgttcgcattctgaccatccataaaagcaaaggactggaatttgactctgtcattatcatggcagttgaaaatgagactttctttggtaaccaggatgaaaatcgctgtgcgttttttgttggcgtttcgcgagcaaagaggcgattggttttgacgcatgctgatcggcgagagcggcctgctaactataccaaacgctgggatgttgttcgttctgttcaatttgagtaccttggctatatcacgccatttgtaaggcaataa

SEQ ID NO: 232241 - DNA, 1419 bp, Klebsiella pneumoniae
atgttcgaggtgaatttctctttcccgaacggtatctgcggctttgacagtaaggggaaaaaacgcattcgccatgttgagtgggagattcagtatcgcgtctacggttccggatcaggatgggtgagtcaccagggcgagtacgcgctgaaaaacatcaacgggttaggtttcactgagcggatcaccctcagttctccggggctggtggaagttcgctgtcgtcgacgcaatgagcagggcagtaataactcgcgcgacaatatgtactggcaggctttgagagggaggcttctggcaagaccggtatcctactcaggtgtaacaacctgggcaattaccgttgaaaccggagggaagctggcggcacagtctgacaggcgcgtcagcgtggtcgctacccgtgaatatgaggggggaggtaacagaactataagcggcgcattccgtcatgtggcaaatagtcttggatttaatgctaatcagctcgacacctctgcaataaatgctcttgaaactgcctggtggacgccgaggggagaatattttgactatgaggcaagcagcgacagtgcttcagcgaaagatattttcgacaaaatcaccgaagcaggcatgagctattttttgctatcagatgggctcttatctgccgggcgcgaaggtatcaaaacctggaccgggatcatcactccccaggatacggtagaggaaatgcagacatcattcagggccccttctgatgatgattatgatggtgttgacgtcacatatattaatccggttacctgggcggaggaaatcgttcagtgtcggacagctgataatcctgtgccacgcaaagtggagtcgtactcgctgggcattgtaatgactgcagatcgtgcttaccggataggtatgcgcaggctcatgaaatatctgcaccagcgcaggacctatgaatgcacaactgagcttcttggctggtgctatcagtttggcgatcacatcattctttctgatgatattccgacgggtaaaacaatcagctgtctgatagaaggcgtgacattcgatgatgaagttatcacgttaacagtcactgagcttcttgactggagctatgctaatccgcgctgctggattcagtttcagggggggcggccgtcgactcgtttgctaacgccgacacgtgtcgatgacttcacccttactataccgtacaacgacgacctgcacccggaagactggattatggatgatccggatgttgaattacctcgcctgttgttttgtgacagtgagaagggggcgcggcacggtatcgttcaggaaattgtcccgtctgatgactgtacttgccaggtcacagccccggaatataaagaaatcttttacgcatacgacgacgctacataccctggcgacgtagcttag

SEQ ID NO: 232242 - DNA, 141 bp, Klebsiella pneumoniae
atgaaaacgttctttaaggttaaaaatcttttaaaatcaatgagatacttaaagcgtttcctgtcactgaatgcggcagtgaaacgcgagtgcgtggtggtgtgtaacaccttcgctgtcgcattcagtgacaggcactag

SEQ ID NO: 232243 - DNA, 276 bp, Klebsiella pneumoniae; identical to SEQ ID NO: 145354

SEQ ID NO: 232244 - DNA, 342 bp, Klebsiella pneumoniae; identical to SEQ ID NO: 145355

SEQ ID NO: 232245 - DNA, 192 bp, Klebsiella pneumoniae
atgacgaaacaacagaaaactgcgctgaacatggctaaattcatccagaatcagtctctgctcctgctggagaagcttaacgagcttgatctcgatgctgaggccgacctttgtgagaaactccacgatgatgcggagcatcttttccgtacactgtcctcgagactggatgcattacaggatggtaactga

SEQ ID NO: 232246 - DNA, 1359 bp, Klebsiella pneumoniae
atggtactggatattccgtggaatgtcggtgcgttaaatttcgggcttgaccccgcaacgcttccattaggttttcaatttatagggtggggttgccgacgcccatatacaattgatgacgataacagttttctgaattgcggagtcgtcatccgcgtagcagctggtgcaagttttccattttattcaacaggcaggcatgtattccgggatattgtttttgatggccgagataaaacaacgtaccttttttattcgccaggtactgcaacccagttcaacggcacccgacttgaggggtgcggattttatcggtttgcgatcgggattggctgggcttcaggaggaacagccaggtacatcggaacaatgaaagcatatttctgttcaatatccggaaacggggatggtgtcaggaatttaatagactccatgatgtttggttgcacaatcaatgctaatgatcgaggagtggcccttaccggtggggcaaacaataacttttttggaggatgccggaacgaatggaacaccggcgataactggtatgcgtaccagtcggtggagaaccagatttccggtgagctttgcgacagggccggaaggggaggtgtggtcgccggggcgaaatccgcatggattttaaacggcgttaacgtccggcgcagtggtgctaatcaacccgtgggtaatgactattccgcaaactttattattattgatgacggtaaaattgaactctcaggggtaagaactggtgtcggtgcgaatgacagcggtgacggagggacaatctcgccatcctacaacgtatcggctcttggctctggcggggggactttactggtttccggaagtgatatgactggttttgttacttcagcaattaaccagaaggcgaccacgttaaataagttgataaccggcaaccttggtatggacgacgatgtaaatattggtatgacccaggttgttaaaggcaggcgaattattggttcacagtcatcaggtacgttagcaggttctgtgggtgcaacgttatctctgaccaagaccaacatattccagaattctttcgatacatatattacccgttcaatcctaattgaatgtcgaattggtagccggtcacttggtgacgatattaaaattcccgtcagattcagaagggagaatctttattatctggatatcctgacctcgggaattgttgccagctctgcacgcattgggctttcagggactggcgtaacggtatcattgtccattaacagctcaaccggtctggttactgttcaattgacaaatgttgatggtctggaaagaaccgttaatgtatcaatgttgccctcaatgtag

SEQ ID NO: 232247 - DNA, 1215 bp, Klebsiella pneumoniae
atgattggcggtataacagatttctatcgttcatggcgtggtgtaaaactatcagctgaaatggcactggttattaaaaattggactcttagtattttacttactatgggcattgtttcatttaccccagaaataataattccttttaaaatcatgctgtggtggtatatatcatcgtttttgggaattctattatgtcgcactttaataagatatggggctcgctgggtaagattattaggttataatactcgcaaggtcgctattgctggaagtatgcctgtaggaataagtttagctaagagttttatcgaagagccatggttaggatttgttgttaatggatattatgatgatgtcaataagaatgagtcggctattccatatattggcaattacgatattttattgaatgatgctaaggctggtaaaatagatcgaatttatattgcgatgagtatggacgaccatgagaagataaaaaatttaataaaacaattaactgatacaacctgttcagttatgttaatacccgatatctttactttcaatatattgcaatctagaacggaagaagtaaatggagtaccggtagttcctcttttcgatactccactaaatggaataaatatggttttaaagagagtagaagatatattcgtctcaagttgtattttattgttaatttctcctttgttaatattaatttctattgttattaaattaacatctgcagggccagtgatttttaaacaaacaagatatggtatagatggtaaaccaataaaagtttggaaatttcggtcaatgaatgttatggaaaatgatagtgttgtcactcaagcaaaaaagaacgattcaaggatcactccatttggtagttttttacgaaaaacatcgttagatgagttacctcaatttatcaatgtattagtcggtaatatgtctattgttgggcctcggcctcatgctgtcgctcataatgaacaatataggtcactgattgaaggctatatgttacggcataaggtgaaaccaggaattactggactggcacaagtaaaaggctggcgcggtgaaacggatacattagagaaaatgcaaaagcgagttgaatatgatttagagtacattcgagaatggagtatttggctcgatattaaaattatattacttacaattttcaagggttttgtaaataaatccgcgtattaa

SEQ ID NO: 232248 - DNA, 846 bp, Klebsiella pneumoniae
gtgggttatctggctgatggctcagtcggcaacattatcaatggtgaattggttgaccgtaatggctcggcgaatttcgcggtgcttaatggcggaggctttctcgttggggatgtattctcccagcgacctggccgaacctcggcggcaggttcctcctataatactcatttttacatggagggcgcaggcagctatatcatgctcagcaatgtcgtgacacgaaccggcgttgatgatgatggccagggaaaactgacgccagaaagggtactgacaaccggtggcggctccacggatatgacttttattgccaatggttgtgatttgtccggatacaccctatccgcgttgcggcaaattaccactgccgagaaaatgattttcaggggaaataaaggcgtacctgacctgataactactggcctttatcagttccagaacggtcgggggaatgtgggaggtgtgaagagcaatcaggttctgacgtccggcgttggttctgtgttagccctcagttttcaggaaacgggattagccgatcccacgacagcccaggcaacgctccctttgtgcagaacgctcctgattgaatcgctaacatcaggcggggtatcaggaaaattcaaactaccgtttcagataaggcgcgtggtacaggccgctaatgttgacctgtatacctctgaagcccgttcatcgcccacgggagcctacgctgtcactggcgcgacaggtgtcaatgtatcactggcagttaatgctgatgccacactgacaaccgtcacgctcaccagcgttgacggcatcgggcggttcctgcgcgtgacaattctggacaactaa

SEQ ID NO: 232249 - DNA, 402 bp, Klebsiella pneumoniae; identical to SEQ ID NO: 221994

SEQ ID NO: 232250 - DNA, 981 bp, Klebsiella pneumoniae; identical to SEQ ID NO: 219474

SEQ ID NO: 232251 - DNA, 858 bp, Klebsiella pneumoniae
gtggcagtgcaggtgcagggtgacgtcatagcgcttcttgatttcgctgaccagctcaaaggcggcatgcggcgtcagaatgccggacatgtccttgatggcgacggagtcaacgccggtctccagcagctgttcggtgaggtcgagccaggtctgcagggtgtgggccgggctggtggtgtacgaaagcgtaccctgggcgtgggcgccgtggcggcggaccgcctgcagggcggcctgcatgttgcgcgggtcgttcatggcgtcgaagacgcggaagacgtccatgccgtttttgacggcgcgctccacgaagcgctccaccacgtcatcggcgtagtggcggtagccgagcaggttctggccgcggagcagcatctgcagcggggtcttcggcatcgcctttttcagctcgcgcaggcggacccacgggtcctcgccgaggaagcggatgcaggcgtcaaaggtggcgccgccccagcactcaagcgagcggtagccgacgtcgtccagctgagcggcaacgggcagcatatcgtcgagacgcagacgggtggcgaacagggactggtgggcgtcgcgcaggacgacatcggtaatggcaacggtcatgaattcctccgtgaattaagggtgaagacggcgatggtggtgaatggcggcgacaatcgccggcttcaggcgggcgaagtcgtcggcgggcgcgacggcggccggcgccgctgcgggggcggcggacggctcgggaaacaggcggttgacggcgagggacattccccggatggcaaagatgagcagcagcaggaacaccagcacaaagcccatgccgagaaacatcagggtgaagccttcgcctaa

SEQ ID NO: 232252 - DNA, 447 bp, Klebsiella pneumoniae; identical to SEQ ID NO: 10873

SEQ ID NO: 232253 - DNA, 2163 bp, Klebsiella pneumoniae
atgacaccgattgttaataacaaaactcaacaagctgaatcagatgattttgatcttgggcgtttgttgggtgagcttatagataatagaaaactaataatttctattacatcagcttttactgtattagctgtattatatacactgctagcaacccctatatatcaagctgatgctttaatacaagttgaacaaaaacaagggaacgctattctaaatagtatcaatcaaatattaccgaatagtcaaccagagtctgcacctgaattaaccctactccagtcaagaatgattttaggaaaaacagttgatgatcttaatttacaggctcaggtaagacaaaagtattttcctgtaattggacgtggggttgcaaggctcttgggagaggagtcaggatctattacagttggaaaactttatttaccacaagttgagggaggagatgctcctcaggtgattttaactgtaaatgatggggaaagatatactattgctggtgacgattttactctcgagggaaaagttggcgagttaataaatgacaaaggtgttactctattaattaaagaaattaacgcgcaaccgggaagtgaatttgtaattacctatcttaataagttgaaagcgattagcaacttgcaagacgcctttaatgttgccgatcaggggaaagatactggtatgctttcattgacgttaacaggtgacaacccgaccttaataaagaatattttaaatagcatcagcaataattacttagagcaaaatgtggaaagacaagcggcacaagatgctaaaagcttggattttttgaacgagcagttaccgaaagtaaggagtgatcttgattttgcagaagataaattaaatgcttatagaaaacagaaagactccgttgatttaacgatggaagcaaagtcagttcttgatcaaattgtaaatgttgataatcaattaaatgaattgacatttaaagaagctgaaatatcgcagttatatacaaaagagcatcctacatataaagcattagttgaaaaaaggaaaacacttcaagatgagaaagttaagctaaacaaacgtgttagctccatgccttctacgcaacaggaagtactaagattaagccgcgatgttgagtctggaagggcagtatatttacaattattaaatcgtcaacaagagctcaatattgcgaaatcaagtgctataggtaatgtccgtattgtagatgatgcagttactgaacctaacccagtaaagcctaaaaaaatattaataataataataggaacaattcttggtgcatttatttctattggcattgtcttgttaagaatgtttttattaagaggtatagaatcaccagagcaattagaagaggctggtataaatgtctatgcaagcgttcctgtagctgaatggtataaggcaaatctagtcaaaggcaataataaacgaaaagaacctgaatctttacttgcaatagaaaaccccgctgatctagcaatagaagctattaggagtctccgtacaagccttcactttgcaatgatggaagcaaaaaataatatattaatgatttcaggtgcaagtccaaatgcaggaaaaacatttataagtacaaatttagcggcgacaatggcctctagcggaaaaaaggtattatttattgatgctgaccttcgcaaaggttatgtacataaaatattgggttccaataatgataatggcttatctgactatttatctggaagagtatcccttgaaaaagtgattacaactgttacaaaagggaattttgattacattccccgcggtcaggttccgcccaatcctgccgaattgttgatgcatcctcgctttaatgaattgatttcgcaagtatctaagctttatgatttagtaattatagatactccccctatattagcagtcacagatgctgcaattattggtcgttatgttggtactactttactcgtggcaagatttgaaattaatactaccaaagaaatacttgtgagtattaaacgttttgagcaaagcggagtgaatgtaaaaggttgtatccttaatgggatggtaagaaaagccagtagttattatggctatggttacaaccattatgggtatgcatattccgaaaagaataataaataa

SEQ ID NO: 232254 - DNA, 555 bp, Klebsiella pneumoniae
atgatcaacggcgagcagtcgcaggtggttagcctgcgcgcccagctggcggaggcgaagtacaatctcgaccagactaccgtgcgggcgcccagcgatgggtatatcactcaagtgttgatccgtccggggacctacgctgcctcgctgccgctgcggccggtgatggtgtttatccctgagcaaaaaaggctgatcgtcgcccagttcaggcaaaattcgctgttaaggctggagaagggcgacgacgcggaagcggtgtttaatgccctgcccggacaggtattccacggcaaactggtgagcattttaccggtggtgccggggggaacctatcaggcgcagggggcgttgcagtcgctgaccgtgacgccgggcagcgatggcgtgctggcgaccattgagctcgatccgaatgccgaaatcgatgcactacccgatggcatctatgcgcaggtggcggtctactccgaccatttcgcccacgtttcggtgatgcgtaaagtgctgctacgcatgaccagctggatgcactacctctatctcgaccattaa

SEQ ID NO: 232255 - DNA, 522 bp, Klebsiella pneumoniae
atgtcaaagccaaaataccccttcgaaaagcgccttgaagtcgtgaatcactacttcacaactgatgatggttacaggatcatctctgcacgttttggtgtgcctcgaacacaggtcaggacgtgggttgccctctatgaaaaacatggagaaaaaggtttaattcccaaacctaaaggcgttagtgctgatccagagttgcgcattaaggtcgtgaaagccgtgaccgagcagcagatgtccctcaatcaggctgctgctcactttatgcttgctggtagtggttctgtagccaagtggctgaaagtctatgaggagcacggagaagctggtttacgcgcactcaagatcggcaccaaaagaaacattacaatgtcagttgatccagaaaaagcggcgttagcattggagctgtcgaaagaccgacgtattgaggatcttgaaagacaagttcgattccttgaaatgcggcttacgtatctaaaaaagctgaaagccttagctcatcccgcgaaaaagtga

SEQ ID NO: 232256 - DNA, 732 bp, Klebsiella pneumoniae
atggctattctgggattacagggcgtgcgaggggggactggcgtcacgtccattacggctgcactcgcctgggcgctgcaattgctcggtgaaacggtgctggcgatcgacgccagcccggataatatgctgcgttttttcttcaataccgacatccatcatcaggacggctggtcgcgggcgctgctcgatggccgggactggcgcgacgcgggtctgcgctatacgcagcatatcgatctgctgccgtttggccagctcagcgcgggcgaaagagaaaacgtcgaccagctgcagcccaccctgggggcgatgacggaggccgtactgcagctgcaggggcagtaccgctggctactgctggatctgccggcgggctattcgccgttgacccgcgagctgctgacgctctgcgaccgctcgctggtggtggtccatcccgacgccaacagccatatccgtttgcaccagcagccctttccggccaacagcgatattctgattaacgatctgcgggtcggcagccagctgcaggaagatctctaccagctgtggctcgagagccagccgcgcatcctgccggtgaccattcatcgcgacgaggcgatggccgagtgcctggcggcgaagcagccccttggggagtatcgccaggactctctggcggcggaagaggtactgaccctggcgaactggtgtctgatccactatgccggcgggaggccggcatga

SEQ ID NO: 232257 - DNA, 3480 bp, Klebsiella pneumoniae
atgcgcaagctctcactaagtttactcacgctgtccctcggcgttgcgctgctgccgttagcgcaggcggcgacgacgcccgcccagaaacatctgctggagcaggtgcgcctcggcgaggccagcaatcgtgaagacctggtgcgccagtcgctgtaccgtctggagctgattgaccccaacaatccggacctgattgccgcgcggatgcgctatctgctgcgccagggggatgccgccggggcgcaaaaagagctggagcgactgacgaagctggcgccggactccccggagctgaaggcgtcgcgcaatgagatgaaaagcaacaccggcgagggtcgtcaggcgctgcagcaggcgcgactgctgggcgtggccgggaaggtcgatgaagccatcgccgcctacgaaaagctgttcggcggcgtgccggatgatgttgatgccgcgattgaatactggacgctggtggcgcgcctgccggcccgtcatagcgaaggcgtcagccagctgaaaaaactgaacgccagcgcgccgggcaacgtcagcctgctgacggcgctggcgaagcagatgtttgccgataacaaaccgcaggaagggttcgcctatctggcggaaatggcccgctcggcctcaggacgcggtatcgccgccgatatgtggtacagcgaggtgaaaagcatgccggtgagcaaggccagcgtgcaggcgttgcagcaattcctgctgcaatttcctaccggctcggtggcggcgaacgcccgcgtcctgctcgaccagcagcaggcgcagctgcaggatccgacgttccgcgcccgctcggaagggctggcggcggtcaaatccggaaatacctcgcaggcggtggcggatctgcagaaagccgttcaggccgacagccgcgacagcgatgcggtgggcgccctcggccaggcctattcccagcgcggcgaccgcgcgcgggcggtggcccagctcaataaagcgattgccatggatcccgacagcccgaatcgcggcaaatgggacagcctgctgcaaaccaaccgctactggctgctgatcaagcagggggataacgccctgaaggccggtcagcttgcgcaggcgcagaattattatgcccaggcgcagcgggtcgatcggaccgacagctatgccgtgctggggctgggcgacgtcgcggcggcgcgcaaagagtcggcggcggcggagcgctattatcagcaggcgttgcgcctggatcgcggcaataacctggcggtgcgcggcctggccaacctctatcgcgccgaatcgcccgagaaagccagcgcctggatcgccggccttcctgctgcccagcggcgcagtattgatgatatcgagcgcagcctgaccaacgaccggctggagaaacaggcgcaggccctggagagccagggcaactgggcgcaggcggcggaagtccagcgtcggcgcctggcgctcgatccggacagcgtgtggatcacctatcgtctggcgcgggatctggtcagcgccggcgaacgccagcaagccgatgcgctgatgcgggcgatggtcaaccgccagccgcaggatgctgaacggatatacgcctcggggctgtacctgtcggggaacgaccaggacgatctggcgctggcgcaaatcgccaccctgccgcgcaacgcgtggacagataacatccgtgaactggaggcgcgtctgcaaagcgaccgggtgctgcgccaggcgaaccaattgcgcgacagcggcgaggaagcgcaggcgatcgccctcatcaaacagcagccggcctcggtacgctataacctgacgctggccgactgggcgcagcagcgcggcgacaaccagacggcgattgccgactatcagcgggtgctgcgtcaggaagccgacaacggcgatgcacgcctcggccttgcggaagtctacctggccgagggggataaaccggccgcccgggcgcaggtcatgcagctgaaaggcgcagaggccgaatccatgaatatgcagcggcgggtcgccctggcgcgagctggccttggcgataccgctgacgcccaacggatttttaaccagattgtgccgcaggcgaaggcgcagccgccctcgatggagagcgcgctggtgctgcgcgatgccgcgcgctttgccacccggaacggggagccgcagcaggcgctgactcactaccgggaggcgatggtggcctccggcatcacccccgcgcagccgcaggataacgatacctttacccggctgacgcgcaacgacagccgggatgactggctgaagcgcgggatccgcagcgatgccgccgatctttatcgccagcaggatctgaacgtcaccctggaacatgacttctggggatccagcggcaccggcggctattccgatctgaaggcgcataccaccatgctgcaggtggatgccccgctagcggatggccggatgttctttcgcaccgacctggtcaatatggatgccggcagcttttccacccacagcgacgggagctactcgcccagctggggcacctgcggggagatcgcctgcaccagcggtagtaaaaatcagaccgacagcggggccagcgtggcggtcggctggcagaacgacacctggagcggggatatcggcaccacgccgatgggcttcaatgtcgtcgatgtggtcggcggcctgagctacagcagcgacgtcgggccagtggggtacacggtcaacgtccaccggcggcccatctccagctcgctgctctccttcggcgggcagaaagacagcaacagccataccggcaccacctggggcggtgttcgcgccgacggcggcggtgtgagcctcagctatgaccggggcgaagcgcacgggatctggtcctcgctgggggccgactcgttgaccggtaaaaacgtggcggataactggcgcgtgcgctggatgaccggctactactacaaggtgattaacgagaataatcgtcgcgtcaccgtcggcctcaacaatatgatctggcactacgacaaagatctcagcggctacaccctcggccagggcggctattacagcccgcaggagtacctctctttcgccgtgccggtgacctggcgtcagcgcacggagaactggtcctgggaactcggcgggtcggtgtcatggtcccattcgcgtacccaaacgcaggcccgctatccgctgctgaacctgatcccgtccgactaccggcagcgcgccagcgaactgacggagcagggcagcagcagccagggattcggttacaccgccagagcgctggtggagcggcgggtgaccagcaactggttcgttggcgccgcggtcgatattcagcaggcgaaggattataccccaagccatgcgctgctttacgtccgctactcggcggcaggctggcagggggatctggatatgccgccccagccgctggtgccttacgccgactggtag

SEQ ID NO: 232258 - DNA, 1569 bp, Klebsiella pneumoniae
ttgtctattttccgcctcactctgctggcgctgatcgcctgcgtccctctgctggctcaggccgcgcagcactcgctcaccaccgcctggccggtgaacgtcggcccgctgaatccgcatctttatacccccaaccagatgtttgcccaaagcatggtctatgagccgctggtgaagtatcaggctgacggcagcgtgcagccctggctggcgacccgctggcgtcactccgacgatggtaaaacctggtggttcaccctgcgcgaggatgtgaccttctccaacggcgaaccctttaacgcccaggccgcagcggcgaatttccaggcggtgctcgccaaccgtcaacgccacgcctggcttgagctcgccaatcagataaccgacgtgcgggcgctcagcgccagcgagctgcagatcaccctgaaaagcgcctacgcccccttgctacaagagctggccctgccccgcccgttccgctttatcgccccctcgcagtttatcgatggcggcaccgccaacggcataaaagccccgatcggcaccgggccgtggcgactggcgagctcgcagctcaatcagcgcgacgtgctggtacgcaacgaacagtactggggtaataaacccgcgctgcagcaaatcaccatcaaagtgatccctgacgccaccagccgcgcggtggcgttcgaaaccggggaaatcgacatgctctacggcgacgaagggctgctaccgctggataccttcgaacgctttcgtcatcaccccggctacgtggctcgactctccgccccgacggagacggtgatgctggcgctgaacgccagccagggcccgacccgcgagcaggcggttcgcgaggcgctcaactacgccgtcgacaagcagaccctcgtcgatagcgtgctctacggcacccagcaggttgccgacaccctgtttgcgccctcggtcccctacgccccgcaggatctgacgccacgccgttacgatccggcaaaagcccgcgccctgctggcgcaggccggctggcagcagccggaaggccagccctggcgacaaaaagccgggcaaccgctggcgattgagctggcgtttatcggcaccgacgcgctggctaaatcgatggccgaaattattcaggccaatctgcgggaggtcggcgtccgcgtcaccctggtgggcgaggaggagagcagcatctatgcgcgccagcgcgaaggccggttcagcatgatcttcaatcgcacctggggcgccccctacgatccgcatgcctttttaagctcgatgcgcgtgccctcgcatgccgattatcaggcccagcgcggcctgcccgacaaagcgatgattgataaagagattagcgaggtgctgaccaccagcgacgaggcgcagcggaaacggctgtaccacgatgtgctgacccgtctgcatcaggacgcggtgtacctacccatcagctatgtctcgctgatggcggttgcgcgccaggaggtcggcgagatcccgttcgcgccggtgaccaccgagatcccgttcgaccagattaaaccggtaacgccataa

SEQ ID NO: 232259 - DNA, 1560 bp, Klebsiella pneumoniae
atggaattgttaatggatccctcaatctgggccggcctgttgacgcttatcgttctggaaattgtgctcggtattgataacctggtgtttattgccatcctggcggacaaactgccgccgaagcagcgtgataaagcgcgactgatcggcctgtcgctggcgctggtgatgcgcctggggctgctgtcggtgatctcctggatggtgacgctgacgaagccgctgattactatcgccgatttctccttttccgggcgtgacctcatcatgctgcttggcgggatcttcttgctgttcaaggcgacaactgagctgcatgaacggctggaaaaccgccagcacgatgccggtcacgggaaaggctatgccagtttctgggtggtggtactgcagatcgtagtgctggatgccgtcttctcactggacgcggtgatcaccgcggtcgggatggtgaaccatctgccggtgatgatggcagcggtcgtgatcgcgatgatcatgatgctgctggcctccaagccgttgacgcgctttgtcaaccagcacccgacggtggtggtgctctgtctgagcttcctgttgatgatcggcctgagcctggtggcggaagggtttggcttccatattccgaaagggtacctgtacgcggcgatcggtttctcgatcatcattgagttctttaaccaggtggcgcgccgcaactttgttcgtcaccagtcgacgctgccgctgcgcgcccgtaccgcggatgcgatcctgcgcctgatggggggccgtaaacaggcctccgtcaaccatgacgccgacagcccggcgtcggtgccggtaccggagggcgcctttgcggaagaagagcgctacatgattaacggcgtgctgacgctggctcagcgctctctgcgcagcatcatgaccccgcgcggggaaatcagctgggtggacgctgagcagagtgaagatgaaattcgccgtcagctgctttcgtcgccgcacagtctgttcccggtctgccgcggagaactggacgaaatcattggcatcgtgcgggcgaaagagatgctggtggccctggagtcgggcgaaaacgtcgcggcgctagcctccgcctctccggcgattgtggtgcctgaaacgctggacccgatcaatctgctcggcgtcctgcgccgcgcgcgcggcagtttcgtcatcgtgaccaatgaatttggcgtggtgcaggggctggtgacgccactggacgtcctggaagcgatcgccggtgaattcccggacgccgatgagacgccggagatcgttatcgatggcgacggctggcttattaaggggtcgaccgacctgcatgcgctgcagcaggcgctggggctggatccgctgatcaatgacgatgaggatattgccaccgttgccggtctggtgatctccgccaatggccatatcccgcgcattggcgacgtggtgtcgctgccgccgctgcatttcaccgtggtggaagcgaatgactaccgggtcgatctggttcgcgcggtggtcacccgtccgccgagcgacgaagaagagtaa

SEQ ID NO: 232260 - DNA, 633 bp, Klebsiella pneumoniae
atggcaaagcaatttatgttgatggaaccaaagaatgagaattttaatgaattaattggtggtccaaacaaatatattgtacccaggttccagcgagactacgcatgggatgtagggcaatgggaggacttgtgggcggatataaatgcacttgatgatgaaggattccattatatgggctacattgtccttcaacaaaaagaacagtatcaacatgaaattatcgatgggcaacaacgtttagttacgttatcgattatagttctggctgcaatgaaagctatcaaaaccttaattgataaaggagaggatgtagagggaaatactgagcgactcaatggtataactcaaaactttgtaggaagtaagaacttcgttacgcttaaggtgattaataaattagaactaaataggaacaacaaaagttattttcaaaggatgtcatcgcatttagaggctcaaaatccgcgaggtattacatcgactaataaattgatacgaaaatgttttgaattttttactaaggaaggtgcgaataagcaggtcatttcttcccaagctgactcgctgattaaaatttcgcggatctgggccgatttttttcccgcaaacacatcgaatcagcctatttag

SEQ ID NO: 232261 - DNA, 366 bp, Klebsiella pneumoniae
atgatgtccctctgggatgcgctccggatgaatatgatgatctcatatcaggaacttgttcgcaccttccctaaagcactcgtattgaccgtggcggcgaccacattctgtctgatgaccagcccggcattcgcggtacaggaaaccacaccgcagaatatgacctgtcaggaatttatggatatgaacccgaaaagcatgaccccggtggccttctgggtagtgaatcgcaacaccgacttcagcggcggggactatgtcgactggcatgaagtcgagaccgtctcggtgccgaaaatgctgcagcagtgccacaagaaccccgccgctaaactcggcgacctcaactcggttattaaaaaataa

SEQ ID NO: 232262 - DNA, 1455 bp, Klebsiella pneumoniae
atgagctccacctcctgtatttcgatgccccctgaacatgaatcctgctgcaggcccccctgggctggcctgtttgtcctgctcctggcgggattcgtcactctctttgacctgtttgtcgtgaatgtggccatccccagcattcagcgcggactgggggctaatttcgccgacattggtcttatcgtcgccggatacgaactggcgtttggcgttttattgatcaccggcgggcggctgggagatcggtatggtcgccggcgactctttgttatcggtatggcgggttttacgctggcgtcggcctgttgtggcttggcgccaggaaccgggtatctcatcggcgcccgggtcttgcagggcctggccgccgccctgttgttcccgcaggtgtatgcctccattcgggttaactttgcgggcgacgacaggcgcaaagcgtttggtctgttggggatgacgctggggctggcggcgattgccggtcaggtgctgggcgggtggctgatacatgtcgatctgttcggcctgagctggcgcaacctctttctgatcaatgtgcctgtcgggctcctcgctattctcaccgcccgattgattcccgaatccgccgccccgcaaagaccgcagctggacgggatcggcgtggcgttggtcagcattgggctgacactgttactggttccattgatcgaggggccggcgcagagttggccggcatggagtctgtggtcaccgggcatcgcgctcatcgtcatcgcgatctttggtcgacaccaggcgcagcgtcgaattgcgggtaaatcgcccctggtggatatgcgtctactggcaaagcgtcatttcgcgctgggaacattgctggtgctactgatttactcgacatcaagttccttttttctctgctttgcgctgctggtacagaccggtatggggctggatcctttcctggcgggaagcctgttcgcgccctgtagcggtgggtttgtgctggcgtcgttgacggccccgcggctggtttcccgatggggagctcgaacccttctctggggatccctggtttatacagcgtctattgcgcttcttatcactcaggtagggatggcgggagcggagctaaagccagcgcacctgctcccggcgctgattgtgctcggcgccggacagggatatatcatgacgcccttgctgaacctggtgctgggtgtcgttgatgaagccgactccggtatggccgctggggtggtatcgacagtgcagcaggtgggcgctgcgctgggtgtcgccgtcgtgggtatcctgttcactagcgtgctcaccgaggcgacctctctgtcgcagcgcggacagtatgcttctgcttttgtcgccggcatgttttataacctggcagcggcagtactggtctgctggctgctgtggatgatgcaaaaatcgccacgactatcgagataa

SEQ ID NO: 232263 - DNA, 804 bp, Klebsiella pneumoniae
atgcgaacccttaagcgaacacgacgcgatctggcggactttctgcggacgcagcgggaacggctgtcaccggctgacgttgggcttcccagcggggcacggcgacggacgcccggtcttcgacgggaagaagtcgcggccctggccggcgtcggccttacctggtacacatggctggaacagggtcgggatattggcgtgtcgtccacctttctggataatctggcacgggtgctgaagctggatgccgctgaacgtcgtcatctgtttatgctcgctcacgatcgccctcctgccgaaccaggaaaaacctggtgcgtgctgccgccgctggtgcgacgcctgatgcacgatctgccgcaccctgctttcgttatcaatttacgctgggatgtgctgggatttaacgccttagccgatgagcggttaactttcgcccgccatgcccccgggcagcgcaatttgctgtggttgctgttcaccgacccggtcctgcaagcgcgtatcgttgactgggagcaacaggcgccgctgatgttgtccagctttcgccgggattttacccgcgccagccaaagtaccgacattcctgaactggtcaacgatctggaacggatctctccggcgtttaaattatggtggcggcaacatcaggtgcaggccccgtgccatggtgtccgtcatttactggtcgacgagcagcccgtcccgttcgaattcacctcactgaccgttgatgaagaccgacacctgcggctggttgtgtatgcccgaaaggaacaggaaaccagtctttcgggataa

SEQ ID NO: 232264 - DNA, 471 bp, Klebsiella pneumoniae
atgcaaatcagacttgcagtacctgaagaggcagaggaatgctggaatataaggaatctttccatccggcaaggatgtaagctaagttataacgccagggtgcttgaggcctggacgcctgaagctatgcctgaacactacagagaggttattacggtaaatcctttctttgttgtcgaaatgcccgatgccggattggtggcaacggggtatctggatcttaccgggggaagcgtagaagcgatttttaccttgccggattatatgggtaaaggtttcgccagcctgattattgaaaaaattaaagatgaggcgatgaaaagagggctgaaacagttaaccctgacctcaacacccaacgcgcaaaccttctacgaaaagcatggctttatgtttatcagggaaagtaaatacccatcaagacttgcccagacagatttacgcggtatggaaatgtctattgcactataa

SEQ ID NO: 232265 - DNA, 972 bp, Klebsiella pneumoniae
atgctgactctcgcccatctccaacagcgccgcagccggcgttggctctttggtttaacgctgttgctgctggtcaccctgctgatcagtctgtgcgcgggggatcaatggatcccgcccggtgagtggttcagcgccaaggggcatctgtttatctggcagatccgcctgccgcggaccctggcggtgctgctggtgggggcggcgctggcgctctccggggcgataatgcaggcgctgtttgaaaatccgctggcggaaccgggtctgctgggcgtctccaacggcgcgggcgtcgggctgattgccgccgtcctgttgggcaaaggcctgttaccaggctgggcgcttgggctgtgcgcgatcctcggcgcgctgctgatcacctttattctgctgcgtttcgcccgccgccatctttccaccagccgtctgctgctggcgggggtggcgctgggcatcatctgcagcgccctgatgacctgggcggtgtacttctccacctcttttgacctgcggcagctgatgtactggatgatgggcgggtttggcggcgtcgactggcagcagctgtggctgatgatagccctcctgccggtgctctgctgggtctgtctgcagtcacaacccctgaatttactggcgctgggcgaagtttccgcacgtcagctcgggctgccgctgtggctgtggcgcaagctgctggtggtggcgaccggctggatggtcggcgtgagcgtggcgctggcgggggcgattggctttatcggcctggtgatcccacacattctgcggctgtgcggcttgagcgatcaccgggtgttgctcccggcctgcatgctggcgggggcaagcgctttgctgggggcggatattatcgcccggctggcgctttccgccgctgagctgccgattggcgtggtgacggcgacgctgggcgcgccggtctttatctggttgctgctgcgctag

SEQ ID NO: 232266 - DNA, 222 bp, Klebsiella pneumoniae
atggaagaattaaagttgcactgtcatggttgcggcggttcttttgctcgcgatgagctgcaatatcgcccatctggcaggggtgcttatcggagagacttttatttctgcccggtatgcaatgataaagaaaagcagaaaatcgccctctccgctgccgcttcctcgtttcgtaaaaccttgccttcccgtccggggcatatggccaacaagcgctggtag

SEQ ID NO: 232267 - DNA, 294 bp, Klebsiella pneumoniae
atggctaatttactgcatggcaacccggcttttaaagcagcacaaagcaagctggctattgcgcaatttattggtaatagtgaaatgtggtcagcagctttttcctcaatgaaagatatttatgaggaagcaaagcacgcagaagatttcatgttttgcggtcgcgaagaatctctctcggccctgaaattcaacgatgttattttgaattatgacatgtatggcgatttggtttctgttaacgcagattctggcaatgcgcgttacaaaataaatacagaagtttcttactaa

SEQ ID NO: 232268 - DNA, 792 bp, Klebsiella pneumoniae
atggctaaaaactcgatcgacgcgtatggcgccagcggaaaaaccaacgttctgatgttcgaaccggaaaacctgcatatggttaccgacaaaacgcacccgctttacgatgagcgtatccacctgcctatcagcgaggcaatggtactgaacatcatggaccagggcgttcttgagccgattatcgtatggaaggacccggaaagcgggctggcctgtgtggtggatggtcgtcagcgcgtgcgccatacactggaagccaacaagcgtctgtccaaagagggcaaagagccgttactggttcctgcggtaactaaacgtggctccgccgttcgcatggcgcaggcgatggtaagtgctaacgaaatccgccaggcagatacaccgctgggccgggcaaagaaaatggctgatgcgctggaacgcgggcacgacgaggacgatttagcgctgatgtttggcgtgagtgtccagacagtacgcgcaacgttatccctgctggatgccacccaggcagtcaaagacgctgtagagtccggcacagtgacggttacacaggcgcgtcaactggcgtcactaaaacccgaagaacagcgggaaaaggtagcggaaatcgagcaggcgacagctggcacaactggccacgaaaaagcccgtcggcagcgccagattctcggtgaagcaaaaccacgcttgaaaacccgtaaagaaatcacaaaagccctcgaaggtgccggcggtgaatacgctgatgcactgcgctgggtgcttggggaggccagccatgactga

SEQ ID NO: 232269 - DNA, 183 bp, Klebsiella pneumoniae
atgcatatcccagacgatttatttccggggctaaagggtcatactgggcctgtacttatttatcttaagaatggagctgcagagaagggattcccgctccggcaggatgagtttgttacctcccttaaatcccttgatgaggcttacaaaaaagcagggttaccccctgtaagtcaggactaa

SEQ ID NO: 232270 - DNA, 270 bp, Klebsiella pneumoniae
atgacaaaaatgagcaccatttacagcagactttcatacggcaccgggaccgcactgacgggctgcggtgtctcagcaaaggcgtatgccggggcagttaaggcagaggtatggattttggccgacaaaatagcggggatgaccctgagtgactgggcaattattgtcggtatagcctgcaccattacgacctgtggggtgaactggtactaccggcggaaagaacgcgaggatcggctcaatggctatgacaccaaaactgaggaatag

SEQ ID NO: 232271 - DNA, 504 bp, Klebsiella pneumoniae
atggctatgacaccaaaactgaggaatagcgttatcgctgccgtcggcggtggcgccatagccattgcttctgcgctcatcaccggcccaaccgggaacgatggtcttgaaggtgtgcggtacgatccctatcaggatgtggtaggcgtatggactgtctgttatggccacactggcaaagacatcatgctcggcaagaagtacaccgaggctgaatgccgtgcgcttctcagtaaagacctgaacgccgtcgctcgccagattaacccttacatccagaagccgatccccgagacaatgcgcggggctctgtactcgttcgcctataacgtcggcgccggaaacttccagacctccacgctgctgcgcaaaatcaaccagggcgaccagaaaggtgcgtgtgaccagttgcgccgctggacttatgccaagggcaagcagtggaaaggcctggtaactcgtcgcgagattgagcgcgaggtttgtctctggagtcaaaaatga

SEQ ID NO: 232272 - DNA, 369 bp, Klebsiella pneumoniae
atggctgaagttattgttaaaacaaaagaagagctagagaaagccaaagatgacaaggttgagtacatagttatcgaaggtgagctcgcagataaagtcagaaaaagcaaaacggtggcaaaagcaagtggagctgctctggctatcattgccgcagcgattgccgcagcgattgccgcagcacctgtaacaggtggtttatcatcatttgctgtggctccagtggctgctatgtctggatttgaaatagccgcaataatcgcagcggcctcgattggccttgcgctgatcatagctttatttaaagattacgaagagattgaggctggcgagggaaagataaaattaaagaggcgccagaaaaattaa

SEQ ID NO: 232273 - DNA, 474 bp, Klebsiella pneumoniae
atggcggcattaaaaccagaggttaaagctttcataattcaatctgttgcatgctacgaagccccctcacaagtggccgatgccgtcctaaaagaatttggggtaaaaataacccggcagcaggtggatcaaaacgatccaacgaaggttagcgggaaagggctcgccaaaaagtgggtagaccttttcaatgccactcgagaccgattccttaatgagatatccgatattccgatcgccaataaagcgtaccgtctccgtgtactcaaccgcatggctgtcaatgccgaaagcatgaagaactacggcatgaccgcgcagctacttgaacaggccgccaaaaacgcaggggatgcctacagcaacaaattgaaggttgaaagcacaggaaaagacggtggtccaataaaaacagaaacggtcgcaatgaccccacaggaagctgctgaagcttacaaaaagctaatggggtaa

SEQ ID NO: 232274 - DNA, 1527 bp, Klebsiella pneumoniae
atggctgaaggctatgctcgcgtctccagtgcttttggtgtttgtctggtcatcggtggtcccggggtcacgaataccctcaccggtatcgcttcagcttatacggataattttccagttttactgctagccgggcaaattgcgtccgggatggaaatgcgtaacgttcttcaggacagtacacaatccggtattaatcaacgtgatatttttgcgccagtcacccgggctgcttacgaagttaaagaagggcaaccgctgagtctctttcttcgggagtcgttacgggcgttgaaaggtgcggaacgtggccctgtctatcttggagtgagtaaagaagtcctcaccagcgttgacgcctgccgcggcgagattaccgatagcgtcagtgatagctggcaaagaaagccagtggatctgattaaaatgcgcagttcggcatttgaaacttttctcgccaataatcaacgctgcatcattctcgcgggcctgagaggcaagacacctgaaaccagcagagcgctgattgattttgccgaagcttacggttttcccgtcgcgactacgcttagcgcaaaagggctttttcctgaagatcatccgcttgcactgggggtatatggttattcgggtcatcctcgcgccattgaagccttaaaagatggtgaactcgatggcgttattttactcggtatggatatgacacagtggagcacgatgatctggtcacccgacctccaccctccagggggagtgattcaagttgatatcaacgcagactatcttggcaaattcatggatgtgacttgcggcgttgtcgctgagagtagcgcatttcttgatgtgctgagcgaatattaccatcctattttgacagagggtcgcaacgtccgcgaaccttgggtgcaacggcttatgacggcctcacgctgcatgccgatcggtgacgaaagccgccacccagcttcttatgttggccttctgcagactcattttccagacaatggcatcgtcagcgttgactctggcgcacatcgttctttttttgggcattactgggtttctcgtactcctgatgcttacctttccgccacaacgctgggaccaatgggatggagtattccagcaggcatcggggccagttttgccgctcccgaccgaaaatgcatggttattaccggggacgggtgtatgttaatgcaaggaatggagatagcgactgccgcgaagtatcagcgaaatgtactttttgtcgtcttcaataacgcctcctatgccgccagttattttaataataaagaaaaccaggcggatcttaccgacattcctgattacgattggtgtctgttagccaaaagttttggtatcgaggcaatttctgttcaatctccagaagagttagaaggaatgattgcggacattatgcgcaagcagaccccttttttgattgaagtaaaatgcgataattatcatgcaacacctaatactgaatataaccgtcgtgttaaagcgcatccacttatttag

SEQ ID NO: 232275 - DNA, 834 bp, Klebsiella pneumoniae
atgtctctcatgctctccagacatggcatctggtactaccggaaagttaacttaatgccatgtggtaaacgtcgtgaatatcgtcgttcacttggtacccgttctaaaactgaggccctgaaacgtgctaaacgttttgtagatagtccgtggaccgtggttgatacctcagtagtgacttcttcgcctacagttgttgtaccgatttctcttggctttgatgaattaaaatctcaggctaaacagtatgttgctttcaagagtaaggaggtaggggagcgggaaactgcatcaatacgacgctgtctggatagctacttcaaatttaccgtacagcctaccagcaaaagtcaggctgcagcgtttattgctggcctagacctagcgatcccaacgaaaaataagtacgtgaagaagttgggggcgttctttcggtggcttagtaatcgtgttgactatgaggtgaagaacccctttgatgggttaatgcagaaggacaaggaggctgccgccagtaaacgcgaaagttacagtactgctcaaattaagcggctaatggcatcacttcagcaagtcccagaatggaagcggtggatcattttattgggtcgcttcacgggaatgagggcgaatgaaatttgccaattgtatcatggagatatcaagaagattgatgagatctggtgtatcgtggttaatgacactgaggaaggacaaacagttaaaacagaaaacagtaaacgttgtatccccttgcatcaggaattgatttcaaaaggctttctcgagtacgtagataaggccaaaggtcgtgacctgctccccgttgattaa

SEQ ID NO: 232276 - DNA, 1191 bp, Klebsiella pneumoniae
atgaaaatcaaaactggcgctcgcatcctcgcgctgtcggcactgaccacgatgatgttttccgcctctgccctcgcgaaaattgaagaaggtaagctggttatctggattaacggcgacaaaggctacaacggcctcgctgaagtgggtaaaaagtttgaaaaagacaccggcattaaagtttccgtagaacacccggacaagctggaagagaaattcccgcaggttgcggcgaccggcgacggcccggacatcatcttctgggcgcatgaccgtttcggcggctacgcgcagtccggcctgctggcggaaatcaccccggacaaagcgttccaggacaaactctatccgttcacctgggatgccgttcgctataacggcaaactgatcgcctacccgatcgcggtggaagcgctgtccctgatttacaacaaagacctggtgccgaacccgccgaagacctgggaagagatcccggcgctggataaagaactgaaagcgaaaggtaagagcgcgctgatgttcaacctgcaggaaccgtacttcacctggccgctgatcgctgccgacggcggatacgcgttcaagtttgaaaacggcaagtacgatgtgaaagacgtcggcgtggacagcgcaggcgcgaaagcgggcctgaccttcctggttgacctgatcaagaacaagcacatgaatgccgataccgattactccatcgcggaagcggccttcaacaaaggtgaaaccgcgatgaccatcaacggtccgtgggcgtggtctaacatcgataagagcaaggttaactacggcgtgaccctgctgccgacctttaaaggcaaaccatcgaaaccgttcgttggcgtgctgagcgcggggatcaacgccgccagcccgaataaagagctggcgaaagagttcctcgaaaactacctgatgaccgatcagggtctggaatcggttaacaacgacaaaccgctgggtgccgtggcgctgaaatccttccaggaaaaactggaaaaagatccgcgcatcgccgccaccatggcgaacgcccagaaaggcgaaatcatgcctaacatcccacagatgtctgccttctggtatgccgttcgtaccgcggttatcaacgccgccagcggtcgtcagactgtcgatgctgcgctgaaggatgcccagagccgtatcaccaagtaa

SEQ ID NO: 232277 - DNA, 171 bp, Klebsiella pneumoniae
atggaatggtatttctccatcggtcttgttttgtggattttggcgcaaataacaagagccgatgaaacatctggcattaagaataacattctgtgcttgctgatcttcattgtggcgtggccacttgtcatttcaaccatcgcttacaaacttattgtgggggaggactga

SEQ ID NO: 232278 - DNA, 510 bp, Klebsiella pneumoniae
atgacacctgatatcacccaactggcgcaatctgaaattaatgatgcgctggcccagctgaagcagatcagcgaataccccacgccgtctactcaatatgcactggttttacgtaaatatattacctcgcaggcagaggcgctggagaaggcgcagcagttggccactcagcaggtaaatatcgcctgcgcgcttttcgatgaagttaccgctcagcgccagcgcatcgccgagctggaaagccaacttaaagcagcagaaaacaatgagattgatgctcgctgtcatatcgccgatctggagtcgcgtaccgtgaagctgccgaagccacacgcgcatttaatctggattcaggcagggcatgcgccagacgattactgggatgacgtagcggtatctcacagcgagaaagacctctgctgtgatggttcagagcgctatccggtttatgcgcgctgggaaattgaagagatgttggccgccgctggcatcaaggtggaggttgagtga

SEQ ID NO: 232279 - DNA, 1311 bp, Klebsiella pneumoniae
atgagtatgtcaaactctcaggaagtcctcacttcctcatcagggacgaaaaaaagaagccgcgttcggatagttattttactgctgttgtccgtcggaacgatgatcaattatctcgaccgcaccatcctcggtatcgttgccccacagttaacccaggaaattcatatcgatccggcgatgatgggcatcattttctccgcctttgcctggacctatgccctggcgcagatccccggcggcatgtttttagaccgcttcggcaacaaactgacctatgccctgtcaattttcttctggtcgctgtttaccctgctgcaaagtttcaccctcgggcttaaatctctgctgcttctgcgcctgggacttggcgtcagtgaagcgccctgcttcccggccaacagccgcatcgtcagcacctggttcccgcagcatgagcgcgcacgggcgacggcaacatatacggttggtgaatatataggactggcggccttctcaccgctgttatttttaatcctcgaacatcacggctggagaacgctttttttcctcaccggaggattaggtattttatttactttggtgtggtggcgtttttatcacgaaccccatgaatcgcgcacggctaatcaagcggagctggattatatcggcgcaaacggtattaacaataaaatccagaacgttccatttaactggcgtgacgccaggcgcctgctgggctgtcgccagatcctcggcgccagtctgggtcagtttgcgggcaacaccacgctggtgtttttcctgacgtggtttcccagctatctggccaacgagcgccatcttccctggctgcacgttggcttcttcgccacctggccgtttctcgccgccgccatcggcatcctcttcggcggctggatctcggaccgactgctgaagcgaaccggctccgtcaatatcagtcggaagttaccaataatttccggattattactctccagctgtattattgcggcgaactgggtgagcgccaacagcaccgttattattattatgtcagtggcattttttggtcagggaatggttggtctgggctggacgttaatttctgatattgccccggaaaatatggcaggcctgaccggcgggatatttaatttctgcgctaatatggcgtcgattatagccccactgataattggcgtgattatctccgcaacgggtaacttcttttacgcactgatctacgtcggcctgacggcgctgatcggcgtgattgcctacatttttatcatcggcgacatcaagcgaatcgaactgaagtaa

SEQ ID NO: 232280 - DNA, 1185 bp, Klebsiella pneumoniae
atgctgtggttgatgacgatgggacgacggctaaacggcgtctatgccgcctttatgctggttgcttttatgatgggcgtggcgggcgcattgcaggcgccgacgttgagtttgtttctcagccgcgaagtgggggcgcagccgttctgggtgggcctgttctacaccgtgaatgcgatagccgggatcctggtgagcctggcgctggccaagcgctccgatagccgcggcgaccggcggcggttaattatgttctgctgtctgatagcggtaggcaatgcgctgctgtttgccttcaaccgccactatctgacgctgatcacctgtggggtgatgctggcatccatcgctaacgccgccatgcctcagctctttgccctggcgcgggaatatgccgacagctcggcgcgggaagtggtgatgttcagctcggtcatgcgtgcccagctgtctctggcgtgggtgattggcccgccgctggcctttatgctggcgctcaactatggctttaccaccatgttctctattgcggcgggcatctttgcgatcagcctggcgctgattgcggtcaaactgccctcggttccgcgcgtggaacagccctcggaagaggcggaggcgctggcgcaggccggcggctggcaggacaagaatgtgcggatgctgtttatcgcctccaccctgatgtggacctgcaacaccatgtatatcattgatatgccgctgtggatcagcagcgatctcgggcttcccgacagtctggccgggatcctgatgggcaccgccgccggcctggagattccggcgatgatcctcgccggctactacgtgaagcgctttggtaaacgtaaaatgatggtagcggcggtggcggccggtgtgctgttttatctggggctgatcctgtttcatgcccgaacggcgctgctggccctgcagctgttcaacgccatttttatcggcataatcgccgggatcggcatgctgtggttccaggatttaatgccgggacgcgcgggggcggcgaccaccctgtttaccaacagtatttccactggcgtgatcctcgccggcgtgatgcagggggcgctgtcgcagagctatggccacgccagcgtctactggacgatcgccgcgatttcgctggtgacgctgtttttaaccagcaaggtgaaagatatctga

SEQ ID NO: 232281 - DNA, 585 bp, Klebsiella pneumoniae
atgttaatgtcagtaagtcagtacgccgagcacagcggcatgagtcgccggtcattttacaactgggaaagtaagcagggattccctgcgcgggttgacgggaagattgaccaggaggcttgcgacgcttatctggcccgttaccgggacagccatgatccgcgcgctcagaacgcgaaaagcaaagtagtggcatccggtggccgtactgttgtgagtaacgccctggtagagatgagcgttgcagagattaagcgcattatggcatcgggtgccgaaaaggtggccggaatggatccggacgaacgagcccaggttgctgcaaaggccgtagagctgtttgtaagcgaaggcccctataacccgcccgtaacgtttggcggctaccggctgtcgattgttgaaacgccagatgatgaaattgggcagatcatcgcgggcggcgcgtttggcctgtctgcgtatgatgtggtttatgagtgccgggattacaccctgactctcatgagcgatgaaaccgaagaaacagccatgcggagagtgatcccttcgttgctgtatgccctggccgacgataccgattaa

SEQ ID NO: 232282 - DNA, 657 bp, Klebsiella pneumoniae
atggcgacactaaaggacctgtctaaccagcttaataagctgaagaagcaaataccgtttgcgatggcgcaggcgatgacaagcactgtcagacaaattgagcaggctgagaagaccgctattcagcggaagcttaacgcaacgccctttactgtgaaatcagtgaaatctaaaggggcaacaaagaataacctcgtggctaaggtgtttgttcaggacaaggccgctgagtatctggatccctttgagatgggtggcatgcataagctgcagcataaggccaagcttgtaccgcatggcatcagactgaacaaatacggcaatatccctcgcaacaagctcgaacagctgaaagcaaagccagatgtgtttgttggccgcgcaaaagttaaaggtggtggtgaaggtggtatctcaggtgtatggcagcgtaaaaaggccagaaacaagcggaagaaaagacgtgcacgctctcctaacggaacacagcagccacggctgaaaaccagaccaccaaagctgctgattggattcggtgatgcgttgccagtgcaggctgagctgggctacatctctcgggctgagatgatggcaaagaacatcctgccaaaagagctgagcaaagccattgcgaacgcgctgaaaactgcgaagtga

SEQ ID NO: 232283 - DNA, 222 bp, Klebsiella pneumoniae
atgctggaagccggaatggttgagaagaaatcagcaggaagcgcagccctctggatgcgtgaggctgcagaggtaatagataaacagtttggcgatggctatgccagtgcacaccctgagctggtggcggggttcatgcaggcagcagctattgatcaggcgggaatgtatatccggtcactggtggaaacgctggatttatggcccggctcgctgtcataa

SEQ ID NO: 232284 - DNA, 201 bp, Klebsiella pneumoniae
atgagtgatctccccgtccgacagtttgctgacaaagcatatcaggcagaaatcattctcgctctgatgcaggaaaaaaccgccgtgcgcatggaagatagcgaaattgacgcgctaatcgcgatggttaaagacttgatcggcgatgtgggtggttttcttggtgaagaagcatcacgcgaggaggtggaaaatgcataa

SEQ ID NO: 232285 - DNA, 207 bp, Klebsiella pneumoniae
atgcgtaaatcaataaaaatgcctgttgttcatttatcgctacccgtccctgaaaacttcacaggcaaagtgcttgtgaatgtcgaaaaaggcgtagctgttggcgggtttccattaagaccagatgagtttgttggttccgtcgatagctttattaaatgttgccgcctgacagggctccagattgtagaggtgcgtcatgagtga

SEQ ID NO: 232286 - DNA, 201 bp, Klebsiella pneumoniae
atgactaccaataccatgcaagacaaaaaacttacccgcccggaagccgccgcatacattggggtgtctccgcgcactatggcgaactggcacagcacaggccgggtaaaaatccccttctacaaagtaggccgtaaaaaaaccatttatctgcaatcagatcttgatacgtatctggcatcggttcgccagtctgcgtaa

SEQ ID NO: 232287 - DNA, 597 bp, Klebsiella pneumoniae
atggaaaaatttaacgtgccggataaattatattatccaattcatgaggttacggaaaagttaggagtcactgtaagggacttgtatcattttgaggctgtttgtgcattggaactttgtgtgtatataaaacaccatagatatgatgaaaatcatagtttgagtggcacctataaaattctccatggcaatttttcagaggctcaatttgatgatgtggatataatcatctacagtgttaaagacgagactatagatattgatggtgatataggtaaaatagattttggcgatgcaccgttagttgttgattcaaaatttttatatatagaaagagatagtttgcataaattccatcaattatccatcgattattttaaaaatactcagtctggagagcatccccgaacagcgaatagaaagggagaagtaattcccgcattattgaaaatgattccagaatttgatgatgttgatttggaaggtgaaagtataagtaaaatagcttcaattttagaagcaattgcagcagctaaaggaattgagttgaatcttccagataaaaatacttgggcgcgttacttggggagaaagtga

SEQ ID NO: 232288 - DNA, 1206 bp, Klebsiella pneumoniae
atggcctcacgcatcctcggtgaggtggcgacgacccgcaggaatccaaacgaccagcggcgggaagataaaaacaaatccgtcactctggctgacgcgctagcggagtacatcaaatcccgcgctgggcgtatcaagccgacaactatagagcagtataagggcgtgctgactaacttctctggagactggcttaaaacaccgctggcggccattgaccgtgagagagttgaagttaggcataaagccattactgatggcggtatatggtttggcgataaaccgcagcgtgctggagtagcagcaggcagtaaagcccaggctgatttatgggcgcgggttttgcgtgcggtctaccgatattcgcatgatcattatcgcgacaacgatggcaaccgtctgttacctgatccgcccacgatggtactgagcaccaaacgaaaatggcacggcacagcgcgtaaaacctcccgtatccgcaataatgagctttcccgttggctggcctctgttgatgccgttcggcaacatggagccagtatcagggatgattttgccgtatcggtctgcgatgcgctggatgtggctttatttacgggcttgcgccgtgcggaggtgttcgggctggagtgggtcagggtgaatatgtccggccgttacttctggattgaccagacgaagaacggagacccgcttgaacttccgattaccgatacactgttggctatcttccaacgccgaaaagaattacgtcgtgataataacccgtatgtatttccggcggagaaaggcggaatagttacggatccccgaagggtgataggccagataagcgaagctaccacgcagggcggtacagagagcgccattggtttcacctgtcatgatgctaggcgtactttcggcagtgtggcggagttggtaggtgttggttcatacattcttaaacgcctaatgaaccaccgcactttccgtagtgctgacgtcacacagggctacttgcactattccgccgatgagttgatggaaccagcgcagaaagtcgagcgggcaatactggagcatgctgggttaattgaaaaaactggtgggttagatagccagttgctggccgttatgggggcaatgaccgatgaagaaaaacgcaggattctttttgatattcttaatattgaaattaggaacataaatcatggaaaaatttaa

SEQ ID NO: 232289 - DNA, 123 bp, Klebsiella pneumoniae
atgaatttacctaaggaaggtgcgaataagcaggtcatttcttcccaagctgactcgctgattaaaatttcgcggatctgggccgatttttttcccgcaaacacatcgaatcagcctatttag

SEQ ID NO: 232290 - DNA, 300 bp, Klebsiella pneumoniae
atgaaaaaatatcctttttctcgttctctggtaggtatagctttactggccctactctctgcaggtgccgtcgcggctgaaaaaataacattaaaactggcgcataaccttgagcgcagccatgtggtgcatcaggcgtttgaggagatgtccaaagaggtaaaccagctttctgacggtaagatgaagattcgcatttaccccagtagtcagatgggcagcgcgcgcgagaccatggagttattacaaaatggcgcgctggatatgaccaaaggttccgccagcgatcggctttgttga

SEQ ID NO: 232291 - DNA, 900 bp, Klebsiella pneumoniae
atgaaactctcccgacttgctctgctgtccctgttcgcgctgaccagctccccggtttgggcggacggcgtcgtcacggtttactccgccgacggcctgcatgacggcgataatagctggtatcagagccagttcgacgccttcaccaaagcgacgggtatcaaagtgcagtatgtggaaggcggctctggcgcgatcgtcgagcgtctggcgaaggagcgcaccaatccgcaggccgatgtgctggtcacggtgccgccgtttatccagcgcgccgcgaaagagcagctgctggccacctttaccccacagggcagcgcgcagatccccggcgccaatgaccgctattcgccgctggtgaacaactatctgaccttcatctataacggccagttgctgaaaaccgcgccggccagctggcaggatctgctggatagccgctttaagaataagctgcagtactccacgccgggccaggcgggggacggcaccgcggtgatgctgcaggccttccacagccttggcggcaaagatgccggcttcgagtatctgggcaagctgcaggccaataacgtcggcccatcggcctccaccggcaagctgacggcgctggtcaacaaaggcgagcgcagcgcgctggcgctgccctacaccatcgggctggtgcagaacggaccgaacagcgaaaacggcaagaagctgattaatttcctgctggataaaccggcgcaatccagcgtcagcgcgcgctcctggggcttaccggtgcgcaacgacgtggcgccggatgacgctaactttaaggcagcgcaggcgggcgctcgacggcgtgaagcgctgggaacccaactgggacgacgtcgcggtttctctctcggcggatatcgcccgctggcataa

SEQ ID NO: 232292 - DNA, 567 bp, Klebsiella pneumoniae
atggtacggcggacaagcggcggtccccagggtgcgcatcttctcgaccagatagtttttcagcttcgccggggtgatcagcgctttggtttcctggtacagataggttttgttagccgagccgccgcccttggcgatgcagaggaatttatactcatcgccatcggtagcatagaggtcaatctgcgccggcaggttggtgccggtgttaacctctttatacatatccagcggggcgttctgcgaatagcgcaggttgtcctggatataggtgttgtacaccccctgcgccagggcggcctcatcgcctccgccggtccagacgcgctggccttttttacccatgatgatcgcggtgccggtgtcctgacaggtgggcagaatgcctttggcggcgatatcggagttgcgcaggaactgcagggcgacgtatttgtcgttttcgctggcttccgggtcgttcaggatatccgccacctgctgctgatgcgccgggcgaagcataaaggaggcgtcgtggaaggcatgttgcgccagaagggtcagcgcctgagggtcaacttttag

SEQ ID NO: 232293 - DNA, 729 bp, Klebsiella pneumoniae
atgtttaaattcaaggtttcatatgttgcgctggctgcagcgctaagttcatccgttgtttatgccgatccgtcaagctatacgcatagatcaggggcaaatgttattgatatcgaagctcctaatgccgctggcgtctcgcataacttatatcgcgaattcaacgtcggccctaacggcactattttaaacaacagcgccagcgacgtgaaccacagcactcacggtaatatcgctaagaataataatctgaccaacggcagcgcttccgttattttaaatgaagtcacctccaataaaatgagtaatctgcagggctttatcgaagttaacggacaaaaagccgatgtcgttatcgccaaccctaacggcatcacctgctccgggtgcagttttattaatactaacaaagcagtgctgacgacaggccaggtcaatctgagcgataccggcgcgattgatagctatacggtcacgcagggtaaaatcaccattgacgataaaggtatgaacgcgtctaacagctatgcagccttgctggccgacgccatcgcgattaacggcacaatgacggcagccaacgctatggtgggcgcgggcaacttaacgtttgataacaaaaccggaaagatgaccagccttggaaaagcagccacagccaaacaaatattatatccggaatacagcattgatgacctgcccccagagttagatacaaccttcagttag

SEQ ID NO: 232294 - DNA, 513 bp, Klebsiella pneumoniae
atgtggcgactgtctgtaatggctaacatacaaagaactgtttcagccttggctgaacagtactctatagctgggactactgataccggtactgtactgaagttcttaatgggtaacacagcggacccgtcaaccgcaccaacagaaataatgcggatgtatagtgaggggtatctttataataaaggatatgtatcaccaacggtgacaatagctgccggggcgacatatacgcatatcgtcggcgccggagtaaacaaccgtcgaggcgagtacaaaataactgggctcgaagatgataatactcttttcggttctttctttaacgtgcctaacaaagcgccaaagcccacaggaattattggtgatggtatcaacctttctcaggcgcagcctgactcatcagtaacaaacaaactctgtatttaccagagtgggcagtatatcgttttagaaaaccgtcgcagcgcatcagttacgctggctatacgttttgattcaggtatcagctga

SEQ ID NO: 232295 - DNA, 240 bp, Klebsiella pneumoniae
gtggccacggcgcaaacccagctggcctgggcggttactccgcgctggatcctgcagggattcgttggcgccgggagcgccgctgacgcggcggatacgctatgggaagagtcagaggtggcatggggggccggttttcgatacctgatcgcgcgacagtacggtttacgtaccgggattgacgtggcgttcagcgagcatgaacaggcggtctatttcaatgtcggttcgggtttataa

SEQ ID NO: 232296 - DNA, 1113 bp, Klebsiella pneumoniae
atggcaacggcgaatgacaaactgcaggatgaatccgtagcccacgctatatgggtgagtcgctacagtaccggcgttgccaacaggatgataaaagtcctgaatgacagcgacgccgaacttaccgcaaggttgctggtggcaattgatacgctggacgctgagagctttaccgtttcgcgtctggaagcgttactggtaagcgtcagggcgataaacaaggatgcgattcagtcgatgtatgcagctcttactgccgagctgcaggaactgtcgaagcacgaagccacttttcagatgagcctcttccagtttgcgatccccgacgatgttctggcgcttcatccactggttgacatctccccggatgcagtttatgccgcggcgatggggcgtccatttcaggggcggttgctaagtgaatgggccagcaacctcgaagccgatcggatggcgcgcatatccaatacggtgcggcagggattcctgctgggcgatacgcatgagcagatcgcaaaaaaggttcgtggccatgctaaccgcggctaccaggatggtgcgctgcagatgagccgggccaatgcagccagcatagcgaaaacggcagtagggcatcttgcatcgacagctcgacaaagctttgcggcggcgaacgacgacattctgaagggtaagcagtggttatctactttggataaccggacatcaaaggattgtcggatccgcgaccgactcaagtacacgctggataacaaaccgatagggcacaaggtgccttatttgcagggaccggggaaaatccacttttgctgtcggagcaccgaaacttacatcctgaaatcgtccgaggaattgggtattaaagtcggcgaaatcaaggatagctcgcgcgccagcatggatggacaggttccggctgacacgaattaccaggactggttctcccggcagtcgttcacgcgacaagctgagattgtcggagaaacgcgcgccaggctgattcgtgatggcggcatgtctcccgatgagctctacaacgacaggggcgagtggctgacgcttgaccaattgcgcaaccttgacgcgcaggcgtttaaggatgccagagtgtga

SEQ ID NO: 232297 - DNA, 1575 bp, Klebsiella pneumoniae
atgaattacaaggctgtatggaagcctctgcccggatcacagtctctttcgctgagttgcccatgtaatgagatcctctacgagggaacgcgtggaccaggaaaaaccgcggcgcagttggcgcgttttcgtcgtaatgtcggtgtcggttatggttcattctggcgcggtgtcatttttgacactgagtataagaacctggcagacatcatcacgcagtctaagcgtatgtataacctgttcggcgacggggcaaattttcttcggtctgcgagtgaattgcgatgggtgtggcctactggtgaagaactgctgttccggttcggaagcgaagctgatgattactggaacttccacgggcaggaatttccgtttatcggctttaacgagctaaccaaacaacctaattcagatttctacgaagcaatgttttcgtgtcgccgctcatcgttccggcctgaagattatccgcgaaaagatggctcattgctaaaaccgatcccgctcgaagtattcagcacgacaaacccatttggcatcggccatacatgggtaaaaaaacgatttatcgaaccggcaccgcgcggaactgtacagcgtcacaagcaattagtgttcaaccctcaaaccgagcgggaagaagagatcacgttaacccgcgtcgcgatacacggttctttcaaagagaacccgtatctcgatccgcagtacattgcaacgctgatggcaattaaagacccgaaccgtcgcaaggcgtgggtagagggctcatgggatgtgaccagcggcgggcgctttgaccatctgtggaatgaatcactgcatgtcattaagccgttccgcataccggatagctggaccgttgaccgttcccatgactggggtgagtcgaaaccgttttctaacctctggtgggctcgcacggatggcacagtcgcgacgctgccggatgggcgtcaattctgcccgcccgccgggtctctgattctgattggtgaatggtacggttgtccacctgacgaactgaataaagggctgaacatgtcatccaccaacgttgcaaaaggcgttgcgtggattgataagcgattaacaggccaggaagttgacgaaccggacgagataaaacttgatggtgtcactcagggacaactcaacattatgcctggcatctgcaaaaaggttgttcccggcccggccgacagcgcgatctacaacactggtgatgatgagctttcaatcgctcaaaaaatggaagcgcagggtgttaaatgggttgaggccaacaaaaagcccggttctcgcgttaatggtgccgcgttgttcgccgacatgctggaggcagttgtcgaaggcaaaaaactggagtccgggataccagaaaaacccgcgttttatgttttcgattactgccgtggctggataagccgtattcctgtactcgtccgcgacagcaaaaaccctgatgacgttgacactcagcaggaagatcacgactgggacggaacgcgttatgcagttctgcacaatccaccgaagcccgctttctccatctcactggacacgacattctga

SEQ ID NO: 232298 - DNA, 489 bp, Klebsiella pneumoniae
atggcgacattaaaaggtgaggttaaagccttcatcgttcaatcgcttgcgtgcttcgacaccccttctcaggtggtggaggctgtcaaaaaagaattcggcatcacgatccctcgtcagcaggttgaatctcacgaccccacaaaagctaacggcaaaggactggcaaaaaaatgggtggagatgttcaacgaaacccgcgagcgcttccagacggaaattgcagaaatcccgattgctaataaggcttatcggctccgcgtactgcaacgaatgtctgtgactgccgagaacatgaaaaacctcggcatgacggctcagcttctcgaacaggctgcgaaagaggttggtgacgtttataccaacaagcagaaggttgaacaaaacgttatatccactcacaacgttatgcccgttccatcctgtgacaacgttgacgaatgggaagctgctgcgcagaaacaacaaaatgaggttcttggtggatga

SEQ ID NO: 232299 - DNA, 798 bp, Klebsiella pneumoniae
atgtcagtaagtcaattaatctcaaaatctacagttagaattgagtgtgatgtagttggaggtggcgtgtcggttggtacgggattttggtttggtttttcaactaccggagactcaggcctgccattactcgtaacaaacaaacatgtgattgctaattccactaccattcgtattagattaaacgtttcatccgctgcgaacccacaattaaaattttatgacgtaacgattaataatcctaatgatttcatacagcaccccgacccaaatattgatctttgtgccctacctataggtacttttctaaatgagttaagttcgcaagggatcgaagttgataaatttttcttcacagatcgtagttttcttaaccggcatcatgttactccagttgaagaagtttttatgactggctatccaaatggcttatgggatactgtcaataacaggcctattaccagaaaggggatcactgcctcatcattgcttgaggattggcagggcaggcctgaattcatgattgatatggcctgttttggggggtccagcgggtcgcctgtgtacattatgaatgaaggcggcttttcaacctcagatggatgggcgatcggaaatagatttatctttttgggggtgttatatgccggcccaactcttgatgtaaatggaagtattaacatagtagatgttcctactgtagctacgccagtggttagcacaacgttaatgatgaatttaggtatggtgattaaggcagagcagttgaatggactcaggccgttgctaggtatttga

SEQ ID NO: 232300 - DNA, 462 bp, Klebsiella pneumoniae
atgaaccggctaatcgcagtcatctgcgccatattgatctgcctgatagtcagcctcggttggctggccagtcactaccacgacaacgcgaccgagttcaaaaggcagcgggacaaagcgaatgaacaactcagcctggcgaaagacaccatcgctgatatgcaggtaaggcagcgagacgccgcagcgctcgatgccaaatatacgaaggaattagccgatgcgaaatctcagcttgatgatctgcagcgttgcgttagctctggcaagtgcgggttgcgcgtcaacgcagaatgtcccgcgaacggagcggccagcgccggcggcatgggcgatgcttcaggcccccgacttactgactccgctgaacgggattatttcaccctcagagagcgaatcgtcacagtgacgaagcaggttggatatttgcagggctacatcaaagatctgtgtatcaaataa

SEQ ID NO: 232301 - DNA, 138 bp, Klebsiella pneumoniae; identical to SEQ ID NO: 198572

SEQ ID NO: 232302 - DNA, 327 bp, Klebsiella pneumoniae
atgacaactaatatcaccgaactggcgcaatctgaaattaatgatgcgctggcccagctgaagcagatcagcgaataccccacgccgtctactcaatatgcacgggttttacgtaaatatattacctcgcaggcagaggcgctggagaaggcgcagcagcgcatcgccgagctggagtcccgcaccgtgaagctgccagctgaaagattttgccctgcggagtacgccggtagtcaactatggtcagaaactgaagtttggaataaggcgatcactgcatgtgctgacgcacttcgcgccgatggcatcaaggtggaggctgagtag

SEQ ID NO: 232303 - DNA, 471 bp, Klebsiella pneumoniae
atgactatcacattacaggcagtaaacgagctcatcgcctccctggagagcgcaggcgagctgtcgatcaaagagacaaaggttatggcgctggctaaagcgtttaagcagctggctgcggagaatgtggcgatgaaacagatcgtcgattccgtaaccaacctggataacgaacctcagtaccacgacgaaggcatggggtgcggacttgaagaccgtggcattactgaccggtacgatgcctgccgctatggctgggatgaagctatggagcggatatacggcgaagttatcccatgcgccgatgagctggacttttccgccaccgacgcttatctggccggaattaaggctgaaggtgcagaggcttgcgttagagcgctagtgacttcggatgatgacgacttcaccgacgcgccgaacatctgcgcaatggtggcattccagctgcgcgagagggccgacaaatga

SEQ ID NO: 232304 - DNA, 465 bp, Klebsiella pneumoniae
atggcaaaacaggaatcactcagaaccagtgaatgtccggtggcgagaacgttggaatcaattggtgaacgctggtgcctgatgattatccgcgaagcatttgacgatgtacggagattcagcgagtttcaaaaaaatttagggctggccaaaaatatccttgccgcgcgcctgaagcacctggtcgagatcggtattttcgagattttaccggcatcggatggcagcgcatataaggaatacgtcctgactgaaaaggggcgctccgtgtttcccattgttgtggcgatgcgtcaatggggagagcgttatatgtttgagcagggagaaacctactctgtcctgctggataacgaacacggccagccgcttcaatatctggatgtgcgttccgctcagggagataaattgcaaccaggcgactgtcatcgccggcgcgttgtatcagataccagcgccgaataa

SEQ ID NO: 232305 - DNA, 10899 bp, Klebsiella pneumoniae
atggcgctgctgagttatacggaagttatcgacgcgaagctacgttatccaaacacggctttgctgtatatcgagtttgattctagccagtttaacggctccattccgcagatttcgtgtgagccccgcggccgggttattcgtgtccctgatacctatgatccggaaacccgctcttacaacggaacctggaccggtacgtttaaatgggcatggacggacaacccagcatggattttttacgatctggtggttaccgaccgcttcggtcttggcaatcggctgactgctgccaatatcgataaatggatgctgtaccaggttgcgcagtattgcgaccagcttgttcctgatggtaagggcggtgatggcctggagccgcgttatatctgtaacgtttacattcaggatcgcaatgctgcctatacggtgctgcgcgactttgccgccatattccgtggaatgacctgctggaacggtcaacagattattgcgctggcggacatgccgcgcgatatcgatttcacctatacccgcgccaacgtcattgatggcaaattccgctattccagcagcaccagtaaaacccgctacaccaatgctcttgtatcgtggtctgatccggccaacgccttttctgatgcaatggagccgtcatttgtaaaagagcttgtcgcgcgctacgggtttaatcagctcgagctaacggcgatcggttgcactcgacaatcagaggcccaccgaaaagggttgtgggggatcctgaccaacaataaagatcgtgttgtgacatttgatgtcggcctggatgggaaaatccctcagcctggctatgttatcggtgtggctgatgaaatgctggcggggaaagtcaacggcggtcgtatcagtaaagtggacgggcgagttatcagtctggacagagacattgatgcgaatgccggagatcgtctgcaggttaacctgccttccggtacttcccagagccggactattcagtcaataaatggacgccggcaggtgactgttaccacggcattcagtgagaatcccgagaccgaatcagtatgggctattgagtctgatgaacttttcctgcagcagtatcgcgtagttggcgttaaggataacaacaacgggacttacacgattacaggtacgtcgcatgacccggacaaatacccgcgcatcgatacgggcgccattattgatcagcgtccggtcagtattgttccccctggtaaccaggctccgccggatggcattctcctgacgtccttctccgtggtgaatcagggtatcagcgtcgaaaccctgcaggccaattgggaggccgtgaaaaacgctatcgcatatgaggcgcaatggcgtcgcaatgacggcaactggattaacgtaccgcgaagctctaccacctcgtttgagattaccggaatttatgcaggtcgctacctggtgcgcgtccgggcgattaatgccgctgaggtttccagcggctgggcatactcggaagagaaaacgctgaccgggaaaatcggactgccgtcggcaccgatcgcactgacaacgacctcgttactgcatggtgtgcagctgaactgggagttcccggccggtaccggcgatacccagaaaactgagctgcaatacagcccaaatccgaacggtaacggggcgatgttgctctctgacgtcgcgtatccgggcaaaacgtatcagcaaatgggactgcagattgcggccatgttctggtaccgggcgcggattgtggaccgcctcggtaatgaaagcccctggaccgactgggtacagggtatggccagcgacgatatcagtgcgtattacgatcagctgactgacgcgatcaaagagacgccggcatgggaggaggtccagcgtgatatcgaggagacgcatcagcaactgacggaaaccgccgacgctatcagtgaggacgtggcccggcagatttcagccgttaaccagaatattgatgagaccgttacggctatcaatcagcaggttgataatcagattgatgcggtcaacaagtcgataaaggagaacatcgataccgtaaatcagacgctcgatgacaatatttcgacagttaaccaaagtatcggtgccgcgaacgaggcgatcgatgcggctaacgatcagatcactgctgtcagcaaatcactggatgagaaaatcgccagtgttaataaaaatattgatgacacggtttcagacatcaatgccggcatcgatcagcagattgatgatgtgaataaagcggttgccgcgggcgacgatgcgctgaaaaaacagatccagactgccgaaaatggtctcaaacaaagcatcgcgcaggcaaatacgggctgggataaagcggtcaggcaggaaaccgcagatcgtatcgcagatgtgaacgcgaaagccgcgcaggcagctgaccagctgctgaacgagcgcaatgaccgtgttgcggccatcgatcacctgcagaccattatgcaggacggtgatgattctctcgcgcggcagatttctgaaatctccgccggcagcggccagcagtttgactcgttcaatattttttatttcgaccagggcaatgagggatggacggaagatgatgctggccagataccgatgcaaatcacggatgatggctggctgaaggcgtcaaacagcaccgcttcctgtcgttcgcctaacggccaggccatcccggcgtcgtcgtatcgtaccgtcatgctgcgaattaaacgcgtcggtaatccgacgtggaaaggcaagctttactggataggtgttgatgaaacgggctggagtgagtcccgggccatcagcatcccggatcaggagtttgacgctgacggaatcagcgtagtggccatctcggatattaactggaatgcctccggcactatccgccggttccgtctcgatctggcccagggccagaacgcggataattatttcctgatccactggatatcggtcggacgcccggccccggccgccagtaccgctgcattgagggatgaggaaaccgcgcgtactaacgcggatgaagcggaagcgcaaaaacgctcgacgcttgccgcgcaaattcgcggttcaacggacagcaacagcctggcggatctgcgctccggcctgctgtaccaggagatgaacgcacgtatcaccgcggatgcggcggaggtcacggcgcgtgagtcgctgcaaacgcagtttaatgaaaacaaggcgtcggtagcggaggagttaagctctatttcgaccgcgcaaagcgcccaggccagcaaaatcagcgggctggaaaccagcctcggcaaaaaagccgatgcgagcgcgctgcagtcgctgacgcagaaagtcgagcagcagggaaccacgctgaccagccagggtagcaccctgacatcgctgacgaaccggatcgggaaggcagagtcaggtgtggccgcgaacagcaatgccattactggtctgcaatccacggtcagccagcagggtaatacgctaaccagccagggcagcgccattaccaaactgcaaaacgatctgtctgtgaccaatgacacgctgggcaaaaaggcggatgccgcatcagtcagcagcctgacgaaccgtgtcgatgctgcagagaggagtatcacctctcagagcgccagcattacggagctgaacaacagcgttaccgccgcgcagctggatgcggatgcgggtaaaaaccagccgaccaaccagctggtaaatggctcatttgagcgtggttttgatggctggcgtaatgacggctggacaacgctggccgcacagaatccgaaatccgggaaactgatcctgcaggcaggtaaaacgaccaacaacggaacggcatgcgaccaggacgtgacgttaacggccgggcggagctaccgttttggtgcatgggtacgcaaatcagccgattttgctatcagcaatcaaaacaatacgaaactcagcctgcgcaacgctgccgggcctgtcaaagatgttccgttaccagcaacagatattgccggcggatggacattgttcactggcgagcataaggcgtccgttgattcaacgatggtgttctccctgagaacatccctgagttcgggctatctctatctcgatgatgcgttctttatcgatatcaccgatgagaaaacgatagcggcgaatgccagcgccaccagtgcgctgacgagccgggttgagtcggcagaagggcaaatcacgtctcagggccagcagatcacccagctgaataacagcctcacggggaaagccgatgccagcgccttgcagtcgttgcagaacactgttacgcagcacggcaaaacgctgacaagccagggtgatgcgattacgtcgctgaacaacagtctggaaggtaaagctgatgccggggcggtaaacagtctgacaagtcgcattacagaggcagagggcaagctttccagtcagggcagtgcgattacgaaattgcagaacgacctgacgacaacgaacgccaacgttaataagaaagccgatgctagcgccctgcagagcctgcaaaacacggtcactgaacagggcaatgcgctgaccagccagggccagtcgattactcagttgaagaatgatctgtccacggccaacggcaacatcgcgaaaaaggcggatgcgagcgcactgcagacgctgcagaacacggtgacgcagcagggcaaggacatcaccgccgcgaacagcgccatcacgaagctgaccggcgacttgtcaacgacgaacgcgaacgtcagtaaaaaagccgacgcgagcgcgttgtcggcgctgcagaacacggtaacgcagcaggggaacacgctgaccagccagggcagcagcctgacgcagctgaacaacagcctcagcgcgacacagaacgatgtggccgcgttacagaatgatgcggccgccggcgtagccgtgccgggcaatatgctcgtgaacagtagttttgagcgtggcttggccagctggaccacgttgtccggaaattatgcggtcgttgatgctgctgcaccgcacagtggcgctaaaattctgcgcaccactaccggtgatacagccgttggtcaactggtagatatgaaagccgggcgtacctataagctgggcgtttttgcccgctgcaaagcaggtactgttatctcgaaccagagtaacaacaagctgcgcattggccgcacagatggctctatcatcaccgacatgcagttcaagatctctgacatggatacggggaatatctggaccgagtttagccgtacctatgcaccatcgagtgatgcgcgatttgagatttctattcgaacttctgcgagtgccggcgagcagtattttgatgatgtgtatctcgtcgatgttaccgacgaaacgaacattacggccaacgctggcgcaatcagcggtctgacaagtcgggtaagcaacgcggaaggggccatcaccagccagagccagtcgcttacaaagctgcagaacgacctgtcgacgacaaacaccaacgtcgacaaaaaggccgacgcgagcgcgctgcagacgctgcagaacacggtgaccctgcaggggaacacactggccagccagggccagtcgatcaccagtctgcagggtagcctgtcatctgcgaatatggagattgcgaaaaaggcggatgccagcaccgttcagacgctgcagaacaccgtgacgcagcagggcaaggacattaccgccgcgaacagcgccatcacgaaactgaatagtgatctgtcgacgacaaatgcgaacgtcagtaaaaaggcggacgcgggcgcggtcagcaatctgacaagccgcgtaacagaggcagagggaaaactttcaagtcaaagcgagagcatcacgagcctgaataataccctgaatagtgtgcaggccgatgccgatgcatccgggaaaattccgggcaacctgatcgttaacccgtcgtttgagcgcggcacagacggttttatcggtctctcagcgaagagcacggtagtggaagttcagacgccgcactccggcacacgggcgcttcggattgatactggcagtgtggcgccagggcagaacatcgattttgtcaaagatcgcacctatgaggtcggcatctgggttaaacaggtggcaggcacaacggataatggtgctggcaacaataagctgcggatcgggaacagtgccggcaatccggtgcttgagatcccgtataccggtgctggtacaaactggacaaaatacagcaaggtgtggaaagcgacggagacagccagccttcccgtcacgctgaataactatctgacagccggtaatcgttatttcgacgatttttatgtcatcgatgtcaccgatcgtatcaatactgaggcaaatactggcgcgattagtcagctgcagacgacggtaacccagcatggcaatacgctgaccagccagggccagtcgattaccaaactgcagaacgatctgtccacggccaacggcaacatcgcgaaaaaggcggatgcgaccgccctgcagacgttgctgaacactgtgacgcagcaggggggcacgctggacagccagggacagtccatcacgcaactgcagaatggattatcctccgcggatgcgaacattgcgaaaaaagcggacgggaccgcagtcaccgcgctgactaaccgtgtgaccgatgccgaagggaccattaccgcccagggcgcccagctgacgatgctgaagaactcgctggccgagggcagcctgatcagtaatggcgggctgaatgtggatgcctctttctgggataactccggctctggttcggccttcacatatgatgcgggcgagaaggcgctgcggacaaccaccgggtccattcgcgttgctaacacgacacgaatcccggttgaagccggcactacgctgacgctgtcgttcgagatgaaatcctccgaggctatcatgagcgtgtcggcggacaccatcggatttattaccgatttaggcaacccgatcggctggctggtatcgcaatcgccgtggctggctgacgtgacgaccagctggcagacgaaaagtgttgagctgacgatcccggataatttcgccggtaattttgtctatctgcgattcgcggccggtggctgggcgccggcaaccagcgcccgcctgtatctccgcaacgttgacgttttttcgtcaaacggcgtggcgaaaaaagcgaacgcatcggcagtcaatgacctgaccagccgggtggattcggcggagggcaagctggccagccagggacagtcgattacgaagctgcagaatgacctgaccagcactaacaacgacgtgagcaaaaaggcggatcagagcgcgctgacatcgctgaccggccgcgttgaaaaaacggaaagcgggatgacggcggcgaacagcaacattacctcgctgactgccgcgattactgcagcgaaagcggcaggggatgatttaattcctaacccgacgtttgacccgacctataaccagatgggttataacgtcgtgtccacggacgcagagggcgtgccggcagggtgtccgtttaagtacgctgcgcggctggccagccgcgatcacatcccaaatatgaacaacatcgtggcaactgctggtgatgttattgagttttcggctctggttgcatgtggtaccggcactgcagcgttcaatctgtacgtcagttcatcgggatcacccactggaggtgtctcggctgcaaactctggtggttccgtttcagctgcagctggcgctacgtgggttcgtaccacctggcgctggaccgtaaccgcagcggttgccgcgaaaggatttttccgcccattcctgcaaatttcccagagcgcaccgttcagcacgatctggtatgcgacggactggcattgccgcaatatcacggcagcggcgaaggctcaggcgacagccgatgccacggcgtctgcggttgattccctgacgacgacggtcagccagcagggcgatacgttaagcagcatcgggaaccggaccacggcgctggaaaacggtctgtcgacgacgaacgcgaatgtcagcaaaaaggcggatgcgagcgcactgcagacgctgcagaacacggtgacgcagcagggcaaggacatcaccgccgcgaacagcgccatcacgaagctgaccggcgatctgtcaacgacgaatgctaacgtcagtaaaaaggcggacgcgagcgcgctgtcggcgctgcagaacacggtgacgcagcaggggaacacgctgaccagccagggcagtagcctgacgcagctgaacaacagcctcagcgcgacacagaacgatgtggccgcgttgcagaatgatgcggccgccggcgcaaccgtaccgggtaacatgcttgtaaacagtggttttgaattaggcagcaaaagctgggcggtatccgggcctgcgacattcagttcggcctcatcaccgcatagtggcggcatgattgcgcgttgtggtgttggtaaatcaaccatttctcagcgcatcgatgtcaaagctggccggacctatcgggtcggtgtttttgcccgtcgtaacactgctgcggccacagcggatcagtcctatcacaagctgcgaattggcgataccagcggttcgattatctatggtgccaactttatcacgacagatttgccgacgagcaccacatgggtagatgttagcggaagctggacggccgcggctgatgcgaccgttgaagcggcgatctggacatcgttgtcagccggtgagatgtactttgacgacgtttatgtcgtggatattaccgacgaaacgaaaatcgcggccaatgctggcgcgattggcggtttgacaagccgggtcagcaatgccgaaggcacgatctccagccaggggcagtcgctcacgaagctacagaacgatctgacgacgacgaacgccaacgtcaataaaaaggctgatgccagtgcgctgcagacactgcagaacacggtcacgcagcaggggaacacgctggccagccagggccagtcgataaccagtttgcagggcagcctgtcgtctgcgaatacggagattgcgaagaaggcggatgcctcggcggtcaacacgctgacgaaccgggtcacgcaggcggagaacaaactcgacagccagggccagtcgattaccagcctgaataacagcattgcagcagtacagcaggacgcggatgcggcgaaggccatgccgacgaatatgctggtcaataattcgtttgagcgcgggttcgatggttggcgaaataatggctggacgacgctgtccgcgcagaatccgaaatccggcaaattcattatccaggcgactacggcatcaggaaacggaaccgagtgtaaccaggacgtaagcatgtccgcagggcggacttatcgggttggcgcctgggtacgaaaatctggtgattttgcggccagtaatccggataacacgaaaatcagtatccgtaacagctccggcccggtgaaagatctgtttctggccgggagtgatgtagggaccagctggacgaaggttagcaccgattacaagccgacagcagatgtaacactgacggtttccctgcgtaccagtttgtcagctggctatctgtatatcgatgacgcgttttgcctcgatgtaacggatgaagtggctaacagcgtaaacgcatcggcgataagcgcgttgacgacccgggtcacgaatgatgaggggaaaatcacgtctcagggtcagtcgatcacgagtctgcagaatagtctggggaataaggcggatgttggtgcggttaactcgttgacgacgcgagtcacgcaggctgaaggcaaaattgagtctgcggccaccagtcttacaagcctgaacagtacagtgggcaacctgtcgtctacagtacaggcgcaggggcagacgctggctgacacgaacggcaagctcaactcgatgtactcgatcaaggttgagactgacaacgggaaaaaagtcggcgccggtatcgtgctggggagtgacggcgataccagcgacatgatcctatacgctgatcggttctcactgttcaaccgcaacagcaaagcagctgtgccggtgatgattgctgagggtaacgagctctacattgattcggcccgtattaaaaacggctctattgataacgcgaaaattggcgatttcatttgttccagtaactataactgggctgatggttcgacaggctggctcatctccaaagatggagcctgcctgttcaataacgggaggtttcgcggcaccgtctatgcagatggtggtgaatttaataacgtcaccatccgtgaaaactgcaatgttctgggaacagtccaggcagcgaagattgtcggtgatgttggcgcgtatggtatcaatatcgcccagcatcgatcacgttccatccctaaagcgacatgggtatggtatgacctgatggtcgtagatcgtcagccattcgcacagcgagttcagctggttggagcgttacgtcaggatgacaagatcaatatttcaggttcaggtgatttttccgctgaaccgggctattgcatcttgatgcgcaccgccggcgcaacatcaggtggtggcgctatgacgtgtgcaatcagtattgacggcattttgtatgcgcaagaaggcgactcgatgaaggtccagtcgatggacttcgttgttcccgctggtactggccagactgtcgtgcgttacggatattatctggaccgcaacggcagtatgaaaggcgctattttgtcccgcttccatgcatttgcttcccgaaattccaatattattcgcggtgcatcaagtgattag

SEQ ID NO: 232306 - DNA, 249 bp, Klebsiella pneumoniae
atgtttgtagaactcgtttatgacaaaagaaattttgccggactggacggagccaaagaaatcattgctgctgaactgactaaacgcatccatcaaattttcccggatgcagatgtccgcgttaaaccgatgatgactctcccggcgattaatacagatgcgagcaaacacgaaaaggaacaaattagccgtacagttcaggagatgtttgaagaagcagatttatggatgtcaggagaatataattag

SEQ ID NO: 232307 - DNA, 387 bp, Klebsiella pneumoniae
atgggttttccatcaccagcgaaagattttgaagagcataggatttctctcgatgagaagtttattcaccatccctcagcgacctattttatgcgagcggggagcacctactatcgggctgggatcatccagggggctttactggttatcgatgcgtccctgagtccatgtgatggatcactgctcgtctgtgcgatggagggagaatttaagataaggcggtataggacaatgcccgatcaacatcttgagaatctactgaccggaaaaagagaggaactaccgagggatgatttcgatgacaaaccgccagtggtatttggggtgattacttacatcatcaatgacgccagaatcggtgagtttgacgataacccagtgatgtga

SEQ ID NO: 232308 - DNA, 822 bp, Klebsiella pneumoniae
atgaacgtttggcaaattttttctgattggctttcgatcccatccactggcagtctcatcggaattggaggtatattagtagcaattttttctattttcttaacaagagcagtttcaaaaatttctagtcatcttgagttcaatagtttgattggtggttttgagtcaagtttacctaagaagataaatattacatatgatgatgttccagttgaaaaagtttcttcatctgtatttatcatttggaattcaggtaataaagtcataagcggcgaagcacttaaaaccattgaccctctgcgcattgaggcaagtaacggagttgagattcttcgatctaatattcaaagaacaaacaataaaacaaataacattcaaatcaaaaccgatcaaaacaataagaacaacctattgatttcattcgattatcttgaaaaaaagaatggagccagaattgaaatacttcataccggcgatagcgatggtttacaagtcaaaggtacgctgatcgatgtgaagccactaaaaagaaaaacaggaacattacataaaatcctccatttagctttcaataatttcaaagtaattaaaatttcaatagctatctctggaattattttcgctgcattacttttactcatattactttatacatttattcaacctgacgcattcaaaacaaccaccccaaaaccacttaatatatggccatttcgaataatattatttagttacttaatttttattctatatgcttttaaaaaaatcaagccaccttatccatcaagcctccgttcagataacagcaaagttaactcctga

SEQ ID NO: 232309 - DNA, 1143 bp, Klebsiella pneumoniae
atggaaacgttaatgttgctgacctacgccgcgctatgcatcgtggtgtttaaagtcttccgcatcccgctcaataagtggaccgtgccgacggcggtgctcggcggtatcgccctgattggcgcggtgattttcgggatgaattacaacttcccctataccgacgtcggtaatcaggtgtttcgcaccgtaccgattgtgtcgcaggtgcgcggtcgggtgcagagcgtaccggtgaggcctaaccagaggctgcataagggcgatgtgctgtttactctcgacccgacgccgttccaggcaaaggtggacgatctgcaggcgcagattaaagcggccagccaggatgcgctctccctcaacgccgcgttaagccaggcggaggccgagctgagcagagcggtggctcagcgcgaccagtcgcggcgggagtatgcccgctttcgggaggggcatgcccagggcgccttctccgatcaaatggtcgatacccgtctgcagacgtggaaagccgatgaagccagcgtcagcgcggctcaggcgaaagtggttcaggcgcgtaacgcgctggactcggtggtgaagggcaaaaataccaccgtggcctccctgctggcgcagctgcagaaggcgcagtttcagctggataacaccgtcgtccgcgccccggaagacggctatgtcagcaccgtcggcttacggccaggcaccatgtccaccgcgctgggaatgctgccgctgatgacctttgtgccggtggagggcgacgcctcgcgggagtatgtcgcggcatttcgccagaacgccctgcagcgtctgtacaaaggcgagcccgcggagctgatgtttccggccatcccgggcaccgtcttccgcggggaagtggccgatgtgctgccggcgattggcgagagtcagtttcagggccagggcaaactgctgaccacggacgcgctcaatacccatggccgggcgctggtggtactaaaggtgaccgatccacgttttgccgaatacgctctgccgcagggtgctaccctcgaggcggcggtctactcagatcacctgaaagagctgtcgctgatcaggaagatcctgatccgcatgaagagctgggaaaactacatctatctcgatcactaa

SEQ ID NO: 232310 - DNA, 873 bp, Klebsiella pneumoniae
atgaagacgacccacaccgaatttgaacgctattaccagcaggtacgctcgcggcaaaagcgcgatgccgtctgctggtcgctgctgctgctggcgctctattttgccgccggcagcgccgcggaatttaatctgctgactatctggcactcgctcccccatttctttgactatatggcagagaccattccgcccctgagcgccggcaacctgttcgccgacgtgcagaccaaaggctcgctggcctggtggggctatcgcctgccgatccagctgccgctgatctgggaaactctccagctggcgctggcctcaaccctggtggccgtcgccattgccacggttttcgcgtttcttgccgctaataacgcctggtccccggcgccggtgcgctttgccattcgcgtgctggtggcgtttttgcgcaccatgcccgagctggcgtgggcggtgatctttgtgatggcgttcggcatcggcgcgattccgggctttctggcgctcatgctgcataccgtcggcagcctgaccaaactgttctacgaggcggtggaaagcgcgcaaaacaaaccggtacgcggcctggcggcctgcggcgcatccccgctgcagaaaattcgcttcgccctgtggcctcaggtgaaacctctgtttctctcctatggctttatgcggcttgaaatcaacttccgctcgtcgaccattctcgggctggtgggcgcgggcggcatcggccaggagctgatgaccaacatcaagctcgaccgctacgatcaggtgagcatcaccctgctgctgatcattctggtggtgtcggcgctggacatgctgtccggtcgtctgcgcctgtgggtactggagggtaagaaatga

SEQ ID NO: 232311 - DNA, 1032 bp, Klebsiella pneumoniae
atgacagatagcaaaattaaaatttatagcacacgctatagcaacataatgaaattgctggattttttctccgttaacatctttatctacgtctatcttatcgttcttaaccttgttcctaccccttcttctatattacttgggattatttattcattaatatttatacgtaccaacgagtattttcagctctattctggacaaatgaaaggtagatacttgtccattctcgtgaagctgtttataagcgcgtgtctgggaggcttgctatctttcctattgatcgttatcgctgaacaacttgccagtcgccccctatcgattcaccacctggtattagccaaaaccattgcactgtgctcggttgctgttttcatcagcatgtttttcatccgtgttgtgaccagtcgctatttctttaagagcaaacgcagggtcgccattctgggcataacgccagcagggctggctatcctgcaggaattgcataaagaattctcagctgaaggtatcgacattcgtttctatgaggaccgggcggtgcaacgcgacagccgccttatcaatattgataaggcgggtaactcacgagatctgctggcgctggcaaaaaaaggtgaggtagatgaagtttacattgcgctgccaatggtggcccaacagcgtattcgccagtttttgaacgaattttccgataccacggtggatgtttttctggtgccggatcttttctcgtacagtgcacacatttcccagttacgcatgtttggcaacattcaaactatcagtattttcacctcaccgtttgaaggtgaaggcgcggtactcaagcgtattgaagatattattcttggtctcttttttaccttgcttagccttccggtgatgctgtttgtggcgataggtattaagctcacttcgccaggaccagtgttgtttaaacaaaaccgctacggtctcaacggtaaacagatccaggtgtggaaatttcgaaccatgcgggtgatggagaacagcgcggggctttgttga

SEQ ID NO: 232312 - DNA, 552 bp, Klebsiella pneumoniae
atgcgaatcaagagtttacctcttttgttatgtgccgcttgtgttggctgtaatggatattctcaacgacagggtcatgtagatatccccacttactcagagagctatgatcaggctttagggtggcttgtgacagctcgttataaagatgcaaataactcagttatcgtaatgtcattggtatcggatttttgtaaaagtaaaggcaaggaggctactctctacaaaacaactgccggaacagatgccaccactcaagaaatttgggcttgccaaacctccccgaggttaaatgatactgaggtattaagtggcatttattgtcatttcattgcaaacgctcctcgctactcagtagacttgtctaaccgtcagaaagaaatagcagaacaaacttttgttaaggtgttcttgaatgaagggattgaataccctgtaggcggtttttatgacaagtatcagcaaaaatttgcctcctgggctgttactaagcgcgaaggaagccctaatgctgataatgttcgtacatggtttgataagcattgtcagtag

SEQ ID NO: 232313 - DNA, 531 bp, Klebsiella pneumoniae
atgcattgggaatcagagaggctgatttacagacatgctgtcatgtcagacttggaagatctatttcgcatctatggtgaccccagaacacatacttttaatcccgctggcccacatcttgatattgagcaatcaaggaaatctcttgaaagacgtatttctgaccaaaaaatctatgggtttgatgattgggttgtcatgagtaaggagaggcctgatcacatcatcggttttggtggggtttttgttagtgaatttaatgggcgagtaactaacaatctgggctatagatttgaaccggacgcatgggggaaagggtatgcaacggaactgtccaaaagggccatacgctacggatttgaggaagtcggcctacaagaaattgtcggcgtagtacgagctaatcaccttgcttcaagaaaagtgcttgaaaaagctggtctaaagtttatagaagaaatcaaagactttgagaacctaccagcaagccttatgttcagcctttctcgtgatgaatggttaaagtcttag

SEQ ID NO: 232314 - DNA, 456 bp, Klebsiella pneumoniae
atgagcgacccgctggcggaaatcatagcgatgctcaatctcagagcggtgctgaccaaaaccattgagggggcgggagaatggcgcgttaaacgttcagaccagggaatgtcgttctacggcgtggtactggaaggcggctgtcggctggaaatagaccagcatgaaccgcagatcctgcgcgccggggattttatgttgatcccggcggcgtaccgcttcgcgttaaccagcctgaccccgccgccttcaccggcgctggagaccaccccggtgaagcttgcggcggaacactttcgcctgggagctctcgaccaatcagcggagatgcaggcgctgattggccactgcgctgccgattcggataacgccagcctgctaacctccctgctgcccgccttagtggtggttcgcaaccagccgcggctggccacctttgtcgggctgctgaaatag

SEQ ID NO: 232315 - DNA, 1278 bp, Klebsiella pneumoniae
atgtctgaccaaacatcctctctttttattcgctggctacagcgagaagccgcaccagcattaggttgtactgaacccgttgctatttcatttaccaccgcttacgccgcgaaacatttagcgataccctgcgaaaaaattagcggttttatttctgccaacctgtataaaaacgccacgggcgtcacgattcccggcacgacagtgaatggcgtcgcgctggccgccgccatcggcgcctttggcggcgatgccgataagggattacagaccctggcaggcattacttcacagcatgtggaacaggcacaagcgctggtggacgccggccacgttaatattgacgtccaggacacgcctgactttattcatctcgatctcaccctcagcgccggtgaccagacctgtcgcgtcgtggtaaaaggcacgcataccaatgtggtcgagttatatattaatggcgaacagcagccattacacgccggggaaaatagcgccacagcgcaggccgaactgccaactttctctctccaggaagcgtatgactttattatctccaccccggttgagaatattacgtttattctggaagccgcccgcctcaatagcgcactggctgcagaaggaaaatcgaaaaagtatgggttgaatattaacggaacattctctgaagccgttaaaaatggtttgttaagcaatgacttaatgagtgaggtcattatcaacaccgtcgcggcttccgatgcgcgtatgggcggcgccccggtggtggctatgtcgaacttcggctctggcaaccaggggatcgcggcgaccatgccggtggtaaccgtcgccgagcatctgaatgccgatgaagagacgctcgctcgcgcgctggcgctctcgcatctgacggccatttccatccattcgcgctatacccgcctgtccgcactgtgcgcggcctccaccgccgccatgggcgccgccgccggtatggcatggctgtttacccgcaatatcgaaaccatcaacaccgccatcatcaatatgattagcgatgttaccggcatgatttgtgatggcgcctccaacagctgcgcgatgaaggtgtcctcggtggtctccagcgcctttaaatctgtattgatggcgatgcaaaaccgctgcgccagcgccaacgacggcattgtctgcgccgacgtcgaacagtcgattaataacctgtgccgcctcgtgattaagcctatggcgcaaactgataaagagatcattcgcattatggtcagcaaataa

SEQ ID NO: 232316 - DNA, 1545 bp, Klebsiella pneumoniae
atggatgccgttaaaaagaaacactggtggcaaagtccgcaactcacatggtctgtgattggcttactgtgcctgctggtgggttaccttgttgttttgatgtacgcccagggggagtacctgttcgccatcatgacgctgattttaagctcagttggcctgtatattttcgctaaccgcaaggcttatgcctggcgctatgtctatcccggcctcgccggcatgggcctgtttgtcctgtttccgctgatctgtactatcgctatcgcgttcaccaactacagcagcaccaaccagctgacctttgagcgcgcgcagcaggtgctgatggatcgctccttccaggccggcaaagcctataacttcacgctgatcccggcaggcgacgagtggaagctggccctgaccgacggtgagagcggtaaaaactacctttccgacgcctttaaattcggcggcgagcagaagctggcgttaaaagaaaccgacgccctgccggaaggcgagcgcgccaacctgcgcgtcattacccagaaccgcaccgcgctgaaccagctgaccgccgtgctgcctgacgacagcaaagtgatcatgagctcgctgcgccagttctccggcacccaaccgctgtatacgcttggcgaaaacggcgtgctgaccaacaatcaaacccacgtcaaataccgcccgaacaacgacgttggtttctaccaggccatcaacgccgacggtagctggggcacagaaaagctgagcccgggctacaccgtgactatcggctgggacaactttacccgcgtcttccacgatgaaggcatccagaaaccgttcttcgcgatcttcgtctggacggtggtgttctcggtgctgaccgtggtgctgaccgtcgcggtggggatgatccttgcctgcctggtgcagtgggaagcactgaaaggcaaagcgatttaccgcgtcctgctgattctgccgtatgccgtaccgtcatttatttcgattctgattttcaaaggtctgttcaaccagagctttggtgaaatcaacatgatgctcagcacgctgttcggcattaagccggcgtggtttagcgacccgaccaccgcgcgcaccatgatcatcatcgtcaacacctggctgggctacccgtacatgatgatcctgtgcatggggctgctgaaggcgattccggacgatctgtacgaagcgtcggcaatggatggcgccggcccgttccagaacttctttaaaattaccttcccgctgctgattaagccgctgacgccgctgatgatcgccagcttcgcctttaactttaacaacttcgtcctgattcaactgttgaccaacggtggtccggaccgtctcggcaccaccaccccggccggttataccgacctgctggtgagctacacctaccgtatcgcctttgaaggcggcggcggtcaggacttcggcctggcggcggctatcgcaacgcttatcttcctgctggttggcgcgttagcgattgtgaacctgaaagccacacgcatgaagtttgattaa

SEQ ID NO: 232317 - DNA, 531 bp, Klebsiella pneumoniae
atggcatccctgaaaacgaaactcagcacagccatgctagcgctcattgctgccggtgcatcagctccggtgctgtttgatcagtttattagcgagaaagaaggtaatgcgctggtggccgttgttgatcccggcggagtgtggtcattgtgccacggtgtaacggtcatcaatggcaagcccgttattaaggggcaaagagcgaccgaggcgcagtgtaagcaggtaaacgccattgagcgggacaaggcgctggcatgggtcgaccggaatatcaagatatcgcttaccgctccgcagaaagttggaatcgcgtcattttgtccctacaacattggccccggtcgctgcttcccgtcgacgttctaccagcggattaacgctggcgaccgtaaaggcgcatgtgaagcgattcgctggtggataaaagacggagggaaggattgccgggtgcgctccaataactgctatgggcaggtaacacgccgtgatcaggaaagcgcgctgacttgctgggggattgagcagtga

SEQ ID NO: 232318 - DNA, 519 bp, Klebsiella pneumoniae
atggcagtgggatggctgattagctctgctcaaggaatggacatggcaaaaacaataacaattcggtttatgcgaaaaaatgataattcactgacggattcccctgaatttgggacgagaccggtgattccggtaaccatcaggcctagttcacccgaagatcatgcgaaggacattggaggaaaaaccaaacaagtattcgctctcattgataccggagcggatgatttttatgtcgatgaagctcttgtcgaagaattaacactccctataaaaaaagagagtgaaccagcaacagtgatatctggtttaaacaatgaaaaaacgactattcaccatggaataatacacttaatcgatactgacattgaatgtggcattactatgcacaagatcattaccagcaagttagggttaggttatcaaataatacttggtatggatttaatacgtcgaggaactttggttcttgatcctgtaaatcaaatttataccctaacccttcctgacgttatttag

SEQ ID NO: 232319 - DNA, 291 bp, Klebsiella pneumoniae
atgcagagtttaaaaattgaatacgtcaatggaatgctggttgctctggaaattgacgggcagccgcaactggataagacagcagtccaggccattaactttacgcatgagcaaggtgccacccctgtactgcgaataaccgtcgcagagcagattgtcgctcctgcgcaacctgaaattactcaggaagcaccgcagccagagaaagaaggcgagctgcttcttgccaaaacggaaacacgtcagccgcgtaaccgcaacaaaaaccgcaaccgtaaccggagccattaa

SEQ ID NO: 232320 - DNA, 429 bp, Klebsiella pneumoniae
atgtttaagcgtgatgatttgaccatctctatgtattacgcatcgtctaccgattccgaatcgggaaacaagatggccactatgaccgtggaagtacgtgacatcagtcccattggcgatctggccctcatgacgcagctgcagtgcgtgaccgacaaggcgaaaaagaagacctactccgtaggtaagcaaagcctggcaaacggctctgatccgctcctggtcgcgattgaacagtactggcggacgggaacggaagggctggtgaaagatctgctggcagaagtcatggactttatctctggcagcgtcgggcaggaaaatacctgggttggacagtacggacttaaagtattcgaaaatgcagcgctggctgaacgtctgccggagagtgtgttacaggctgacggtggcgcatccgcagactga

SEQ ID NO: 232321 - DNA, 546 bp, Klebsiella pneumoniae
atggaggtaaacaaaaaacagctctccgatatttttggtgtcagcgttcgtacgatccagaactggcaggatcagggtatgccggttgtacgcggcggcggtaaaggtaatgaagtgctttacgattccgccactgcgattaagtggtttgccgagcgcgatgctgatatcgaaaacgaaaagttgagaaaggaagtggaagagctccgtaaggctggtgaatcagatctacagcctggaacgattgattatgagcgctaccgtctgacccggtcgcaggctgatgcccaggagctaaaaaacgccaaaagttctgctgaggtggtggagaccgcattctgcacgttcgtgctttcacgcgtggccggcgaaatagccagtatcctggacgggatccccctgtcggtgcagcggcggtttcctgagctggagaatcgacacattgatttccttaaaaaggacgtaatcaaagccatgaacaaggcagctgcgctggatgaaattataccggggttgctgagtgaatatatcgaacagtcagattaa

SEQ ID NO: 232322 - DNA, 1833 bp, Klebsiella pneumoniae
gtggaatgggcggacaaaaattattacctgccgaaagagtcggcataccaggaagggcgctgggtcacgctgcctttccagcgtgcgataatgaatgcgatgggaaatgactacatacgggaagtgaacgttgttaaatctgcccgtgtcggttactcaaagatgctgctgggcgtctattcctattttattgagcataagcagcgaaattccctcatctggctgccgaccgacggcgatgccgaaaactttatgaagtcgcacgttgagccgacgatccgtgatattcccgcactgctggcgctggcgccgtggtatgggaaaaaacaccgcaataacacgctcagcatgaaacgattctctaacggtcgcggcttctggtgtctcggcggtaaggctgccaagaactaccgtgagaaatcggtcgatgttgccggttatgatgaactggcggcattcgatgaggacatcgagaaagaaggttcgccaacgtttctgggtgataagcgaattgagggctctgtctggcccaaatcgatccgcggctctaccccaaaaattcgtggtacctgccagattgagcgagccgccggcgaatcgcagcattttatgcgtttccatgttgcgtgcccgcattgcggggaagagcaatacctcaagttcggcgatagggaaacgccttttggttttaaatggtctcccggtgagcctgccagcgttttttacctgtgcgagcacaacgggtgcgtcattaagcaacaggagctggatttcattcatgcgcgctatatctgtgagcgaaccggcatctggacgggggacggtcttaactggttctcttcctcgggtggcgaaatagacccgcctgacagtgtgaccttccatatctggacggcttacagcccgttcaccacatgggtgcagattgtaaaagagtggataaagaccaagggtgatacaggcaaacgtaaaaccttcactaacaccaccctcggggaaacctgggagccgaaaattggtgaacggcctgatgccgatcttatcgaagagcgaaaggagctctttgctgccgcagtgccggatcgcgttgtctatctgaccgccgggattgactcacagcttgaccgttacgaaatgcgagtctggggctggggacctggtgaagaaagctggctggtggaccgacagattatcatggggcgtcatgatgacgagcagacccttaaacgcgtcgatgaggcgatcaataagacctataaacgacgcaatggagcggagatgagcatttcgcgcatctgctgggatatcggggggattgaccccacaatcgtttatggccgttcgaaaaagcatggtcttttccgcgtaatccccatcaaaggtgcttctgtatacggtaaacctgtagcgaatatgccgcgtaaacgaaataaaaacggggtgtatctgacggaggttggcaccgatacggcgaaggagcagatttataaccgattaactcttattccggttggtgatgagccaatggccggcgcagttcattttcctaacaaccccgaaatattcgatttgaccgaggctcagcagctgacagcagaggagcaggttgaaaaatgggtaaacggcgagaggaaaatactctgggacagtaagaaacgccgtaatgaggcgctggactgttttgtctacgcgctggcagctctgcggataagcgtctcccgctggcagctgaatcttgagtctcttctgataagcatgcaggaggacgaacttacctctaaaccgaaaaagaccctggcggattatgcccgggcattagccggagatgaataa

SEQ ID NO: 232323 - DNA, 207 bp, Klebsiella pneumoniae
atggcaacacagtctgaactggaaagtgcccgcgccgcacttcatgacctgatgacagggaaacgcgttgcgacggtacagaaagatggccgccgcgttgagtttactgccacgtcagttgctgatttgaaaaaatatattgccgaacttgaagttcagattggcatcaccagtcgccggcgcgggccagcaggattttacgcatga

SEQ ID NO: 232324 - DNA, 1593 bp, Klebsiella pneumoniae
atgaaattaccagcacttgttggaccagacggtaaaacgtcgctccgggaatatgccggataccatggtggggctggtggctttggtggccagctgcgcgcgtggaatccacccagtgaaagtggtgatgccgcactactgccgaacttccagcgtggaaacgcccgcgccgacgatcttgttcgtaataacggcctcgcggcgaatgcggtacagcttcaccaggatcatatcgttggttcatttttccgtcttagccaccggcctgcctggcgctatcttgggatcagcgaagaggatgcgcgtgcgtttgcccgtgagtgcgaggatgcctggaaagaatatgcggaggacgaccattgttttattgatgccgaacgtaaacgcacgttcaccatgatgatccgtgaaggggtggccatgcacacttttaacggagagttatttactcaggcgacctgggataccagcgcgaacaggctctttcgaacacagtttaagatggtcagtcctaagcggatcggtaatccaggcaatcagggcgatacccgaaattgccgggcaggggtaaagattaatgatgctggtgccgcccagggttactacgtcagcgaggataactatcccgggtggatggctcagaagtggagttatataccgcgtgaactacctggcgggcgaacggcctttatccatgtgtttgagccaatggaagatggacagacaaggggagcgaatcagttttatagcgttatggagcagatgaaaatgctcgatacgctgcaaaacacccaactgcaaagcgccatcgtcaaggcgatgtatgccgccacgattgaaagtgagatggatacccagacagcgatggattttatcctcggtgcggacaatccggagcagacgaaaaagctgaccggatggcttggggaaatcgcaacgtattatgcggccgccccggtcagacttggaggggcgaaggtaccacacctgatgcccggggattcactgaatctacagtctgctcagaataccgataatgggtattccgtattcgagcaatcgctcttacgttacatcgccgcggggcttggcgtttcttacgagcagttatcccgcaactactcacagatgagttactccaccgcacgcgcgagcgccaatgagtcctgggcctatttcatgggccggcgcaaatttatcgctgctcggcaggcgagcatgatgtttttgtgctggctggaagaggcgatcgtccgtcgtgtcgtcagcctgccatcccgcgcccgttacagtttccaggaggccaggacaagctgggcgaactgcgactggatcggctccggcaggatggcgattgacggccttaaggaggtgcaggaggcggttatgctgattgaagcaggcctcagtacctatgaaaaagaatgcgcgaagcgcggcgatgattatcaggaaatctttgcccagcaagtgcgtgaaacgatggaacggcgacaggcagggttaagaccgccttcgtgggcagctgcggcgttccagtctggtctggagaattccggtaaggaggaacaagatgacgcccgagctgcgtaa

SEQ ID NO: 232325 - DNA, 1332 bp, Klebsiella pneumoniae
atgacgcccgagctgcgtaaccttccacatattgccagcctggcatttaacgaaccgctgctccttgaacccgcctatgcgcgggttttcttttgcgcgctggcaggccagctgggcattacccgcctgactgataccgtatcggggacaaccctgggcaccgagcaaatggcggaaccactgatgctattcggtaacgaggaggccgggccgcgtccggctcgtagctatcaggtaatgaatggtattgcggtattacctgttgccgggaccctggtcaataaaacccgctcactccagccgtattccggcatgaccgggtacaacggtgtaattgcccgcctgcagcaggctatcagcgatcctgatgttgatggtgttttgctggatatggatacgccaggtgggatggttgccggagcgtttgactgcgccgacattattgcccgggcccgcgatattaaacccgtctgggcgctggcgaacgatatgaactgcagcgccgggcagcttatcgccagtgcggcatcacgccggctggtgacacagaccgcaaggacggggtccatcggtgtgatgatggcccacagcaattatgggcaggtgctgaaatctcagggggtcgaggtcacgttgatttacagcggcgaccacaaggttgatggcaacccttacgaaaaattgccaaaagatgttcgtgaagcttttcagtcccgtattgatgccacccggcagatgtttgctgaaaaagtggcaggttacacgggaatgtcggtgagggcggttctcgatactgaggctgcggtcttctccgggcaggagtccattgatcatgggctggcggacgaacttgttaacagtacagatgcgatcggcgtaatgcgcagcgcgctggataccaaaaagatcatccatatcggaggaacgatgaagacaacgacgacgaatgcagctgcaacccaaccagacgccaatgccgcaccggaagccaatggagcaattgtaactgctccggcagcgccagcggctgctgcacccacaccggatgtaaatgctcaggttgccgcggcggtctctgctgagaatgcccgaattatggggatcctgaactgtgaggccgcaagcggtcgggaggaacaggcccgtgcgctggcagaaacgccgggaatgacggttgagcatgcacagcgcattctggcggcggcgccacaaagttcacaggcccgaagcgaaaccgcgctggatcgcctgatgggaaccgcaccagaaacgctggcgtccggagcaccggttgccagtgaaacagatgatttgatgaatacccctgtttga

SEQ ID NO: 232326 - DNA, 333 bp, Klebsiella pneumoniae; identical to SEQ ID NO: 178023

SEQ ID NO: 232327 - DNA, 1026 bp, Klebsiella pneumoniae
atgtcagtttatacaacagcccaactgctggcggtcaatgagaagaaattcaaattcgatccgcttttcctgcgcatcttctttcgtgaaagttatcccttcactacagagaaagtctacttgtcgcaaattccaggcctggtcaacatggcgctgtatgtgtcgccgattgtctccgggaaagtgattcgctctcgtggcggcagcacgtcagaatttacacctggctatgtgaagccgaaacacgaagttaacccacaaatgactcttcgtcgcttgcctgatgaagatccacagaatctggcagatcctgcttatcgccgtcgccgcatcattcttcagaatatgaaagatgaggagctggcgattgcacaggtcgaagagaagcaagcaatcgaagctgtgctttatgggaaatacaccatgagcggggaagcatttgagccagttgaagtggatatggggcgcagtgccggcaataacattatccaggcgggggcggcagcatggtctggccgtgataaaaaaacctatgatccgaccgatgacattgaagcctatgcgcttaacgccagcggtacaatcaacattatcgtgttcgatccgaagggctgggcactgttccgttctttcgatgccgttaaggagaagctggatactcgccgcggctcgaattctgaactggaaacggccctgaaagacctgggtaaagccgtttcttataagggcatgtacggcgatgtcgccattgtggtttatgccggtcagctcgttgaaaatgatgtcaaaaaaaatgctctgccggatctgtctatggtactgggtaacacccaggcccgcggtctgcgcacctatggttgcatccttgatgcagacgcccagcgcgaaggtattaacgcttcaactcgctacccaaaaaactgggttcagtcaggagaccctgcacgcgaattcaccatgattcagtcagcacccctgatgttgctggctgatccggatgagttcgtctccgtaaaactggcctga

SEQ ID NO: 232328 - DNA, 414 bp, Klebsiella pneumoniae
atgaccaaagaagagttaattgctcgcctgaaagagctgggcagcatgctgaaccgtgaaatcagtctgaccggatcgaaagaagagctggcgctgcgcattgcagagctggaagaggagcttggggatgatatcgacgatggtggcgatagcaatgaaacgggggccggaaatacggcatccggaagtgaggagaaggatggcgatgcgcagggtaaagcattaacgccggcgccccaggaaacaaagtctgcttcagatgacctagtcgcggtgaaaacgcttacgacgttacacctcgaagcgctgcacgcggtaaagaatgaacaggtgagtcttgttttgccgggtactaccgttcgtgtcagcgctggggatgcagaagagctgattacacgggggctggctgtctaa

SEQ ID NO: 232329 - DNA, 354 bp, Klebsiella pneumoniae
atgaccgatttcgataatgttttcgatgctgctatatcgcgggctgatgaaacgatccgctcaaccatggggacggttgcgcttatcacctcgggtgggctttccgggctgagtatttccggtgtctttgatgatccagaaaatattggctatgcggttcctggtgtgagagtggagggcacaagcccttcttttttcgtgaaatcgacagatgccagcgagttacagcggctggataccctcacaattaacggaatctcctactggattgacaggattggtccggacgattgcggatcctgccatctctggctaggcaacgggcagccccccgcaggaaaccgccgccgatag

SEQ ID NO: 232330 - DNA, 753 bp, Klebsiella pneumoniae
atgattaattctgattatcaaaagctggagcctggtaatgaaatcaggctatttgaaattgatggcagtagttttggactggataatgttctgtatttccactcgcataatatcgcccatacagaagaggaaataattgctgctgggggggatgaggataagttacctgcaaaaagtatctggtggcagggcactgaatataaagcctggccgtgcgagatagagggaattgaggcttccaccagtgggacggacgcccagcccacgttacgggtcgctaaccttgatgcgtctgttactgctctgtgcctgcattatgatgacctgatgcaggcaaaggtcactatccacgatacgctggcaaaatatctcgatccccggaactttcccaccggcaacgctacagccgatcccactcaggaaaaactgcaaacctggtatatcgatgcaaaaaacgatgaaacggatgaggtggtggagttcaccctcgccagcccgatggacctgcagggcatgatgatccccacccgccagctgcattcgttgtgtacctggtgcatacggaataagtatcgttctggcgatggctgtgattacgcaggctcgcggtattttgaccaaaacaataagccggtcgatgacccctcgaaggacgtctgcaacggtaccctcacagcatgtaaattgaggcacggtgacgccagtgaattgccgttcggtgggttcccggggacttcattaatcaggagctga

SEQ ID NO: 232331 - DNA, 711 bp, Klebsiella pneumoniae
atgcgtcaaaaagtcattcaggcgatacaggtacatgcggcggcggaatacccgagagaggcctgtgggctagtcgcccagaaaggccgggtagtgcgctatttcccgtgccgtaacattgccggtgaaccaactgagcattttattctggcgccggaggattacgccgttgttgaagactggggagttgtgacagggattgtacacagccatcctgacaccacaacccagccgagcgagctggacaaagcgcaatgcgatacaaccctgcttccgtggcatatcatcagttggccggagggtgatctccgtaccatccacccgcgcggagagttgccgctcctcgagcgtccgttcgtgctcggacactatgattgctggggtttggtgatgagctatttcaggcagacccacggcatcgagctgcacgattaccgcgtcgactatccctggtgggaaaatgagttcccggacaatttctaccaagattgctggtatgagtgcgggttccgggagttcgatggcccgccgcagccgggcgacatggtgatcatgcaggtgcaggccgataaatggaaccacgccgggattttgctggaaggtaacatgcttcttcaccacttatatggccatctcagccaacgggtgccgtatggcggttactggttagagaggactatgaaggttctgcgttatcactcactgtgctaa

SEQ ID NO: 232332 - DNA, 192 bp, Klebsiella pneumoniae
atgggttacttcgagatacataaaactcagaaagactactcacagcgttattacttcgtcctcaaagctggaaatcatgaagttattgcgacaagtgaaatgtattacaccaaaggaggggcggaaaacggcattcgctctgttcagataaacggcccctcgacagatgttcgtgatcgtaccggtgaataa

SEQ ID NO: 232333 - DNA, 1614 bp, Klebsiella pneumoniae
atgccgctgccctttacattcgacttcaaaaatcctgactacaacatggtttttgaatggagggtggagcgcctgctgcgcatcaggcaaaaccctgatgtaatccctgcgctgaggcagttttaccgtgacgacccggcacagttcatcattgactggggcatgactaccgacccacgcaacctcgattacggtcttccggctactatcccgtttttgctgttcccccgccaggaggaatggattaactggatcatggagcggcgcagccaactagaacacgggctgacggagaaaagccgtgaaatgggcctgagttggacctctatcgggctggcttgctcgttatgtcttttcaacaaagaaatggtgattggcttcggctcccgcaaagaggagtacgtggacagcaccggtgacccgaaggcacttttctggaaggctagaaagtttgttgaaatgcttccagttgagttccgcggctcctggacagagaaaaagcacgcgccgtatatgcgtgttgaattcccggaaacaggggcggtaatcaagggggaagcaggcgataacatcggacgcggtgaccgtacgacgctttatttcgtggatgaggccgcatttcttcagagaccgctgctgattgatgccgcgctttcgcagaccacgcgttgccgtatcgatctatcctctgtcaatggcatgagcaaccctttcgcgcagaaacggcatagcgggaaaatcccggtattcacattccactggcgcagcgatccgcgtaaggatgatgagtggtaccggaaagagtgcgagaaaattgataacccggtcatcgttgctcaggagctggacctcaactatcaggcatcagcagaaggtatcctgatcccttctgaatgggttcaggccgctgtagatgctcatatcaaacttggcattgagcctagtggtcagcgcctcggagcgatggatattgcggacgaggggaaagataaaaacggcttctctgcccgttacggcttcctgttgcaggaggttgaagaatggtctggcgaggggagtgatatttacgcctcagtcgctaaagcatttggcttctgtgatgacttcggcattgatgagttccggtttgatgaagatggtcttggtgcaggcgctcgtggtgatgccagggtaatcaacgaacatcgttatgctgagggcctaccgcaaattatcgccaccccttttcgaggaagcggcgctgtatttgatccggaagatgaagccgttcccggcgacaacggcaaacaggcacgtctgaataaagacttctttgccaatgccaaagcgcaaagctggtggcacctgagaaagcttttccgtaacactttccgcgccctgagcgggatggattacaaccctgatgaaatcatatcgataagcagcacgatgaagaataaagatcgcctgctgatggaattgtctcagcccacctggtcgaaaaatactgtgggaaaaatcctcgttgataaacaacctgacggcacgaagtcaccaaacctcgccgactcggtgatgatctgttacgccccaatggataccgcattcgatatctggaaaaaactcggagaataa

SEQ ID NO: 232334 - DNA, 441 bp, Klebsiella pneumoniae
atgtctacgtattcgtttcttgatgtttcggcctctctcgcagggcctaccgggttagttgagcttggctacggctcagcgaacgccgaagagggcattactgtcacaatgacagaggccaaaaacaccatgaccattggcgccgatggcgaggtgatgcacagcctgcacgccggaaagagcggcactatcacggtaacgttgctgaaaacctccccggtaaacaaaaaactctcgctgatgtacaacgcacagagcctgtcatcggcgacgtggggcaataacgtcattgtcattcgcaacaaagtatcaggtgatatcaccaccgcgcgtagctgcgcattccagaagcagccggatcacgctaacgccaaggttggcaatacggtgtcgtgggtatttgacgccggtaagattgaccaactgctgggggagttttaa

SEQ ID NO: 232335 - DNA, 303 bp, Klebsiella pneumoniae
atgacgatcagcgaaatccctctttctccggaaaaccagcgattctccatatccgtggcaggtcaaagtctgcaaatggctgtgacctggcgtgctgctttctggtgtctggatattatggatagcagcggtgcggacctgataaaggggatcccgcttatcaccggcgccgacctgctggcgcagtatcgctatctcgggcttggcttttcgctttatgtgggctgcgacaaccagtccagcgaaaacccaactgaggccgatctgggtatttacagccatctttatgcggtaacggagtaa

SEQ ID NO: 232336 - DNA, 774 bp, Klebsiella pneumoniae
atgagcaaatacaccgaacttatttccaactaccatgcaggaaaaccaaaatttgtaaaacatgttgacctgtcgacaaggccgctaattgatgtgtctggttcagtgtccggtcttatctctgcgttcgacatagatactggcgtaggggcacaacttgatattcttggtaaatggattggagtagcccggactgttgccgcgccgatatctggtgttttccttgaatgggacaaagaacgagtgggctgggaccaggggatctggcttggtccgtaccagtcttctgacgcaataacatacctgagtgatgacgtgtaccgggtcgtgttaaaggccagggtgggtattaataactggaatggtcagaacggaacgctgccagacattctggaaacagcgctcgctggtactgggattaaaatgatcatcctcgataatcaggatatgacgatctcagtgctcatcgtcattgattctgaatatttaatgtctgtaacagaccggttgatatttgattcaggtatgaatcgtggtccctttatttctcttcctgatgattacacaccatcgcgatatgacattaacccaatagataaacttcccgctgagtttgtttttgtggttcgtgctggcctccttacggtaaaagcggccggagtaagagttagagaaacggttacgccctctaatggatataaattctttggttttgatgtcgaaaacgactatatcgctggatttgagtccggtgcatggggagaaaatttctga

SEQ ID NO: 232337 - DNA, 786 bp, Klebsiella pneumoniae
atgccagttaacaactttaaaccatttgccattgcatctggctcaaatgtgacatcacagacggaatgggaaggtttgatcgccctttctacaggatttactgcagggctggccagggccgcccagattaataaagcgctgcggcaggggaccgttatggcgagcgtcttagctcagttcatggctgagacaaccggagaggatgtgcttgatgatggtgacacagcaaagcttgtatccctgattaccatgtcagttaattctgttgcgcggagtgcgcttccagttggaacccccatcccttggccctcagatagtctacccgcagagggaaacttcgcatttatgcaggggcaaacatttagtccgacggcatatccgttactggctgctgcgtacccgtcaggtgtaattccagacatgcgtaactggaccattaaagggaaaccagctaccgggcgtgcggtgctatcacaggagcaagatggtgttaaatcccactcgcacacagcatctgcctcatcaacagatcttggaactaaagtcacgagtagtaacggtgaccactcccacacgtggggatctgctatgcagaaacaggggggaagtgatcaggaggttggcaataatagtgggaataattttggtgtgacatctactgcaggcgcacatacacactctgtagtaattggggcccactcacataccatcacggtcgatgctactggtaatgcagaaaacaccgttaaaaacatcgcattcaactacatcgtgaggctcgcataa

SEQ ID NO: 232338 - DNA, 579 bp, Klebsiella pneumoniae
atgacttttgaaatgtctgataaaactcaggttgtaaccgtttatcatatcagtgacgacacgggggagttggcgggctttgaagagttgtcaatcccgcctcacactggattgccagcctgctgcacccaaataacaccgccagaaatagggcccggagaagcagcggttttcaatatagctgctgggctgtggtctcttattgaggaccatcgcggaaaaaccgtatacagcacaatatctggagaatctattgagatttcagcactcggagaactgccagaaggggtaacgacgaaggcgccagcggacaaatatcaaaaatgggatggcgataactgggttgacgatacagaagctaaacacctggctgaagtgagcaattctactgagctattgaccgaattgatgcgcgaagcaaacgcaaaaatagctcctctaagtgacgctatagagcttggtatccagactgaagaagaaattacgaaactggctgagtggaaaaaataccgcgttgcattgaaccgcattgatacatctacggcacccgatatcgtttggcctgaaattcctgcctga

SEQ ID NO: 232339 - DNA, 267 bp, Klebsiella pneumoniae
atgaaaacatcaaaatttagtgacagccaaattctggcgattttaaaacaagccgaagctggagcacctgttcctgagctgtgtcgtgagcatggcatgagttcagccaccttttacaaatggcgagctaagtttggcgggatggatgcgtcaatgatggcgcgcctgaaagagctggaagccgaaaatgcccgactgaaaaagatgtatgccgaagagcggctcaaagccgaaatcctcaaagaggctatcgaaaaaaagtggtaa

SEQ ID NO: 232340 - DNA, 852 bp, Klebsiella pneumoniae
gtggtaaagccgtcgcgccgacgggagttggcgcaaaaggcggtgcaaaaccattccattaccatcaagtttgcatgtggtctatttgggctgagcgaaacctgttaccgctatcaggccaaactcagtgatgagaatgctcaaatcgccgactggctgcttcggttaactgaggctcaccgcagctggggttttggaatgtgcttttactttttacgcaatgtgaaacgctttggttggaaccataaacgggtgcttaggatttaccgtgagctggaacttaatctgcggatcaagccgaagaggcgcttaaaacgtgatgtgcctgatgcattagtggtgccggagtcgataaatcagtgctggtctatggactttatgcatgaccagctcgaggatggccgcagcttcagactgcttaatatcattgatgattttaaccgcgaaggattggcgattgaggtcgacttctcgctgccagctgagcgtgttgtccgcactctcaatcaagtgattgaatggcgcggcaagcccagacaaattcgcagtgacaatggtcctgaatacatcagtgctttactggcggagtgggcagcaaaacatgatgttgagctgaagtttatccagcctggcaacccgcagcagaatgcctatgtggagcggtataaccgtacagttcgctacgactggctcaaccaatatttattcagcagtattgccgaggtacaagagcatgcgacagaatggctttggttttacaacaatgaacgaccaaacaaagcaattggtggcataccaccgaaatacaagcaggctttaataacgcaaccttctacttctaacgtccattaa

SEQ ID NO: 232341 - DNA, 261 bp, Klebsiella pneumoniae
atgaaccaaatgaacgaggaaaaaatgaaagcacttaagaatgttgttatttatacgaaagaccattgtccattttgcgcacgcgtgaagaattacctaactgctgaaaaggtcgatttcaaacaaattcgcgtagacgacgatccgaagacttacctggagttgaaggaaagaacaaatctccaaactgtaccgcaagtttttgtggatggagaattcattggtagtgctacagacttcttctcgtggattgatagctaa

SEQ ID NO: 232342 - DNA, 441 bp, Klebsiella pneumoniae
atgttcaattggaaaagcatttacaactacctggataacggcactcccgcgcctcccaaaaaagtagaaaagagcgaggaagagtggaaagaaattctgacgccagcgcaatttcgggtcatgcggatgaaaggcaccgaacgcgcgcacaccggagaactctgttcattttatgaagctggaaggtacgcctgtgtgggctgcgacaccgaactctttgactcgaacctaaagttcgattcgggaacgggatggccgagtttttctgagccagtcgcagacaacgtaattcaatatgaactggatacgaccttcgggcgcagaatcgaagtgctatgcaatgtgtgcgaagcccatctggggcacgcttttccagacggtcctgagccatcaggggtccgattctgtattaactcggagtcattgaagtttgtagaataa

SEQ ID NO: 232343 - DNA, 246 bp, Klebsiella pneumoniae
gtgttgattaagctgttcggtcataaagactgccataaaaccaagatttaccattcgtacttgcaagaaaaagggagccagtttgtttttttggatgttcatgaagacgacgcggctgctgatgaactgtgctccctctattcgaacggaaagctgaatttcccgacaatagtggttgggacaaagaagctgagaaaccccaagttcaaggaccttgacaggtggttggaagcttcaatgaaataa

SEQ ID NO: 232344 - DNA, 663 bp, Klebsiella pneumoniae; identical to SEQ ID NO: 54504

SEQ ID NO: 232345 - DNA, 978 bp, Klebsiella pneumoniae
atgacctttagtttagctcaaacagctagtgcagaaaccacactaaaagcacctgctgaagcagatcagaacctgcgggatatcactgaactggcgtgttatatctgtgatgcaccagtggctatggtgacgcgaaccgatgacacaaagctgaatctaattgcaaaagttggtatttcgcgtacctctgtattaattaaagagtccttttgcgtgtatgcaatggaaacacctgatgcggtaatggtggtccctgacgctactttagatcacagattcagtaccaatgctatggtgatttcaggacctggctaccgattttatgctggctcgccgctgattgatcccgaaggtgcagtgattggtactatttgtgtctatgatcatgttcctaagcagctgaaccagcggcagataagctctttgcaggctctgtccagacaagtgatcgccatactggagctgaaaaaagtcggcgaacaattacataataccagcatgacggatgcgctgacaggggtgaacaacagaagagcttttgacctcaagtttgaagctgaatttgctcgctggcaaagaacaggacaatcttttgtactggcattgattgatattgatcactttaagagttttaacgacagctatggtcatgccgcaggagatgaggcactgagtcaagtcgcggctctgtttcagcgccatagcaggaactatgactttttcgcccgttatggtggtgaagagtttgtgctgatcctgccaggcacagacacagcgtccgcaaataaaacactggaaaagttaaggctggtagtggctaaccatgagtggttattacgacaattaacggtcagcataggtttggccagcgctgatttatttgacgacaaaaagcagttgctcgaagtcgccgatcagatgttatacaaagctaaaacccaaggccgcaatcaaaccagtgtgttcgccacactgtaa

SEQ ID NO: 232346 - DNA, 1287 bp, Klebsiella pneumoniae; identical to SEQ ID NO: 54521

SEQ ID NO: 232347 - DNA, 555 bp, Klebsiella pneumoniae; identical to SEQ ID NO: 54522

SEQ ID NO: 232348 - DNA, 516 bp, Klebsiella pneumoniae; identical to SEQ ID NO: 54523

SEQ ID NO: 232349 - DNA, 639 bp, Klebsiella pneumoniae
atgcgcacaggcattcagtggcgagatttgcctgaaagattcggtcgttggaactctgtatttaagcgctttaacctttggtcaaagaaaggtgtgttacaaaaatggtttcaaagcatatcgtccgataatgatccagaatggttgtttattgatggaagtattgtcaaagcgcatcaagacagtagcggagccgcaagcagttcagatgaagcgataggaaaaagtcggggtgggagttctacaaaaattcatctcgctgtagatagcggtgggcttcccgtttattttgaaatatcgggtggtcagataaatgacattgtccatgctcagagcttagtatccgcggccccaaagtcatgtagtgttacggccgataagggctatgacagtgataacttcagagcatttattaaggcaaatggcagcattgccaatattccaagaaaagagaacagtaaaacagggaatggtcacatggattggtgcctttataagtatcggcacttagttgagaacgcttttttaaggataaagagatacagaggtatcgctacacggtacgacaaactggccagaaactacgccagcaatgtagcgttggcatttgtgattatgtggctgccgatgcatttctga

SEQ ID NO: 232350 - DNA, 1017 bp, Klebsiella pneumoniae
atgtatatccccagacccgctaaactcctcttccagattgatgatggctggagcaagctactcgctaaacacggtgaattcatacccgaatggacacaactggtcgtcgagcgcatgctcgcctgtggtacccctgccatgggattacgccgatactgctgcgtatctccccattgcacacacaccaaatacatttgctacagctgtaaagggaaaggctgcagtgcctgtggcatgaaagccaccgagcaatggattgccgaacagcaacacatcctccccgactgcgaatggcaacacatcaccttcactatgcccgacaaactctggcctctcttcgccaacaactggcccctgctcaatccgttattttcttgcgcggcccatatcctactgaaatgggccaaaaaactcggcgtagaaattggtctgttcgtggcattacacacctatggtcgacaacttaaccggcacccgcatattcatttatccgtgacccgcggcgggttatgccttaaacacggcgtctggcggccgatttacttcaaaaagaaagtcgtcgaagcttactggcgtcaggccgtcattaaactgctgcgggaaagctacaccgagttagatttgtccgacgccaactatgcacatattcgtgactatcgtgagttgtgccagttccttgaggtccaattccaacgctgctggaaaatacactttgcgaaaaagactaaacatgcgaggcaaaacatcaactacattggccgttatctcaaacgcccgccaatggcggcctccgcattgcgccattacaccggtggcgccgttgttcatcattattatgaccaccgcacacagcaacaccgaagacagatcctgagtcaggaagagatgctgctgcgctatatcagccatataccctcacgccattttaaaatggtccggtattacggctttctgtcaaaccgcaaacgcggtgaattaggcccagtgggagcgaagctgcgatttgacgacatttga

SEQ ID NO: 232351 - DNA, 258 bp, Klebsiella pneumoniae
atgaatcgcattatccgtactaccattgccgcgcttgcgcttaccctggccggctacgccgccgcagatgaaattaaccgtcaggacgctgcagatctgatgccatcaggccatatttctgtcggtaatctgtcaacgccagacgaagtgactaatgcgcttaaagtcagagcagaacaggtcggtgcctctcactttcgtatcacttcgcttgacggcaaaaataaattttacggaaccgccgttatctaccgctaa

SEQ ID NO: 232352 - DNA, 369 bp, Klebsiella pneumoniae
atgtctcggctttcatctctgctgggtataaagactcttacccgctacctgatagctggagtggcaggtggcggaacagcctgtctgtccgtgctagttttcatactattttatcaggtcaagaataccggcagcgccgcagactggatcgcctccttagcgaatgcaagtatggcggtcacggcggtactggcttttaaggtggctcgcagctggctacctcagctaacgacccaagaaggctataagttggccattgagctggtcaacgatcattatatctggctcggtatgcaaaacagtgtactgactgacgttaccctgcctatccgctatatccagcatcaggtcgacagggaaagtatgtag

SEQ ID NO: 232353 - DNA, 624 bp, Klebsiella pneumoniae
atgccaacaaaacatatcgatgatgccactgccgcacagctggacgatctctacgtccgctgcgtgaccctgacccagcaacccgtgaaggaggtggaggttctgcgtctagcgatccagaaaggcattcataatattgctgacgacgatatcctagcgacgctgtccgtaaaggatagcgtctgggaacagctggcggcgcagacctggtcggaagtcgcggcttggtggccggaggaagccatctcggctgacagatttgaacttctggctgaagaacactccgcaacctggcagcagtatccgactgaaagctgccggacggccctgcgtgagcggctgagccgtaagctgaagcttccgattttcggtaccagcgacgtattgtttgagggggatgacttcgggatggctgaagaagaacggcaggctgctatcttacgggaaagacagcaggatgcagcttatcgtgcagaactcccagccctacatggccgacagtattcctcgctgagccagcatgaacagacactggcgcggcactacgatgatcgggtcagttttacgccggacgggaagggggattttgtggttcaggtatcgttaacggaggctgggcagtga

SEQ ID NO: 232354 - DNA, 666 bp, Klebsiella pneumoniae
atgcttcaaagagaccctcatggattcagaaaagatgtgaaagcctttatcggattgattaaatcatttcaagtcgatattcgtacggaaaacaatcttacatcggcttataaacatgctctctttttggaattcattcacaattctcatccggaattaagtcataaaacattcattaaaagtataatttacgatgttctaagttcaattacagctatacttagcaaacgtgaaagatatcttcaccttaactttcgttcaatgattgaacatctagctcgtatatctcttcaaaaagttgataacggtggagattttgacattactattaggactgttgatttcgataatttaaaagctactaatactgatgaaaattggacgtatatgcactctcaatataaacaagcatgcggctggttgcactcatcatctaaagttaaattaaatatcacggcatcattccctgaattattaaactctgactctaatagtaatgctgctaaactatccactcatttacaaaaaatgactactgaggtcttaaagattttatttaattattatgtagatgagattaaaacttctttttaccgtgcgcgtgaagaaatgagatacgtggttgggagccacaactatgaatattttttaaaaaatcacaaatga

SEQ ID NO: 232355 - DNA, 420 bp, Klebsiella pneumoniae
atgcataaaaacaataactgccttgaaatattacaggcattagttaataaaaagttctcctccagagaggggtttattggattgattacgatcgtaatctattcaagagaaatttttgttaaaaatgaagatgctgcaaaatttgtaaaaacggtatttggacttagttttttagattatgtaattaaatcgagaactttactctgtgccaggcttactcgcaatttggtgagcatgagtgataaagatattaaagaaagtgtatataaagcatctgaatatttcaaaactgataaatttatcattatgtataatgaaagcttgcatttgctgaatgaaaaaagctttaaaaatagacgtaccgcaaatcgtgatgtcagcacgtggatcagtgctcttttgaagaaggataaaaaataa

SEQ ID NO: 232356 - DNA, 852 bp, Klebsiella pneumoniae
atgactacaccagtaataagtttcataaatatgaaaggtggggtaggcaaaacgactttatgcgtcggtattgctgaataccttgccaattacatggagaaaaaaatcttaattattgacattgacccacaatttaatgccacacaatcaatacttagtaaatataatagggttcctgaatatataaataaccacttacaaaacacaaaaaccattaggcgaattttcgaaacaaaatcaagtttaacaggcaaggttcagcaggttacacctgatgaaattattattaatatgtcacagcatttagacatgatttttggtgacatcaatactatttttgatattgaacaacccgcagcaaggttgcataagttaaaaagatttatagaagaatataatctccgtgatacatatgatttcattttcattgatagcccacctactatttcactatttaccgatgcggcactagtcgcttcagattactatattgttccagttaaaatcgatcactactcgattttaggtgcaacgagtttattaagcgtcatagataatattcaagaaaattatgatcataaaaccattaaaaaccttggctttatttatacaaataccctagaaaatctttcacgaaaaacaaaaaatttacaaaccgaatttgaaagcaccgaaccatttaatgaactatacttctttaatagccagttgaaatttgtacaagatttgatggttggtggcagaggtaatatttcatctgcttacaaactatccagaaattatatcaaagccatttgtgaagaatttttaatcaggatcgaggaagtgcgtgtgggaggaggagatgcataa

SEQ ID NO: 232357 - DNA, 1182 bp, Klebsiella pneumoniae
atgggctcgacaaaatcgcctaaactcccgcgcggcgtaaccatcaggaaacatagcaacggagaaactatcaatattacttttacatataagggagttaagtgccgtgaacccctttctaatctggaagtttcttcgaaaaacattaaatatgctgagcgaacactcggagaaatccataacaaaatcgaaagaggaacgtttgtttatgcagaatacttcccccgttctacccgtttaaaaatctttgggaatgctgcttccggcaaaacggtgaaaatgtatctagatgaatatcttgtgatttgcgaaacgaggaagttatccccttcaacgatcggcggctataaaaaatgccgtagcgcattgtcatcgcttcacgtttttcccgctagtgagttaacgccggccgcattgaaggcatggatccaagatcagaaaacgaccttgaagaccatccgaaaccagctttctttcctgcgctctgcattggatgaagcggtaacagatggtattctccagattaatcctgtttcactagtaaccgcctcacgttaccagagtgataaatcagaggcagaaagtaactatgtggttgatccgctctcacctgcggaagtagatgccttactctcggccgctggtaataagcaatgggagaatctgtttcggttcgctatccaaaccgggctgcgtagctctgaactgtgcgctcttcgttggcgtgatatcgactttatagggaagacagcacacattcaaaacgcaagtgtagttggcgtaattaaagggaccaaaaccaaagcaggcacacggaaagttgagctcactgaggaagcattggttgctctaaacagtcagaaactgttcacttttatgaaagatgaaacaatctttgaagatccaaaaagcaataaagcttgggcaagtgctgatgcgataagaaaaaaagcatgggtgcccacactacgtaaagccgggattagataccgtaatccataccagactaggcacacctttgccaccaagcatattagccaaggtgcaaatctcttctggcttgctggtcaaatgggacataaggggccagaaatgctgtttcgtcattatggccgctatttgagtgattatgacaaccaaacttcaacaacgtttatcagtaactgcactagcacaccttga

SEQ ID NO: 232358 - DNA, 198 bp, Klebsiella pneumoniae
atggcacacgtgaaagtgaaagaattggttgccgcagcgcacgctgcagcgccagaactaccgccagcagcagcccaattgatgcaagacatagcgtcaaggctggatgtgacctttgtcgcccttacagaggcaatggaccagaacacagcgctgtcggctatgttaggtgcagcgcagaaacaggagaaaaattaa

SEQ ID NO: 232359 - DNA, 201 bp, Klebsiella pneumoniae
atgaaagagttctgggattcattaaccaaagagcaacagagcaaattagcaacaaacgttggctccacaactggttacctacgtttggttttcaatggctacaagaaagctggttttgacttagcaaaaaagttggagaaatgcaccgcgggtgcaatcaccagatctcagcttaggccagatatttattccaaaacataa

SEQ ID NO: 232360 - DNA, 585 bp, Klebsiella pneumoniae
atgaaccacagatcaaaggggggaaccgtgggtaatgagccaatctggaaagtagaacgtcaaccagcctggctggtggcagcgttcaagaaaacgattactgaactgccaggaggttatgccgaagcagccgaatggctgggtgtaactgaaaatgccttattcaaccgcctgcgcgtcgatggtgatcagatcttcccgcttggatgggcgatggtgctgcagcgtgctggtggtacaagttatatcgctgacgcggtagcgcgccagtccggtggggtttttgttccgctggcggatattgaagaagtggataacgcggatatcaatcagcgcctgcttgaggttatcgaacagataacagcctattcgcaacagattcgcgcagcgatcgaagatggtgtgattgagccgcatgaacgggcggcgattgatggggagctctatagctctattcaaaaacttcaggagcattcggctcttgtttatcgcattttctgccagccagaaacggatgacgcccgcgagtgtgcagctccgggcgtcgtggcgaataaatcaatgtgtatggagaaatccgcatga

SEQ ID NO: 232361 - DNA, 705 bp, Klebsiella pneumoniae
atgactcagcaatcaattaatcgtgccccagctgttggattttcccctgtgttcggcggtgcagtgacaatgagcagtagagaaatcgccgctctggtgcagagtaaacatggtgacgtaaaacgctccgctgagcgcctgaatactgctggtcttttaaccgcgccgttggcgcagttcgattttgagcataacggaaacgtgtatcaggagtaccgcttcaataaacgcgactcattggttttggttgctcgcctgtctccagagtttaccgcggcggttgtggatcgctggcaggagcttgagaacaaatcggctattcctcaaacgttacctgaagccttgcgactcgctgctgatatggctgaacaaaatgcgcaactggcacataaggtacagcaggatgcgccaaaggtggcgttcgtaaaacactacgtagagtccggaggcgccaaaagcctgcgtgaaaccgcaaaaatcctgaacatgccggaaaaggccatgatcgacacgctactgcgtgacaaggtgctgttccgccagtccggcaatcttctccctcatgccctgcgccagcgcgaaggtctgtttaccgtcaaaacgggtacttcagattttggtcatgcctacacccaaacgcgagtaaccccccgcggcgtccagtggattgcacagcgctatgcctctgaactgatgggaggatga

SEQ ID NO: 232362 - DNA, 882 bp, Klebsiella pneumoniae
gtgagcgttaaattatccgcatatgtctgggatggttgcgccgcggcaggcatcaaaggcaataaattactgatcatgcttcgcctggctgattacgccagtgatgaggggatcgcatacccaagcgttgcgacgattgcgcgccagctcggcgccgggcgcagtaccgttatcacgttgatcggcgagctggttaaagatggctggctgaccaaaaaagaacgccgtctcggtcagcgcagcaccagcaatctctacaccctgaatgtggctaagctgcggcaggctgcaaatgaacattatgagggttcaaaatctggacgttcagaatctgaaccttcggaatctggacgtccagaaactgaacgtccgaaagagccaaaaaaacagggttctcagggtccagaaactggacacgatccgtcagtaaattcaaaaccagatccatcagtaggatctaaacccccttgtccggttcctgcggaacccgacccggaagtggttattaccgatcttgctaagcaggccctttcacacttgaacctcacaaccggttcacgttttcaggtatgcaaaacctccctggaacatatccggggcaggctgcgtgaaggatttacacctgacgaactgacgctggtggtcgattacagcactgagaagtggggaaaagatctaaaaatggctgaatatctgcgaccaaccacgctctttctgccgtcaaaattccccggatatctccagtctgcaaccaagtgggctgctgccggccgcccgaaatgcgttgatggaaaatggaccaaggtcggaggtgaagaccaggcattcaagtccagctattcggatgtcaaatacaccattccaaaaggattccgctcatga

SEQ ID NO: 232363 - DNA, 258 bp, Klebsiella pneumoniae
atgaaatcgcaggttatatcaccaacccccgaacaactgcgccgccaggcggatgatatgctcaaacgtgccgagcagctggaaaagacgggcgccaccaaagatgcactcaaaaaagcgctggtaccggcactgcgagaactaatgcaggctaagcatcgcgcacagctggcagttgatgagctggtggatagcgttgcagatctggaaggtcgtgtgtcgcaagtcgaaaaagtagtgcaggaggtgctggcgtga

SEQ ID NO: 232364 - DNA, 1386 bp, Klebsiella pneumoniae
ttgggtgaagatattgtggaatcattcttcaatggtgaagacacccaggtcaagaccgtcgaggtgctgctacggccagaggtatggatccgcctgttaaagcatggcaaggcgcggactgctggagctcctgatattgttacacctttggttacagctgcactcctcaaccgcgaaggctttttattccctacatcgccagccaccattccccgtgacctgctcgaaccactccccaaaggtaccttttctattggtgagatggcggaatatgacaagtacagaaccacgcatgattcaatcacttttggtcccggtaatgaggatgagctgcgtgaggagactgatgaacaacgagagggacgatatgctcgttatcagcagtggtggcaaaagtaccttaaagattcagaggaacttttaaagcatgttgctggcaaatggctcgcattacctgagcaatatgaaccagctggctatggctacattattaaagccaaccagcctggaggggccagcatccatatcctgcctatgtacgatcatttgctgacgtgcaaaaaagaggtgccattgctggcgcgctttgcttcgaaagagaagtctcctgttgagccactcctcgccagtaatgccatgtttagtgagcgtctggggcactccggtgataagtttccgctggctgtcgcgcagcgcgatgccctgagccattacctcactcaacagcccggcgatattcttgccgtgaatggtcctccgggtaccgggaaaactactctggttctctccatcatcgctactgagtgggcgagagcagctttaaacaaaactgaaccacctgtggtggttgcgacatcaaccaataatcaggccgtaaccaacattatcgaggccttcggcaaagatttttctatcggtaccgggcctatggccgggcgttggttaccagatgtaaaaagctttggcgcttacttcccgtcttcgggacgaagagccgaggcggtaaaaaaataccagacggaagacttttttaaccgtgttgaatctcttgaatatgttgaagatgcccggtgcttcttccttgaaaaggcaagggcagcttttccgaatgagaaatgtcattcatcagaacaggttgtggatctcctgcatcagcgtttggttgaactctctgcagagcttgagcaaatcgagcctgcgtgggatgacctgaacgcaatccgtcaggagcggcatgtcatcagtgacgatctggaacagtatattcaggataagagaacgttactgctcaatagcaccaatgaaatctcgctattaacgcagggcaaaaaacagtgggaacaatatcgagccggagagtcgatcatgttcactctcttctcctag

SEQ ID NO: 232365 - DNA, 1272 bp, Klebsiella pneumoniae; identical to SEQ ID NO: 161896

SEQ ID NO: 232366 - DNA, 573 bp, Klebsiella pneumoniae
atgagtcgtacattcctgtactgtcgtgtgagtacaactgaacaaacagttgataaccaactcctggctttagcccatcgtggctataccgttcccccgactcgtgctatcactgaaactatcagtggcggtgtctgtgcgatggaacgtcctcagtttaaaaacatggtgcacaataaactggaatcaggtgattcactggtagttctgaaactcgaccgactgggcagggatatgatcgatatcctcagtactgtcgatatgcttcgaggtaaaggaattgttgttaaatctcttgatctggacggcgtggacctgaccagttccgcaggacgattccagatgtcagtactggcagcagtggctaactttgagaaggaccgtatccgtgagaggactcaggaaggtttagcgaaagcaaaagctcagggtaaaaaactgggtcgtcctaatgctgccagtactgaccgtattcaggcatgtaaagaaaatgggttatcccagagcatgacagcaagagaactggggatttctatcgctacagtaaaacggtactggaactatgtccaataa

SEQ ID NO: 232367 - DNA, 1371 bp, Klebsiella pneumoniae
gtgagtactatggaacagatgccagtactggagaaataccagccgtaccctgagtataaggattccggcgtagagtggttggggaatactccatcacactggactgtcactgcgattaagcggtttgctagctataccactggctggactcctccaactggtaatgacgcatatttcggaggagaccatctatgggctaacatttctgatgttggccccagagttttatctgtaacagcaaagacgattactgatgcaggtgtaagagcaacacgtatcaaaaaatcgcctaaaggttcattactattcagcttcaagctatctattggtttagtttcaattgttggtgaagagatgtataccaatgaggcaattgcgacatttttaccttctaaaactgtaaatattgcctatatgtattgggcggcaccattgtttattccacaaaatgctgaagaaaatatttatggagccaaattactcaatcaagaaagaattagtaatgccgactttgtgttaccaacagcacaagaacaacacaccatcgccgccttcctcgactatgaaaccgcccgtatcgacaagctgattgccaaacagcagcgactgatagaactgctcaaagaaaagcggcaggcggtgatttcccacgctgtcaccaaaggtctgaaccctgatgctccgatgaaagattccggtgtagagtggctgggtgaggtgccggagcattgggtagtgctttctcttcgatatgtaataaggactttagaacaaggtaagagtccagaatgcgaggctcgtttagcagaaaatgatgagtgggcagtactcaaaacaggttgtgttaatggcggaatttacagtgaaaaagaacataaggcacttccatcacacatttcacctcatgtaagttttgaggtgaagcgtggtgacttgcttatgtctcgagccagtggttcaaggaacttaattggtgcagtcgcatatgtccatgaaacacgtcaaaaactacttttgtccgataaaatatttcgattaattcttgagcctaatattgatcctcaatacctttcattgctgatgagttccaggccactaagagtacaggttgaacaggcaattaatggtgctgaaggtctggcgaataacattacgaaagagtcaattaaaagctttgcaatcgtgttacctgatgttcaggagcaattaaaagttagatcatacctcaatcagaagttgagaaagttcgaaaatttagaggataagttaaagggaggcttagttcttctgaatgaacgtcgttcttccctaatatcatctgcggtgacaggaaagattgacctgcgaggctgggagaaaccggatgcttaa

SEQ ID NO: 232368 - DNA, 720 bp, Klebsiella pneumoniae
atgcttaaccctataaaaagcctgtcagaatatatggactgggctaatcatcctattcgcaaaacgcagcatgtttttttccgaggacagcgttacccttggcctctactccctggcatctgtcggactgatctatcgttaccccttgttgaacgagaaaataaattacttgagtgcttcaagcgtgaaggggggcggagcctacatgttgagcctggtaatgactgggattggctagttgtagcccaacatcacggattacctactcgactgcttgattggactagtagccctaaaattgctctctggtttgcattggagaaagcaagatgtattcaagactctcatcctgttgtctggcaattatgccctgatgcaattgactttgtaactgaaaacgagaaagcaagacctttcgatggcaccagaacaaaactatttgaaaccacttttaatattccacgagtacgggctcagtgtggttatttttcattatttaaacatgataaaaaatggaaggatgggtttgttccattagaggataatagatacctcaagcaatcgatggcaatgattaggattgagcctgagtatgcgggcaaaatacttcatgatttggttagagaaggaattaatcaccatacaatctatccccccactattgatgcaatagctcggttagtcaggaataaggtgctattgggagatcataatggataa

SEQ ID NO: 232369 - DNA, 1233 bp, Klebsiella pneumoniae
atgccatatagaaatttgacatctgaacaactagatgctgtaaaatttgatggcaatctattacttacagcttgtccaggttcaggaaaaacaaaaacattggtttccaaactttgttttatccttgaaaataaggagttgtttgatataggtaagaaaaaaattgtggcattgacatacactaatgttgcagcagatactattctcgaaagaattatttcatatggtataaatagcgattcattgtggattggaacaatacatagtttttgtttaaatcggattataaagcctaacattgatagaattccaaggctcagcaaaggttttaatgtaattgatgagtatgaaaaagaatttatattaaatgatctgagagaacgttataacttatctccttacgataaaatagatacgcttttagacttaagttttactccggtatattctcgaaatactgctgaatattcagtggtaaaagcctatcactcctatttgtatgagaatcgattaatcgattttgatttgattttgaatttaacgtgcaatttattattgaagaatgatgtgctatgtgaaagactatctttaattatgcgatatattttagtcgatgaatatcaagatacctctcatattcaatatgaaatactaaggctgatagtaagtaaaagaaattccttggttacttttattggtgataaagaacaagcaatatatactggattgggagcggttgttaaaaatagagaagagttgttcgattacttcaaccttgaagaattagaagaaatgaggttaaccggttgtttccgtagtagtcaatcgatcatagatttttatagcaaatataaagatgatgcctattatattaattcattgtcagaactgaagacatttccttctgtgatactcaaggaaaatagtgttgatatcacccagttgtctgtttatgtttcaggaataataagaactcacttagaacaaggtatttctcctggtgaaattgctgttctatgcccaagttggtttgatgtaataaaattatccaatgaaattatatcactaaattctgatctggatatcgatggtatcatggtttctcccatacctaaaaataatgaaaacttgtggctcaatcttgtaaagcttgctttaattgaaaagaatccatctaattatcttgttaggcaaaaacttttgcgagatttactcaaagaatggctttgttga

SEQ ID NO: 232370 - DNA, 954 bp, Klebsiella pneumoniae
atgatcttgatacttactgacagtaacgatgttcatgcagacatagtttcgatgaaactcggtgataactatttccgtttgaatttagatatagaagcccttaaagatacaaaaattagctttgatggctctgaatggactatctcccagaacggaaaaacaatcaaaaattcatccgtaaaatgtgtttggccaaggcgggtatctgttcaagtcaattctgaacaacagcaagatcaaagtaatggtttcagattatggcgatctgaatggaataaaagcctttttggtctatataatgcattatctgaaagttgctggtttaatcatgtaagagatgcaactctcgctgataacaagtattttcaacacaaaatagctaatgaagttgggctaaataatccactatttataacttcaaactccaaagaagacctcaaaaatttcttaactacttaccctgattcggttcttaaattcatgtctcaagatatgtatatctctgaatcaggtgagttattaggtctatatgtaaacaaaataactttagaacaattagaaagttttgcaaactattcagaaaatccaattactcttcaaaaatatgttaataaaaaatttgaagttagatacacagtaattgaagatgaacattttgcttgtgctatagactctcagcattcaaacaaggcaaaaatagattggcgtagatacgatatacctaatacaccgcactggaaaattgatgcccccacttcggtgaaggaaaaaataaattccttaatgtctaagttaaaccttcgatatggggctttagatttcatcgttgatgaaaataatgactggtggttcttagaggtgaattctgctggtcaatggttgtggatcgaagatttatccggcatggatatttccgggtccattgcaaattggttaacttcaaatagcaggtga

SEQ ID NO: 232371 - DNA, 213 bp, Klebsiella pneumoniae
atgaataaaaaaataatgacgtatattgtgataatttatatcgcctcaattttagcatccttaatttatttaaacttatcggacactttctcgatgaggtatttcgaattgtccggtttaaaagaaaaagtcatcactacctatgtagcggtttcattgtttttttcaccattattatttatgatatcggatgctattaacagtgaaaaatag

SEQ ID NO: 232372 - DNA, 951 bp, Klebsiella pneumoniae
atgtctgaattagttgttttcaaagcaaatgaactagcgattagtcgctatgacttaacggagcatgaaaccaagctaattttatgctgtgtggcactactcaaccccacgattgaaaaccctacaaggaaagaacggacggtatcgttcacttataaccaatacgctcagatgatgaacatcagtagggaaaatgcttatggtgtattagctaaagcaaccagagagctgatgacgagaactgtggaaatcaggaatcctttggttaaaggctttgagattttccagtggacaaactatgccaagttctcaagcgaaaaattagaattagtttttagtgaagagatattgccttatcttttccagttaaaaaaattcataaaatataatctggaacatgttaagtcttttgaaaacaaatactctatgaggatttatgagtggttattaaaagaactaacacaaaagaaaactcacaaggcaaatatagagattagccttgatgaatttaagttcatgttaatgcttgaaaataactaccatgagtttaaaaggcttaaccaatgggttttgaaaccaataagtaaagatttaaacacttacagcaatatgaaattggtggttgataagcgaggccgcccgactgatacgttgattttccaagttgaactagatagacaaatggatctcgtaaccgaacttgagaacaaccagataaaaatgaatggtgacaaaataccaacaaccattacatcagattcccacctacataacggactaagaaaaacactacacgattctttaactgcaaaaattcagctcaccagttttgaggcaaaatttttgagtgacatgcaaagtaagtatgatctcaatggttcgttctcatggctcacgcaaaaacaacgaaccacactagagaacatactggctaaatacggaaggatctga

SEQ ID NO: 232373 - DNA, 516 bp, Klebsiella pneumoniae
atggtgtttgtgttttgttatagcaaggtaatatctatgaggaatggtttaatagttttatcaatattgttatcgggatgcagcatgaatgttcctggattaacaagccacacagacaaacaattatccataaaaaatataacgataggggatggcatatcgtgcaacagcgatccaaaggaaatttttggtaatgttcgactatgtcatatagacatcaaatcttatggcggggaaaaggtggtttccaacaccattgcattattaaatggtaaagtagcagtaataaagctagctttatctcaagatagtggattcaatcaaaaaggcgttcttaatgctatgtcagaaaaatatggtcctccagcaaggggaggagcacctaggacacacatctggactaataataaaaacactatgtacttagatgaaatagaaggaactgttgttttatatggtgataatttaatggaggttaaaaaaatgatcagctctgtagatgctaaagatctatag

SEQ ID NO: 232374 - DNA, 738 bp, Klebsiella pneumoniae
atgatgaaaaacgaaaagaaaagtgaaagcgaaatagagtgggagaaggaatataacctcagaaaagctaaaaggaagtggcttttaaataaaaaaaagagtgaattgctggctttaattcaagactcaaatgctttaagtaaaattaaggttatgttttgcgtggttggttttgttgttttaatcttatttgttgtggtggtttttgattttttatttaatatattcttgaattacaatgagtctcgcaagtatcgagtggaaactacttctgcattaattaagcttgagtcgggtcttaaggaaagcatagggagaagattcactataaaagattcaggggatgaaagtttcgaagtggtgctatcgagttgccatattaatggtgatgttattgaatgtactttctctccaggttttacaaggtccggtgtacattacatggggcttgatttagcatatgggtatattgttagtgagttatcaagattaaaacttctttctgctctgcttgaatctaaatccgaattaaacacatttgtttgcgatttattaaaccctgaagatatgaaggcgctattgtatggggggaagcagatatcatatcgggtgcctgatctcgacgaatctagtagacagggttctattgtttacacggggtattatcctgtgcaaatacgtaattcatgttctttagatgtaagaactggatttttgagtggtgtcaagagtttgtga

SEQ ID NO: 232375 - DNA, 207 bp, Klebsiella pneumoniae
atgaaaccattaatcgtgctgacgctggcgctgcttccagccctagcgaatgccacacagataaccttaaccaatccacaggaggagcagacggagaacgggaaaacgctgtgcatctatcagaacagtaactacacatttacgttcatcactaaaggcgcttgtccctatgcaaaaacatttgatacagaggattcagaagaataa

SEQ ID NO: 232376 - DNA, 126 bp, Klebsiella pneumoniae
atgcagaacaatcacattatggcgttagcgctcgcgctgtgcaacgccggaagacgggttaaagtgccagctatgacaggtagccagctgaaagccctgcttgattacatacgggctttgaaataa

SEQ ID NO: 232377 - DNA, 150 bp, Klebsiella pneumoniae; identical to SEQ ID NO: 145251

SEQ ID NO: 232378 - DNA, 213 bp, Klebsiella pneumoniae; identical to SEQ ID NO: 134363

SEQ ID NO: 232379 - DNA, 1329 bp, Klebsiella pneumoniae
ttgaggattctttttattttatttttaatattcatgtcacccaccgtaacttttgcaaataagtttgacgttggttttttatcacctagtggtttaaataaggagtttgttgataaagttaacttcgccatgatcaatgtttacaacgaaaatcaattggaggaaaatttaaaaatagccaaaagcaacaatttaatgctgttccttgatcttgggccttctttaaatacatcccgagacaataatgacattcgcgttatttataaagattcagaaaacatcgagcatactaaaatgctcacccctttagataaaaacaaactaagaaaactaccctctcaagaagaattgaaaattagaataaacaaatacgtcccgctcatcaaagaatacaaaagcaacatctccgctatatttttagcagacgagccatatctcaacggactcaataaatcagatttagagtcggtggcaaactcaaccagaaaaatacttaatgacaacaatttaaacaacataaaacttggcgttatttttgcgagcgcaatgtttaataaatcattcgccaagaacttagactcactatctgccgagtatgtaaaaacaatagacaatcactataatgaaattgtaaaaaagaagcaaaacaacctagcaaccgatgaggaaattgaatggttgcaaataatcgagagaaacagactaaccacatacgactctgccgggaatatctatactgatggtggtatacctaaaggctttgatatctatagctttgatttttacctatcaacaatattgcttgataacttatatcataacgttcctgcttggttagcatcccaaaaaattgaagacagttgcgatgtttttaatggaaagacaatgtgggatataaaatccgaactcagttttttcagaacgggttcaatgaatacaacgcaggatgatatacataaagacaaagaagtccttgattctttgtattcatgccgtatgggtgttgtattacagttattagaaaatgaaataaaaaacacctcacccaatggcgagatagttttgatttcagagtcaagcagcaatggtgttatggaatttgaccctcaaggcaacatcaaaaatggacaaccagaaaaactaattgaacttcgtgttttaaacgaagttaagcgagcaattaacctcatgaaagaaacaaagcatgacaacatcactggggttatgttctttttatttaacgacgaatatgataaaacaataaaaattaacattggtggagccgcatcaatgcctagcgttttgaatgaaatttactcacttaagtaa

SEQ ID NO: 232380 - DNA, 1257 bp, Klebsiella pneumoniae
atgacccaaagatataacaccggaaacccacgcccttcaaacagcatgaaggaccttaacgataacgcccttgcatatgatgatttcctgaacagcgaagccgacacgtttgttgatcgcatgggaaatgctcaggattccctgcgcggggaaaagaaaaaaatggcagcagctggcgcagctgttgtagaagaaactcgtcagaacctgatccctctcagccggcagtatatgaccctcgcggaagctcaggccgatatcgcgaatataccgtcaggttcagccacctatgtacgtagcactgacggtagctctcttgcagacgagtacatcaacaacgccggtacgctggaggctaccgggcggagcatgccatctcaaaccacagtggggaatattgacggcgtatctctgaaaaatactgcacaagtagattctatatcaccaggtagaactgcgggtgctatccatgtagttcctggcatatttcaactatctacaggaataccccaacaaagttcaaataaagtggttcgtactccaggttttatttttctaaatgctggagacagaattgctgttcctgctgatttcaacgtgtcaggatgtttatattctgccgctatggagagcgcattctcaggtgaatatttcacgtattcaattgattatactgctacgcaggaatcattcgttcgtcttaacataatgtacatcggaacagattcaggttacaaccctaagaattcagccaccttcgataaagttataatcttgcggaataagaaaacggccctcaacaacctagcggatagcgttataccgtctgccaaagtaaatctaggagactaccagaccaattacccgatccagcctggttccctcaattccaccactggggctgaagtagcgcctaattctactttcgttcatcgcaccgaatttattaaagtagatgtcggggataccttctctattacggacgcagaatatctgtactgcccgttcttctacgacacggctggaacgtttatctcatccccaggtgcatgggtaagtagtaacgttgtgaccgctgccgcggggtacgttcgtttcacaacaaaacgagtagacggcggagatgatattaattctaaaacccaggcttcatggatacgtggccccaatgccatctcaaagtgggtgcctaattttgataatgttcctgacggagccatcccggtggctttgttgaataaatcgaacttttgctga

SEQ ID NO: 232381 - DNA, 861 bp, Klebsiella pneumoniae
atgacgccacttatcgaggggttttacgatccggctaccggaaccgtcagctatgtgttggccgataggatcgggggagttgcggcgattattgatccggttctggactatgacccgaaatccggccggactcagacaacctccgccgatcggttgatagattacgtacaaaagcagcaactgaccgtcaattggctactggaaactcacgcccatgccgatcatctttcggctgtccattatttgcgcgagagggttggtggcaacaccgccatcagcgaaaaaattgtcgaggttcagcggatattcaagcgcgtttttaaccttgagcatacctttgcactggatggttcacagtttgactatctgctgactgacggtgaaacacttgaactaggggccttgaccgtgcaggcgttgcaggttcctggtcatacgccagccgatatggctttccaggttgctgatgcgattttccttggcgataccctgtttatgcctgatgtgggcaccgcgcgttgtgatttcccgggtggggatgcacagcagctttatcattccatccgcaagattctcagttttccggcacagacccgtttatatgtgtgccatgactatccccctgtagaccggggtccccaatggcagagcagtgtagccgaacagcgggcggccaatattcatgtccatgatgggaacgatctggctacatttgtggcgcttcggcaggcgcgagataaaaccctggcagctcccgttcttctgttaccgtctattcagatcaatatccgggccggtgaattcccgccagcggaagataatggcgtctgttatttgaaaatccctttaaatcttctgtaa

SEQ ID NO: 232382 - DNA, 342 bp, Klebsiella pneumoniae
atgagtaacgcgcttattgaccaaaaaaaaatgcgtgatgccgccagtgcagccgccgccgtattgcgtgctctggcgaatgatgatcgcctgctgctactgtgtcacctcagtcagggggaagcttctgtggggcaaatggaaagtgctctggggattgggcaaccgacattgtcacagcagctgggcgtcatgcgacgtcaacaactcgtggcaacgcgccgtgaggggaaacagattttttaccgcattgatgatccgaatgtgttgatattactcaataccctctatcaactttactgtccaaaagatgacgaagaaggtgttaaccatgaccattaa

SEQ ID NO: 232383 - DNA, 432 bp, Klebsiella pneumoniae
atgaatctgtttttttcgctgttggcaggtgtgatatttggcgttggattactggtcagcggcatggcaaaccctaccaaggtgattggctttctggatattacccgcgtttgggatccttcactggcttttgtcatgggaggggcgatcagcgtgggttacttcgccttccgttcagtgaaacgacgcacgcactcggtgtgcggtggcacaataaatctgccgaccagcaaacaggtcgataagcgtttgatcggcggcgctatcctgtttggcattggctgggggctggctggcatttgccctggcccaggactggtattactcggtgccggtgtgaccaaaggcatcgtctttgtgggcgcaatggtcgctggcatgctgctttttgaacagcttgaacgtagacgagcgaagcgtcaggtacagtaa

SEQ ID NO: 232384 - DNA, 798 bp, Klebsiella pneumoniae
atggtcatttcgttactgttaggtctatgcgtgggggcggtgctcggcatcacaggggctggcggcggaatttttgccattcccactctggtgatgggcatgggatgggcaccacagcaggccgccccggtggctctggtcgccgttgcaggaagtgcggctctgggtgccatcgatgcctggcgcaaggggctggtgcgctaccgcgccgcgatcgtgataacactggcgggcgtgcccatgacgagcgtggggttatgggtagcccaccgttcctccccgacattgctgatcctgctgtttgcgggggtgatgctaaccgtcgcgtggcgactggtgcgtgcgcccgagatggcggccacacacgcttataccgtcacactggatgaacacaccggacgatttgtctggactgtaaaaacatggctgctgtttctccctttcgggatggtgaacggttttatgaccgggctgttagccgtgggcggcggatttattatcgtcccgttactgcggcaatttacgcccttgcccattcacagttgcatcgcgacttccctgatgattgtcgcattggtaggtatgggcgggattgctacagcggtgatgcagggagccactctacccatgccttttaccttctggtttgtactgagtgctgtgacagggatgtttattggccggaggctaagccatcatttacctgaacatatcgtgcagaaagggtttgccggactactgatcgtggttgctctggggatggtatttaatgccgttatgatgaaatcaatcagctaa

SEQ ID NO: 232385 - DNA, 285 bp, Klebsiella pneumoniae; identical to SEQ ID NO: 182641

SEQ ID NO: 232386 - DNA, 531 bp, Klebsiella pneumoniae
ttgcgattaatccctggttttcaaccttttgacttgtgtgctgagtacagcatggcgaactttagctgtggagtcacacatttagatgagtttttgaaaaccgatctccacaaaatgcaggggcgtagcctattaaagggctacgttctgctttctgatgatgaaattccagaaattatggggtactacacgctgagcggtgcatcgttcgaacgagggcatttgagtaaccgcctgaggaagaaaattccttactcgaacatgccggcagtgctgttaggtcgtcttgctatcgatcaacgaattcagcgaaaaggttttggtgagttactaattgtcgatgctatccataaagtgagggctactgctggacagattggtatctatgccatgtttgttgaggcgcatcctggagcttcatctttttacacaagaatgggattcattccatcatcaatggctgatgataataaaacatttttctacccagctaatcagtttgatgatcttatctttggcgataaatgctag

SEQ ID NO: 232387 - DNA, 423 bp, Klebsiella pneumoniae
atggccagagtgtctattagtgaagcggcacggcttgttaaggttagtcgccccacaatttacaagatgattaacagtgggaaactaagttacacctctgttgtgaagcatgggaaaaatactaaagttattgatacatcagagcttattaggatttttggctcgctgtatggtggggaagacactgtaaaacatgatgtaaacggtgacgcaggcgctacagcggttaacatccttggtttacatgatttacagcataaaattgctttgcttgaagctgaaaacgatggtcttaaaggggctgttaaagctcgtgatgaacatatcgattctcttcgccaggctatgcagcttctggaacacaagcacgaaccctctccacaagttcattctccgtggtggaaattctggaaaaaatcctga

SEQ ID NO: 232388 - DNA, 1968 bp, Klebsiella pneumoniae
atggaatttaagattcgttcaataaatgattttaatggtttctttatgcctgaagcattaattttcaacgggcactcctgtttgttaactggaaaaaacggatgtggtaaaacaaggttattaaaaagtatttctaattatacatccgaaactactataaacggaaataaggtttccggtaatgatgtatcaatgataaacatactgagctccaatcttggggtgtttacaatggaaggaaatggtaagcttgttgaaacacttgcagagcaacttttggtattaattcatacaaaacaagattcacttgaagaacaaaatacaagtgttaatttaaaccctcgctccagttacaacagctcacacattgcaaatataaaagatatattaaatggagcaaccactttattcgccaaaaaagccgaagaactctccagtgaagaactacaattatctattcatgttaatagagatctctacaataatattcatgatgaggtagggggtaatccttttattaacttaagccaatttaacattggtcaccatcaaacgataaggctaaatgaaatattagcctttaataacacaaaaaacgatgaaataaaaccacttaacgatgatttcctattcaaaaacatgcatccacaaagccctcatgaaatttttaatgatataataaataaactcttcagaaataaattctttctttcaccaccaccagaaaaattaaaacaccttgtttacaaacccaccctcactcttcaatcaaataattcacaaattgatataaacaacctttccgagggggagaaaacaatattctggctagcattgaagacgtttgaagttaaatatttaacgcctggagccgatctaaacaatagaaaattaatattattggatgaaccagattcgcacttacaccctcaaatgactgtcgacttttttgaatgtcttgagttattaaacaaatcattaaatgtatcatttttatttacaactcactcccctactacagttgccttaatggataatgataatatattcaatcttgagtttgaagttactgacaattcttacaaagcaagaaaagttagtaaagatgaagctataagtcaactccttgatggcgtaagtcaggtttcaataaaccctgaaaactcaaggcagatatatgttgaaaattccaatgatcaatcaatatatgaagtagtttataatcacattaaaaatcggtccaaaaccatttcatcaaaaatacctcttacatttattagctccggacctaaaataccagaaaatgaattaaaaaaacatatcatctcagtttatggtaatgatgaaaaagtttcaaggcttataacggcaataaatggtgatggtgattgtgaagaagtaatcggaatggttgaacatcttgttgatagaggaaacaaaactgtaagaggaattattgactgggataataaaaaaagaagcttacgaaaagaaataatcattttcgctgaggggtatgcctattcgatagaaaatgtcgtgtatgatccacttagcatttacgcgtaccttgcatatgaaaatgctcttccgctaaattatttttttgaatgcgctcctgactttccgtggatagatgctatttcagacacagaaacagcgcaaaaaatcgttgattccgttacacttagagtattaggaagggagaataaaagggattatgctattaactatatgaatgcgccatctttaaagggggatcgggagtatttcataccaaccgaaggtaatacaggccacaccttagaagataaaatattagaagtatatcctcaaatcaaaagacttgctaataaaaccagcgggaaacctttaatgtattttttcatgagcaaagccaccatcaaccttctgggatgggaatatatcaattcatcttttgatgagcttttttcaaaaataaactaa

SEQ ID NO: 232389 - DNA, 840 bp, Klebsiella pneumoniae
atgcgtgatctgatccttcaactcagcaaaagttcgatttattcaacaaagccgttttggggcatcaatgcaatattcggtccgctggtgctggaccttttcgctgacgacatcaatgcaaaatgcccggcatggtataccgctgaagataatgctctgacgcaggactggtctggtcgcctcgcagaacttggcggcgcggcctttgctaacccgccgtacagccgctcgcagtaccatgaaaaacaagccataacgggaatgactcatatcatgaactataccgctgagcagcgtgaaaagggcggtcgctacatttaccttgtgaagtcagccaccagtgaaacatggtggccggaagatgccgatcacatcatgtttattcgtggtcgcattggattcgatctcccggcgtggtttgtaccagccgacgaaaagcagaagcccaccagcgctttctttgctggagccatcgcggtgttcgataagacctggcgcggtgaatgctttagttatatcgatcgtgtagagctggaagcgaaagggcgcgcaagcatggcgctggcgcagtttgcagtcgggcaggtatctcaagcgaaggatgtggatccaactcctgctgctaaaccagtcgccgaacctgtcgttgaatctcgcatctggccgctggaagtcaatctggcattcgggcaggttgaaggcgctgccgatcttggcgagtcgcagcagaacaggttgaaggcccacatcaaccatctatggttggagcgcacgccaaaagatgaaatcctcatcctggcggctggcatggttaatgagctatcaggagaagcagcgtga

SEQ ID NO: 232390 - DNA, 1062 bp, Klebsiella pneumoniae
gtgagagcgctactcactccggaagtcgtgccgcgcttaggcgtggtgctacttaagccaggcaaagagctgatgcgtcttttccgcagtggcagggtgctggtggaatctgagcccaaaagcatggcagggctggctacgggccgaatccctgatgcgcgccaaccgctggctgaagataaggtgctggaagcctttttcactagcgagcgggtcatcaatgctgccggcggtctcccgggtcttgagtactggctccagcacaatatccgggaatgccagtatccgcattctgagtaccatcaccatgagcatgtggtaatgcgctatcaacctggcgccatgatgctttgctggcactgcgaaaacagtcttcgtgagcataccaccgacacactcaccggtctggcgcgtagaaacgttatcgactgggttattgatactgcgctgctgaacctgcaactgggtcgtgatcgggaactatctatggcggagctgtgctggtgggctgtatatgctggtgctgcagacgctatcactgagacgatggcgcagcgtggtttgaggctgcctgaagagccgttcctgtcggtatataaagaaagcgatatccggcctgctgtaccggccagcagtattctgcaggagaaactaccagttgcagccgcagtgcagcagcgcagacatagcgaaattatgcctgtgctgcaggaacagccgaaggtgctggcgctgactgccgatcctgaatcacctgaatccttcatgctcaggccaaagcgccgtcgttgggtaagcaagacttataccgactgggttaagcatcaaccatgcgaatgctgccacagaccagctgacgatccgcatcatgtcatcgggcatggcatgggcggtactgctaccaaagcccacgatctcttcgtgtttcctctgtgcagagagtgtcacgacgagttgcatgccgacgcaaaagcttttgaagagaagaacggcacgcagctgcagttgctgtttcgttttcttgatcgagccatagcgatcggcgtgattgtaaaagcataa

SEQ ID NO: 232391 - DNA, 1152 bp, Klebsiella pneumoniae
atggttaaaaacagtacaaaaattgcaattgtgcatgattggcttgatgtttatgcaggggcagaaaaggttctcgagtgcctgttaagcatgtttccaaatgctgatttattttgcatagttgactatatgccggaggataagagagggttcctggctaaaaaaaagatcactactacattcatacaaaagtttccattttcaaagttatattataggaaactattgcctttaatgccgttcgcaatagaacaattagacctgactggttatgatattattataagtagcagtcatgccgtagcgaagggggtaataaccgggccgaatcagttccatgtatgttactgtcacacaccaattcgctatgcttgggatatgcagaatttctatattgattcgtataaaataaaaagcattgtaaaaaagcaattgatattgtattttcttcatagattaagaaactgggattaccgttctgcgtctggcgttgacttttttattgcaaatagtacgttcgttgctcagaggattatgaaagtataccggagggaatcaattgttatccatccaaatgttaacattaatagatttgaactaagtaaggataaaaaagattattattttaccgtttccagggttgtgccacataaaaatatacttactatagttcaggcatttaaaaaattaccagaaaagaaacttgtagttattggtgacggaccgttgcttgcagaccttaaagatataaaatctgataatatacaatttcttggatatcagaatgataacgttgttaacacttacatgagggaggctcgggctctcatattttccgccgaggaggatttcgggatcgtacctgtagaggctcaggcctgtggcacacctgtaatagctcttgagaaaggcggagcagtagatactgttattgaaggagtaacaggtatattttacccagaaaatacaccagagcaccttgtgatggcaatacaaaggtttgaatccatgccagcctttgatcctgaaaaaataaggtttaatgctgaaaggttttctgagattaaatttgttgagaagattgaaaaggtagttagggaaggttattcacaattcaaatctaaatctaaaatgcatgtggtattgaggtag

SEQ ID NO: 232392 - DNA, 705 bp, Klebsiella pneumoniae
atgacatttatatttgatgcgaaacgttggcttattgtgagtccgcacgctgatgatgctgagcttggatgtggaggagtaattgctgcgggcagagaaaaaggtattaatatacacatagccgttgcatccgttaaatccgaaaatcatttataccgtgacgtcttaacgacttcggaagtcagagaaaaagaactaaatgaatcaatgaattttagtggatgcagttattctataatttataaaactgactcaagtaatgagtttgatcttgcatcctccagtaagtcagcgtttataaaaacgcttgactccattattgcagattactcccctcaggttttgtttataccagtcccgtcattccatcaagagcataaatgggtttatgattgctgcatggcagcatccagaccatacaaaataacaaaagaaaatatcattatattggcatatgagtatcctcctgcaggatggggagactcagcctcttgggattcatcaaagggcgctatttatgttgacatatctaactatatagatagaaagatagagatgttaacattatataaatcacaaattaggagtgataatacatcgctttctctaaaggcagtgaaaaccttgtcaaggtatcgtgggatgcagtgtaacacagatcatgccgagttgttctatcttttaagatgcgtttgcaaggtttag

SEQ ID NO: 232393 - DNA, 513 bp, Klebsiella pneumoniae
atgcgtttgcaaggtttagaggtcgatatggacaagttaacttacagggtatctaagaagggtttcgattatttggtgtcggcattattaattgttgttgtttctcctgtgattcttttggtggcagtagtaataaaaataacaagcaagggtccagttctttattgtcagaagagagtagggaagtatgggaaagaatttaatatgtataaattcaggacaatggttattaatgcagaagcaatcctacaggataaaattaacaaaaatgctgactttagagctgagtgggagaaatatcaatcagtagcacgcgatccacgcataactaaaattggcaagatattaagaaggaccagtttagatgaattaccacaattattaaatgtacttaaaggagatatgagtcttgtaggggcaaggccaataacagcagatcagattaaaatgttcaatgaaggattttcatattacatcttatcacgccctgggttgacagggttgtatcggtaa

SEQ ID NO: 232394 - DNA, 240 bp, Klebsiella pneumoniae
atgtcacttattaagtatcgttcaaaaaaaacagttcaggcaatgctgattgagagtattgctattaatccagattacacggcgatcatatctgacagttacggaaatgagttgtacgtttcagcagagtatgttttgagagagaagccgaaaggaggtgggtattacatgatcaacaacgagggattcgaaagttttattgataaagatgttttcgaaactgatttttctgcaagctag

SEQ ID NO: 232395 - DNA, 939 bp, Klebsiella pneumoniae
atgattaccttaatttttggagcaggagcaagctgggactcagagaatttagagttaagagataaaggatcaacgccacccctaggagataacctcttctttagactaaataatcttggtggggctacttctagactcgatgatacaatcaaagatattttcataaaaaaaggatatgaagttgggattgatagcttgcaggcatcaaataaagttttagttccgattttgagagaaacggcggactatctttcatctttctctccgacaacagacaatgcttacacaagattatttaaacaaataagaaataatattaccaatgtgactattgcaacgttaaattatgacttactaattgagcaatccctccttaacctttcaattggtgtctcatatctctgtgagagtgattacaatggcgccaaagtgataaaattccatggttcatctaatttggttccagtaatgccaaaaaacattacttttattaatcctcactttgaatcagataagggtgtttttgtagaaacaaataccgtggagtatttaagagggcataatgaaattgtaacttggttaagggctcagagaaatgacctgcttgcacccataatgtgtttgtacaatagagaaaagagagtactttattcgaagagagctatggatgaaatacaagaaaagctatatcattcaataggagaatcaacagcgctgttccttatagggataaaatacgtacatcatgacacccatctatgggaaccaatattaaaatcgaactgccacatagtaatattcgacccttacccaacgactgaattaatagagatcctcaaaaatcggaatggtgaatcaacgatcattaaggatggtttttattcgagcgcaaccagaataacaggtttaataaataagttcttgagggaaggaaaataa

SEQ ID NO: 232396 - DNA, 834 bp, Klebsiella pneumoniae; identical to SEQ ID NO: 92367

SEQ ID NO: 232397 - DNA, 1272 bp, Klebsiella pneumoniae
atgactaacgaattgttcaaaaccattgttgcaaaactaaatttttctctggttaacaaaacgcctgttattctacagtcagaatcatcggaatgtggagttgcctgtctggcgatggtctgtggttattatgggttaaatatcgatttatttaattttcgtcaacgattcggtagcccctcacagggctcctcactgctgtctctaagcaaaacagccgagcaggctggtttaaaaaaccgtgcgctagcgctcgacctcgatgaaataaaacagcttaagcttccctgcatcatccactggggaatgaaccactatgtagtccttacaaaagtaaagaaaaacggatttgtgattcacgatcccgcgctgggtaaacgaatcattggcatcagtgagatgtcaaataattttaccggcgttgcgcttgaactctggcctgaccataacttccaacaagaggaggcgaaatcccgtttacgactcctggatttaatgcataaaattgttggtttaaaatcggcgctgattaagatctttgctttctctgttgtggtagaagcaattggcctcctgttgcctattggtacacagttagtaactgaccatgtcattatggcgcacgatgaaagtttactctctgttatttgtattggtttaatattttttacgctattccgcacgtttattagcatgctccgagcatggacgtcgttaacgttgaatacattgacaaacattcaatggaaaacaacgctattcgatcacttggcaagtttgccattatcttttttcgagaaaagacacttaggtgatatccagtctcgtttctcgtctctggataccattcgttcaatttttaccaacagtatcgtcactggcatcatcgattcgataatgacgatcggtttgttagtcatgctgacattatatggcggctggttagtctgggtcgtcattggctttaccgtctgctacgcgattatgcgcttcgctacctatagtttttatcggcgcgtaacggaagagcaggtcgttaaaggggcgcgtgctaactctcactttatggaatcactttatggcatttccacgatcaaagcattaaatttaaaagaacgtcgctcgcagcattggctgaatcttaacgttgatgccagtaacgcaggtattaagcaaactcgctttgatatgatgtttggtgggattaatacctttatcacctctatcgatcaggtggtggtactgtggttgggtgccattaggctttgttga

SEQ ID NO: 232398 - DNA, 807 bp, Klebsiella pneumoniae
atgctggttaatgcgcagactggtttaaagaaaatgcatgataatctttccagttacgataaatatcttcgtgatggccttatcaccaaagatcagtataactatcagcattcattatactttcaacaacagagtacctatcagtctttggtcagtcagaaaatgcaactggaatcccaggtaacccagttaaatagcgataaaatcacaaaaacggcagattttgacaaccaaatatcatctcaggaaaaccagattaatgattacaaaaaccagttggttgaatcaaatgccaatggtaatgtcattattaaagcaaccacagaaggacgcattgaatcgctggctgtaacaaaaggacaaatggtcgacaaaggcagcagtttagcgcaaatcaaacccactggtgatatagaatattatcttattttatggttacctaataatagcataccttatgtcaaaccgggtgatgtcattaacatccgctatgatgctttcccatccgataaatttgggcaattcccggggaaaatactttcaatatcttcggtcccgacatcccgacaggaactgtctgaatacactaatgttaataatggaacgaaccagcaggaactggcactctataaaaccattgtcaaaattgaaaacaaaacctttaattacaatggtaaaacgctttcgctttcgaatggactgaaggctcaagccgttgtatttctcgaagagcgcccactttatatgtggatgtttacccctgtgtataagataactcaaagcattactgggccaatccatgactaa

SEQ ID NO: 232399 - DNA, 804 bp, Klebsiella pneumoniae
atgcaaacttcaattgaaatactcagccaagcaagtttcaagtcggttctcggcagacctagtgaagggcaaatggccctgacactgttatgccttattgattggcctgatggtgtgcaaagacaatcatatgtgaaaatattcactaatgaagaaagcatagggatttttaatgaagttctagggtacttgcttaccaaatcatatgatcttcctgttgctccgaaagctggaatattgatattgcctgatggtgtaatgggggcaattgaccggtccgtatcaccaattgcttttgttacatctaaggttactgggaactctccgtctagctattacaatattggtgatatgattaaattcgaaagtcttagaaatgttcttgatggatgggatttgttacataagacgatcgcttttgatgagtgggttgcaaatcaagatagaaatttaggaaacttgattatcgattcacacaatcaagtcaccctgattgatcacagtaatatgcctgtggaccttaggtggtctccagaagacttatctgtaactatcaatccagttaataaattggagattgctctccgttccgaaccaactcttcctcagaaaatggagatagtaaacggagctaaaggccagactgaagcattggatattgtaatggccgaggttaattattggtgtgataaacttctgagttcgcaggcaaaagatagtttattgatatttttgagtcaacgggcttttctttcgaaagaaagattaagtagaagattgggtgtgctcgtgggggtcgcgtga

SEQ ID NO: 232400 - DNA, 870 bp, Klebsiella pneumoniae
gtgattaatttcgattctatcttaagtgaacattcgcaccaacccgttgttaagggagaatggtttaccattcaatggtgccctgatattgcaacaggagagaagcttaatataggtatatgttttaaagatagttatggtgttgcatttgtacaaactctcgagtatttcgatagagtagcttgcttatactctcacggcatgacattccatctaaagttagcttgtgaagtagcaagggaaattgctctttcaggggctgattttttgacaaatcaatgccaaggtttaacatttaaaaataatggatacgcccaaggggaatcagcagacgatattgtttcctctttgttttcaaatgttgttcctttgtcggttaaacttacaaaaaaaagagagaaagtatattctccaatttcaagagatcggctttacaatatgatggatggataccttaaacaccatctcgagtatgaggaatattttgagatgcgagacccatcgcctttaaaaagagtcacgctgggacaacaaacgcaaacaatttatcttccttacaaagctaaaaactctctaggaacaatagcatcggcagcttattctgatgagaatttagctaagtgtcatttatatgatgcacaaagggatatttctttagctttgaatagctatgatgagtataagagtggggcaatttttatattatctccaagcgatgatctcaaagtggaaaaacgcgatcaggttgatttggaaattgataagttttgctggtatttgaaaacacaggctatagaaactgaggttgatagcgaccccaactctctttccgatagagcaatccattggtaccgcagaaaggcagcgtga

SEQ ID NO: 232401 - DNA, 501 bp, Klebsiella pneumoniae; identical to SEQ ID NO: 180332

SEQ ID NO: 232402 - DNA, 753 bp, Klebsiella pneumoniae; identical to SEQ ID NO: 180331

SEQ ID NO: 232403 - DNA, 144 bp, Klebsiella pneumoniae
atggcaatttcattggtcgaaaatgcaaaaaagaaagagggctttatcgactttgcgccctatttcaacaaaattaagcacaagctgatctggtgcctggtagtggttattgttgccgcggtggcatcatttatcctgacgtga

SEQ ID NO: 232404 - DNA, 1092 bp, Klebsiella pneumoniae
atggccagaagcaaaatgtggaatgcggttgttgctaatgcgaaagccaacaacattagcaatgagcagtctttccagaatttaatggatgagtcaagaaaaagaacaatatcgggtgagttgtatggcggtgctaaaattgattcttctgatgcagctcttgggaaaatagggagctgggttaccggaggcagtatatttggtggtgttaaagtggcagccagtggtgccgccagtacggggtcaacggatactgttggacgatcaggtaggcattctgaagataatcgccatgataccagcactcaggcggcgaaagactttaaggaagcatccgattactttaccagccataaaacaaccacatcaggcaataacaccgataacaatgccagttcgcgtgttgaccagtttgccgcgtcactctccagtgccaaaaacagctatgaccagtatacaagcagccggacacgcagccacgagtacagtgagatggcttcgcgtacagagagcatgactggccagatgagcgagaatctcactcagcagtttgcgaactttgttcagcatcgtgcacctcaggacgctgaaactattctgaccaacaccagttctcctgaagttgcggcgcagcgtgaagccctggcgcgtgaattcgtcaaagagcaggttgaacccagggttgatggtgcgtatcaacagggtcgcgaaagcatcggtcagaatatgtctggggtgtcaggcggtggcgacaatggttcggtcatggcggactacggacataatgccggccgtattgatgccatgaccaaagaggcgggtattaaggatgatgtggggcaaaaagtggatgggatgattgcagagaataaacaacagcatcaggaagcccgagaaaaaatacaacagcaaggtgttgaggtgaaaaaagagaatgctgaactggaaaaagaccacaaaacaaaagaaaatgatttcaaaaattcttataatgataagaaagaacatcaaaccagactgcctggcgcggactcaaccaaagagctactggataaggcaacaaaattagaaaacgataaatcaaagagatag

SEQ ID NO: 232405 - DNA, 1386 bp, Klebsiella pneumoniae
atgaaaacaatgagtgctatttacactacgcctagccgtagcctaacaaataaagaatataatatttttggattgaaccctaaaaaaggtgaacattcaaagatgatatgtgcgaatatgaactggtatgatacggttaaaaatttttctgattttgaaaaatggcaaaaaattggcggtgaaaccggattcaccaagagtgacctgctcatgataattttcggtagaactataacctccgacattgatcaatggtgtacacgcaataacacaaatgttgtggcacgttccggtttcattcttgattatgacggagaaggtaataagtcctttagtgatattcagaagataattgatgagtacgagtatttcctattttcaagtccgtcatacggtataaaacctggtgatcgttgtcgcatttacttgccttttgagtgcgagatatctgctgatgaatggcaggttcgaaaaaaatcatttgtacaatatttcaatgaaataggaattacaattgatgcaagttgtatggtactgagtcagggacagaatgaaccagcatatgacgttactgcgtctaagccgccatatgcatattacaacaaagggcggttcatcaatccgctagttgatatcaaacatatttctccgtcacaaataccaagactgacaactacctataaccccacaaatacaagtacgagttccttgacagcactgttgcaagaggtctgctatcacaatgctggctcactcgcttattgtgacagacggacgttggcatcattactggtattgctgggtgttgaatatcacgagattgaacgaattctgactcactgttcacgccctggattcactaagtcgaatgtggatatcattaatggttgtggtgtcttcaacaacctatatggtctgtacaagttcgtatcaaaaggattcaggatcccggaagatatattgcctaacacgaagaaaatccctattccgaaggtagctccagcgacactcagtactgcatatcactgggactataagaaaaaactgataagtgaacatacactcagtgatataactaaagagatgcctcatcatcaaccaggaaatcatttagttgtctgtggttgtgcagttggtaaaacatatgaatccgcgaacaatcccgactctttgacaatcgttcccaatacttcaattgtttcccagtatacagcacctgaatatagaggaacgcctgatgaaaatacgttgggcagtaatgtttgcacatggaatcagcttgagaagttagttggtaaaatacctgaacaattgtcagtcatattaggtggccgccggatattagatatagatgaggctttgttgaataaatcagatttcgggtaa

SEQ ID NO: 232406 - DNA, 675 bp, Klebsiella pneumoniae
atgatccctaattgggctccgatgttctcttggtgggttcataacggacttattcggaaatttaattggcgtaacgatgagatcggcaaaccatcagcaaaggttgccgctcttatgatttacatagcaattaccatgaaatgcgctgaagaagttggcattcaggaagtgaaaataacctatacccggctatcagaaatgacagggattagtcggcagctgataagagaaggtacagctattttagttaagctggatatgattgatgttacgcggattggtcgaaacaacacctataaactgataagcaataaagagcgtagtggatggtgcaagatacctgtaagagcaataactagtgaaggtggccatgctattacaccatttgaagatttaaagctaaggcgaaaagtagagctgcatgcgctaaaaatattcatttatcttgcttctgttcgtgataactacacagagtattcgttagcttcttaccagactataagtagtgctgttggcattacagaaaaagatatccagagagcattagcactcctctcattggtaggtctgatcactaggatttctagtgaaaaagctgatgacactaaaaagaatcagcctaatcgctactatcttgctggatataaaagctttgttaaaagatcggactggtga

SEQ ID NO: 232407 - DNA, 1170 bp, Klebsiella pneumoniae
atgaagattactatcatcaatacattgtattatccatacagattaggtggagcggaggtctccgttcaggttttagcagaatcccttgtcaaaagaaacgttgaagttacagttttaaccctgcacgaagggaaaaacttaaaaatagactcagttaatggtataaagatatattacttacctctccttaattgttattggccatatgatagcagcgagcacagcaaaattcatagattacaatggcatataaaagatctatataacagaaaaatggttaaattagttaatactattcttcaggatttgcgtcctgatatagtacatactaataacctctccggattttctgttggagtgtggagggttttaagaaaaatgaacatcccaatagtgcatactactagggattattatctcttttatcccaactctacgttatttaagaatggcaaaaacattaagccaacaaatatttttgtaaaacttaacgttctgtataaaaaatatatgagtcaggatgtcgatgcttttataggaattagtaaatatatatccgactttcattatagatttggtttcgctaataaagggctacatggctatatttataaccctgttttaaaaccgaatatttcaattagccacaataatatagataaaataaccattggctatattgggagactaacctcggacaagggatttgatgattatattaatatcgctcaaaaatatcaggcttgcaaatttgtagctgcagggaaacctgatgcatcagaagagtcaaaggatttattaaaaaaagcaaagaaatcaaatgttgaaattcttggctatattccagttgatgaattcttaaataaagttgatgcagtattgttaccaataaaatggaatgaaccttttggaagagttgtcgttgaaagtgcactagcctataaaccggtttatacgaattatgttggtggaattacagaaatatcatcattttttccatgggttaaagatatccattcatttgacgaacaagagttgaaaagtactattagttctgttatgcaaactttacgcgacaaacaaaacccattttgttccgaaattcatgttgataactatcttaaaatatacaataagatagttaaaaataataaaatggtaaaagcatga

SEQ ID NO: 232408 - DNA, 282 bp, Klebsiella pneumoniae
atggtacctcttgaagcatttagttgtaagctcccagttatggctagttcctgcacttcttttcctgaaattatcaaagataaatataatggtttcttagtagacatggataatactgaaattgttattcagttacttaatgaaatagcggctgataaaaatattgacactctcgaaagccttgcctctaatgcgtatgttacttatcttgaaaaattctcttcaacaaaaatgaatgaagatgtatacgatttatatcgtatgagcgaatctgtctgctga

SEQ ID NO: 232409 - DNA, 222 bp, Klebsiella pneumoniae
atgttctccttgtttgaaagaatctcgtttaattccttttcatattttttatcattacaaaaacctgcaattattaatttcttagatggagggaaagagataattatttcctcaatttttttatatttctctattctcccaaagatcaaatatgagtccttatgtactatcaagtcactttttatgttaatttctttaagtggatattcatataagggatga

SEQ ID NO: 232410 - DNA, 537 bp, Klebsiella pneumoniae; identical to SEQ ID NO: 145252

SEQ ID NO: 232411 - DNA, 609 bp, Klebsiella pneumoniae
gtgaaccgacgtcgttttcttaccgccaaagaagttcaggctatgatgcaggccgcgcgtcagggcgccaccggcgagcgggactactgcctcatccttctcgcctttcgccacgggatgcgcatcagcgaactgctggatctgcactatcacgatctggatctacgggaaggccgggtcaatgtgcggcggttgaagaacggtttttcaactattcacccgctgcgctttgatgaacgtgaggccattgagcgctggagtcaggtccgcgccggctggaaagcggcggccaaaaccgacgcgctttttatctcccgtcgcgggaccccgctctcacgccagcaggcgtatcgtattattcgctccgccggggaaaaggcgggtaccgtgacgcagacccacccccatatgctgcgtcacgcctgcggctacgaactggcggaaagaggtacagatacccgtttgatccaggattacctcggtcatcgtaatattcgacacacggtacgctacaccgccagcaatgcggcgcatttcgctggaatatgggaaagaaataatcttattggagaaagcattgcagaatcgggagttgatacaactgattga

SEQ ID NO: 232412 - DNA, 984 bp, Klebsiella pneumoniae
atgactggtaataatctgggtttcggcgtccggaataaaggcacgatggctgcaaacacccttctcaccatgaccagcaacggttcactgattaatgaaggcgctatcactgggaaaggcatcgcgacgcaaatcgtctcagcaggtgagatgaaaaataagggcagcattaacagcagcgccctcgccactcaggtcaccactctgaacacattgaccaatgaaggcacgattaccagtgacaaaacgcttaacgtgagcgccgccggcaacctcgtcaataccggcagaattaatggcaccaaggcattaaccttaaccaccctcggcgatatcaataccacctatggttcaacgattaacgccgatggccagttaaatatttctgcccacaatatcaacaacggcggtacaatgtggggcgaaataaccaacgtcaagtttagcggggataatctcaccgtcaccggtaacctttggggctacactaatctggctatcgtgtcggcaaaggatagcaacgtcagttcaggcaacatccataatacagggcgaatttctggtatcgatatatcgcttatcactaatggcgatatcatccaggacggtaaccttgttagcggaaactctatgacggttaaaagcgtccagttcaaaaataacaactacgtttacggaaaatccgtacagattgagagtaataacgttcacaataaggcaactattgatagtgtcgatgcgaatatcatcgcttattatggtatgaaaaatgaaggccaaatcatcgcagccaaagatctcaccttggatacgaaaaattttgccgatatcaccaactacggcactcttcaggcaggagataatctgacgattatcgctaataaagtctataatggcggctatcgctgtggtttcctgaagctttcaacttgtaatgttggttctatctccactaaggaaggtgcgaacaagttcctgatatga

SEQ ID NO: 232413 - DNA, 171 bp, Klebsiella pneumoniae
atgctgccggccggtatgaacgaggacggtgtgattgaagacatgcaggcgtatgacgcctgggctgatgagcagacgcagcgggatatgcagcggcgtgaagaggtcaatatcaaccacagccaccgccacgatgagcaggatgatctcgaaattggggggaatttctga

SEQ ID NO: 232414 - DNA, 192 bp, Klebsiella pneumoniae; identical to SEQ ID NO: 180342

SEQ ID NO: 232415 - DNA, 2319 bp, Klebsiella pneumoniae
atgcaaatacaacatcatagtgaaccgtccctgagccaagaaattgtgcttttattcaaatcatctcaactgatccctttttttggtagtggattcaccaagggggttagagcaaaaaacggtaaagtcccagacgctataaaacttactgaattaataaaaaacattgcagcggaaaatgaaaatataacaaaagaagaagctgaagatatcagtaaaattattcagctgaaaaaagcatttggcctgctaaatatggaagagtacatcccaaagagaaaatccaaagcattattaggtaatgtcttttcagaatgtaaactaacagattatgataaattaaagctaataaatttagattggcctcatattttcacatttaacattgatgatgctatagaaaatacaaatagaaaatacagagtgctgtgccctaatcgaccagtccaaagagaatatatatcatctaataaatgtcttttcaaaatccatggtgatattacagagtttgttaaatatgaagatcagagcctgatattcacttggcgtgagtatgtacatagcattgatgaaaataaatctatgttatcttttttggcagaagaagctcaaaattcagctttcattttcattgggtgcagccttgatggtgagcttgatttgatccacttatccaagagcactccttttaaaaaatcaatataccttaaaaaggggcgtttgagtttagatgaaaaaatagccctttctgagtatggtattgagaaagtgatagtttttgatacatatgagcaaatatatcaatggctaaataacatccttcagggaatagagcgagagtctcccacaagaacctttgaacttgatgactccaagttaactaaagatgaggctataacattctttgctaatggagggccagttactaagatgagagaagatattagggtcttacgaaattcaattagcttctgtaaacgaagtgcttgtgatgacgcgataaaaggtctcagagttaataactgtattctaataacggggaggcgctttagtggaaaatcagtgcttctatatcaaataatagaagcaaagaaagaatatggctcctcttactactcatcaacagatacatttgatccatcaataaaacagtcattaatgaaattggaaaatcatatttttatttttgactctggctttcttaatgcgcaaagtatagatgaagtgttaagtattaaagtgcatcataccaacaaaatagttctatgctcaagttttggcgatgcagaattgtatagatacaaactaaaagataaaggagtaacgcatgcggaaatacagttaaaaaataattttaataaactagaagaagaatatctaaatgataagctatcctccgaaggtttaccattgtataaatcttcagagacattattaaattttgcatacagatactaccatgagtatggaactaggttaggtacttccaacttatttagcaaacaatttgatgagcactcaatatctatcttgattttaattgcagcctttaataaagcctcgtttgggcatataaatagccttataaaacattttgatgtggcagactttgtttcgaaaaatgacaggctattcgagatggaatacacgggctctgaacaaaatggtgttttagtttgtaattcaccatcatggcttttgagagttatcagcgactatatagtcaaaaaccctgaggcgtataagactgtttctaaaatgataatatctctggcatctagtggatttattgctgcgtctaagaatcttataagttttgataaactaaatgaattgggcaacggcaaggatgttcatgtgtttatcagggatatatataaggaaatagcgcttgtttaccgcgatgacatgcattattggctacaaagagctaaatccgaacttatatcagcacacacaattgatgagcttgttgaagggatgggttatgcaagcaaagtaaggttggatagcgctgatttaaaaaatcaaacctattacagcgcaacattagttttagctcagttgtctgcaagggcattatcgataggtaaggaaaagaaatatgccttaagtttctttgaaaatgctcttgaatccattaggaattatgaaaataactcccggcatgtaaataaaatgatggataaaaaagatggtggcgttaaatatgcgatagattatcttaaaaatacacctctaatagagcttcttccacgaagaaatgaagttgtcgaattaattgatttctatgagcgccgtagggataaaaaagaatag

SEQ ID NO: 232416 - DNA, 420 bp, Klebsiella pneumoniae
atggacattcaagtagttcataacgttactgaatatgatagagaagagctgctaacggggctaagaagatacaatgcccagtttatcgactttagcaaacatgggcagctcggagtctactgcagaaataaaagcggggagatgataggtggtttaattgcggacaggaaaggtccatggttgtgcatcgattatctttgggtgagtgaatcagcacggagtggcggtttgggtagtaaacttgtgagcatggctgagaaagaaggcgtactgaaagggtgcattcatggcctggtcgatacgtttagctttcaggctctcccgttttatgaaaaacagggttatatacttcaaatgtcattgcctgatttccctaaagtaggttcacaaagacattatctagtaaaaaataatttatag

SEQ ID NO: 232417 - DNA, 318 bp, Klebsiella pneumoniae
atggcctttcaggttttttggacaatatcctcagagcacgacattcagagcatttcttgtcggtactttattcataaaagtttatgcctcaactcatttattagtattaggaacagtaaaaaagatgaggcagttaattgtgaattaaataattttaaattgtcgtcttttaccgcgctttgtattttattctcaggatatcaatacaaaggaatgtacatgtcagaaaaaggattacatagtttatgtattacgctcggtatcatgctcattttttggttgggcataattacgttgttttgggcaattttcgcgtaa

SEQ ID NO: 232418 - DNA, 285 bp, Klebsiella pneumoniae
gtgacgccggctggcccactcaccaccaatatcagtgaagcgcttctgacggcggtcattcgcgccaccagtatcgcactgctgccgggttggatggtcaaccaggcggtgcaccgcggagaactggtccgcgtgctgcccgactggcgcagcgcggcgaaagtcagcgtttatgccctgatgccgcccggcacgctggttcccgcaaagacccgggtatttatcgacacggtatgccagcagctggcgtcatccccgctgtggcaggacgcgctgaagcgataa

SEQ ID NO: 232419 - DNA, 594 bp, Klebsiella pneumoniae
atgcttcatttccttatttacgatgtgttagggacaccggcgattctggttggattgttttctctaatcggtctgctgttgcaaaaaaaaggaatttcagatgttatttcaggaacactgaaaaccatcatgggctttgttattttaacggcaggcgccggtatcattgcctatacattaaccatttttagccagctgtttgaacattcttttcatatccagggcgtggtgcccaacactgatgccatggccgcgctggcgcagaagaattatggcacggaaaccgccacaatcatggtgttgggtatgttgatcaatatcgtcctggcgcgtctgaccccattaaagtacatctttttaacaggccaccatacgctctatatggcagcgatgctggcggtgatcttgtcagtagggggcttgtcgggtggttgggtggtagccatcggggcgttgattctcggcgcgatgatggtgatctctccggcgatcttgcagccgtttcccgtaaaattaccaataccgacgatctggctctcggccattttggctctattggttatctactttccgcgctggtgggcaaagtcgtag

SEQ ID NO: 232420 - DNA, 978 bp, Klebsiella pneumoniae
atgatccgctattcactggatgagtattttccgcgcatccactcggcttttctgattgaaggtaatcttaacctggtggtcgatcagctcaatgaatttctgctggcgccgaatactacggtacgactgcagctgcgcaaccagattatccagcatctggacaaaatagaacggctaagtcaggggttgtcgccaacagaacgccagcagctgggggtaatattgcaggacagccgcgcgctgctggcggaactggatcgcgtgctctacaacatgtttctggttcgtgaaaaggtgggggagctttcggcgcggatcgactggttgcacgacgatttcactaccgagctgaattcgctggtgcaggattttacctggcaacagggaacgctgctcgatcagatcgaagcccgacagggagatacggcgcagtatctgaaacgtgcccgggacgtgcagaatgaacagcagcaggtctataccctggctcgtattgaaaatcagatcgttgacgacctgcgcgacaggctcaatgaactgaaatccgggaatgatgacggcatgctggtggagacgcatatccgctatcttgaaaacctgaaaaaaacggcggatgaaaatatacgtgcgctggatgactggccgagcaccattaccctgcgacaaacgattgatgagctgctggaaattggcatgatgaaaaataagatgccggacaccatgcgcgactatgttagcgcccaaaaagcgctcgtggaagccagccggtccagagaagcgacgctggggcgcttcagaacgctgctggaagcccagcttggcagcagtcaccagcagatgcagatgtttaatcagcgtatggcgctccaccagggacgtattaatgaggtggcggagtatctgctgataccgcgtaaaaaactttatctcagaatgaagaagtatggtctgaataaagagcactacaaaggggtttag

SEQ ID NO: 232421 - DNA, 153 bp, Klebsiella pneumoniae
atgaaaaagacctgctataccgaagaacagattgcgtttacgctgaaacaggccgaaacctgcacccgtgtcggggaagtctgccgaaagatgggcatttctgaagccattttttataactggaagaagaaattcgccggtctgggggcgtaa

SEQ ID NO: 232422 - DNA, 327 bp, Klebsiella pneumoniae
gtgcacggctataaagcgccacgtcgtatcgctgtcaggccttccgtcgtagcgcctaatcgcgtgcagcagcagttcaccgttgaacgggccaaccaggtctgggtcaccgatattacttatatccgcacctggcagggctggctgtatctggcggtgtttatcgctctcttcgcccgtaatgtggtcggctggtcgatgaaactcactctcaatatctcaatctcatacaggtatcgttccgattaccagtgctgcaacgagtgcgcagacgctcataatccagaccttcgtcatagaatgtcggatatgttcatcaacccgtaa

SEQ ID NO: 232423 - DNA, 213 bp, Klebsiella pneumoniae
atggcccgaatacttggcggtattgccgtctcacatacgccgacgattggcttcgccgttgatcaccacaaacaacaggatccggcatggtcccctattttccaaagctttgagccgcttcagcgctggcttgatgagaaaaagcccgacgcgctggtctacatgcgacgctgggcggtatggaaggttcagaggttattatgtggctggtga

SEQ ID NO: 232424 - DNA, 531 bp, Klebsiella pneumoniae
atgtggctggtgatgcgcggcgccctttcggccaatgtcactgagacctggcgtgattactacctgccctcaatgaccggcattgcgacgcttattctggaaaataacgcccggatgccacctgtggacaccctgactcgacatcgccagcatatggcgcaggagctggccggggttgataacctgccggggacgtatccgtttacgcatgagcgcagcctgaacggcctgcggctaaacaacttcctgcataagctcacacagcccgcctggcgcgagcgcttcctgagcacgccgcaagcactgtatgaagaggccgagctgagccaggaggaacaacgtctgctgactgaacgtgactggcgcggattgatccagtatggcgcgagctttttcctgctggagaaaatgggcgcggtggttggccaatcgaatctgcatatttatgccgccatgcgtggtcaaacgctggaggaatttcagaaaacgcgaaaccagcaggtcacctattctgtcgcaggtacccgttag

SEQ ID NO: 232425 - DNA, 402 bp, Klebsiella pneumoniae
atgaaaactttactccatgcaataaagataaagacagatccagaacgcgtatggcatgcactaaccgatatcaccgaaatggcagcctggcatgaaggtactgtgcaaggtgcgatcgcggaaggcgaatcgctcattcttaatccaaaagatgatttgcattttgtctgggaaacggagcaacttgtatccccttcactaattgtgcagatttgcaccgaaggacccgggcattcggtgggaaaacgtcttcaattcactctaagcccactgagcgatggcaggacattagttgagcttgctgatggtcaatgggaggacaacgatccgcatttgccgctctgcaacacttattggggcgcggtgctataccgcctgaaggtctatatcgagcagcattaa

SEQ ID NO: 232426 - DNA, 1545 bp, Klebsiella pneumoniae
atgccgcagaaaaaaccgacaacctggcaagaagtgaaacctggcgcaatacaccctcagggatgggatgttcctcccataaacgatttacgttccgccattgagttgcttaaaaaacaccccggacagtatatcgaaaccgacaaggaaactgatcccatcgccgaactggcgggggtgtatcgttatgttggtgcaggaggtaccgtaactcgtcccacccgtaaggggccagcaatgatgtttaataacatcaagggatttccggggatgcgggtgcttgttggcttgcttgctagccgggatcgcgtcagtatgatgctcggggcgccggtacgggaattgggaattcagatggcggaggcaagacgcaatgtcactccgccagtagtcgttaatagacagcaggcgccctgtcaggaagttatttaccgttcagaagatgaaaactttgatctccggaaactactgcccgctcctaccaatacccttgaagatgcaggcccttatttttgcctcggattagtattaggtagcgatcctgatgaccgtgataacgttgatgtcactattcatcgtttgtgcgtacagggaaaagatgagctctcaatcttctttgcgccgggacgccatattgatgctttcaggcagaaagcagaagcggcaggcaaacctcttccagtgtcgatcaacatgggattggatcctgcaattcccattggagccgaatttgaagcaccgactacaccgttcggctttgatgaactttgtgttgctggcggtctacgtggtagacccgtagagttggttgattgcgttagcgtgaaccagcgcgccatcgcgagagcagagattgttatcgagggggaaatactgccaggtgtcagagttgcggaagaccagcacacccatacagggaaagcaatgccggaatttccgggttataccggtgatgccaatccatcactaccagtgattaaagtcaaagctatcacgacaagacgtaaccctattcttcagacattagtgggtccgggtgaagagcacgttagtctggcaggtatcccgacagaagcaagtatctatatggaatgcgaagatgctctaccaggcttggtcaaaaatgtctatgctcatagcgcgggaggcggtaagtttctgggaatcatacaggttgccaagcgtaatagcggtgacgacgggatgaccaggcaggcagcactcattgctttggcagtatatcgcgagttgaagaatgtctttttagtcgatgaggatgtcgatctttttgacagcgatgatgtgctatgggctatgcaaactcgcttttccggcgatcttgataccatctttatcccaggtatcgctggacacgtactggatccttcccagacgccattatacgatccgcgtataacggccaaaggcacaacgaccaaaaccgtctatgactgtacagttccattccatctaaaggaacattttgtccgtgcgaagtttaaggagcttgatccgacgttatgggtacccaatttgtataagtga

SEQ ID NO: 232427 - DNA, 729 bp, Klebsiella pneumoniae
atggcagagttacaaggcagccacgttctaattattgggggcagttcggggatcggttttgaagtagcccagcatgccggtatggaaggtgcaatccttacgcttatgggtcgaaatcagacaaggcttgaggaggcgcgagcgctactcagcgcacaaggtataaaagtgaatgaactgattgcttgcgatgcacacgatcatactgctttaactgactgttttactaaaatatcttcatttgatcaccttgtttcaatggtaggcgatgcaatgggcggaggttttctggctgcagatatgtcaaccatcgaacaggttattcattcaaagtgccttaccaatattttaataggtaagcttgcagccaaaaagctccgtgaaggggggtctataacgtttacatcaggcacggggggaagggcgcagcatgcgtgcgcaagctatatcgggaatcttgctattcaagcgctggctcaaggattagctgcagaaattgccccaaagggcagagttaacaccgtcgcccctacctggacagtgacgcctttctggcgcaaggtatccccggaagaggtcgaaaaaacaaggctgcacttttccaaaactataccattgaagcgtactgccagcgttgatgaactggcatctgcctatttatttctgatgaaaaatgattttattaccggacagcagttggccattgacggcggcattatgcttggttag

SEQ ID NO: 232428 - DNA, 657 bp, Klebsiella pneumoniae
atgggctcaactgattgtctagtctatacaaaagcccgattttcgggcttttctacaagaggcaacatcatgactgattctgtatactccgacgagcatgttgttttattagacgcacaaaaccagcctgtcgggacgaaagaaaaattatctgctcatgaatcatgtacatcacggcatcttgctttttcagtctggctatttaatcccaaaggtcaatgcctgattacacgccgttctctaactaaaaaagcatggccaggaatctggacgaattctgtttgtggccatcctcaatggaatgagagtatagaagaagctatacatcgtcgttgccgttacgaaattggtgtcgatgtgagagcagtcactcttatcgaccgaaatttttcatattgcgaaacagatcttggtggcattcgcgagaatgaatattgccctgtatacgcggccctaactaatgatgcgattgcgccacggaaggatgaagttattgatatttactgggcggatcttatgtccattatcactacaatacattcgataccctcgctgttcagtccatggtcagtgcagcaggtcaatgctccaggaaatacagcgaggttaaacgactacgcgctaaacgttatacatcttaattttccaggagcatga

SEQ ID NO: 232429 - DNA, 717 bp, Klebsiella pneumoniae
atgttaataggaccgtatgttaacggtgcggcagttataattggtggcctactaggtgctattgccagtaaaatgatcgctgagcgcgttaaagtgtctctccctctcatatttgggctatgttcagttggtctggggataaatctggtcattcaggttaaatatatgcccgccgtggtgctggcgatgattgttggcacggcaataggagaggttctttttgtagaacgaggtattggtaaagctgcaggttcaacccgatcaattattaatgcgatattgcctccggttaaaggtttatcccaggagcaatttacagagaagtttgtagcaatcctggtgcttttttgtgccagcggcacgggtatttttggggccatgcatgaaggcatgacaggggatccatcgatcctttatatcaaaacagtgctggattttttcaccgcgggtatatttgctacaatgctcggttttgcagtcatgaccattggtctgccattaattattattcaggtggcgttggcgatgcttgcttcactgattctgccaatgatatctaaagaaatgatggccgatttctcttgtgccggaggtcttctgatgattgcaacagggttacgtatttgcaatatcaaaattttccctgtagcaaatatgttaccagcgcttatcctggtcatgccattctcgtggctatgggctcaactgattgtctag

SEQ ID NO: 232430 - DNA, 600 bp, Klebsiella pneumoniae
atgtcatcatcacgtatcatcgtcggtattagcggtgcctcaggttttcaatatggggtgagggctctggaattgcttcaaaatcggggactggaagtacatcttgttctttcaaaaggcgcagagaaaacttgcgaacttgaaactgactaccgtcttgaagacgtactggcgaaggctgatgtcgtgcactctattaataacttaggagccgctatatccagcggctcatttcagacgctcggtatgctagttgcaccttgctcgatgcgaactttaggctgcattgctcatagtcttacagataatttgctgacccgcgcagcagatgttgtactcaaagaacgacgcagactggtgttaatggtaagggaaactccgctgaatttaagtcatatcaggaatatgcaggcggtaacggaaatgaacggcattattttcccaccggttcccgcgttataccaacgaccccaaacggtagaggatatcatcactcatagcatagcacgtgcgttggatctgtttggacttgatatgcgcgctatacctcgatggggcgaagcggaattaccagcacaaccagagagtgtcagtgtatga

SEQ ID NO: 232431 - DNA, 1644 bp, Klebsiella pneumoniae
atgttgtttttttgtttcgaggttgttagtgatccgcctgtttgtatatatctttttggtataggcattgcaataaaaacagtattagcctcatctgactttcaggattattattttttgaacgagtgtgtttttcttttaattaaggaaccaggtatggaagaaattaaagagaataaaattcacgatctccgttcggcgctggaattattgcaacgtactcctggtgaatacgttgaaaccagtgtagaggttgatccacatgcggagctttctggtgtatatcgttatgtcggcgcgggcggcacttgtgaaagacctacgcgaaaaaatggccctgtcatgatgtttaattctatcaaaggatttccacagacacgtgttgctattggaattaacggttcccgtaagcgcgttggccagttgctcaattgcgcaccggaaaaattggggtatttattaaaagattcagtgctgtcgccgattgatcctgttttagtagatgatgaaacggcagtatgtcaagaagtcattcactacgcagatcagcctgatttcgatctccgtactttattgcctgctccaacaaatactgaagaggatgcagggccatatatcactatgggcctgtgttatgcctctgatcctgatactggcgaatcagatatcaccatccatcgcctttgcgtacagagtcgtgatgaactttcaatgtggttaacgccaggaagacatatcgacgcatttcgaatgaaagctgaagcggcaggcaaaccactgccgatatctatcagtatcggagttgacccggctattgaaattgccgcttgttttgaaccgccaaccacacctcttggttttgatgaactcagcattgcaggtgctttacgaggtcatgctgttgaaatggtgaagtgtaaaaccattaatgagcgtgcaattgcacacgcagaaattgttatcgaaggagaattactgccagatgtaagagtccgtgaggatcagaatacccatacaggcaaagcgatgcctgagtttccgggttatacaggtgaagcaaaagccgctctgccagtgattaaagtgaaagcggtgacgcatcgtcgcaaccctatctggcgtacaacaatgggccctggcgaggagcacgtcaatatggcaggtatcccgacagaagcgagtatcctcgcaatggtcgaacgcgccatgccgggcaagcttttgaacgtttttgcccactcagcaggtggcggtaaattacttgccgtaatgcaattcaaaaaagccgcagctgtcgacgaaggacgtcagcgtcaggccgcaattctggcgttcgctgcattcccggaactcaaacacgtcatacttgttgatgaagatgtggatatttttgacagtgacgatgtgatgtgggctatgcaaacgcgttatcaaggtgatgtggacacagtgtttattccaggtgtgcgttgccacccactcgatccttctcaagcggcgggttacagcccctcaatcacccaggatggtatgtcttgtaaaactattttcgactgtaccgtgcctttccatcttaaggaacactttgagcgttctcgctttaaagaagtggatgtgaagcgtttcctgcctgatttccagtaa

SEQ ID NO: 232432 - DNA, 879 bp, Klebsiella pneumoniae
atggatcttaaacgcataaaatatttttgtaaggtggctgaacatggttccataagcgaagccgcacgacagttgaatatggcacaaccgccattaagtaaacgtattcaggaacttgaagatgaaattggcgcaccattacttatccgcaatagtaatggagtgaatataactgcggcaggaaatttcttttaccaacgcgcctgtcaacttctcattcagttagaagattcgatacgtgaaactgtaaaaattgcacatcgagaaaattcctttttacgtataggacttacacatctgtatcaaaattatttcaggcctttaatacttgaattatatagacgtaatcctaaaattgagttgcgaattactgtttctgattccagcacccttgaggcatcacttcatagcggtctattagatgtggcctttattcaaaaaccaaataaaaatgatgcatacacatgctatgattttacacccgttcctacagtcgctgttataaacaaaggtcttataccctctttacctaccgaaaatctccagttaaccgacttttcaacattccctttggttttgttacgtcggtatgacggtgtgggagtttatgagaaatttatcgattcaatatcaaaaaatggcacatttcctaacgtcataatgcatatcactcaacccaatgctatcatagactgtcttgagtccggactggaagccatttctcttcttccagaatcagaagtcaatgccaatcgtttacaagcatgtcaagtgatccaacttggacagcatccaacgtttttttttccaacaatggttaaattgacaacaaccgcagacattaaagaaatcaacgatatcttacttgagggctactaa

SEQ ID NO: 232433 - DNA, 5340 bp, Klebsiella pneumoniae
atggaaaaactaactcatccgctggctcgtggggccagctggttgttgatatacctcacagccgttcagcctttacatcctgctgttgcggcgggtatcagcgccgcgaatggtaacacccaggtcgtggttaaaaccggaaatgtaccggttgtgaacattgccacacccaacgcagcaggtatatcgcataacgcctaccaggattttaatgttggaacacaaggcgccgtattaaataacgccacccagggcggaaaaacccagcttggcgttaccattgacaacggtaacgccagattaaaaggcaaaccggccgagcttatcatcaacgaggtaaccagcggtaatcgttcggagttaaaaggcaaactggaagtttttggcaataaagctggcgtaatgatagccaacccgaacggtatcatctgtaacggatgcgggtttatcaatacgccttcggttaccctgaccaccggcaagccgcagtttgataaacaaggggctctggatgcattagccgttaagaaaggctcggtgattatcggcagcaacggctttgacggaaacagcgcggagtttgttgatattatcagccgggcaactgagctgaacggtaaaattaacgctaaaacgcttacgctaacccagggggcaaacagagtcagcttcaaggatggctcggtaaaccccattgctggcgagggagcaaagcctcagcttgctgtcgatactaaggcgttgggcggaatgtatgccggaaaaatccgcctggttgccactgagaacggtgtcggggtcaacatgaataatatcacctctactcagcgggatatttccctgacgaccgccggaaaaataaccctcagcaacgttaaagcgcaaacagacctcaatgtcagcgggcaggagatcgtcacacctgcgggcagcagtgtgcgtgcagagcgtgatatgacactggcggccaccaccgtggacaaccgcagcaatagctccgcccacagggatatgcgggtttttgcctccacggtgcgtaacaccggcgagcgggcggcactgcacagcaacaacaatctgtggatacagaaggatgcccagggcaacaaagcgactctggtggagaaccgctctgccaggatccagaccaatagcggcgacctggtgatacgaaccaataaactcagcaatgtgcgcgatgttttaaccatagtgactcagtctgaagcagtagataatgaaggcatgagaatttatggcgtactttttaatgcgcataaaaatggtgatataaaaaaccgacaagacctttatcaggaggattatgcgaagcgagaaaaatggatgttgccttgcgatacggttgaagattgcacatacgtcacccgcaatatcgatcgatggataccagatgaacgtactcgtacctttgttaaaatgagtacgcctgaggcaattattgactcaggtaaaaacagcttcattaatgctgatttgttactgagcgatgccagtatacttaaagccaaggatgacatcatcctgacggggaaaacgtttgtttccagaaaccatcctgtagggatcaaagaacgattcaataaattcattccggatactgaagcctataagcaatatgataagctgggctggccttatcctccgatgagctatcttgatagtggtgaaaaaggatatagctggagcccgcaaagtcatttagccagtaaagtcattgctggcggaaattttgtggctgacttttctgatcgtattgaaagtaatgaaccctatgatacctgggtgcagcattccggagtgatgtcacgcccggataccattacggcgaaaaacattttcttacatgcaggacaaattatcaccaccgatgtgatgaaagccgccggagatatcacccttcagtcagaaaaaggtctaaagatcgcactggcactattaacggccggaaaggaactttctgtagtggcgggtggaatggtggagtcctggcaaagtgagcttaagggtcagaatatcactctcgtcagccgcaatggagacgtgaattcgcatactagtgaacaaccaaactatttccatgcagatggtgtgcgttggctagggagtattgaagccagtcgtgatttttcaatttctgcgggtgggaatattctgctgagaaatacgcgccttccggttcagagtcagaatatttctctggttgcgaatggtgatatcaccctggataaaaatgaagcgatgctgggccatgaacagccaggcgtccttctgaccctggcccgcaaacaggaactgtttaaccggatgctgcccggagagccgctgcgtgcttccggggatattacgctcagcggtaagcatctgaacctcaatggcgcaagtcttgatgccgggggcaatatcagtcttacgtcagccgcaaatacggacctgaatatgcggagattcagcgaccgttacagcgtctttttcccggccaaccggatacccgagttacgcagccatctgaaagccggaggtaacctgctgatcagttcagcggcggatatcggcctgcagggagcagatatttcggccgggaaaacggcgaccctccaggcagggagacttatctggctgggagcctacggctatggtgtgacggacagcggcaatgacaacaaccgggatgagttgaatgtcccgacccgtcttcagggcgtgaagggcatcactctggcgtcaaacggcgttattcaggctaacggcagtaccctgacatcggatggtaatatcacactaacctccggcggaaatatgcaatttcagtccgcacggggaaccgtttatcgtgaatcgggtaacagctggacggaaaccgtcagccagaccggagtgacgctgaatgcgggcggcgccctgacggtgatttctggcggcagtatccttttccaggcatcgcgcctgctggcgaaaggcgcgatggacgtggcggcgaaaggcggctggctgtatgcccaggcgatggaagagttcagccattacgaacgtgaaaccacgaagcgaaaatggtggggacagaaaaccaccgttaaacagacgaagcacacgaccaccaaccgggtgaccgagtttactgccgggggcaacctcagcctcctgagccgggatgacagctcgtatgaagccagtaaaatcgaggcgggggaaaatgcgacgctgaccagcaccaacgggaaagttaatttcctggcggtgaagaatacgaccttcgagcagaccgtcagcacctcgaaaggcttttatattaaacaggcaaataagggctacagcgaagggaaatgggtcctgccttccgtttacgccggcggtatgctgacggtggatgcggcaggcggtatcagtgctgatgttaaaaccaaaaatggtcaggcgctgcagggagccattaccgcactcggcgttcagccgggtaccgaatggctaaaagggttaaacacccgcaatgatgtacagtggaacgtggtcaaggatgcttacgacagctggaactataaaagccagagcctgaatccggccgttgccgcggtgattgcgatagcggcggctgcagtgactgccggaacggggctcgcagctttggctggaagcggcgcgattacggcaaccggcgtcacaggcgcaacagcttccgctgcagtgtatggctcagcctatgcaggtatgacatccctggtttcccaggctgccgtcgcgctggttgaaaaccagggtaatctgtcaaaaaccctgtcggcactgggaagcagcagttcggtcaaatcgctggccacctccatggctataggcggggcgctggccggattcgatgaggtgatgaacgtcagtgtgtcgccggacaaggcgcgtctgccggctctgacaaaggatgaggggtggagcaaggttgtccagcgtgtggccgggcagtcggttatcagctccagcctgaacaccggcatcaatggcggcagctttaaggacaatctggtcaatgcgctgttatcaaatattggtaatcaggttcaggccgaaggcgcagggctgattggggacaacggtgaagtgttaggcgtggccggaaaatcggtcagccatgcggtccttgctggcatcagcgcggaaatcggacgaggtgatggtaaaggcgcggccaccggcgcactggcagcggaactggccgggatcatcatgcaaagctcgttgttcgaacccgcaaatctaaatgaacaagagcgccagttgcggcgtctgcaggaagcgctaaacggtaatgaggcaaaagagcagacggcccgtgttattggcgcgctgaccggggcgctgaccacacattcgcccgaaagtgcgtatagcggagcagacagcgcgcaaaatgtttaccgttacaatatgacggagcatatgctacaacaatatgctctggataatcagcgggatattcttgcggcagataaaggggacaaggaagcagccaaacgcgttcaggcccggcgagaagctgcgattatcgtggctgctgccagcggtggaggtatggcgctgaccgcaggtggcatgactctggttggtgcggcacccgagctggttctggcagcaagactggttatcgccggttgtaaaacaaatcctgcgctctgcctgaatcaggcgggtatttatgcggctgatattgtggcaccagaggccatcattggtacaggcgctgtaacgaccggcagtacattgattctgggtaaaaccgaagccagcttgaagaagctttcacagcagttggtgaaggcctacgatgaactgaatataacaaaaagactaaatattcagcctgttgccggttttattaaaggcgaaacgtctgctggtgccggtttgtcaacgaaaacggcagattatgtccgcgatattcagaaaaccaatactgaccagttggttaaagtgtttgatccaaaacagagtagcgataagctcaatgtgttcgggaaggagtttgcgcaggtgttgggtgacgggggaggtaataagtacggaacgaccaaggtctttgcgacagagaaactttccgaccgagatatcattgattatgcgcaatctttaacggggggagcgccatttaaagaagtcacgactcctttaggtacagtttatttttcaaaaaaagatggtgtaacaataagcttgcgtgactattccgccagcgaagaaaaaacaaatgctcgctggactatagaaattttaggtaataaagacttgcaagccttacagggcaaagttaagaaaaaagttgaaatcaagtttcggtaa

SEQ ID NO: 232434 - DNA, 1182 bp, Klebsiella pneumoniae
atgatttaccaatgttattcatgtaataagacatctttcgaaattatatgcccgtggtgttcaggtaccataccaataacatcctcaccctggggcagcagaagctcatctgctaaatcatctgatttacaagagatgattcccctggatccatccttctacccggagtttcagtaccagtcaaagggtatgttaaaagatttatttgggaaaaagaaagagcaatcgcaactaaaccaattgcttgaaaatgttctggaaaagtactctaaatttaaagatccttattttacaaacttcatatatacatccaggttttctaacaatcaaactaccgaagttgagtattcagaatataatggagtttattcagatgccagattgttcagagaagtgcttgtacgaaaaggttttagcgaactagaacaattgcccatcttgttagataagctactactcacaacatcttttaacgctctttattatggttttgctaaagaggtcaaaaggcatattaaaccaacagttagcgaatcgtttaaatcatggatagaagaagccgggacaacctttcgagcagatctttctttgttcttgttccacctttgggataataaatttactttttcagaaatagaattcaatgataatgcaaaaaataccccaggattaccattggtttcatttgaaaatattaaaaagtatttatctatatgcgagggtatttattttgatattctagtggaaagattggctacgcgccttgaacatttcaatccgagtaagtttgtaactatgtatcttatcgatgcaatggatggataccagtttgaaaatttcctcgtcgaaatattccaaactctggggtacgacgttaaggaaactaagaaaactcaggaccaaggcgcggatttatttgttacacgatttggtaaaaatatggtcattcaggcaaagaattattctggttctgtaggtaattcggctgtgcagcaagcgatctccgctaaagcattttatggttgtgatgaagcgatggtggtcactaactcttattataccaagtcagcaatggaattagctgagtctgcgcgagttcgtttgatcgacaggaatgaactgcaaaaatatctggatgattacaatcaaaaaataattgaggactttcaatcaaatccatag

SEQ ID NO: 232435 - DNA, 1767 bp, Klebsiella pneumoniae
ttgaaaaagcaacataccccattgagacgtcgatttttaaaaaaaatggcattaattactgcggggtgttttgcgctgaagaatggcgaagttaacgcagtaactgaaaataaaaaaagtgctcacagtagtgattttgcaatatttataaaagatttgctttcaaaaaaaacaaattatattggtgaggttatttgcgtaactaattacaatgttaataaagatattcttgaaagcaatatttcattattccgaagcctacctcctaaagcaattacaccggatgatataatttacattgaaggtgccaattgtatttgggggcgtgttttcgatagttttttaaatgtggagtggtttggtgcaattggtgatggtgtcactgatgatactaaatctattgagacagctaataattatgcgcataaatatgagcttccccttcactttccaaccggcaaaaaatatatagtcaatggaagcttcgagctggatgttgctaagacaagttggcatggcggggataattctatattgcattggtcacaatcacccagtcagtttgctttacgggtctttagtagtcgtagtacttattcacatactcatgtcaataataaacttgcattatctaacctcacttttttaggaggaggaattcgtaatttatacgatgcaatcgccatttctttaggcggtaatgaagaatcctcttcgctcttttcattaaaaaatatcaatgtgcagggttgggatataaatttattttttaatgacaactcctggcgtataaaaattgaagattcattgtttttatgggggcgaatactatcaaaacccaatgcaaagaactctggtgaatgtatgtacttttcaaattgcatgttcgcagataattttagtacaacagaattatataccggtgactggcactacaatgcatgttctatagataatcatgaagttaaagtttttggagatgcttgtgtttacttcgataatggtcatattgaaaatccaggtagaaagaataataaatttgtagctgttggaatttattcgaaagatgcttctgcttcggtcacaaattcccgtttgattatgagcaaaacaccaaaattgataactacgccagtattttatgtggccgatgaaaataaatcgttaggtttatatgttaacaatttgagatgtgatcaaaacacaaatttcgatccatcagctactgatgctaaaggaatctttcttgtcggcggtgatggcaaggttgtaatggataatatttttataaatatagttaattcaagctttatagcactctctaaaaatattaatactgtattagtaaatcaactttttgaaaatgatttaaatggatggagtattactggagatgctactgttcaaagcaatgtctgccatgtgagcgagcaatgtttacttttgacaaataaagcaaaaattgaacaaaaggttatggttcgtggcagagaaatcattacaggtggggtctgggttaaagcacctaatgaagatacgattgttcgcatcatgattagttttgtagacgctgatggaaatcttaagaaaggcaaaaattttgtctttcaaaaaaaaggaaaatatgattggaaatggatcaggatcggcgctatagctcctgcagatgattgcttttgcattttctcattttcctctttcgctctagctgaaactaaaacttatgcatattttgatgggctcgttattaacaaggctaacaaataa

SEQ ID NO: 232436 - DNA, 1146 bp, Klebsiella pneumoniae
atgaatatacttttaattaatacattatatttcccatacaaggtaggcggagcagaagtatcagtaagattgcttgccgaggggcttgtaaaatctgggcatattgtgacagtattatctattcatgagggcaaagatttaaaaatagatatgataaatggtgttacagtatattacattccatttgctaatttttactggcagttttcaaattcaaaccacaatgcggttaaacgcctattttggcatttagtagataattacaacccattcttgaagaaaacaataaaaaaaataataaaggaaataaatcctgatatagtacatacaaataatctgagtgggatttctgtagctgtttgggacatagcagagaaaaatggatgtaaaattgtacatacatcacgagattattatcttttacatccaaactgcaaaatgtataaaaataactgtaatatgacggggcatgaatcgtcagttaagctctggtcattctttaaaaagattaagagtaaaaaagtagatttttatgttggcattagtgattatattagaaacaaacatatagatgcgggtttttttgataaagataaagctataacaatatataatgcagtcgataataaggatatgtcatataacagcacggcaaacgagggtgccagaaatgttgggtttatcgggcgtttaacaaaagaaaaaggattcgatatcttttgtcgtatggccgaaaagtataataatcaaaatttcatcgcagctggtgaatttgagtataataaagatgcagaagaactaaaagaattagcatcgaaaaataacattaaactgttaggacattgccctgtaacagagttcatgaaaatggtagatttaattgtccttcctattaaatggcaagagccttttggtcgcgtagttttagagtctgttttctcaggtaaaataatacttacgaataaggtgggggggataactgagcttgcttcgatgctccctaatatctattttttagaagatatccaagatttgaatgatgtgccgcagtataaacaaatacccaaccaagcaattgataaattcaattcaggatctataacgcgtgaatatgaaaaaatttttgaaggattattaaatgggtaa

SEQ ID NO: 232437 - DNA, 2169 bp, Klebsiella pneumoniae
atgacttcagttatatccaaaaaaacgaatgttacagagtcggaagatatcgatttagctaggatcgtcggggagtttatcgatcatagaaagctgatattaagtgtaacatcaatatgtactatgttagccatagtctatgcattatttgctacgccgatatatcaagcaaattctcttcttcaaattgaacaaaaacaaggtaatgcgttactagatagtttaagtcaagtattgcctaatacacagccacaatccgcgccagaaatagcgttattacaatcaaggatgattttaggtaagactgttgatgatctcaatcttcaggcagaaatagagcaacagtacttcccgatatttgggaagggatgggctcgattgatgggcaataagccagggaaaatagcaatttctcatatttatttaacaaagaaaaataacaatgaagctccagaaattgaaattaaaataatagacaataaaaattatttaatttcaggtgatgactttcaaataaaggcaaaaactggagagttgattgatagtaatggcgttacattattaattgattcgattgatgcagagcctgacacaaaatttcaaataacatatttatcaaaattaaaggcgataaataatctactaaaaaatttctctgttgctgatcaaggacgagacacagggatactaaacctaaccttgactggtgacgatccagaaaatattgctaaaatattagatagtataagcaataactatttaactcaaaatattgaaaggcaagctgcacaagatgctaaaagtttagagtttctgaatgttcagcttcctaaggttcgctctgatctagatttagcagaaaataaattaaatgagtatcgcagaacaaaagatactgttgacttgtcgatggaagctaaatctgtcttagatcaaatagtcaatgtcgatagtcaattaaatgaacttactttcagagaggctgagatttcacaattatatactaaagctcatccaacctataaggcgttgatagaaaaaagagaaactcttactcaagaaaaaaatcggttgaataaacgtgtttctagcatgcctactactcaacaagaggttttacgtttaagtcgtgatgttgagtctggtcgggctgtctatatgatgcttcttaatcgtcagcaagaattaaatattgctaaatcaagtgcaataggtaatgtcagaattattgaccatgcagtaactgatcctaaacccgtgagacctggttctatactagtggttgtgattggctttgtaatagggttggttttctcttctgctattgttattttgcgtatatttttgagacgaggcattgaatcgcctgagcaactggaagaacttgggataaatgtttatgctagcattccaatttcagaatggatggctaaggcgaatattaacgaaaataaaaataagaataaaaataatcaaaaatatagtttcttagctttagataacccagcagatctagccatcgaagctatcaggagtttaagaactagcctacattttgcaatgctggaagcaaggaataacatccttatgatatctggcgcaagtccttccgcaggtaaaagttttgttagtagcaacctatcggctgtagtcgttcaaggtggaaagcgtgttcttttcatcgactgtgatatgcgaaaagggtatttacataaggtttttaatgtttccaatgatattggaatgtcggatatattatctggaaaaaatcaattccgtagcgcagtgaaacatttagaacctgaaggattccatttcataccgcgtgggcaagtaccgcctaaccctgcggaactattaatgagtaaacgatgcggtgaatttctcgactgggcatctaaagaatatgatcttattgtaattgacacgcctccaattcttgctgtaactgatgctgctatattgggtcgttacgtcgggacaacattaattgtagccagatttgaggcaaatacggctaaagaaattgacgtaagtatcaagaaattcgaacaaagtggtgtacatgttaagggttgcatattgaatggtgtagttaagaaagctagtaattattacggctatggttattcttcatatggatattcatataaagacgacactaaatag

SEQ ID NO: 232438 - DNA, 255 bp, Klebsiella pneumoniae
atggaaactcatataggaatgaattatgtaattaacaatgaatggatctattacctggagcctgcttattatagtcattttaacgactttcatgccagcaatgataaaaactatcactgggaagttgataatgtttttatgtacacggggttcaagcatgcacagccatatttttcggcagcctatatggatcgtgtaacggcgaagcatgacgataactatcgaattcgaattggtttacgctataatttctga

SEQ ID NO: 232439 - DNA, 2058 bp, Klebsiella pneumoniae
atgagttttttagagtttaaagaagaaggcttttatatttccttttcgctgaatgaagaaggaattatctatattgaccaattttccactacggatcatggtgagtcacacggtgagtttccattgattcaggttcatgccagcggatataatcaaaatgatcatcatgcacgtaaacatactggctgcgaaccagggtcatctttacgctataagacgcacctgtgttacgataatgaccatggaaagaaacttgaagtcgcgctaaccggggacgtcatatctgcatattggcatctccagcattttcaacacctgaaaacagccagaatatggtgtgaaattcataatcacagccaggaatctattgggcttgaatatgtcagctccctgacactgtttgccattgatagccttccgtgggaaaagaacagcgttcttcatcttccacataataactggtatggcgaagcgcaatggaagagggcgacacttcctgagcttgggcttgataaggtaaaccgcttctctttggatagattttccatagaaaataccgggacctggtcaagcatcggctacctgccttgcgctgcttttgaagatttagccacaggtaccactttgttatggcagattgagcataatggctcatggcagtgggagattggcgactttcgtgagcatctttacttacaaatcagcggtcctactgaaaacgaaaatcactggtggaaacagctcatgcctggtgaaacgttcacctctgtcccggtagcagtatcgctggttcagggtggactgcaagaggcgctacaggaaatcacccgttaccgccgccggatccttcggccttctcaggataatattgttttaccggtcatttttaatgattatatgaactgtctctttggtgatcctacgacagaaaaactgttgccgctcatcgatattgcagcagttgcaggttgcgaatacttctgtatcgactgcggctggtattcagacggtgaatggtgggatggtgtcggagaatggcaaccttcagctacgcgctttccacgcgggataagagagcccatcgattatattgctgcgaaaggcatgaaaccaggcctgtggctggagcttgaggtcataggtattacctgccctctggcacagaaacttcctgatgaatgctttttccagcgccatggtaaacgagttattgaccatcagcgttaccagcttgatttccgccatcccctggttcaggaacacgccgatcgggttattgcccggttggttgatgaatacggtattagctatataaaaatggattacaacatcaatgcaggtagtggtaccgactatcaggccgacagcacaggtgacggactgttgcagcataaccgcgcctacctttcctggctgattaaaacaatgaatcgttacccacacctggtgatagaaaactgcggaagcggtggactcaggatggattatgctttgctgcaacatcacagcatccagtctgttaccgatcaaacagactatcgtttaatggctgttatcgcatcgtctgctgcttccgctgttacgccggaacaggctgctatctggtcttatccgctgcgtgagggtgaccgggaagaagtagtgatgaatatgattaattcgatgttattacgcatacaccaaagtggccatcttgcagagcttagcgaggaacgctttttactggttaaagaaggtatcgcactatataaaaccttccgcgaaaagatcccccacatgacacctttctggccgttgggaatgccatcaatgtcatcgccatggcttgccttcgggctttacgatgataatgatatatggcttgcggtttggcgtatggacagcgctgaagatactatttcactccctctacccattcctgaagcagaatacttaaaagtgaattacgcttaccctcaatttgataaaagtgaatacgcttccattcgggaaaataacagaatggaaataacacttcataaaaagttcacggcgaggctattacactgccaccattaa

SEQ ID NO: 232440 - DNA, 1404 bp, Klebsiella pneumoniae
atgcaattagatagagtcatgcctgcctcggtatcaagaggtaaaaaaaagccacaaataatctggatatgtcttctggcagcacttgctggtttactatttgggttagatatcggtgtcatctcaggcgcattacccctcatcgccaaagaatacaatcttatcgatagtcagcaggaatggattgtcagttcaatgatggtaggtgctgctgcagccacattatgcagcggcgttctggcatatcgactgggccgcaaatatgcgttactgattgctgcagcctcctttagcttgggagcaatattttgcacgtttgctactaacgtcgagatgttgattattggtcggcttattctcggtgtcggactcggcgtcgcttcctacgccacaccactttatctctctgaaattacgcccaagaatattcggggagcaatgatttctgcctatcagttgatgattgccctgggaattttaatcgtattcctcaccaatactgctttcagctatagcggcaactggcgaggaatgctgctcgtcgtggcaataccttccctgatttttctgtttggcgcattgtttttaccccgcagcccacgctggctcatgatgcatggtagggaagaagccgcttatgaagtgcttatgcgattacgcagtagtcatgcagaggtagaaagtgaattacgggaaataaaagagcaactcaggataaagcaacagggatggcatttattcctggaaaacaaaaattttcgccgcactgttggtttaggcattgttttgcaaatcatgcaacaattctctggcgtcaacgttatgatgtattacgccccacgtattttccatgaaattggttttacttccacatcagaccaaatgtggggcactgtcatcgtaggtgttgttatgaccattgcgacatttattgccgttggtttcgtggatagatggggtcgcaagcccatgttgtatataggttttctgaccatgagtctcgcaatgggggtggtcggggcactactcggtggtgaagcattatccgtgccaggaaaaattgtcactgttgccatgctgctgatatttatcgttggtttttcaatgtccgctggcccgctcatttggctgttgtgttcagaaattcaaccactcaaagggcgtgagtttggtatcacttgctcgacttttacatgccatatagccggaatgattgtcagtgcgacgttcctgtcacttctgaattcattaggaagcgctcacacattttatttatatgcgttactgaacgtcgtagccattgttattattaatcgcttcgttcctgaaacgaaaaatatatctctggaacagattgaacagaatctgatggctggtaataaattacgcaatattggacgatga

SEQ ID NO: 232441 - DNA, 831 bp, Klebsiella pneumoniae
gtgggcgttgtcgccttgcttctacctgtagcgaaggacggtaacgtgcatactgcttcgttctttatgcgtattgccagaggtcttcaggccagcctaaaagacagtggtattgatcctgttattcatgtcactaccgatcggcaaggtgaacatcagttgttacgtaagattgttgaacaaaaccgcgcagatgccgtcattctcactgatacgcgaatcttcgatgaacgtattctgctactaaacgacctccagttcccgttcgttacaatggggcagagtcgagcaatgaacgggctgttcaactgggtcgatttttatcatgaagatatgggacgtcagtgcgttcgttttgctctacgtcagggcgcaaagcgtatcgctattgctacgctgggtcctgatagtatgcacggccaacagtttctggatggctgtttacatgaaatgcgcgaatgtggactaacaccgggtaaaggattaattttctttggaacagtcgatgaattgtctggggagaaagctgcgcggcaattcatgcagcaagaaataaagccggactttattattttcatcaatgactttttattgatgggggctagccattatctgcgatcgcttgatgtgggtagccttgatgaccagtccatgatgtgtgccactgcgagcagtgatttttcttcgcggataatgtcttcaacctgtctttttactgtggatcatgaagaggttggaagatgccttggagaagccgtgcttagggtagtagctggcgacagggagcaccgttcggtcctcataaatctccctgctaatttggtgaattaa

SEQ ID NO: 232442 - DNA, 870 bp, Klebsiella pneumoniae
atggatgtattcaaaatttctgttgatacgcagcaggttcacaagattacccaagagaacgttgatcaggttacgaaaaaacaggccccctggtatcagccaattaatggtcaccagggatggtttgcggtttgtccggcctgtgacaacccgatccagattattggaatgcttgagcgcgatgcgccgtatgggaaacacttcttcccgactgctggtgccgtggctgtaccgttgaaaggtcgtgttgataaggaagaatatgagtggtgcccatatgccagcaagaataagcatctgacgaaagatgatcggcgagcggcgggtagtgaacttgctgtaatgataaaacaaaccttaattgagcaatttgaccgggttatttacctgttagaaaagggaactggaatgaggatttcatttgccctggcgaaacagatgcttgaagaataccgcgcggctgaaggctggcgctacaggggagcaacacggcagaatataccttgggtatttgcatacatgatgcaggctaagcggttgagaggacggatatttttcgctgcaaaatttaccgaagaactcttaaccagacgaccagatttaacctggaatgccaatgggcaaattgatattaaggacgataaaaaattctgcgatttgagttttagtttcatcaggcatcgtcgccatgttgctcaacatacgttgtctgaaagtattgagttcaatattgcgaactcaaaacaggaaacggtatgcaaaaaggaaattatttttgaacacgactatttcctgaaactgataaacagtaaaaatgaagctaacaggaaaatgaaccttgttgatcttgccagaagcgtgctggcctga

SEQ ID NO: 232443 - DNA, 990 bp, Klebsiella pneumoniae
atgagatggctactgtttctgctgttcaccttcagcacttttggcgcctgggcagggaattgcgacctgaacaccagttatatccagaaagggatcgaaggttacggtatctatattttcaaacccgtgaccctctccggcacactggcgttacgcgagggcacctttcccaatgatgactggctgtttgtttgtcagtcattagagaatgtcgttattaccctgacgggcgaagcgcagcacagcaccgagtataattttctggtgggtaatgaaaaatataaaattaaattcgacctgtcgccgcataatttgtctggcaaagattttaccaccaatgcccactataaattgtcggatattttcaccgataccgcctcgattgactatgccatcagtcagggcgaggtcgcgggcaggccggtgatcactcctggacagccgtttacggtaagttataagcttaatctgaggtactgtcagaacaaggacaaaacgtgcactgacatccccatcacctatatttaccatattattctgcagatcaacgtaatgacctgtggctttgataacccgacgacggaaattaatatgggtgattataatttcatcgatattaagcagggtaccgtagattaccgcccggagatgatctatatcgattgccggcagggggactccggtatgctgcagctgacgccgggcaaaattgagtacaccttccggagcgcatcgcttctgaaaaacggcctggtgttagctaacgatgaagagttgtccgcgaccggggccggtgaggttggattccgtattcaggatgccagcggggcggatatccagtatgacaatggctacctgtacgaaacgcctcaggtcgccacccaggggaaaaatcccatcattctcaacatcaagcccatgaaatatggtgagaatatccgtaccggaacaatcaagagccgggtcattatcgtggtgaataacaactaa

SEQ ID NO: 232444 - DNA, 2481 bp, Klebsiella pneumoniae
atgttaaggatgacatcactggccctggcgattattgcatcattatttgctgaagccctggcagcagaagagacctttgataccaactttatgttcggaggaatgaaaggggtcaaagacagtcactatcagtttacagatgacgcgctggttgcgggcgaatataacctggatgtatatgtcaataataagtggcgtgggaagtatgacctgacggtgaaggagcagccaggggaaagctgcctgtcattatcccagctgcagcagctcggtattaagatcgagggactgaacaaaaaggctcaggcgcaatgcatcacgttgcgccaggcggtgcagggtggaaaataccattttgatatctccaccctgaccctcgagctcagcgttccgcaggcgtttgttgatgaactggaggagggctatgcttccccggaaagctgggaccgcggggttaacgccttctacacgtcctattatgccagtcagtattacagcgattataaaagcgccgggaataccaaaagcagctttgcccgctttaccagcggcttaaatctattgggatggcaactgcactctgacgccagctataacaacaatgattctggttcgggtgaatggaagagtaacacgctctatctggaacgaggcttcggcgagatagaaagtacgtttcgcgccggggatatgtacacgtcaggggatattttcgacaccgtgcgttttcgcggggtgcgcttatatcgcgacatgcagatgttgcccaactccaggcgcaactttacgccgatagtccaggggattgcgcaaagcaatgccctggtgaccattgagcaaaatggtttcgtcatttatcagaaagaggtgccgcccggtccctttgcgattgctgatttacagatggccggcggcggggccgaccttgacgtgagcatcaaggaagcggacgggacggtcacccgctatctggtgcccttttcttctgtacccaatatgctgcaggctggcgtctcgaaatacgatcttgctgccgggcgcagccatatcgaaggggccgatcggcaggctgattttatccagggtagctatctgtatggtgtgaataatctgctcacgctgtacggcggttcgatgctgtccaatcactattcggcttttaccctcgggacgggctggaatacctggctcggcgcgatctctgtcgacgccactcagtcgcatagcgaacaggatgatggcacctacgatggtcaaagctatcaggtggcctacagtaaattcctgaccccaacccagacccgttttggcctggcggcctaccgctattcgagccgggatttccgcacctttaacgatcacgtgtgggcgaagaacagaactcattatcaccgtgacgaaaacgatatctatgatattgccgattattatcaatatgatttcggtagaaaaaactcgctgtcggtcaatttaagccaggcgttgccggcgggctatggcgcgatctccctgagcgccctgtggcgcgactactggggaaaaagcggcagtaataaagattatcagctggggtactcaaacacctggcagcggctgacctatacgctatcggccagccagacctatgacgattatcaccaccaggataagcggtttaacctgtatttctctattccgttcagctggggggacgatctgaccacgccgcgccgtcggttgaatctgtcgaactccaccacctttgatgacagtggctttgcctccaataacaccggactcaacggcattgccggctcccgcgatcagttcagctacggggttaacctcagccatcagcagcaaaataatgaaaccgccgcgggggcgaatctcacctggaatgcgccgctggcgaccctgagcggcagctatagccagtcgtcaaactacacgcaggccagcgggagtctctccggtggcgtggtgctctggtccgggggcatcaatctggcgaatcgattatcagataccttcgcgattttgcaggcgccgggcctggagggggctcgggtgaatgggcagaaatatcgcaccactaacgggaaagggattgtgctctatgacaacctcacgccgttccgtgaaaacgcgctgatgctggatgtgtcggattcccacagcaccacggagctgaaaggcaatcggaaaatggtggccccgtatcggggggctgtggtggtcagccactttgataccgaccagcgtaagccgtggttgattcatgcccgacaagccgcgggcgagccgctgccgtttggttatgaaatcgaggataacctcgggcacaacgtcggggtcgtggggcagggcagcttattatatatccgcacggatacgattccgtcgacgctgaaagtggctgtcgataaagcaaaaaatcagtactgcacgatcacctttaagcaaaacattgatgaagcgcagacctacgtctgccggtaa

SEQ ID NO: 232445 - DNA, 684 bp, Klebsiella pneumoniae
atgaaaggattcattctgctgctactgacatttttcatcatccctgcgcaggcgggtattgtgatctatggaacgcgtgttatttatccggccgctaaaaatgaggtgatggtacagttaatgaatcgcggcgatcgcggcgccctggttcaggcgtggatcgacgacggtaatacatccattgctccggagaacattcgtgttccttttcttatctccccgccggtggtgcgcgtcagagccaataccggccagcagcttaaaattaaagcattagccaatacgttaccgcgaaaccaggaaagtttattttatctcaatgtcctcgatatcccacccaatgccagcgtgaatgatggtaaaaatgtggtgaagtttgcaatacaaaaccggatcaagctgttttatcgcccggaaggtgtcactggcgttacgcaggccagttttcatcatttagtcctgcagcaaaaaggcaaaaacttgttcctacaaaataacagtgctaactggatcactattcccgaaattaaaaccaataacgttaagggaaacagtaaagccattatgctggcaccattttctcagcaaattatcaccctcggcggcagtgtcgccagacagtacaaaataactcttattgatgattacggaaattatattagtgatagcatcagcgtaaaataa

SEQ ID NO: 232446 - DNA, 543 bp, Klebsiella pneumoniae
atgaagcgtttaactattgctgcagcagtactgtctacggtatttatgagcgccggcgcttttgcggaaactgaccagggcgaggttattatcaccgggcgcgttgtgggtacgacatgtcaatttcttgacgggaataactctacgaccattacgatgaaccaggtggggcaggaaagtcttgccggcctgagtgccggcgccacctataccggtattaaaaacagcaccacggtgccattaaaattaaaatgtaccggtaagccgccaaaaataagcctggcgcgtaaccagtttgatacgacttacccgaacattacgaaaaataccgtaacgggcggcgcatccggcgtcggctttgtggtgacggcaaataacgccgaactgaacgccgactcgctgatctcgctcaatggcgaacccgatgaaaatggtgtttataccattgatttttcagcacagtatgcgctggtggctcagggttcttccgtcacccagggcgatgtagagtcgaccgttacgctgaccgtggtaaccgagtga

SEQ ID NO: 232447 - DNA, 1116 bp, Klebsiella pneumoniae
ttggccatcttatcgactgttttccagcgtaagatggctgaatggaatgaccatatcctggtagacagtttctgcccgtacggtgaggcattttcagaaggaattattgtggcgactaaaatgtggatgatccgcggcgatggcggaaaattgtatgatgacttcagggacaaacaggttgttgcaatcggctggtcgcagctcgctccctatgtgaaaccgggatgctcaagagagcagttgtttacccggtatcaggagcttgagccacaaactaagccaggcacagttcgttccggtgcttcccaggtctggcgctttgtgaatgagatgcagaaaggtgactgggctatcacttattcaccttctaatcggacttatttgatagggaaaatcgcctcagattttgagtttcatgccgagtggcttgaagatggcatgggcattgcacgtaaagtgaagtggaacgcggaagagattaagcgcgatagtctgagtgatgcaaccagaaacacccttggctcaacgctgacggtttttcaggtgcctgattttgctgtgaatgaattagtgcagggcaaaaagcctgtctcagatgtcgtgccggaagtacctgtttcaggtgaagaggatgaggttgtttctaatcctctgcgcgacatggaaatgatcgcttttgaaggcatcaaggatcgtatcaaccgtctcgactgggatgagatgcagaatctggtcgcaggcgtgttacgcagcatgggatataaaacccaggtatcgcctgctggtgctgaccgtgggaaagatatcattgcttcccctgacggttttggcttcgaaaatccgcgtattatagttgaggtgaagcaccgacgggaacagatgagcagccagcaaatccgtagctttatcggtggccgtcataaagacgatcgcgggctgtatgtcagcaccggtggattcagcaaggatgcacgctatgaggccgatcgttctacaatcccgttgacgctatggacgctggacgatttggtacgtgcgttagtggaaaactatgagcaagtggatattgaaactaagctgttggtgccacttaagaaaacgtatttgcctgcatga

SEQ ID NO: 232448 - DNA, 3228 bp, Klebsiella pneumoniae
atgatcaccttcaaaaacgaagcgcaatttgagcaagcctttattgaagtactcaccaacaagggctgggaaccggagatactcaaaaacaaaaccgaagccgatttgctacaaaattgggcgtccattttgtttgaaaataatcgtcagcgggatcgcttaaacgatgtcccgcttaccgcgactgaaatgcagcaaattattgagcaaatcaaagagcttaaaaccccgctcaagctgaacggtttaattaatggtaaaaccgtggctattaagcgcgataacccagccgataccttgcatataggcaaagaagtcagcttaaaaatatacgatcgccaggaaatcgccgcaggacaaagccgttatcaaattgtacaacagccaaaatttgaacgtggcagtcctttacgtaacgacagacgaggtgatgtgctgctgctgattaacggtatgccagtgatccatgtcgagctaaagcgcagcggtattccggttagccaggccgtaaaccaaattgaaaagtacagtacagaaggtttatttaacggcctgttttcgctcatccaggtatttgtggccatggagccaaacgagaccaaatactttgccaaccccggactagacggcaagtttaaccccgattatcagtttaactgggccgattttaataacgaacccatgaactactggaaagacatcgcctctaccttgctttctattcctatggcgcatcagttgattggcttttataccgtcgccgacgataccgacggcgtgcttaaggtaatgcgcagttatcagtattacgccgccaatgcgatatcagacaaagtagccaaaaccaactggcaacagctgggtagcgctaataaccctgagcgtctcgggggttatgtgtggcatactaccggttcgggaaaaaccatgaccagttttaaatcggcgcagttaattgcccaatcgaaagatgccgataaagtgatttttttaatggacaggattgagctgggtacccaatctctgacggaatatcgcaattttgctagcgatggtgaaaccgttcaagctacagagaatactcatgtactcattaccaaattaaaaagcagtgcaacttccgatacgttaattgttagctccattcaaaaaatgagtaatatttttgaagaagctgataatgagggaacagcaacaaattcagctgatatagaaaagatccgagctaagcgcctggtatttattattgatgaagcacaccgctcgacgatgagtggaggcaaagaaaataagctaggcatgttggtaagcattaaaaaaacgttccctaaggcactcttttttggttttaccggcacgccaattcatgatgaaaataaaatcaatagcaatactaccgctgatgtatttggtaacgagttacatcgctatagcatagctgatggtatacgtgatggtaacgttttgggctttgatccttacaaagttcctacctttagagatagtgacctaaggaaagaagttgcattagaacaagccagggctgaatcggttgctgatgcgatggcggatccagcaaaaaagaaaaagtttaatcactttttaaatgacgtaccgatggcaggctataaagatggcactggaaaatatcacaaaggcattgaagactatatacctaaaagccaatatttaacggctacccaccaggaaaaagtcgtcagtgatattttagataaatgggatgtactcagccaaggcaataaattccacgcgattttagccacaaatagcatcgctgaagcgattgactattaccggcgtttaaaagcggccaaacctgagctaaaaatctcagccttgtttgacccaaatattgataacgacggtagtggtgaccgaggcccaacctttaaaggcgatgggctggatgaaattatgagtgactacaataagcgttatggccacgattttgattttgcccgccacgccgcttttaaaaaagatctagcggcacgccttgctcataaaaaaccttacgaacgcattcataccgagccttcaaaacaattagatttattgattgtagtagatcaaatgcttactggttttgattctaaatggcttaatactttgtatttagacaaggtaattaaataccaaaatataattcaagcgttctcacgtaccaatcgcttgtttggtcccgacaaaccccacggtatcatccgttattaccgctatccgcatacaatggagcagcacattaatgctgcagtaaaactctattccggcgataagcctatcggcttgtttgttgataagttagaaagcaatcttaaagccataaatgaattagtagctgacattaccgagctgtttgttaccgctggtgtggagaattttgaaaaactgccagacgatatagaagcctgtgcccaatttgccaagttgtttaatacctttagccagcacctggaagcggctaaagtacaaggcttccattgggaacagtcggtctattcctttactgaaaataatgcagaacatgaagtaacgctgtctatagacgaacaaacttacctgagtctagtcctgcgctataaagaattaacagccaaaggtgagcacgatggtgcaggtggtggcgatgtgccttttgatatcagtggttatttaactgaaatagataccggcaaaatcgatgccgactatatgaatagccgattcgataaatatttaaaagagctaaacaaacaccaggatcctgcaagcattgaatccacattaaatgaactgcacaagtcgtttgcaacgctcacccaaattgagcaaaaatacgccaaactcttcttgcacgacttgcagcgcggcgatgcgcagctagttggaggccatactttcagagactacatcaacatctacaaagataacgctgaaaatgcgcaaataaacgccgttgttaatgctcttggtttagataaagaactgctcatagcattaatggttgatagtgttaatgcgaaaaacctaaacgattttggtcgcttcgacgcattaaaagaatcggtagataaggcaaaagcaaaaatctattttgaaaaacaagatggcgtaagcatacctttatttaagttgaatatacgcattgaacagtttttaaaacagtttatttttgcacaaaaaaatgattttttaagtgacacagatattgttggtgatgtgatttga

SEQ ID NO: 232449 - DNA, 1275 bp, Klebsiella pneumoniae
atgagtatggataaaaaggtgcctgagattcggtttaatgactttggtgaggagtggaatggtagatgtttgggaagcctctgcctcattggtgatatagatcatcgcatgcctgaatctaaaacaacgggcattccctaccttatgacgggagacttctgcggcattaacggccttgattttaaaaatgccaagttaatatccattgaggattacgagctcttatcaaaaaaaataaaacctgaatatggcgatatattgtttgctcgttatgcttcagttggttctgtacgttatgtcgaaacgaaaattgattttctaatttcttactcctgtgcaattataaagacaaaaaatacctcttatggtaaatttttgttctattgctttcagacggataatactcaaaaaaaaatagagttagatataaatactggttcccaaagaaatattgggatcgattcgttaaaaaatctattcgtatttttaccgaagtcagaagagcaaaccgttatcggcaactacttccaaaagctcgatagcctaatcattcagcaccaacaaaagcatgacaaactcagcaatattaaaaaaagcatgctggacaaaatgttcccaaaacaaggcaaaactatcccagaaatccgctttaaaggatttagtggggagtgggaggagaagccgtttggagactgctttgttaacgtaccgaacaacacgctttctagagccaacttaaactacaaaactggattggccaaaaatattcactacggcgacgtactaattaaacttggtgaaattctggatgcaagtaatgagatcttaccatttattactaacgatgacgtggccaacaagctaaaacatgccaccttacgcgatggtgacgttatcattgctgatgcagccgaagatagtactgttggaaaatgcacggaattatttaatataaatgagcagttagttctttctggattgcacacgattgccgttagacctacattgccgtttgcttccaagtatcttggttactacttaaattcatcttcataccatgatcagcttttatcattgatgcaaggtacaaaagtattatcaatatcaaaaactgcaatacagaacacaaatgttgcatttccaaagagttcggaagaacaagccgcaataggaaattacttccagaaactcgatatgctaatcaatcaacaccaacaacaaatcaccaaactcaataacatcaagcaggcttgcttgagcaaaatgtttgtatag

SEQ ID NO: 232450 - DNA, 2592 bp, Klebsiella pneumoniae
gtgaataaacaacagcttgcggcgaaaatctgggaatctgccaaccagatgcggtctaaaattgaagccaacgaatacaaagactacatactcggctttatcttctacaagtacctaagtgaccaactggtgcagtttgtcaccaaacagggtatgacgcccgaagacatcaaaaccctcaacgaagaagacgccgacaccgttaaatacgtgcaagacaatctaggctactttatagcctacgataatctgttttctacatggattgatccaacatccgaatttgatgaatctaacgtacgtgatgcgctctcggcctttatccgtttgatttcgccaacgtacaaaaaactgtttgaaggcatttttactaccttagaaacaggattaagtaaactgggtgaaagtgctggcaaacgcaccaaagccatcagcgacttaatgcacctgatcaatagcattcccatgactggcaatctagggtatgacgtactgggttacatttacgaatacctgattgaaaaatttgccgccaatgccgggaaaaaagctggtgagttttacacgccacatgaagtttctgtactcatgtcgaacatcatcgcacatgagttgaagcacaaagataccattaaaatttacgaccctacttctggctcaggttcattgctaatcactatcggtgaggcattcgagaaatacgcgaaaaataaagactgcatcacctattacgcccaagagttaaaagccaacacgtacaacctgacccgtatgaacctcatcatgcgtggtattaaagccagcaacattaaaacccgtaatggtgacaccctggaagacgattggccgtattttgatgacagcgatcctcaaggctcatattacgccttacatgtcgatgccgtggtgtccaaccctccttactcacaaaactgggaccccagctttaaagacagcgatccgcgctattcacgttttggcctggcacctaaaaccaaagcggattttgcttttttgctgcacgatctctatcacctaaagcccgatggcattatggctatcgtgctacctcatggtgtcttgttccgtggtggtgaagaaggtgaaattcgcaagcaactcattgaacagaatcatattgatgccattattggtttaccggccaatatcttttttggcaccggcattcctacggtgattttgatactcaagcaaaaacgtcaaaataccgatgtattggtggtcgatgcctccaaacactttatgaaagaaggcaaaaacaacaaactgcaagtcagcgatattaagcgcattactgatgcggtgattaaccgcgaaagtatcgacaagtactcgaaactggtgagcaaacaaaccctacgcgacaatggttacaacctcaacataccgcgctatgtggattcctctgcgacggcagaaagctgggatttacacgccaccatgctcggcggtattcccaatagggaaattgccgagttagacaacttttggctggccttccctcaattgcgcagtactttgtttacgccaaaatcagctgcttacagtgagcttgcaattgataaacaggacgtcaacgaccgcattagcgggcacccgcaagtgttagagtttatcagcgcctacaaccaggcttttaatggctttgatgaccacctaaacaccgagttaatacaaaactggcaaagcgtaaagcgtaaccagcaagaagcagtattaagtgctgagctatttgcccgcttagcacctattgccttaatcgacaaataccaggcctaccaatgtctgaacaaccaatggcaaatcatcagcgctgatttagaaatgatgcaaaccgaaggctttgccgccaccaaacaagttgacccgaatattgtcatcaagaagaaagacggcaaagacaccgaagtacaagacggctggaaaggccacatactgccctttgatttagtgcaacaaacttatttaagtcatgacttaaaagctttggcagataaggaaacccgcctggcagaaatcgctagcgctctggaagaaattttagaatctctcaccgaagaagaaagagaacaagatacggtcaaagaaagcaaagacggttttgccaatgccgaagtcggcaaagccgctaaggctttcttgaaagaacaaaaagacagcaaagttaaatttgccgaagaaagctatgaagccaaaatcattcgcgcgaacaaattaatcgatgaagaaaaaaacctgaaaaaaatggtcaaagatgagaccgctgccctgcacttgaaaaccaaaacgaccatcgaaacattaactgatgagcaagtgaacaacctgctgcaccttaaatggattgcgccattaagtatggagctggctgccttgccaaacgcagtgattggccaacttacgagccaagtacaagctcttgctgataaatacgccatcacatattcgcaagtctcccgtgagataaaaatcaccgagcaagaactggcggaaatgatgggcgagctcactggcaatgagtttgatattcagggtttggctgaactcaccagcttattgaagggtgaataa

SEQ ID NO: 232451 - DNA, 1299 bp, Klebsiella pneumoniae
atgccaatcaaaagaccaccggtacttattccattttcccaactcaccggagcggatttggaaacccaccaacattacagccgcgttaccgacgataaaggtcgctatcttccgtttgacgaattctgccgccgcacatccagcggggaaaatgtctctatcgcctggacgcttacgcggcgcgcgcgtgactcagccatgcaacgcatccattatcgcaacgaagcaggcgatgaggctggctttgtccttacacctgacatcatgtcagtgtgtgaactggtggacaagcacgccacaaggctggcgctcaaagaacttacctccagactcaggggggcaggaaaagagttaacaacactaagtatggaagaacccatcacctcatcacagttggaaggcgctaacacaactacgcttgtcgcgcgggacatgctggaaagtggcagagccccccgtaccgaagatgaacacatgatcgctggtaatgcgcggttgatggccgaaataccggaacttatccaggagccattaacaccagacttaatccgtcgcttccatgccgttggcatggatggaattaatgacgagaaatatcgtcctggagaattccgcgacaccgatgatgtggtgattgcagattatgacggtaacattgttcatcaaccgccagccgccaccgacctgcaggtacgtctgcaaatggtgagtgacttcgtaaacgacacagaatcctacgttcaccctctggtaaaagcctgtgttcttcacttcatgatcgcccatgaacgtccttttcgagacggtaatgggcgaacaagccgtgggctattttactggtacatgctgaaatcagagtatgacgtgtttaagtacgtctctatcagccagctactgcatgcagccccggccaaatatgcccacagctaccagtacactgaaaccgatggtatagatctgacttactaccttgaatatcaggccagtattatccatcgggctatgacaaggctcttaaagcatgtagacaatctggtcgcccgcgcagcccgaattgaccattttttgtataaatcagggagcttatcgcggctgagcggacggcaagtcacactactcaacatcattctggcggagcctggtaagaaataccccgcagctggcgtagctgaggcgcttggcgtatcggataacactgcgcgtaatgacctccgcaccttagcgcgtgaaaatctcttaaccgagatatcagaaaacgaccagaaaacggtttataaggtatctcgggaactgaactaa

SEQ ID NO: 232452 - DNA, 171 bp, Klebsiella pneumoniae
atgctggtcgtatatttatgtataatattaattgtcatgaattatatgtcacgtgaatatttaggtgacgccgcgtcaatagaatttcattctctaatatatctgcataaagcaattgacggactgattgtcgtttataatggatatgggaataaatatgaagatgagtaa

SEQ ID NO: 232453 - DNA, 552 bp, Klebsiella pneumoniae
atgaagatgagagacagtggcacaaggggcattttactggccagccttgtgcagctctccctacctgcgctggcttatgagggcagcagcacagttaattttgctgtcaccggcacgattgaagcgccctcctgtgaggtggcggtggaaccgtcgaacagtatcgatttaggcaccgtctcctcgcagacgttcagcggaaacgccggttcgagcggcgccagcgttccggttaagctggtcttttcccgctgttctgccgatgcgtcggcggtgacgatctcgtttagcggagcaaaattcgatagcacctacgcctcggtttacaaaaacttccgcacagacagcgatggggccagcggcgtcggtatgcaactgctcactcttaccgatcagcagcctctcgggcccggagaccagtatctctatacctttggtgatagcgccgacgtccataccttcaatatggtggcgcgcatgttttcgccctatggccaggtgacccccgggatcgtcagctttaccgccacgtttgatgtggcctacaaataa

SEQ ID NO: 232454 - DNA, 270 bp, Klebsiella pneumoniae; identical to SEQ ID NO: 193493

SEQ ID NO: 232455 - DNA, 525 bp, Klebsiella pneumoniae
gtggccgatctgaccatagagatgttttcagcacaagccgtttacgatttttcgggcttcgactgcggcgaaccatctctgaatgatttcctgcaaaaccgcctggtacagcaacacaacgggcgtatattacgtggctacctgcttcttaccaaagatccggtgccgaaagttaagggtttttacacgctatccgggagctgttttgcaagacagacgctaccatcgaacacccagaagcggaaaatcccctacgcagatgcacccagcgttacgcttggccgtctggcaatagatatcagcctacagaaacaaggctacggggaggttctcgtaacgcacgcgttgaaggttgtttatcaggcttctcgcgcagtaggcatatacgctttgtttgtggatgcactaaaccaaagcgcaatgcagttctatcagaagtttggattcatccctttgacgggggcgaacaccaactcgcttttctaccccacgaaaagcattgaagagctgtttgaagcagagtaa

SEQ ID NO: 232456 - DNA, 207 bp, Klebsiella pneumoniae
atgcttctgctgttcatcgcgagctgcatgataagtggctgcgtgattaagacacagacttccggcgtgctgttttgcgatgcagcaaaccctatttatgtcagtaacgacgactttatgaccgaagagacggaacgcgagatcctcttccataacacgatgggggagcgattgtgcaactggcaggacaggcaagccttgaattaa

SEQ ID NO: 232457 - DNA, 1434 bp, Klebsiella pneumoniae
atggcaatgtacgaagttggcaccgttacaggtgcagcaaaccagacaaaggttactggtatttccaccaagtggtctgagactgcacttggtattcaagagggttcgattcttgtcatttatcgcaatggaagtgccgatctgtatgccatcaaatctgttaataatgacactcaactgactttgacgagaaacatcacaacagctttttctggtgcgaaatatggaattatcacatcagaaacagccagtacatcgtcttttgcgaaccaactagccagcgcattcaccctttggcgtaacgttgtccagggatggtctaccgcactgactggaagtggcgatattacgatgacagatcctctaacaggtgcatctgtgactgttcctgctgtttcaggaatggcgaaagcgtctgatcttgcggctctcagcaactcgctgaaagacgcagcgaaaacgagcgtcgcaaacacgttcacacagactcagacgttcagtaagggcgttacgttcagtgccaacattacggcttcaggccaaattttgcgaaaggatagtgccacgaagttcactgctattgatgccgggagtattgagctttctgctgctacgccattcattgactttcatcataacaattctacggctgactatacgcacaggatctatacagaagatgtggcgctatccattactccggggctacgtgtacgtggaggtactggtatgtatggtgcttgcactttgtacaactcagcttatagcgacggctttacatgccgtttatcatctgacggttcaccagcagtgggagatatcatcgccaccccgaggagcacgtggagattaaacacgcggggcgcggacgggaatggcgactctggggcgggaggtatctggtttgaggaacaggtcggaaccaaccatcgactggtcgtcatgcttcgcggttattcgcaggatgtccagtactggcagttcttacctggcggcaggatttacagtagccagaatgggaatgttcaatttcaagggacgtcagatgcgcggttaaagcatgacattgaacctactgacggtcagctgtctgttgatcgcattcgtcagcttgagttagtgacgtttatctacaacgatgatgagctgagcagagttcgcagagggattgtcgctcaacaggcacaggaagttgatcctcaatatgttaagcaggtgcacacttcgtacatgaagaacggcatgcaagtaaatgacgatcgcctgcaattggacaataacgtgctcatgatggatatgctggcaactgttaaggtactgctacaacgagttgaatcactggagaatacacttcattcatccgaagcgggagatatccttaaggtaaatcaaacagctctcgacgcagatttggttactgccattcaggagtaa

SEQ ID NO: 232458 - DNA, 4545 bp, Klebsiella pneumoniae
atgtcacaaaacgtagagtttatcctgtcgctggaagacaaacagtttacggcgtcaatcgaccgggcgggtaaattacttaccaaatttggcgagcgggctaccaaaccggctcaaaaaattaaaaacctcgagcgctctctgggttcggtctccagcattcttggcgctcttgaaaccagactcaattctacggcagacaaactacaggacgtagctgccggttttgagctcgtttccaacacctctagaaaggcacaacgtgaactgtccgctatcagcactgatttgcggacattcacagatcgcgttgattcagccacatcgtctacgcacaagttcctggcctcattgcggaaggttcagtcggaactcaatgagttttctgattgggttaaatacgcaagagaccatgccggtaaattcaacactgagatcaagggtgccactacttctcttggtggaatgaacaccagactaaatgcgaccagcaagcgtctgagcaattggggaacaacgacaagccaggcggccgaggggttaaaaaaagtcaaagatcagatggatggcgttattcgaagccagcagctgatcagccgccctgtcagggtcagaacaaccacaacgggtgggggaggcagcggaggtggcgctgatcgatttaccgctgcgccccatcgcggtggtggtcgtgaaaatggcgtcttttatggattacgcggcaatattttccttctgggagaaattggggatgctgccagaacggttactgacatcctgtttggttggcagaagccgatcgtagaggctgcggccgaaatgcagcgtatgcgtgtcatgttgcgtggcttgaacaaggataaagtcaatcctgaagaagccgctgctcaagacatgcagtatatcgtgaacatggcgaaaaacgccccatttgcgatgcagtctttaaccgactcatttgtgaagttccgttctgctgggctcgatcctactgatggctcgttaaaggcactggtggactcagtcgcacgttttggtggcgatagtgagttgcttaaacgagcggcggtggctgtccaacagatgtctggtaaaggcgttgtgtcgatggaagagctccgccagcaattgggtgaagcggttccaaatgcgatgaaggccatggcagatgcggccggtatcacgatgggtgagctaaccaaagccgtctccagtgggaccgttgaagcgaaacatgctctttcattgatgtttgttggtttgcgtgcggaaaacgaaaatgccgccaaagatatgatgcaaacctacaccggtgcgttgacgcagctgcaaacctctttcactctgtttgccgatcgagtagggcaggctggatatcttgattctctgaccaaggggatgaaagagctggcggccgtaatgaacagcgctgaaggcatttcgttcgctaattcactgggagaggggcttaccaccgcgattgatggcctgcgcgagctggcgcaatggttggctaagaatcaggagttggttattacgctgggcaaaattgtcgccggaatggtggcatttaaaatgctcagagcgggcattttaggtgttgtcggcgccggcggccagatgctttccaccttcatgaaaatgtccactgtaatccagacaccattcacgctgggagcgacggcggtcactcgtttcaatcgtgctgcacgcatgggactggcaccaatcccatcgctcatttttgccattcgtggcgcgattacggggctgaaaggggcattcgctgggctgactgcgtttatcgcagcaaacccgattggctttgtgtttactgccgcaatgacagcagtggcggggctgatcacttacatgactatgctccgcagcgaaacgtcaaaagtcgttgatgagatccgcaaaatccccgaggcgatgacggccgccaagcgggcacagatggcggattacaaggaacgtcttgatcgccaaatagctcagaaggagcaggagctaaattctggtgaaaaaatggtctacggaccagggatggccggaaccactatcaagattaatcagactgaacgtaagaagattgaggctgaactgaatgatctgcgcactgaacgcgataaaactagtgtggctattggtcgtggagacatttctgtagctaaacgtttagcaaaagaagcgactgaatcccaactcgagaaaatcagagatgaaaataaagattttgcagcaacttttgcgaaagctcgtcaagaggcactggaaaaaagacaaaaaattctgtcggataattcgttgtctgatgatgagaaaattaaagcacttaaaccaataagtgagattgtaaataaatcttatctggaacctgcacagcaacttgttgatgccttgtcctcacgtaagaacgctgtagaaatgcaaatagcgaatcttaatgattccctagaaaaagcgaagaaagagggcaactcagagcaggcgcgtaaactgcaaggcagtattcgtggttatcaggagaatcttgagacaattgctcaggagctaaaacaggccgagtttgaacgaaacaatgcagcagaaactggcaaagagcttctttccgttgatggcaaacggattggaggtttgtctggagataaagctgctgataaagcgctcgcgcagtacatgcgcaaccagatggactctgcggtttaccagcgcacgctgcctgatggcacaccaatgatggattttgaaggaaaacctatcattgggccgaagcagcttaaaactcagcttaacctgcagaaagcctccactgcatcgtctctggaaaagatgagtgagaaggagcgtgcagccgccatagccgcactaaccaaagctcgtgaacaggatgccgctgccgccgagagggcagggaagcgtaccgcgaatgcctcggaacgcgccgcgaagagggaggaaagtgcgcaacagaagctggctgccggctaccagaaggctctggataaagctgaacagctcatggggcagatgggtgaaagctcaaaagcgactgtgtcgtttgatcagtcgctgcgtgatgtcactaagtcactaaccgatcttgcaaacgccacgcctaacgagtttatctcgcaggagatggttgaccaggccaaaaaacgtctcgcggatttgaggaacgctacccccgaataccgtgaaatgtttaatcgccgcaacgtcgagcaaatgatcagcgcttgggcgccggaatcggattcgattatcagcgcaggcttgatgcaaagccatgaggagaaggctgccgagttttcggatacctacaatcgcaatcttaaggcgctgatcgagctgcgtgataaggcgactgacccgaaaatcatctcgctttacaacaagcagcttaataagctggtggccgctggcaacaatgcgctgattaagcaaacaggtacagcgacccagcagttggctctggagtatgagaacctggctgagcagattgagggcacctggacagatctgtttagcggcttaaccgacacgcttactgactttgttgttaacgggaagatgagcttctccagtctggccacatcgatccttaaagacatcaccaacatggtcgtgaagacccagatcactctgcctctcatgaatatgttgggaatgggaacgacaaacgccggcaatgcacaaagtggaaatctcatgaatggcgtagcgtctgcgatcgctaatcaaggggttcagctcggtaattctggtgtgtcggtggccaatggggataaatctgtcggcgaggccactaaggagacagcctccggcgtgaactctatggggcaagcgtctcagaatgcggccagtggtttaagtcaggcggtgaatggcgtctgggactggactaagtcattgttcaccggtactgacgctacgaaagatcaaaccaaagcggttaacagcagcatcctcagtatggggaatctgtctaccgcggctggggcgctggcagctacattcgccatggtaggtgcttcgtcgtcgagttcgtccagccgttggctgaatttcggtctgtcactggccagtaccgcagtatccgcctgggctgggtcagcttcatcgtcttcatctgagccaaagcctaatgtgaagaaacacgccaatggcggcatctttggcaaggaaggggttgtacctctgagaacctatcagaaaggcggaattgccacctcaccacagttggcgatgtttggcgagggctcaatgaacgaggcttacgttccgttgccagatggtcgaaccattccagtcacactttctgcagagtcggctggaaagagtacgggtaacgcggtgtcccctgtctcaattcaaatcaatgtgaccaaggatggacgaaccagcgagagcagcagtggaagcgagagcaatctctggaacggtgcagcgcggcaaattaagtcgattgtgcttgagacgattgccgaagagaaacgttctggtggttcacttaatccgcataccaccagagggtag

SEQ ID NO: 232459 - DNA, 318 bp, Klebsiella pneumoniae
atgaccaaattactcgatctcgactccattctgccgccgaaaaaaagcatcaaatttggtggcaaagaatatcccatcgttgaaatgaccgtcggcctctttgtttctatcaagcagatggaagacaaagacctcatgaatatgtctcccgtcgaccaggtaactgcctacgcagaactggtacgcaaagtcattccgtcagtacctgactacgttctggaaaaactgactgtccagcagctccagcagatcttcactttcgccatggaagtgattgatgaagagaacgaaaaagcggctggcgaaggggcaaagtaa

SEQ ID NO: 232460 - DNA, 291 bp, Klebsiella pneumoniae
atgtacagttgttgggggggggtgaaaatgagcagtaaagactctaattatcagatcgtctacagaggcgaaacactcaagtatttcaagcctggccaatgtgtcttctttcagagagagaagcagtatggcggtggattctggttgggcaggactcatgaagatgggttcgagtttttgttggaggagccaacctcgctgggaaggggtcttgaatttcttataatccacgcgagcgtggaggcaagacacatggagttcgtcgatttcgatgatttcaatttaacgtag

SEQ ID NO: 232461 - DNA, 258 bp, Klebsiella pneumoniae
atgaacaaatcaaccataaccagagatgagcttaacgaagtgattgccacatacggaaagagccacctcgctcatcgaatggctactatattgttgaccgcaatggactgcgagtcgcgcaaaatactcgaagtcaatgtcggcggtaatacctgggtgcaatgctcggagaaggcctacgaaaatgcaaaatcaaaaggggagctcacacgagtactttatgagccttcccaggcaattgattactcaaaaggttag

SEQ ID NO: 232462 - DNA, 222 bp, Klebsiella pneumoniae
atgaccaaatataaattactcgactcaaaaataatgaacaaaattggtggacacccggcaccattttccagtctgtacgtcagggatgtagccgaggaatgcaaaaaaatcgcggctgaagagaacaagccggaacctttccgcattcttgaccgccgcctgcaggcgctacgtaaggcgggaaaaatccgcagtacatctaagggctgggtgagggcttaa

SEQ ID NO: 232463 - DNA, 363 bp, Klebsiella pneumoniae
atgacaactgatatcaccgaactggcgcagagagagaaattcgaagcgtggctgtctgaaaaaccatttcacgcaagatatatgcattggagtaacacgctcaacgcttatgactacaccagcattcaactggcatgggaggcatatcaagccggtggcgctgaactggtagaggcgctggagaagatgcgccaagaacacaatgtacacgaggtacgattaatcgaacagcgagccactttgaaggaatatcgtttatatacaatgcgcttaaacgaagagcgtcgactattaaaagagcgaatcgccgaattagaggggcgttccgtgaagctaactggagtcaaccatgaccaaatataa

SEQ ID NO: 232464 - DNA, 381 bp, Klebsiella pneumoniae
atgaagttagtaaatgccatttcactgttttccacctatctcctcgggggcggcttctcctatcgatactgccctgtctgggacaaggccctcaacaggttgatggataacggatcgctgctagaggttaaaaatgggattgccttgtttgaacacgatgctcagctttacgaagtttttgtagggtttggggctggtttttttcattttggccaccttgtcgcagtgaacgcaaaaactgttggtgaaagcttcaggcgccgaccatcgtttcgctctatggacaaattgcaacgtatggttcacgcggagatctctcgtgtcgagaaagagaaagaacgagagattcgggaaatgatgaagtcgcttctgacttcatga

SEQ ID NO: 232465 - DNA, 321 bp, Klebsiella pneumoniae
atgaaaaaaaatccacgagaaagcaaagaggcgcgcggcatgaatggtctgctggtcgagcgtgtctccgattttgttaagtccccgctggataatcccctcacccgcggtgagcagatggagctggcaaggtggtttctgcatatccatgagcagatggaagtttttaaacagttgccggatctgcccattacagacggccatgttcagcaggtgattaaaagccatgaaaaaggctgggcgatgattgtgccgtgcaaaattacctacgagctggctaaggaagtgcagactaacagagcaaggagtaagggagagtaa

SEQ ID NO: 232466 - DNA, 237 bp, Klebsiella pneumoniae; identical to SEQ ID NO: 149003

SEQ ID NO: 232467 - DNA, 579 bp, Klebsiella pneumoniae; identical to SEQ ID NO: 149002

SEQ ID NO: 232468 - DNA, 342 bp, Klebsiella pneumoniae
atggcactggatttgaaaatcagcttttacacggagccttttggtatggacataattaaaaaaatactaattacatcaataagtatcggaatggttggttgtgctttcccggacaaagacggagattacggcgcttacgtctataactgtcagaagtatgcttatggcaaagcctacgcatttgaacacagagattttgcatataaggtttgcaaagatgcggccaaactttggggagatgaagttccagcctatgtcatcaggcaaatccagttgcatccagaaataccagctgatgagataaaatacgcggcgatggccggctcattggggaacaactaa

SEQ ID NO: 232469 - DNA, 249 bp, Klebsiella pneumoniae
atggtaactattcgtttagcacgtcacggcgctaaaaagcgtccgttctaccaggttgttgtcaccgacagccgtaatgcacgcaacggtcgcttcatcgagcgcgttggtttcttcaacccgatcgctaacggtgcggaagaagaaactcgcctggatctggatcgtatcgctcactgggttggccagggcgctactgtttccgagcgcgttgccgcgctgatcaaagccgctaacaaagcagcttaa

SEQ ID NO: 232470 - DNA, 1149 bp, Klebsiella pneumoniae
atgaacatacaacagcgtattgcagaacgcttaattaaagctagaactgacgcgggtttgagcgccatcgctgtcgccgataggattggcgtggtgcgccagacttacagcaaatttgaacaggctcagggtgtaccaagcgttacccagctcatatctctttgcaaggtttttgataagcctattggctacttttacgacgaagatgatggagcgttccggtttgctatgcgagcagatagcccggatttactcgattctaagttgaggaatgagctgattgaaaagcttaaaaacattaatgctattgaagaggccgcggatgccacttttcccgaagacctgcccaattcgattccgatttttactgctagagatgaggatttgcgccgggtcgaggataaagcaatggaggagagattccgccttggtataggtaatgcaacctgcgttggcgatatagtggctattctggaagcatcggatatacgagttatcccctttaatcgtgaagagagcgagggtggtaaatcagtgttcggtttttcagcattttcaaacaattacggaacagctatttacgtaaatgttaatgaatccatttctgtagagcggcagatattcagcatctgtcatgaatatgcgcacctgatttttcatcgtgatgaatatgatggccctgctaagagctataggactaaagggaaagggatctcaccagaagagaaagtagcaaatcacttcgctgcttgtttccttgttcctggaagcgcactgcgtaagcagtttgctatgcagggaggtggctgggcttatgaggaaaccgtactccggctaaaaagcattttcagggtatcagctacttgcatcattgatcgtttatccaagtgcaaattgattaccccacagaactctaagtatctatgggctactgcaaatagaaagggctggctgagacatgagccaaatccaataaaagaacgtctaaattacaaggggcggctaaccgtgctttcccgaaaagcatgggaagcgggatcggcgtcagaaactttcatttcagagttattggaattaaacaggaaagagttaagcatcctgctagatgagtggtacgacgagcaggaggctggagaggatgccatttga

SEQ ID NO: 232471 - DNA, 552 bp, Klebsiella pneumoniae
atgagtggtacgacgagcaggaggctggagaggatgccatttgaatgcccccgatgtgttgtagacacaaatgttttatcagacttttatgaaagtggttgtttggctttgatttggcagatatttcctggaggagtttggattgacccctatgtctgcgaagagctcaaggccaaatacgatcttgatgttcaacaagagctcgccaggcttcaacttccgtataattttacaaacgattatgagcctgagcatctagtggaaatggctgagataaaaacgcgtagaatggcgctgaagtatgctgatataagctgtgtggttaatgccaggatacatgaggctacgtgtttgtcagcggataatgcagtttataaaacatgtggcgagcgcggtgtgaaggccgcgcgacatggtgggatcttacaggaagctgtgaggcggggcatgttgactaaacatcaagcgcttgcatactttcagcactttttggatcgtggtttaaccatgaaaccatctatacgtgagcaaatcacagcgagcttcacatga

SEQ ID NO: 232472 - DNA, 249 bp, Klebsiella pneumoniae
atgtttaagtatcctgtttgtggcgccgttgcaaaaacgcgtaccagtcgctcgttaagtaataccaccgttcggcactatcaccagtgccagaattttgaatatagtatcactttctccacgctaaacagcgttgaaaaactggtaacaaagcgcgcgccgcgcgagaagttgccgccgggctttatcccctttgatgcgtttcctgcatcacattacggaaacgatcagctcagttttgcaatataa

SEQ ID NO: 232473 - DNA, 246 bp, Klebsiella pneumoniae
atgtataaatataaaatggttcaaatcccgccaaacgttatcgttaatgcaaagaaggtaagtaaggacagtgctgcggctgcatacctcgaaaacgttgttaatgagatggcccaagatggctgggaattccaacgcattgatagcattggcgtacaagaacaaccaggatgcggcagtctatttggagggaagcaaattggtccagttaattactatgtgattacattccgccaagaggcgtaa

SEQ ID NO: 232474 - DNA, 597 bp, Klebsiella pneumoniae
atgtttaatgcaaatatgaatgagctgcggtcactcgccgggaatggagagtgtgtcagcctcaatgcgcctactgccagatgtttgttgctgcttttgcagaataaaggaaaagtgatttcacgagatgagtttctggcgtccgtatgggaaacacggggcgtagtggtatcgcagaatacgttctatcaaaacatctctttgctgagaaaatcgctggtcagagctgggttgtctgaagatatcattattaccgtcagacaaaaaggctttagcattgccccagctactatgatcacccccctgtctgatgaagagtgtgagaatatgaaccggataacattaatgaattattcgggtaataacggagggagtgttatttccagtgacagggagacatctaaccttaaattaagtattccactaccggagaatgtctcaaataaagatgttgatttgcgaaaaaataatgtagaggacactgggaaagcatccgaacgattacatgttcactttaaaatgcccatatggctaattgcgttaataatggtgatgatagtcatcaatattatcgtattggtgaggctacaccgatag

SEQ ID NO: 232475 - DNA, 564 bp, Klebsiella pneumoniae
atgaaaaagacaatcgtagctgtaatggtcgctgcatctgcagttctgagcgctcaggctttcgcggcagggaacagcgccaacctgacagttctgggtaaagttactgcaaccggtgaatcctgtaacgtaaccccggctccgctgatcgcaggcggctctttaactctggacgatatccgagctgataagttagaagcttttgctctgaactctccttataaagagctggctaaagatattgaatataaaatcgaagactgtcagaaaggcgctcaggattataccggtaatatcagtgttaccgttactggcgattacgtcagcggcatgaacgacgtcctgaaaaaccttgcgccaaacgctgcaaccagtactgctgtaaccgttgttaacagcgactggagccgcgtagatttaagcggtgttaatgcggctcaaactgtcgcttataccgcaggtaccccgtcatacatgcgctttaaagctgcatatgtcagaacgggtgctggcgtaacaaccggtgacgtaaaaggcgtagcaacctttaccctcacttactaa

SEQ ID NO: 232476 - DNA, 693 bp, Klebsiella pneumoniae
atgcagcaattattactcaaatcagtaatagctttttcattagtaaccagttcctttgcccatagtgggattgtcgtggactcaactcgtcatctttataaagaaggctcacgcgaaatcaatgcacacattgaaaataaagatgacactccttacttaatcaagtcatgggtagaagcaccacaaggaaaagatgcatcgtattttatggtaaccccaccactatttcgtctggaagggaaacagaaaaacaccttacgtatcttaccaaatgcaaacatttcgaacgcaccgaaagatcgtgaatcagtttatttctttaatgtcatgtcgataccaccgaccagcgatagtgatgaagataaaaataagattcagttagctgttcggcataaaatgagactgatctatcgaccgaaggtagttcaagaattatcagctgatactgaagctaaaaaattagagtggcgaaaaacaaacaacaaaatcacattaaaaaatccgaccccctttttcatttattttaagtcggtgaaaataaataataaagagattaatagctcaatcccacacgtagccgcctattccactgaggaatttactttaccagcaggcgtaaatggctcggaaataacatggaagatagcaaccgatagcggaggctctgggtccacctattcctcctcattctaa

SEQ ID NO: 232477 - DNA, 2526 bp, Klebsiella pneumoniae
atgtctaaatttataaaaaaaagagctggaattcttgctggtgctccttacacggttgctattctcattcctgcactgacattatgcttgtgcaataccgccacggcccgtgatttttttgatcctgatttcattaaatcggttggccaggactcttcatctattccagatttatcagtttatgcaaccagggattctcaagcaccaggggaatatcgtgtcgacgtggtcctgaataatgagcttaaagaaacaactagcatcctgtttgttgaaaagcaaaatggcggattgtcgccttgcttgagtgttgaaaagctctccagctatggtttaagactgaacgcattcccaacgttaaaaaatgatgtaaaaggatgcgcgaacatagccgagatacaaaactttacggccgatctcaactttaatacacagcaactgttgctatctatacctcaagctgccttatcaagcattgctcaaggatttgtgtcgcctgaagagtttgatgaaggtattaatgcgctgttggcaaattatcaattcagcggttcaaaagattttgacgaaaaacaagaatattacaattttaatctacagtcagggttaaatgttggcccctggcgcattcgtaacctgagtgcatggaataaaaatggcggcgataaaagcaattgggactccgtttatctttatgctcagagaagtattattccattaaaaagcaccttagttatgggggaaagttcttcactttccagtatatttgatagtgtaccttttacaggtattcagctagcgacagacacagatatgatccctgaaagccttcgtggctttgctcctgtcgttcgcggtattgccagaactaatgcccgtgtcatcattaagcaaaatggctatcaaatttatcaaacattcgttgctccaggcgcctttgaaatcaccgatctctactctactggcggtaacggtgacttatacgtcacagttgaagaagctgacggcagcaaacaaaactttgtcgtcgcttttgcctcgttaccacttatgcttcgtgaaggccagatagaatatgaaattaccagtggtaaatatcgaccatatgataacaatacagatgaaaaaccatttacccaagcaaccattagctacggggtcttaaataatacaaccttatatggtgggttacaaacagcatcggcttatcaagcacttgcatttggtgtcggccaaaacttaggtgagattggagccatttcagctgatgttactcaagcctggtcgaaaaaacaggatgacgaaaaaacatctggacagtcctggcgtattcgctacggtaaaaatattctcgaaaccgggacgaatgtttcagttgcaggttatcgttactcaacaaaagggtttagcaccctatcggatactttcaacacatataatgaccattataattctttttctgcacgttctgtgcgaaacaggactaacctgacggtgagccaaagtttgggcgcgaacctgggaagtctgacaatctcagggttatttgaagactattgggatagtggccgacgcaataactcactaaacattggctataatggcggagcacgccgttttaactactatttcggctatagttataatcgctattcatggagtaatggtggttctggccgaaatgtggaagatgatcatcttctttcgttcactatatctgtacctttaagtgaatggcttccgaatacgtatgctagctacagtataaataatagcaatccgggatccaccgaccaatacgtatctcttaatggttcagcgttggaaaataacaatctggactggaatgttcagcagggctatagcaaccgagaagacgctactggcagcgtcaatgctacctataaaggctcgttaggccaggtaacgggtggttacagctacaataaacatagtcaattattgaactatggattgagtggaggtgcattagttcatgcaaatggcattactttgggtcaggaaatgtcagacacggccatattaattaaagcacctggattggataacgttcgactggagaatgacaccagtattgaaacggattatcgtggttatgcgattattccttatgcgacaccgttctatcgtacaaacgtaacattagataacacaacgttgagcgataatatggagctacctaatacgactcaaaaagtagtgcccactcgcggtgccatcgtacgggcaaatttcgaaggtactttcggccgcagagcgttcctgattctgaaaagattgtccggtgaaaatgttccttatggcgcaaccgtaaccttatcaactgataaaaaagcacaggccagtatcgtatctgatggtggcatggtttatatgtcaggccttaaagataacggtgaggtatatgctcagtggggttcaaaaaccgatcagcaatgtaaagctacctatacattagctgcggcaaacgaaagtattgcgcaaaccacagcggtttgtcgttaa

SEQ ID NO: 232478 - DNA, 1020 bp, Klebsiella pneumoniae
atgaaaaaaattattattgcaataggtatgttattttcaagcttacaggctttcgcatcctgctcttatagcagtgcaagcagtggtggtatcacaataagttttggtacacctgcggtcctggctgatacaacgttacctgtaggaacaatcttagcgactgcagtccgtgggaatcttactccaaaaacattttcgaaatgtgaggcaggagatgtattcgttgtcagaacatccccaaacgtcacgcaatctggtataaatagaattaatgggcaagccgtttacgagacaggaattccaggtatcggctttcagatatctgatataacaaagcctaaaggaagatttattcctgcagtgattgatcagacggaaccagcaacaagcagatacttttcctcatcagatatatcaaagcaggtcatggtatggctagtaaaaacggggccgattacccagacaaaattaagcgattatataacagtatactatatggctggaacgtctggccaaacgagttcaggaagcaataatatttcgtctctttatagggttaatattgatttgacgaatattaaatataaagagacaacatgtgaagtttcgccaagagacggcaacaccgtaagattacaatctattgacttatcggaactctcttcactttctgcgggaaaggctgctggtaagcctaaaaacttcaccgttgacataacctgtccgacatctgagataaacaaaaactatctttattggttcaaccctatctcacaaaactcaagttcagcggatggtgttttacttaattcactgaccgacggagcaacaaacgtaggaattatcatcaagaaaggtgctgtcgcaataaaattcaatgacatgagctatacttttacctctgcaaagacacagagtcagaccttctctgcagattattacaaaatagcaaacccagtaacgctaggggtcactggcgatgtcaaggtagacttcgaaattgttcttcaggagaagtag

SEQ ID NO: 232479 - DNA, 366 bp, Klebsiella pneumoniae
atgaaacaattaactattgctgaaatgaatgatgtttcaggcgcaggcctcaagcaaattctcaacggagagcagaacattctggtcggaatgctggatggtgctctcggtgccatactggtaggttttggtctgtccggtggtgctgctatgcagggcggggttactggtaatggttcaggtggcggtatgctgggcttcggtattatcactaccggtatcggcgctatttggggcgcaattcagggtgccatcactggtgcagcatggggtttttggctgggttccggagagggtatggactatgtattaaaaggtgttgacgcatggtttgccggcaccattggtggctggactccaagctga

SEQ ID NO: 232480 - DNA, 1218 bp, Klebsiella pneumoniae
atgttggcaggaatcccagcatggttagtttgtactctttcctttctttttctaagcgtactaatcattacactcactacctgcagctacacacagcgtattgatgtgcgcggggaagtgattaccctaccacattccataaacgtctatgctccacagcaaggattcgtagtaaaaaaatacatcgagacaggtgacattgtccgtaaaggaatgcctctttatgaaatagacgtctctcgctctacagtatttggcaatgtgaccgacgcgatgactgccgttattaacgaaaaaatagccaatgctgaagatatcattgaaaaaatattaaaaaataaagatgaaactttagaagcccttcattcccaggtgcgccagtacgaagcgtcgttaaaagaaaccaagcaaatgctaaacgataccgacactggtctacagaagatgaaagctaatcttgcaagctatgatacatatcttaaacaaggcttgataaccaaagaccaatacaactatcagcattctctctattttcaacaacaaagtacgtaccaatcacttgttagccagaaaatgcagcttgagacccaacttactcagcttaaaagcgatctggtggtaaagagtgcagattttgacaatcagatttctagtcaaaaaaatcaaatcaatgattataaaaatcagcgtgttgaatcaaacgctaacggcaatgcggttattaaagccacagcggatggtaaaatagagtccgtagctgtaactgtcgggcaaatggttgacaaaggcagtactcttacccagatcaagcctacaggaaatatcgagtattttcttatactgtggttacccaacaatagcatcccatatattaaaaaaggcgacattgttaatattcgctacgatgcgtttccttctgataaatttggccagttcccaggcatagttgaatcgatttcttctgtaccagcgtcgaagcaggaaatgtcagaatatacaaacgtagtaagtaatccaaaccaacaagaactcgcactttataaggcaattattaggattaagaataaaaaatttgattataacggaaagacacttgagctctcaaatggactaaaagctcaggctattgtattcctggaaaagcgtcctttatatttatggatgttcaccccgtttcataaaatcaagcaaagcgtaagtgaaccgatcaatgactaa

SEQ ID NO: 232481 - DNA, 2118 bp, Klebsiella pneumoniae
atgactaaagaattatttgacaatattaccaagcagctcaattttaaattacgaaagagcacgccagttattttacaatctgaagcggctgaatgtggtataacttgcctggcaatgatctccggtttttatggactcaatattgatcttttgaactttcgcgatcgctttggaactcctgcgcagggtgtcacacttttatcattaagcaaaattgctgaacgagccggcctacaaaatcgagctctttcgctggatcttaatgaaatgcgtcagttgaaattgccctgtgttattcactggggaatgaatcactacgttgttctgactaaagttcgtaaatccagttttgttgtacacgaccctgcgcttggtaaacgtgtgattggactacaagagatgtctaattattttacaggcattgcgcttgaactgtggccggagcaaaatttccaacaggaaaccgttaaatctcgtctgcgcctgatagatttaatgcgcaatattgtcggacttaaaagtacactacttaagatttttgctttttcggtagttattgaagccattggtctattattaccggttggtacccaactggtaacggatcacgttattatggcacacgatgaaagtttacttgccgtaatctgtataggcctggtgtcatttacactttttagtgctttcatcagcatgttaagagcctggacatctttaacactaaatacattgacgagcatacaatggaaaaccagtatgtttgatcacctgttcaaactgcccttatccttttttgagaaacgccatttaggtgatattcaatcaagattttcatcgctggatacaatcagatcaacatttaccaatagtatagtcacaggcatcatcgactcaataatgactattgggcttttgatcatgctaacgctttatggcggctggctgtgctgggttgtagtaggttttacagcttgttatggcatcatgcgcctggccacgtaccgtttttatcgccgagtatcagaagaacaagtcatcaaaggagcacgctctagctcacatttcatggagtcgttatatggtatcgcaacgatcaaagcccttaatttaaaagaacgtcgttcaaagcattggctaaatttaaatattgatgcctgtaatgcaacgataaagcagagccgctttgacatgctttttggcggtatcaatacccttatatcctctattgatcaggtggtgattttatggttaggggcattaatggtcattgataacaatatgacactcggtatgtttatggcgtttaatgcctaccgaggccaattttctcagcgagcatccagcctgatcgatctttttatgaaggtacgaatgctttccttacataatgaaaggatttctgaaattgcgttctgcgagccggaaaaagaattgccctctcgtcgtatttttgaagaaaatactggggtaaaacttcaggtaaaagatcttacctatcaatatgatccattttcacagcctattatatctaacttgaatatcaccattgagccgggtgagtctgttgccttaattggtccatcaggtattggaaaaacaaccctattaaaagtaatgagcggtttgctatctcctacaagtggtgatgttttagtgaacaatcttgatatcactaaaattggcatgaataattatcgtttaagtacagcttgcgtactacaggaagatcggttgttctcaggctctatcgctgaaaatattagcggttttgatgataatgcagatattgatttcattatagagtgcgcaaaaaacagtaatatacatgctgaaataatgcaaatgcccatgggttatgaaacattgattggtgaactgggcactggcatttctggcggacaaaaacagcgacttctgatcgcacgagcgctataccgtaaaccgggtattttatttatggatgaggcaaccagccatcttgatttacaaaatgagtatcatataaaccaatcaatatctaatttaagtattacacgtgtgattgttgcacaccgtccgtcaactattgcttcagcagatcgtgttatcgatctgtcaaaaaataactcaatttcatag

SEQ ID NO: 232482 - DNA, 858 bp, Klebsiella pneumoniae
atgactaaaaaaattagtggcattaacactggcgcaattaaattcaatgacaagttttgcctgatggcagtaaaaattaaggatgaggactctacttgccatacttattatatgcaattaagtgttatgctcgattttattattcttatgcgcgatcgtgcacataaagctgtgaaaaaactgcaagagaacggggaaatttataaagcaaaaatcattgccgagcacgaaaaattggcaatgaatattcctgcttttgaagaagaagaactacaacaacctaatcaggctaatctgattatttctattactccgaagtttgctgatgagcactgtacgctgattgtggtgttacaaaatgaacatattctttcgttaactattcctgacatacaggcagaatttttcattttagcagtccagcaagcacttaatgcaacaaatgacactgaaacactcaagcaaattgcatcgattctcgattttctaatgctttattttgtagatctttcagatttaagttatctgaactataaggaaataaatcacgagccctggaagcaatcattatttgctcaacatcttgctgttctttatagctttgaaaaagaagagggagaagagatcttagcaggcgccgtaattaaaacaaatgctccgccggacacggaagaagcaaagaatttaatcaagcggattgcacttattgcaccaggactccgggagattgttgaaaaaagacatttaactcagacatttatgaaggtaatacctgcagatcagactcaagttcttacattagatgaatgtatgcgcccactctatgagttttgccttgaaacacagaaaactctttag

SEQ ID NO: 232483 - DNA, 609 bp, Klebsiella pneumoniae
gtgtcaggctatccatacaatgaaaggcattacaggcgttttagaaatattttaattgatcttaatagggatcttttaactatatctgaatatatgaatgaatatgatgattattatgaattaaatgatttgtgttattttgttatggctcttgaggatcgccgtttttttaggcattgtgggtttgattttttttcttttattagagaggtatttaaagctgttcgtaacaaaaaacatggtggtgctagcacaattgatatgcagttggttcgaactattaccggcttcaaggacttaactatttatagaaaattctatgaagtgattcttgctgtgcttttgaattttaaattctcaaaaaaacaaataataatgtgttatctgagaaatgctttttttggttcaaggttaattggagctgaaaaagcagcatctttttttaataaaagtgtgtatgaattaaccgttgatgaaagcgcctgcttagcagctatgctgctaagacctaagccattgatacctagtgataaatggtttgagtcaatcaaggttagggcgctttacgcgaagagatttaggagttcggtgaaagagggctattattag

SEQ ID NO: 232484 - DNA, 660 bp, Klebsiella pneumoniae
atgattgatgatattataaaaatagcaattggctttatattcacaggtatactcggctcaaaaatctcatcaaagatacagaagaaaaactttataaaccagaccaaaataagcaaaaccgaaaaggaagtagagaagataaaagaattaacaaagaaaatagagcttttatcaggcgcaagaaattacgccgtaagaatattatcatcatcactacaccttagaggtaatgatgaaaaacgattagacgagataaggaaggaatatagagaagcagtaaaagaatggaatataaacataacaaccatatatactgaactttttagcttaaatctttatgcgtacgcaattaagttagaggaagacgtacataacaattttagagaaagccatatattaatcaatgactgcataaaaaacaactcactaacaaaggctgctgaaataaatgagttagctgataaaattttcaaaaacacaagagacatatcatcaaatctaattaacgaaggaaaatccaggtgggccaaaaccataaatggcaacactgagaaactttgcatttataacatccaacacgccaccttatttactctaataatagccctctttcaccgaactcctaaatctcttcgcgtaaagcgccctaaccttgattga

SEQ ID NO: 232485 - DNA, 888 bp, Klebsiella pneumoniae
gtggcaggtgccaaactaattatcttcattgtttttttgtcagttatagttaattttctttttccatcgattatcaataatcctagtattattcaagcaaacgcgtttcccagcacattacgattaagaggatttagcgttgaagcaagcttgtttggtttccagattgtttgcgccgcagtattgataggaattatatacaatgttaaattacccatacttgtagtagcaactttgatgtttgcaattattacaacctcaaagggagctgcgctatctttcttaatttgcgtttgttgttactatgcaactagagggaatttgatctttaggatattcttatcaatactatctgcattggtttcttttgttatttttaagttgtatatcctaccatccttaactaatgatattgaaagttataattctgtagcgacgcgattaacaatgtttgtgagcggtttgacagtattcttatataatccgtttggagtggggtattacggctatataccatctatttatgcatttactcctgatgtgatttcacgtataggttctatctttccaattctaaattttagtgaggttcagacatatactattattggagaatataaagcagtcgggacaaagtcaatgattatcgattgcattatgtttttcggattattattcattgtacctttcatattttatataaagagattgtcaggttattttttaagtagtaatgatcgcgcatcttttattttattgctttttgtagttctttctaatctcttttttatcgcttacatcggaagctatatgactccgtttatgttgtcttttttaacgcttcgatatcgtcaaaatttgaaaaatagcatagagtatgttttatga

SEQ ID NO: 232486 - DNA, 720 bp, Klebsiella pneumoniae
atgaacgtaagttcttttaagaaatacgtttactcgtttatagaacgcttattaagcctaaatacagatgcaattatttgcactagcaattatgaaaggaatatggcgattcaatatggtttaaaaaaagacaagttatttgtggtttacaatggtatacaagagcctattgtaaatattgatgatgatatgaatccatttgattcgcataaaataaatatattgtatgtaggccgctttgattaccagaaagggatcgatatattatttgatattatcaatgcagcagggactaagtatcatttcacgttagttggtgatactgtccatgacagttttaatcgccctgaattagcttctgtcacatatacaggatggttaaactctaagcagttggcaaagtattataaatatgctgatgtgaccatcatgccgagtcggtgggaatcgttcggtttagtagctgcagaatccaatagttatggaacacctgttatcgcatcgaattcaagttcgttgccagaagttgtcgtagatggcgctacaggatacttatttgacttaaatgattttcagaaagcattagacattctgaatattaaaacaaaaaaagattggaattcgatgaaagagaaatgccgttcaaattatattgaaaaattcaagtcatcggatatgatcagcaatgttgaacggttatataagaaaatcaaacaatga

SEQ ID NO: 232487 - DNA, 876 bp, Klebsiella pneumoniae
atgtgtgcagtaattggatatttatttaatgttatatccagaacgttcttgcttattctaaaagggaattgttatccaagaccaaaattgacgctacactttttttcggttaaagataatttaagatttggtgcctatttaactgctgacagtattgtcaactatattaattcaaacatgtcgactgcattaattacaaaacttttgggggctactgctacaggggggtacaatattgcttataacgttgctgttaatccgccttcaaaaattaatcctatattaacaagggttttatttcctgctttctcgcaaattcagaatgatttacaaaaactgagaattaactttttcaagcttttatcaattgttggtttccttaattttccagctctggttggattatgtcttgtcgcatctgattttgtctatgttctgtttggtcaaaactggatgtttatcgttagcgctatgcagttattgagcttagcaggtcttttgcgtgccataggtaatccaattggatcgttactaatggccaaagcgcgggtggatcttagttttaaattcaacgtagttaaaatatttatgtttgcacctgctttgtattttggggctaagtatgcgggggtaactggtgtcgctgttggttttctatccgtgcaaacgttaaatacaatacttacttattttgtgttaattcgtcctgtacttggtaaatgctatttagaatatatttcaagtatcctatctccgtttttacatgtgtttattaagattcttgttggtgtgttagtttatggtattactattttagtaagtaaaaatactctcctcgctgaagttaagtcggcatttttgaagcgttctaagtaa

SEQ ID NO: 232488 - DNA, 660 bp, Klebsiella pneumoniae
  misc_feature (554)..(563): n is a, c, g, or t
atgcctattgaagtatcttttaataaacataagtttgacgtttataataatcgtattttatttgttggcaatttgtttatgccaaataatgtcggtggtatcatctggtatcttaaaaatgttcacgctgatctgctagattatgataagaacataaagttaacaattgctggaaatgctaaaaacggaattagctccgaattacaggaagcgataaatttatatccaaaagatgcaatcgagttaattaaaagtcccacagactctgaattgaaaaaaatatatgataatcattgtatctttattaacccaatgctcaatggagcaggggttaagttaaaaaatttagatgcaatgcgtaactcgttttatgtggttacaacttctgttggtgctgaagggactggtgtggaaaataacaagacttcagtcgtagctgataacccggaagactttagagatgctatcatctttggcctgaaaagtgaaaattcagaagttattgcacataatgcttaccgtcttataaaaaataattttgatattaagtcaannnnnnnnnnagttctcttaagttattattggagaaaccattgttttttctgttttgcttgtttataccttttgataacacacctttatcaaatttcggtggtataa

SEQ ID NO: 232489 - DNA, 273 bp, Klebsiella pneumoniae
atgaaagccgtagtcttcgcttatcacgatatgggctgcaccggtatccaggctctgctggacgccgggtatgatatcgctgctattttcacccacccggataaccctggcgaaaaccatttctttggctccgtggcgcgccttgccgccgagcagggcattccggtgtgggcgccggaagacgtgaaccatccgctgtggattgagcgtatccgcgagatgaagccggacgtgctgttctccgttctactatcgcaacctgctgggcgatga

SEQ ID NO: 232490 - DNA, 354 bp, Klebsiella pneumoniae
atgcacaagacaaccctggagcagtgggcgttactcgaaaaggtagtggaattggggagctttgccagagcggcggaggagaccaatcgcagtcagtcatcggtaagctataacctcgcgctgctgcaggagcgcttaggcgtggcgctgctggcgccgtccggccggcgggcggtgctgacgccggctggcgaactactgctgaatcaggtcaagccgctgctgcaggccttcgcctacgtcgagacgcacgccgccactctgcgcaacggggcgcggacccgcctggatctggtggtcgacagtattttcccgcgccagcggctgttcgcgattttacgccagtttcagtag

SEQ ID NO: 232491 - DNA, 2619 bp, Klebsiella pneumoniae
atgatccgcctcagtacgctgctgctggccccgccggtgggggagcggctgcgtgcgcgctatgatgactatcggcagcacggcgcttcgtggctgtcggcgtcgcttggctgtctgtgggcgtcgctggtctgggcgctgatgccgctggagacgccgcgctggcaggcgattctggcccgccatgaaacctattttccccacataaatccgcatcgcccgcgtccgctggatccgctgcgctacctgctgcaatccctgtggttactgacgacgcgcgtgccggagccggagaaaaaggtcaactggcgttcgctggcggcgctggaaggggtgcacggtcgctatacgcagtggctggaaaaattgcctgagcagatgaacgcccgcaccggccatctggataaacagaaagagctggcgcacctcaatcctaaactgcgccgggcgatccttgggggggtgaccttctgctcgctggtgctggcgctgatgtgtattacgcagccctttaacccgctgtcgcagtttatcttcctgatgctgctgtggggcgtggcgctgctggtgcggcgcatcccgggccgtttctcggcgctgatgctgatcgtgctgtcgctgacggtgtcgtgccgctatatctggtggcgctatacctcgacgctgaactggaacgacccggtaagtctggtgtgcgggatcattctgctgttcgcagagacctacgcctgggtggtgctggtgctgggctacttccaggtggtctggccgctgaatcgccagccggtgccgctgccggaggacatggatttgtggccaactgtggacatcttcgtccccacctataacgaagatctcaacgtggtgaaaaacaccatttacgcctcgcagggcatcgactggccgaaggacaagctgaacatctggatcctcgacgacggcggacgggaagcgtttcgccagtttgccaaagatgttggggtgcactatatcgcccgcaccagccacgaacacgccaaggccggcaacatcaataatgcgctgaaatatgccaaaggggagttcgtctcgatctttgactgcgaccatgtgccgacgcgctcgtttctgcagatgaccatgggctggtttctgaaagagaaagagctggcgatgatgcagaccccgcaccacttcttctcgcccgatccctttgagcgcaaccttggtcgttttcgcaaaacgccgaacgaagggacgctattctacggcctggtgcaggacgggaacgacatgtgggacgccaccttcttctgcggctcctgcgccgttatccgccgcggcccgctggatgaaattggcgggatagccgtcgaaacggtgaccgaagatgcccacacctcgctgcgtctgcaccggcggggatatacctccgcctatatgcgtattccgcaggcggcggggctggcgacggagagtttatccgcgcatatcggccagcgcatccgctgggcgcgcgggatggtgcagatattccgcctcgataatccgctgtttggcaaaggcctgaagctggtgcagcgcgtctgctacgccaacgccatgcttcactttctctccggtattccgcgcctcatcttcctcacggcgccgctggcctttttgctgctccatgcctatatcatttatgcgccagcgctgatgatcgcgctattcgtgttgccgcacatgatccacgccagcctgaccaactcgaagattcagggcaaatatcgccattcgttctggagtgaaatttacgagacggtgctggcctggtatatcgcgccgcccacttttgtggcgctgatcaacccgcataaaggcaagttcaacgtcaccgcgaagggcgggctggtggaagaggagtatgtcgactgggtgatctcccggccctatatctacctggtgctgctcaatctggtcggcgtcgcggtggggatctggcgcttcatgtacggcccggaaaatgaaatcctcaccgtctgggtgagtattgtctgggtattctacaacctgattattcttggcggcgcggtggcggtctcggttgaaagcaagcaggttcgccgttcgcaccgtgtcgaaatgagcatgccggcggctatcgcccgcgaagatggccacctgttctcctgcaccgtccacgactattccgacggcggactggggatcaaaattaacggcgacgcgcaggtgctggaaggccagaacgccaggctgctgctcaaacggggacagcaggagtatgccttcccggtcagggtcgcgcgggtcaacggcagcgaagtggggctccagctgctgccgttaaccaaccagcagcatatcgattttgtgcagtgtacgtttgcccgcgctgatacgtgggcgctttggcaggatagcttcccggaagataagccgatggaaagcctgctggatatcctcaagctgggctttcgtggctatcgtcacctggcggagttttcgccgccgtcggtgaaggtggttttccgcgcgctcacttcgctggtggcctggatagcgtcgtttgtaccccgacgccctgaacgcgccgcgccgacgctctccgcagacccggcaatggctcaacaatga

SEQ ID NO: 232492 - DNA, 966 bp, Klebsiella pneumoniae
atggtgcaacatgatgacgctggctggcgattagcgcaggacgctgaaaccagcgtgcagccgcgcagcgacgaaaaagcgatcctcagccatgtgcgcgtgctggaaggcgccccgccgctgtcggaatactggacgctgtttgacaccaacgacgaggtcttcaacgccgggcgcaccgcgcaagcggcgacgatcctcttctccattacccaaaatacgcaaattgaacagctgggccgctatattcataccctgcgtcgccagcgcggtacggcgctgaaaatcatcgtccgtgaacaaactccgagcctgcgcgcgaccgatgagcggctactgctcagcagcggcgccagcctggagatccccagcagcgcatcgctctcccgctgcctgacgctaatcgaaagcgtacagaaccaaaagttctcccgccatatcccggaagattttgccaccctgctgacctggagccagccgttaaagctgcgcggctaccagaagtgggatgccttctgcgaagcggtgcacaacgtgatgaccaataccctgcttccacccgacagcaaaggcgtgatggtggccctgcgcccggcgccggggctgcgcgttgagcaggcgctgacgttatgcaaacctaaccggatgggcgacatcatgaccatcggcaataaccggctggtgctgtttttgtcgttttgccggatcaatgacctcgataccgcgctaaaccacattttcccgctgccgaccggcgatattttttctaaccgtatggtgtggtttgaggacaagcaaatcctctcggaaatcgtaatcatgcgcggcgtcgagccggcgcgctggaacacgccgctgcctctctcggtcggtaaaaacgagaccattaacgccacccacgatggacgccactggcgacgctaccccgaaccacaccggttaaccacccgcgaggagcaagcctga

SEQ ID NO: 232493 - DNA, 1395 bp, Klebsiella pneumoniae
ttgaagcgactctctcttttcccccgttcgctgcgtcagctggtgacgctctcttttgtgctgatcctgctgccattgctggtgctggcctggcaggcctggcagagcctgaacgcccttagcgcccaggcggcgcatattaaccgtaccaccctggtcgacgcccgacgcagcgaggcgatgatcaatgccgcactggagatggagcgcagctatcgccagtactgcgtgctggacgatccgacgctggcgcgcgtctatcaaaaccagcggcagcgctacagccagatgctggacgcccacgccggcgtgctgccggacgagaagctctggcaggcgctgcgtcaggatgtcagcgatctggcgcagctgcagtgtaaaaatagcggacccgatgcccaggcagccgccagactggaagttttcgccagtaataacagcgatatggtgcaggcgacccgggcggtcgtctattctcgtggccaacagctgcagcaggagatagccgaacgcggccagttttttggctggcaggcgctggtgctactcttcacccgcatgattatcggcccggtgaaaggcatcgaaagaatgatcaatcagctgggggcagggaagtcgctggacgacgccgcattgtttaccggcccgcgcgagctgcgatcggtgggcaagcgcatcatctggctcagcgagcgcctggcgtggctggagtcgcagcggcatcaatttcttcgccatctgtcgcatgagctgaaaaccccgttggccagtatgcgtgaaggtaccgagctgttggccgaccgggtcgcggggcccctgacccctgagcagcaggagattgtcgagatcctcgacagcagtagccgtaacctgcaaaagctgattgaacagctgctggactataaccgaaaacaggccgacggcccggtggctcgcgaagcggtggacctggtggacctggtggaaaacgtcgtggcggcgcacagcctgcccgcgcgggctaaactgatgcataccgaactgacgctgcaggcgcggcgttgcctggcagagcctgcgctattgataagcgtaatggataatctctactccaatgcggtgcactatggcgctgaatccggtaacatccgtatccatagctaccggcacggagagcaggtgcgtattgatgtcgccaacagcggcgaaccgatcccggccgcggaaaaaaacatgatattcgagcctttttaccaggggagtcaccagcgtaaaggggccgttaagggcagtggactggggttgagtatcgcccgcgactgcgtccggcagatgcaaggggagctcagcttagttgatgcgcccgccgggcaggtctgttttcgcattacgcttccctcagcgccggaataa

SEQ ID NO: 232494 - DNA, 687 bp, Klebsiella pneumoniae
atgtcccaattcctggcctggcgccgttccctcagcggatggctgctttcaggcattgcttgtcttacgctggcggggtgttccgccggcttttcaccgcataccgcggaaggtaccgccgcccccgggcaggcgcagcatcaggtggccgattttgtcgcggtagactgcgtggatatctgggcgcacagcagcgatgccagcgacaaaaatcccctctactggctgcggggcattgactgtgccgatcgcctcgcgccggcgcaggcgcgggcggaggcgaaacgccataccgacgatagctggcaggacgcgttccgtcgcggcatcctgcttgctgatgctaaaattacccctgaggagcgccgcgacctggtggcgcggctcgataccttcagcccgcaaatcgccgttcaggtccgcccgctgtatcagctctggcgcgacggccagacccgtcagctgcagctggtggaagagcgtgcccgttacgcgaagcttcagcagtccagcgacagcgaactggagacactgcgtcagcaggagctggcgctgcgcgagcagctggagctgaccacccgcaagctggagaacctgacggatatcgaacgccagctctccagccgcaagccgggcggcaatttcggcagcgaaaaagtgccggaggtgatccatgacgatccgtaa

SEQ ID NO: 232495 - DNA, 567 bp, Klebsiella pneumoniae
atgagtgaagaaaaacgcaaaatgatcgccggtgagctctatttatctggcgacccaacgcttcgcgccgatcgcctgcgcgccagacagttgttgcaccgttataatcattccgccccggatgaccaggaacaacgtcagcatattctggccgagctgttcgctcgcgccggcgatgcgtatatcgagccaagctttcgctgcgactatggttataatatttttctcggcgccggtttttacgccaattttgactgcgtgatgctcgacgtctgccctatccatattggcgataactgtatgctggcgccaggcgtccatatttataccgccactcatccgctggacgccgatgcgcgtaatagcggccaggaatacggcaagccggtaactattggccacaatgtgtggattgggggtcgggcagtgatcaatcccggcgtgaccattggcgataatgcggtcattgcgtccggcgcggtggtcaccaaagacgtccctgcctgtaccgtcgtcgggggtaacccggcgcagatcattaagcgccttccgccgacaaatccgtaa

SEQ ID NO: 232496 - DNA, 1266 bp, Klebsiella pneumoniae
atgaatataccggacgaggggttttttacgctgttgacgcaggggatgcggaaccgcacggtcgaaaccttacagcgcgccctttaccacaccttacgtgacgctatcctgcagggaaccctgacggcccgctgccgtttacccggatcgcgggtgatggctgaacggctacacctgtcgcggaatacggtcaatgccgcactggaacagctggcgctggagggatacctgacacggagccgtcagggaacgcaggtggcaccactcgcctcctgccgccaggaggcgggtcagatgccgcccgtcgtgctgcctgagcggctgcaaaggctgccagccgcgatgcgccgcgactcaccgacgctggcatttacgccaggcatgccggcggtaaactatttcccgctgccgctgtggcggcgactgatggataacgtgctacgcgaagatggtagcgcgctgctgggttatggcgaagccgcgggcgatcctttgctgcgagaggctatcgctcgtcatctggcgctctcccggggcatccggtgcgatatccggcagatcgtcattaccgaaggcgcgctggaaggcgtcaacttatgcgcctcgctactgaccaacccgggcgacagcgtgtggctggaagaaccggggtacctgggggcgaggagtggcttccagcgggcggggctgcgggtcagaggaatggctgtcgacgatgaagggatgtgtattgccaacggcgtcgcggagccgccccggctcattttcacctctccttcacaccagtatccctgtgggagcatcatgagcgccgggcgccgtctggcgctcgtggaatatgcccgccggcacggggcgtggattgtggaggatgactacgacagcgagtttcgccatagcggagaaccgatcccggcgatgctgggaatggtgcctgatgccccggtggtctatctcggcaccttcagcaaaacgctgtttccggcgttgcgtatcggttttatggttatgccgcccgcgctggcggatgctgctcaggacgccattggcgcgctgctgcgcgggggacaccgtgctgaacagcgggcgctggccagctttatcgagaagggacactatgcgcgccatctggcagcgatgcgccgcctgtaccgtaaacgtcagcaacagctgcgcgaggcgctggcgcaagagataaccgtgccgtgcgacgttctcggcgggggagggggggatgcacctgacggtggcgatggagggcgttaa

SEQ ID NO: 232497 - DNA, 699 bp, Klebsiella pneumoniae
atgtgcgaatataatcagtttggccaggcgctcggcgtcgcgctgcctgactggcagccgcgcccctggccgacacgacaggtattacagggcagccgttgtcgactcgaaccgctgactcttgctcatgccagcgatctgttcgccgctcaccagctggcgccagacgcccgcagctggacgtggctgctgcgtgaacctgagagcaaccttgcagaattcagtgcctgggtggagcaggtcgccacgctggcagacccgattcattttgccgtcgttgaccagcagcgagggaaagcggtcggctcgctggcgttaatgcgtatcgatatcgctcacggtgtggtagaggtggggcgtgtgcatttttcaccgttactgagccgaacggccatggccaccgaagcgcactggctgttgatgcagtatgtctttgatacgctcggctaccgtcgctatgaatggaaatgcaacagtcttaatatcccatcagcccgggcggcaaggcggctggggtttcagtacgaaggacgttttcgccaggcgctggtgagtaaaggacacaaccgggacacggactggttttcggtgatagacggcgaatggccggagctggataacgccatgcgccaatggctggccgccgacaattttaccgccgacggccaacagcgccgctcgctggagagtttccgttaa

SEQ ID NO: 232498 - DNA, 1323 bp, Klebsiella pneumoniae
atgagctcatatagccctaacccgacggctgcctcccagccagccgtcaccgtgcgccgctcccggcggcgtatcggcattcttgcgctgttggccattggcaccatgatcaactatctcgatcgcaccgtactggggatcgccgccccaaagctcaccgctgagctggggatcgacccggcgatcatgggaatcctcttctccgccttcgcctggacctatgctctggcgcagatccccggcggactgtttctcgaccgctttggcaacaaagtgacctactttttgtcactgaccctgtggtcgctgtttaccctgttccacggcatggcggtggggctgaagacgctgctgctgtgccgcttcgggctgggcattagcgaagcgccgtgctttccggtcaacagccgggtggtcagcgcctggttcccacagcaggagcgggcgaaggccacggcggtgtacaccgtgggggagtatctcgggctggcctgctttgcgccgctgctgttctggatcatggacggtttcggctggcgggtgctgttcgtcagcgttggcgccgtcggcattctgtttgccctggtgtggtggcgctgctaccgcgaaccgcatgaagatccgcgccttagccagcaggagcgcgagcatatcgaaaacggcggcggcctcagcgccccgatcgaccagcaggtggcgttcagctggccgctggtccgccagctgctgagcaaacggcagatcatcggcgccagtatcggccagtttgccggcaataccgtgctggtgttctttctcacctggttccccacctggctggccaccgagcggcatatgccctggctgaaggttggcttcttctccatcctgccgtttgtcgccgccgccggcggggtgatgtttggcggctggctctccgacaaactgctcaaggccaccgggtcggccaacctcggtcgtaagctgccgatcgttgccggcctgctgatggccagctgcatcatcaccgccaactggctggagagcgacctggcggtgatcctggtgatgtcgtttgccttttttggccaggggatggtgggcctcggctggacgctgatctccgatatcgccccgaaggggctgggcggtctgaccggcggcctgtttaacttctgcgccaacctcgcggggatcctcaccccgctggtgatcggctttatcgttgccgggttcggcaatttcttctacgccttgatctacatcggcggcgccgcgctgttgggcgtggtggcctatctgtttatcctcggcgacgtcaaacgtatcgagttatcgcagtaa

SEQ ID NO: 232499 - DNA, 438 bp, Klebsiella pneumoniae
gtgcgcagcctggcggtgcgcagcccgcagggcgatatccgtctggcgctgaatatttcgcagagccgggcgacgcagatcgcccgctccgtcgcctgctaccagggggcggggctgcagcatgccgcctttgcctgccgcgatctgccggccgcctgcgaccagcttgccgaggttgcccgccatacgctgccgatcccggccaattattatgacgatctgctggcgcgctttggcggcgagctggacgtcgggcagcttcagcgccagcagctcctctatgaccgcgatccgcaggggggagatttcctgcatctttacacccggccgtttaccgtcggccgctttttctttgagttaaccgagcgccgggctggctatgcgctctatggcgcagcgaatgcggccgtccgtctggcggcgatgcagtattgttag

SEQ ID NO: 232500 - DNA, 648 bp, Klebsiella pneumoniae
gtgactcaatcactgttcgatttttctgcatatttcaagtttttcatcggcttatttgccctggttaacccggttggcattattccggtattcatcagtatgaccagctatcagccggctgcggtgcgtaataagaccaacctcaccgccaacctgtcggtggcgatcatcctcctgacgtcgctgttcctcggcgatggcattctgcagattttcggtatctccattgactccttccgtatcgccggcggcatcctggtggtgaccatcgcgatgtcgatgatcagcggtaagctcggcgaagataagcagaacaagcaggaaaagtcggagacggcggtccgggagagtatcggcgtcgttcctctcgcgctaccattaatggccgggccaggggcaatcagttcaactatcgtctgggggacccggtaccactcctgggtgcatctggtcgggttctcactggcgatagcggtatttgccctctgctgctgggggattttccgtatggcgccgtggctggtccgtttgctggggcagacgggaatcaacgtcatcacccgtattatgggcctgttgctgatggctctcggcattgagtttattgtgaccgggattaaagcgcttttcccaggactgctgagttag

SEQ ID NO: 232501 - DNA, 417 bp, Klebsiella pneumoniae
atgattgacggcgcccagacttatagcgataagccgggccatcgcttcacgctgaacgctgacttcgccgcagtaaaggccgagaactacgatgcgctagtgatccccggcggccgggcgccggagtatctgcgcctgaacgaggaggttattaaactggtacaggcattcgacgctgcgcgtaaacctatcgccgccgtctgccacggcccgcagctgctggccgccgccggtattctgcagggccgcacctgcagcgcctatcccgcctgcgctccggaagtgcgcctgagcggtgggcactatgcggatattggtatcgaccaggcgcatgtggacggtaacctggttaccgcccccgcctggcctgctcatccacagtggctggcgaaattcgccgccctgctggcggaataa

SEQ ID NO: 232502 - DNA, 459 bp, Klebsiella pneumoniae
atggagatcccgctctataccatcccgctggtgatggtggcgatgaacctggtctacagcctcacggcttacccgttcggtaaactctcagacagcatgagccacagcaaactgctgcagtgggggctgctggtgctgatcctcgccgatatcgtgctggcgctcagcggccactggagcacgctgctgatcggcgtcgcgctgtgggggattcatatgggaatgacccagggcctgctggcggcgatggtcgcccatacggcgccaccggagctacgcggcacggcgttcggtatgtttaatctgatgagtggcctggctctgctgctggccagcaccggcgcgggggtactgtgggaaaccttcggcgccgcctcgacgttttacgctggggcgataatttgcgtggtcacgctcatcggcatgcgcgtgatgccgtcggcctatcgtcaggattaa

SEQ ID NO: 232503 - DNA, 1308 bp, Klebsiella pneumoniae
atgaaacgtgtttctcaattgaccgcactcgccctgctcatggggcttgctgcttccactacctgcgccgctgaaaccatgccagcgctcactctcttccacctgcaacagcagcacggcgtggccatcgacacccggctcagcgcttattacaacggctggccgcagcgcgccaacggcccggaaggccatgagccgcaggccctcaatctttccgcccgctggctcggcgccatgagcgacgatcagctgcgcgcctgggctaagcagcatcagctccagtccgatacccccatcgcgctgtacggcagcccggaggataacgtcagcgtcgcggcgcggctgaaacaaacgggtttcacccggctcagcaccctgagcgatgcgctgagccagaccgaccgtctgcaaaagctgccgcactttgaacagctggtctacccccagtggctgcacgacctacagcaagggaaagcggtcgccgccgccccggcaggcgactggaaagtgtttgaagccgcctggggagcgccgaagctctatctgctgagccatatccctggcgcgggctatatcgataccaatgaggtggagagcgaaccgctgtggaataaagtgtccgacgcgcagctgaaggcgatgctggcgaagcacggcatccggcatgacaccacggtgatcctctatggtcgcgacgtctacgccgcagcgcgggtggcgcagatcatgctgtacgccggggtcaaagacgtgcgcctgcttgacggcggctggcagacctggtccgacgccgggctgccggtagagcgcggtatgccgccggcgcagcagccggcgcctgatttcggcgcgcagatccccggccagccgcagctgatgctggataccgaacaagcccgcgggctgctgcatcgtcaggacgcctcgctggtcagcgtccgctcgtggccggagtttatcggcaccaccagcggctacagctatatcaagccgaagggcgacatcgctggcgcccgctggggccacgccgggagcgactccacgcacatggaggatttccataacccggacggcaccatgcgcagcgccgacgatatcgctgccctgtggcgccagtggaacattctgccgagccagcaagtggcgttctattgcgggaccggctggcgggcctcggaaacctttatgtatgcccgcgccatgggctggccgcacgtcgcggtgtacgacggcggctggtacgaatggagcagcaacccgcacaatccggtggcccgcggagagcgcggcccggaaagcagtcagtaa

SEQ ID NO: 232504 - DNA, 807 bp, Klebsiella pneumoniae
atgaaattcgtctcttttaatatcaacggcctgcgtgcccgcccacaccaactggccgccatcgtcgaaaaacaccagccggacgtgattggcctgcaggaaaccaaagttcacgacgacatgttccctctcgaagaggtcgccaggctcggctataacgtcttttatcacgggcagaaaggccattatggcgtcgcgctgctgaccaaagagacgccgattgccgtccgccgcggtttcccggacgatggcgaagaggctcagcgccgcatcattatggcggagatcccgtcgcccttcggcaacgtcacagtgattaacggctatttcccgcagggtgaaagccgcgatcatgaaaccaaattcccggccaaagcggcgttctatcagaatctgcagaactatctggagaccgaactcaacaaagagaatccggtgctgatcatgggcgatatgaacatcagtcctaccgatctggacatcggtatcggtgaagagaaccgcaaacgctggctgcgcaccggcaaatgttccttcctgccggaagaacgggaatggatggaccgcctgctgggctggggcctggtggatacctggcgtcaggctaaccccgacaatcatgagcatttctcgtggtttgattaccgctccaaaggcttcgacgataaccgtgggctgcgcatcgatctgctgctggccagccagcctctggcgcagcgctgcgtggaaaccgggatcgattacgagatccgcgggatggaaaaaccgtccgaccacgcgccggtgtgggccaccttccggccataa

SEQ ID NO: 232505 - DNA, 1359 bp, Klebsiella pneumoniae
atgagtaaagtgatcgattcgcttgaaaaggtactccttccttttgcagtgaaaataggaaagcagccgcatattaatgcaataaaaaatggatttattaaattaatgccgttgaccctcgccggggccatgtttgtgttaattaacaacgtttttctgagcttcggcgaaggctctttcttttattccatgggcattcgcctggatgcctccaccattgaaaccttaaacggctttaaggctatcggtggaaacgtctataacggcaccctcgggattatgtcgctaatggcgccgttctttatcggctccgcgctggcggaagagcgcaaagttgacccgatggcagctggcctgctggcggtggcggccttcatgaccgtgaccccgtatagcgtgggcgaagcctatgcggtgggcgccaactggttgggcgggcagaacatcatctccgggatgattatcggtctggtcgttgcggaactgttcaccttcgtgatccgtcgcaactgggtgattagactgccggacagcgtgccggggtcggtatcacgctctttctcagcgctgatcccgggcttcttgatcctctccatcttcggcattatttcgtgggccctggcgagctatggcagcaacttccaccagatcatcatggactctatctcgacgccgttggcggcgatgggcagcgtggttggctgggcatacgttatctttaactctctgctgtggttcttcggtgtgcacggttctctggcgcttaccgccctggataacggcatcatgacgccgtgggcgctggaaaacatcgcgctgtacaaccagtacggctctgttgatgcggccatcgaagcgggcaaacagttccacttctgggctaaaccgatgctcgactcctacatcctgctgggtggctccggggcgacgctgggtctgattatcgccatctttatcgcttctcgccgcgctgaccatcgtcaggttgctaagctggcgctgccgtcaggcatcttccagattaacgaaccgattctgtttggtctgccgatcatcatgaacccggtgatgttcatcccgttcgtgctggttcagccgattctggcggccattacgctggcggcctacagcctggggattatcccaccggtgaccaacctggcgccgtggactatgccgaccggtttgggagcgttctttaacagtaacggcagcgttgccgccctgctggtggccctgtttaaccttggcgtcgctaccctggtctacctgccgtttgtggtgctgtcgaataaagcgcagaccgttatcgagcaggaagagagcgaagaagacatcgctaacgcactgaaattctga

SEQ ID NO: 232506 - DNA, 660 bp, Klebsiella pneumoniae
atgatgaccaccgagatcagtaccgccagagaacaacagctgttcaacgggaagaactttcatgtggtcatctataacaaaacggaaagcgtgagcgggcttcaccagcatgattactacgaatttaccgtggtgttaaccgggcgctattaccaggagatcaatggcaaacgggtgctgctggagcgcggggatttcgtctttatcccgatgggctcgcaccaccagagcttttacgagttcggggcgacgcgcatccttaacgtcggcatcagcagacgcttctttgagaaacactacctgccgctgctgccgtttggtctggtggcttcgcaagtctacgccgtgcagagcgcttttctcggctacgttgagtcggtcatcgcctcactcaattttcgcgaaacggaatttgacgaatttatcgagctggtctccttttatgtcattaaccgtttacgccactatcgtgaagagccggttgccgacgtgacgccgcaatggttaaaaaataccgtggaagccatgcatgataagctgaaattcggtgaaggcgctctcgaaaatatggttcgcttatccggaaaaacgcaggaatatttaacccgggcgacccagcgctattatggtaaaacgccggtaatgctaccaacttactga

SEQ ID NO: 232507 - DNA, 408 bp, Klebsiella pneumoniae
atgccgttaatagccgggattgatatcggcaacgccaccaccgaggtggcgctggcgtccgacgacccgcaggcgagggcgtttgttgccagcgggatcgttgcgacgacgggcatgaaagggacgcgggacaatatcgccgggaccctcgccgcgctggagcaggccctggcgaaaacaccgtggtcgatgagcgatgtctctcgcatctatcttaacgaagccgcgccggtgattggcgatgtggcgatggagaccatcaccgagaccattatcaccgaatcgaccatgatcggtcataacccgcagacgccgggcggggtgggcgttggcgtggggacgactatcccctcgggcggctggcgacgctgccggcggcgcagtatgccgaggggtggatcgtactga

SEQ ID NO: 232508 - DNA, 726 bp, Klebsiella pneumoniae
atgaataatagtgaaatgagtattccagctataattgtggctacgtttatcaatgagcttttcgttgatggtcctgattctgaggctatttcacttttacggaaaggtcttgtattagatgattcagagaaatccgcgcgaggtattgttaataaaataattaactattttgaattttcaaaaaaaccaattgaagatttactttattttattggggtggaaaaaaacgaagttgtaaatgatgctgagtctgttaataccttgctttatatggataaacatcgcactccgtttttaagcgatattccattgtcaggagacggagtaacaattctgaatgccgcactagggttatattttgtgggtatgcaaaataatgcaaatgatcttgccagaattggtattaaactgatgatggaggaggtttttagaaatgaaatatctttcagggaatttaatgagatagctcaaaaggcaatttcagaggcccaaagagaaaaggctaaaaagcctcgcagcccatattactcagaggttattgaagtcattagacttacgtggaataaatatccatgcggtgctaaaacggcacttcttgatgccttggctgctcattatcacggcaaggtaagccgcaatgcattagacaactggataactctctctggtctgaggcctccaaaaccagaaaaatatacaaggcttgaattagtattcccccattaa

SEQ ID NO: 232509 - DNA, 570 bp, Klebsiella pneumoniae
atgtcccgtacccgaatgcccgcgttgtttctcggccatggcagcccaatgaacgtgctggaagacaaccgttatacccgcgcctgggctcaactgggcgaaaccctgccgcgtccgaaagcgatcgtggtggtctctgcgcactggtttacgcgcggtacgggcgtaacggcgatggaggcgccgaagaccattcatgacttcggcggttttccgcaggcgctgtatgacacgcattatccggcgccgggctctccggcgctggcgcaacggctggtggagctgctctcgccggtgccggtcaccctcgatacagaagcctggggatttgaccatggctcgtggggcgtgctgattaaaatgtatccgcaggcggatatcccgatggttcagttgagcatcgacagcaccaaaccgccggcctggcatctcgaaatggggcggaaactggcctcgctgcgtgatgaaggcattatgctggtggccagcggcaacgtggtgcataacctgcgcaccagcccgctggcatggcgagaacacgccgtacccttgggcagagtccttcaataa

SEQ ID NO: 232510 - DNA, 450 bp, Klebsiella pneumoniae
atgggattattaaattttgtgaaagaagcgggcgagaaaatatgggacgccgtctccggcgacagtaaagaagatcgggctgaaaagctgaaaaaacatatcgatggacttaatctgcctggcgccgaaaaggtcaatattgatgttgcggaagatggcaccgcaacggtcactggtgatgtcgcttcgcaggaggataaggaaaaaattctggttgcggtcgggaatgtcactggcgtaggccaggtcagtgacggcgttaaggtgacgcaaagcggggcggaaagtcgtttttacacggtcaaatccggtgacactctgagcgcaatctcaaaagcgatgtatggctcggccaatgattatcaacgtatttttgaagccaataaaccgatgctgacccatcccgacaaaatctatccgggtcaggtgctgattatccctgcgaagtag

SEQ ID NO: 232511 - DNA, 513 bp, Klebsiella pneumoniae
atgacacagaacaatattctattaatttcaggcgctatattaccggtcatcattaccgtcatcatcggctatattagcggtaaacgaaaagactttaactggcagcaggcaggagacatcaataaaattgtgatgctctacgcattgccgctaagtattttcagcaatatggtgatgacgccgcgacacatcgtcatgaccatgggcccggtcgccgtggctatcatcctggcgctgattctcagcttcgtcattcccttactggtcgcccgctatctgtttcgacgcgacctcgccctcagtacgctgcaggcgctggccatcggctcgccggcagtcccgtttatcggcacctcagtgctggcctttttatttggcaccgtcagcgcgtcgctgatcaccgtgtccagcatcacgcaaaacgtcttccagctgccgctggtgatgatactgatgtcggtcgccaccggcgataagagccagcatatttcggtaatgactccaacttactga

SEQ ID NO: 232512 - DNA, 1332 bp, Klebsiella pneumoniae
atgattttggattctacattagatgaaaaaaaaggaataccgacccgctatttaattctgttgatgatatttgtggtgacggcagtgaactatggcgaccgcgcgaccttgtctatcgccggtactgaagtcgcgaaagagctggggctcagcgcggtgtcgatgggatacattttttccgccttcggctgggcttatctgctgatgcagatccctggcggctggctgctggataaatttggctcgaaaaaggtttattcatacagtctgtttttctggtcactgtttaccttcctgcaaggctttattgatgtgttcccgctcgcctgggccggggtctccatgttctttatgcgttttatgctgggcttttccgaagcgccctcgtttcccgccaacgcccgcattgtggcggcctggtttccggccaaagagcggggtacggcttcagctatctttaatgccgctcagtacttctcgctggctctgttctcgccgctgctcggctggctgaccttcgcgctgggctgggaacatgtctttaccgtgatggggataatagggtttgtgctcaccatcatctgggtgaagtttgtgcataaccccaccgatcatccgcgaatgtccgccgcggagctgaaatatatctcagaaggcggcgcagtggtcgatatggaccataaaaaagaggccaccccggcggccgggccgaagatggactatatccgccagttgctgactaaccgaatgatgttaggcgtatttttcggtcagtatttcctgaataccattacatggttcttcctgacgtggtttccgatctacctcgtgcaggacaagggaatgtcgattctgaaagtggggtttgtggcttcgattccggcgctgtttggctttgctggcggcgtactgggcgggctgttttcggattatctgattggccgcggctgcacgctgacttttgcgcgtaagctgcccattgtgctgggaatgctgctggcgtcgtccatcatcctgtgtaactacacggccagcacgccgctggtcattacgcttatggcgctggcgttctttggcaaaggctttggcgcgctgggctggccggttatctcggatgtcgcgccgaaggagattgttggcctgtgcggcggggtattcaacgtctttggcaatgtggcctcgatcgccacgccgctggttattggctatatcgtgagcgaactgcactcatttaatggcgcactgatttttgttggcggctccgcgctgatgatgatggtctgctacctgtttgtggttggcgatatcaaacgtatggaattgcagaagtaa

SEQ ID NO: 232513 - DNA, 465 bp, Klebsiella pneumoniae
atgttattacgttttcgcgtattaccgctggtttttgtcatctcgctgttaagcggctgcggcctggcttctaaagccttttattccgcgggagacaaattatttcaacccggagatgacgccgtcgcttcgatgcagacgtattcagtggctcagttcctgcagccgtttactctcaacccggcgaaggccagcagcgattatctgggtaaatgggtcaaggtacgcggggtgattgtcgacattcgtcggaagagcggtatcgccggcagctactattttatcgtgaccatgcgagatgaacagaataaaacggataaacgtcttacctttaattttggctcgcataacagcgcagacgtaaaggctttaagcaacggcagcgtcgccacgatcgtcggccaggttcatcaggtgcaagattccacgatcccgacgctacagaatcctaaggtggttaaataa

SEQ ID NO: 232514 - DNA, 810 bp, Klebsiella pneumoniae
atgctcactcggttgcgagaaatagtcgagaaggtcgcgagcgcgccgcgtttaaacgaggcgctggatattctggtgacggatgtctgccaggcgatggagacggaagtctgctcggtttacctggctgacaatgaccgacgctgctattacctgatggccacccgcgggttaaaaaaacctcgcgggcgcaccgttgcgctggcgttcgatgaaggcctggtggggctggttggccgcctggcggaacccatcaacctcgccgatgcgcaaaaacaccccagcttcaaatatatccccgccgtcaaagaggaccgcttccgcgccttccttggcgtgccgatcattcagcgccgccagctgctgggcgtgctggtggtccagcagcgcgagctgcgtcagtttgatgaaagcgaagagtctttcctcgtcaccctcgccacccagatggcggcgatcctctcccagtcccagctgaacgccctgttcggccagtatcgtcaaacgcgcattcgcgctctgccggcctcttccggggtggcgatcgccgagggctggatggacgtcagcctgccgctgatggagcaggtgtatgaagcctcgacgctggacaccgcctcggaacgcgaacgcctgaccggtgcgctggaagaggcggccaacgagtttcgtcgctacagcaaacgctatgctgccggggcgcaaaaagagacggcggcgatcttcgatctctactcgcacctgctctctgacgcccgcctgcgtcgcgagctgtttgccgaagttgacaaaggcgccgtcgccgagtag

SEQ ID NO: 232515 - DNA, 150 bp, Klebsiella pneumoniae
atgttatttgcatggataaccgatcctaacgcctggctggcgctgggcacattgacgctgctggagatcgtgctcgggatcgacaatattattttcctctctctggtcgtggctaagctccccaccgcccagcgcgccggatcggtttga

SEQ ID NO: 232516 - DNA, 384 bp, Klebsiella pneumoniae
atgtctgaaattttctgttctgtgctccacctgtcggcgccgggggcgcaaaacggggagaataacaatttaatgtctatctacccaatgtatacccgaaaaatcacccactggtttgccaggcgatcgtttcagaatcgcatcttcctgctgatcttattcacctcgacgatcgtcatgctggcgatgtcatggtatctgacagacattaccgaggaacgtctgcattatcaggtcgggcaacgggcgctgattcaggcgatgcagatttcggcgatgccggagctggtggaggcagtgcagaaacgcgatctcgccagaatcaaagcccttatcgacccccatgcgttcgttctccgacgccacctacatcaccgtcggtga

SEQ ID NO: 232517 - DNA, 447 bp, Klebsiella pneumoniae
atgaccagtaacgaacgtattttgcagccatttactttaccaaatggtaccgagctgaaaaaccgtttgctcatggcgccaatgaccacctgcaccggttatttcgatggcaccgtcaccagcgagctggtggagtactaccgcgcgcgcgccggaagcatctgtaccattattgtcgagtgctgctttattgatgactacggtctggccttcccgggcgcgatcggcatcgataatgatgaaaaaattgccggcctggcgaaaatcgctgaggcgatcaaagccgaaggttcaaaagcgattctgcagatctaccacggcggccgtatggtcgacccgcagctgatcggggggcgccagccggtggcaccgagcgctattgccgcgccgcgtgagggcgccgccatgccgcgggcgctgagcggaggagaagtggggaagggatga

SEQ ID NO: 232518 - DNA, 1479 bp, Klebsiella pneumoniae
atgttgcaggccacctttggccagaccacgcccgaagagcgcgttttgcgcacccgtagcgccctgcgcgccttcaccgaagatgatattcgccagccgctgcgggtcgtgccggttatccgctatggtcagccaggcagactgtttctgatgaacggcaaaccggtgctgctgctgagccaggcggatctcgacgagggcgatgatttaaccctcgaccaggcagcccagcgggtgctggcgcgtatggaagcccagcgcaccagcctccaggagcagttcaacaaccgctatctgttcatctccgccggtaaagccctggccggggcgctgctgctggcgctgttttactacggcgccttccgcgcctggcggcgggtgcgacgttttttcctgctgcggatcctcgaaaaacgtagcgccataccgcagcactggcggcgctatctcggcaatattgaagttcgactctatgctgtgctggtcatccttctcggcatgctggcctgttatctctggctgagctgggccttcagcctgtttccctggacgcgggtgtggagcgaatcgctgggcgactggtcgctgggggtgatccgccacctctctctgtcgattgtcgcctccctgccggggctgatgatcgtggtgcttattttccttctcacctggcttatcattcgcctggtgaaggtggttctcgaccaggtcgccgccggccgcattcaggttcccggcattcatccggagaccgttagcgccacccgtcggcttatctcggtggtcatctggttgtttgccctctccgccgcctacccgttccttcccggtgccaactctctcgccttcaaaggcattagcgtgttcttcggcctgatgctgaccctcgggtcaaccggagtgatgacccatgcgatgagcggcctggtgctgatctactctcgggcgctgcgcaaaggcgactggatccgcctcgccgataatgagggtcaggtcagcgagattggcgtactggcgaccaaaattctcacccgcgaaaattacatcgttaccgtcccgaacgcggtggtggtgagcgggaaaattattaatctcagcgccgaaagcgccgacggtggagtcaacctcaccaccagcgtcaccatcggctacgatacgccgtggcgtcaggtccatgcgctgctggagctggcggcgagacgcaccccggggatcgatcagcaaattgcgccggtggtgcgtaagctgggattgcttgactggtacacctcgtatgagctgcaggtgcgcttactccccacaaccaagctgccggatggccgcaacgcattgcatagcagcattattgatgtgtttaacgaattcggcgtgcagattatgtcgccgaactttgtgatgcagccaaaggcggcggtagtggtgccgcaggaagcctggtacgccgccccggccgtcgcgccgcaggagccggagaaataa

SEQ ID NO: 232519 - DNA, 174 bp, Klebsiella pneumoniae
gtgaccaacagcggcgcggacgccagctacagctatttcaccaaccccgacagccccggcggcgcagcggccatgcagacgctcgccttatccactaactattacaggacggggagcgcggtgaccgcggggacagccaacgccaccggggtgatcacctttacttataactga

SEQ ID NO: 232520 - DNA, 711 bp, Klebsiella pneumoniae
atgcaatctgaagaacaacgccttattgatggactgttttcccggctgaaagaggctgaggcgcacagcgcatcgcgcgatgccagcgccgaggaacggattgcccaacacgtgagcgcgcagccggcggccccctactatatggcgcaaaccattcttatccaggaagccgcgattaaacagcttaacgatcgcatccaggcgctggagagtcaggtcagccaactgcaggcggcaaagcccagcagtggcggcttcctctccggcctgtttggcggtggcggctcgtcacgcggttctgaccctatcccgggcgcggagcaatatggtcgcccgcaggccagcgctcagccgcagtatacgccaccaccgcagcagaactatgccccgcaggctgccgcacgcggcggcggctttatggcgggcgcgctgcaaacggccgctggcgtggcaggcggcgtggtgctgggcaatatgctgaccaatatgttcagcggctcgcacccgcaggagatagtcaatatcatcgaagagaagccgcagcctgatgccgcctccgcgcaggacagcatcgcgcaggacaccaccgcaggtgacgatccgttccgccagggagacgatcagttccttgccgacaatacctggaacgacgacttcgacgccggctttggcgacgatgattttggcagcgatgacgatagctgggtttaa

SEQ ID NO: 232521 - DNA, 363 bp, Klebsiella pneumoniae
gtgaaattaagcgccctgtttattgccctgattcctctactgggctcgccggttattcatgcagaaactactgctgcgccggttctggaaaatcgcgctgcgcagggagatatcaccactcctggcggcgcgcgtcgtttaacaggcgatcaaaccgaagcgctgcgcgcctcgttaatcaataagccagctaaaaacgttattttgctgattggcgatggcatgggtgattcggaaattaccgctgcgcgaaactatgccgagggggcgggcggtttctttaaaggaattgatgctctgccgttaaccgggcagtacacgcattattcgctggataaaaaaccgggaaaccggactacgtga

SEQ ID NO: 232522 - DNA, 1200 bp, Klebsiella pneumoniae
atggaatcctggaaggttaatctcatctccgtctggtttggttgcttttttaccggcctggcgattagtcaaattctcccctttttacccctctacgtctcccagctcggcgtcacctcgcatgaagcgctatcgatgtggtcggggctgacgttcagcgtcacttttcttgtctcggcgatcgtctcgccaatgtggggaagcctggcggaccgtaaaggccgcaagctcatgctgctgcgcgcctcgttggggatggcgattgccattttactgcaggctttcgccaccaacgtctggcagctgtttatcctgcgggcgatcatgggcttaacctccggttatattcccaacgccatggcgctggtggcctcccaggtgccgcgcgagcgcagcggctgggcgctaagcacgctgtcgacggcgcaaattagcggggtgatcggcggtccgctgctgggcggtttcctggcggaccacgtcgggctgcggatggtcttttttattacggcgatcctgctgaccatcagttttctggtgaccctgtttctgattaaagagggcgttcgcccgcaggtcagcaaaagcgagcgtctcaccgggaaacaagtctttgcctctttgccctatccggggctggtgatcagcctgttcttcaccaccctggtgatccaattgtgcaacggctcaatcggcccgattctggcgctgtttattaagtcgatggcgccggacagcaacagtatcgcttttctggccgggatgatcgccgcggtgcccggcgtgtcggcactgatttctgcgccacggttgggtaagcttggcgaccgcatcggcacctcgcgtatcctgctggcgacgctctgctgcgcggtggtgatgttcttcgccatgtcctttgtcaccaccccgctgcaattgggtacgctgcgttttctgctcggctttgccgatggcgcgatgctcccggcggtgcagaccttattgctgaagtacagcagcgacagcgtcaccggacgtatctttggctataaccagtcgtttatgtatctgggcaacgtcgccgggccgctaattggcgcctctgtgtcagccatggccggcttccgctgggtgtttattgccaccgccattatcgttttcattaacctctggcaactggcgtggatgctgcgccaaacccgccgggctaacgcctga

SEQ ID NO: 232523 - DNA, 423 bp, Klebsiella pneumoniae
gtgcgcgagcgtctgctgcatgccggcggcgcacaggcgtgggtcgaagcgcagccgctatttctctacccggcggaatggatggccgcgcgcctgccgcgcctcgaagcggaagatgcgcttgccatcagccattttcagggcaaagagaatctgctgaagcggctacaggccctgaagcaggctgatttttcacgccgtgcgtcggccatcgcctgcccgacgctgattatcagcgccgctgacgacctgctggtccccgcctcctgctcccgcgtgctgcagacggcgatccccggcagccagctcgtggaaatgccgtggggcggccatgcctgtaacgtcaccgacgccgatacctttaataccattttacgcgacgggctggccgctatgctgccggtcgccagggagacccgatga

SEQ ID NO: 232524 - DNA, 1755 bp, Klebsiella pneumoniae
atgtctgattcgctgattcacctgcaaagcgccggtgccgatattgtaattaaaacccgccctttcgccgaaattgtctactggggaccgcatttaagccacttttcgccgcaggatgccgacagcctgacgcgcccggtcgccaacggtagactggatgtcgattcgccagtgaccttaatggcggagctgggccatggtctgtttggcgcgccgggcattgaaggccatcgtcaggggctggatgcctctccgctgttcaccaccagcgaagtgcggcacgagggccagacgctgaccctggtcagcgaagatccgcaggccggcctgcgcctgcagagcgagatcgcgttggatgccagcggcgtgctgagcgtgcgccatggcgtgaccaatctgcgcgccagcccatggcaggtggatcgcctggcggtcacgctgccggtcgccgaacgcgctcgcgaggtgatggctttccatggccgctggatccgcgagtttcagcctcaccgcctgacgcttgagcacgacagctttgtgctggagaaccgccgcgggcgcacctctcacgaacatttcccggccctgatcaccggcagccgcgcctttagcgagatgcagggtgaagtctggggcgtgcatctggcctggagcggtaaccatcgcctgcgggcggaggtgaaaaccgatggccgtcgctatctgcaggccgaggcgctctatctgccgggcgaaatggcgctggcggaaggggaaaccttgtggacgccgtacctgtatgccagctactcggcgaatgggctgaacggcatgagccagcagttccatcgttatctgcgcgaacggattattcgtttcccgggcaacaaaccgcgcccggtgcatctcaacacctgggaggggatctatttcgaccacgacccggactacatcatgcgtatggccgacgaagcggcggccctgggcgtcgagcgctttattatcgatgacggctggtttaaagggcgcaacgacgactgggcggcgcttggcgactggtatctcgatgagaaaaaatacccctacggcctgacgccggttatcgatcacgtgaagtctctgggtatggaattcggtatctgggtggagccggaaatgattaacccggattccgatctgtaccgggcgcacccggactgggtgctggcgctgccgggctataccccgctgaccggccgccatcagtttgtcctgaacctcaacattcccgaagcgtttgattatctgctggagcggatgagctggctgctgggcgagcatgcggtggactacgtgaagtgggatatgaaccgcgagctggtgcagcctgggcatcagggacgcgccgctgcggacgcgcaaacgcgccagttttaccgcctgctggatacgctggtggcccgtttcccgcacattgaatttgaatcctgctcctccggcggcggacggatcgattatgaagtcctcaaacgcagccatcgcttctgggcgtctgacaacaatgacgctcttgagcgcaacaccatccagcgcggtatgagctacttctttccacccgaggtaatgggcgcgcacattggcaatcgccactgtcatgccaccttccgccagcatagtatcgccttccgcggcctgacggcgctgttcggtcatatgggccttgagctggatccggtgagcgccgatgaagaagagcgcgccggataccgaaaatatgcggccctgcataaacagtag

SEQ ID NO: 232525 - DNA, 855 bp, Klebsiella pneumoniae
gtggaggtggcccgcttcgcggtcaacgaattccgtttccccggcgtgacggtggagagctaccaacaacgggaatacccctacggcgcagagctggcgcacgtggtgggctatgtgtcgaaaatcaacgacagcgatctgcagcggctggcgaaaaacggcgaagaggagaactacgccgccgaccgcaatatcggtaagcagggcatcgagggctattatgaaaaagcgctccacggcaccaccggctatcaggaagtggaggtggataaccacggccgggtggtgcgtctactgaaagaggtgccgccggtggccggaaaaaacctctatctgactctcgaccttcatctccagcagtatattgagtcggtgctgaagggacagcgggcggctgtggtggtggtcgacccgcgggatggcggcgtgctggcgatggtctccagtcccagctacgatcctaatccgttcgtcaaaggtatcggctatcaggcctataaatcgctgctggagaatccggaccggccgctgatcaaccgcgtcacccaggggctatatcctccggcttcgacggtcaaaccctatatggcgctgtcggcgctctccgctggggtcatcaccccgaacaccaccttcttcggggcgccgacgtggacgctgccgggcacgcaacgccgctaccgcgactggctgaaaaccggccacggcatgctcaacgtgactaaagccatcgaagagtcagcggacacctttttctatcaggtcgccttcgagatgggcattgaccggatccatgaatggctgagcaagttcggctacggccagtccaccggcatcgaccttaatgaggagtaa

SEQ ID NO: 232526 - DNA, 264 bp, Klebsiella pneumoniae
atgacctcgaacaatgccgatgccctgctcacttcagccatcggcgggatggggatcgtgttatttcccgactggatggtcagcgaagcgctgcacaacgggacattagtcacgctgatggatcgctattcggcggccatcagccacacgccatcgtatatcgcggcgatttatccttatacccgccatccctctctcaacgtgcggacagtgattgactattttgccgacgtgttcggatcgccgccctactggcagcgctaa

SEQ ID NO: 232527 - DNA, 516 bp, Klebsiella pneumoniae
atgtctaccacccaggttctcggcgaaacgccctatgcttcgccaggacaaccgcacgccagcttaaccggacgcattgatgcgctgcccgcctcatttgggttatggtcgtttattaccctgctctcacttggcggcttctttgagctctacgatctcttccagaccgggtatatcagcgcgggcctgctggcggagggcattttccacaccggacaggcgggcatcttcggcatcgccgaccaggcggccttcgcctccgccacctttatgggactgtttatcggcgccagtctgctggcgccgctggcggacaaactgggccgccgcctgacctttatggtggcgctcgcctggtacggtcttttttcgctgctgatggcgacgcagagtagcgcggaaggggtgatcttcttccgctttctggtggggatcggcctcggcattgagctggtgaccattgatacctatctcagcgaatgggtgccaacccatctcaggctggcagttttataa

SEQ ID NO: 232528 - DNA, 420 bp, Klebsiella pneumoniae
atgcttaaaaatgatgccagcacattgaaggaatttttcggtgataacctgaatggttcgaataatcatgcgatgttcagttcttattccagttggctgtttcaggctttgggcggcattaccgtcgctgaggaggcggttggtgctgatgttattttaattagtccatcctttaccgacacgattaactttgtggattgctggcatcaaaccatcagagggcgtattgagtgtcgctggcggcgctataaaaaaggcatcgaattagtcatcaaagtgccatttaacctcaaaaaatgcactcttaaattaccaaaagtgtatcaacttaataaacaattacctgcgccgatagactgtgatacctatcatcacttttataacattaccgatgcaggtgagataaaagtactattgtaa

SEQ ID NO: 232529 - DNA, 1725 bp, Klebsiella pneumoniae
atggagatgttgtcaggagccgagatggtcgtccaatcgcttgtcgatcagggcgtcaagcaagtattcggctatcccggaggcgcagtcctcgatatctatgatgcgttacacacccttggcggtatcgatcatgtgctggttcgtcacgagcaggcggcggtgcatatggcggatggcctggcgcgggcgaccggggaggtcggcgtggtgctggtgacctctgggcctggggcgacgaacgccatcactggcattgcgacagcctatatggactctattccgttggtgatcctctcggggcaggtagccacctcgcttatcggctacgatgccttccaggagtgcgacatggtggggatttcccgtccggtggtgaagcacagtttcctggtgaagcagaccgaagatattcccggcgtgctgaagaaagccttctggctggcggccagcggtcgccccggtccggtagtggtcgatctgccgaaggatattctcaatccgacgaagaagctgccttacgtctggccggacgcggtgagcatgcgctcgtataacccaaccaccagtggccataaagggcagattaaacgcgcgctacagactctggtggccgcaagtaagccggtcgtctacgtcggcggcggggcgatcaatgcgcattgcgaacctcagctgcgcgagctggtggaaaaactgaagctgccggtggcctcatccttgatgggacttggcgctttcccggcgacacactcgcaggcgctggggatgctggggatgcacggcacctatgaagccaacatgaccatgcaccactcggacgtgatttttgccgtcggcgttcgctttgacgaccggaccaccaataacctggccaagtattgtccgaacgcgacggtactgcatattgatatcgatccgacttcaatctcgaaaaccgtgccggcagatgtgccgatcgtcggcgatgcccggctggtgctggagcagatgctggagctgctggagcaggaggaagcgcagcagccgctggacgacattcgcgactggtggcaactgatcgagcagtggcgtgcccgtcattgtctgcgctacgacgaccagagcgataaaatcaaaccgcaggcggtaattgaaactatctggcggctgacccagggcgatgcctacgtcacttccgatgtgggtcagcatcagatgttcgccgccctgtattaccccttcgataaaccgcggcgctggattaactccggtggtctcggcaccatgggctttggcctaccggctgcgctgggggtcaaaatggctctgccggacgaaatggttgtctgcgtgaccggtgacggcagtatccagatgaacattcaggaactctccactgcgctgcagtatgagctgccggtcctggtgcttaacctcaacaaccgctatctcgggatggtgaagcagtggcaggatatgctctattccgggcgtcactcgcagtcctatatggaatcgctaccggactttgtccgtctggcggaagcctatggccacgtcgggatccgcatcagcgagccgcaggagctggagacgaagcttgctgaagctctggagcaggtgcgccagcgtcggctggtgtttgtcgatgtgaccgtcgacggcagtgagcatgtgtaccccatgcagatccgcggcggcggcatggatgaaatgtggttgagcaaaacggagaggacctga

SEQ ID NO: 232530 - DNA, 690 bp, Klebsiella pneumoniae
  misc_feature (649)..(658): n is a, c, g, or t
atgtttttattttataaaccaacaacacaatacgaaaatcttggcgatgcattaattgcaaaaaatctattagagatattaagtaaaaaaggtactatttttttgctaacagaagacatccctaaaggatttgtcgatatcattaaaaatgataattgtgtcggaattagcaaagttaaatttgccctgatgcctttagtttatcgtctattaaatagagatgttgcctttatatataagccggggcatctgtttgggggtagcaaggaatatggaaccggcatcaaggcgcttttaaaaataagttatgtcaatgtattgcacttcataggtgtgaagattattaagacaggtgtttctgtaggcccactaagtggttcttttttaaaagcggaaatgaatattagtgctaaatcttatatatatggtgttcgagaagattattcattgaagtttgtggagggtaactcatttaaaaaatataagagagtttcagatttagcttattactctattttaaaaaatagagagaaatatttagatgaaaaaagagatacaataagttattcatttcgtccgtataagcaatctaatctgccacctgagttacaagcgaaaaagatagcatcggcaatactagacgtagctnnnnnnnnnnattgtaaacaatgtaacacaggttcaaactga

SEQ ID NO: 232531 - DNA, 1764 bp, Klebsiella pneumoniae
atggacgatttaaccctgcgatattttgacgctgaaatgcgctacctgcgcgaggcggcaaaagcgttcgcgcaggctcaccccgatcgggcggcgatgctggatctcgataaagccggtacgccggacccttacgttgagcgcctgtttgaaggctttgccttttccgttggtcgcttgcgcgaaaaaattgatgatgatctgccggagctgaccgaggggctggtcagcatgctgtggccgcactatttgcgcaccattccgtcgttatcgatcgtggcgctgaccccaacgctgccggcgatgaagatagcggaaacggtgcccgccgggtttgagattagctcccgcccactggggccgaaaaataccgtgtgccggtaccgaaccacccgcgatctgacgcttaacccgctggcgatagatgaggcgatgatgacggcggagccggacgggcgttcggccctgcgactacgattcgcctgtagcgagctggctgactggtcgcagaccgatctccgccgcctggcgctgtacctgggggaagacgccgttaccggcagcgccctccatctgtggctgacccgacgccaggccgcgctgtacctgcgtctgccgggtcagacagagcgggtaagcctcgacggctatttttccccggggggattcagcgaggaggatcgtttatggccgaagggggagagcgctttcagcggctatcagctgctgctcgagtatttcacctttcgcgaaaaatttatgttcgtgcagctaaatggcctggaaaacatcaccctgccggcggggatatcgcatttcacgcttgaggtggtgttcagcgaggtctggcaaagtgatttacccgtcagcgcaagcagcctgcgcctgcactgtgtgccggtgattaacctgtttacccttgaggccgatccgttgaccatcagcgggctggagagcgaatacctcctgcgtccgaagcgcctgcaggacgggcataccgaaatctattctgtcgacagcgtgaccggctccgggcgcaccggggaggcgcgctatgtgcctttcacccgctttcgtcaccagggcgggatgatgcgtcgccatgctcctgagcgctactaccacacccgcgtaaaacggggcgtaaccggcatgcacgatacctggcttatcctcggcggacagcaatgggaggctgaccgggagctggcgcgggaaacggtctccttgcgcatcaccggcactaacggccagctgccgcgccgggcgctacagagcacgctgctggatcgctgtgagtcgatatcagccacgccgcttaccgtccgcaatctctgtaggcccacgctgccggcctatcccccggcggaagaccgctaccactggcgggtcatgagccatctgggcacccgttttctcaacatgatgagcagcgccgaggtgctgcgcggcacgctgtcgctctacaactggcgggaggatgagctcaataatcgccgtctggacgccattctggcggtcagccatcaccgaattcagcgtttcgagcagggcttcctgctgcgcgggctggatatcgaagtgacgctcgacggtagcggatttaccggtgcgggcgatgtccacctgtttggcgatatgctcaaccgctttttcgcactatatgccgatatgaatcagttcaaccagctgacgctcattgttcaacctgaagggaaatgtatccggtggaaagagaatcacagtctgcgcctgcccggctga

SEQ ID NO: 232532 - DNA, 135 bp, Klebsiella pneumoniae
atggcgattaccgcagttaaaccctccgccaggttgctggcattcctcatggttaccgtcttaaccggctgcggactgacgcagaccgtgaaagacggtgccgtttccgtgacccagtccattttttacccctag

SEQ ID NO: 232533 - DNA, 129 bp, Klebsiella pneumoniae
atgagtatcaagcgttatggcgtagaaggtggtaccggtaccggcgggcagcacctgccgttcgcgcgggcggtggaagcgggaggctggctgtacgtttccggccagacgccgatgaaaaatggctaa

SEQ ID NO: 232534 - DNA, 2766 bp, Klebsiella pneumoniae
atgcgtaaaacggaactgttggcttttttgcaaaatcagaccgattttttcgatccggataacctgagcgaggtctttaccgccagctggctggcccggcgtttcgcgatgcaaagaaataccgccagccattatctcaatcagctggtcgctcaggacgtgctggtgaaaatcaacacccggccggtctattttctgcataaaaaagccttttgccagcagttctacccgctttcccgcagtgagtatgccagcatggcggagttactcgcggagagcgaccgccagccggagcaggcggaccatttttcgttgctgaccgggcatgacggcagcctgcgtaaaccgattgagcagatgaaaaccgcgctgttttatcctaacggcgggctaccgctgctgatcaccggcgacagcgggaccggcaaaagctatatggctgagctgatgcatgagttcgccatcgcccaggggctgctggcgcccgatgccccctttgtgagctttaactgcgcgcagtatgcgagtaatccggagctgctggccgccaacctgtttggctacgtcaaaggcgcgtttaccggtgcgcagagcgataaagcgggggcgtttgaggcggcaaacggcgggatgctgtttctcgatgaggtccatcgcctggatgctcaggggcaggagaagctgttcacctggctggatcgtaaggagatctaccgggtgggggagaccgcgcaaggcttgccgatttcgctgcggttggtgtttgccaccaccgaagatattcacagcacttttctcaccaccttcctgcgccgaattccgatcctggttagcttgcccgatcttcaacaccgtagccgcgaggagaaggaggcgctaacgctacagtttttctggcaggaggcgcgcacgcttgccgcccggctgcaactaacgccgcgattgttgcaggtcctgacgcagtatgtttatcggggcaacgtcggcgagctgaagaatgtggtgaaatacgccgtggcgtcagcctgggccaggtctccgggccgcgaaatgttgaccgtgacgctgcacgatctgccggaaaatgtcatggccgcgacgccagcgctcagcgaagcgatgggccagcaggagccgctgcttatcgagccgcagaccagcctggtctggctgctgcgcgcgcacgacccggtacaggggctgatctatgacgttcagtgtcgggttctggcgcagtatgaagcggtgctgaataaaaaaacggtctgggaagaggcgcaaaggagcatgggggaagagattgaaaccctcttcgatcggctgatctttgataatcatgactccagtagctcgcagatgctgctgctgatcgctcatcaggttcgggaggagtattatcgcctggaaaagcgcttcaatatccagtttaacggcaactgcctctacgcgctgagccactacctgatccaccgatcccgacagccgcagtccacgataaacaatgaaaaagcccgccagctggaggacttcctggtacagaagtttccgctgctgtatcgcttttgcgaagcgatcctcggtgcgttgacgctgaagctggatattgaaccccagcgtatcgacctgctgctgttagtgctgtggttccacaagaatggcgccatcagccagcagcaggtgacccgggcgataattctcgctcacggttacgctaccgccagcagcatcgccaacgtggcaaaccgcttgctgaaaagccagctctttgagtcattcgatatgccgctggacgtgacgccggaggctatcgctaaccaggtgatggcctacatagagagccatgccctggcatcaggattgataatcctggtcgacatgggatcgctgaacgccattcaccgccattttaatcgtcgcctgagtacgccgatggcgatcatcaacaatgtctccaccggtatggcgatgtacgtcggggagcgcattttgcagggcgttatgctggaagatatcgtccgcgagatcggcgatgaccttgcggttgagcaccagctctattacccgcaaaccgataagccgcgggcgattttaaccacctgcgcgaccggtttgggcgcggcggcgaatctgtcggcgctgttaaaagccagcattcctgaagcgcttggcattgatattgtggcctgcgatgtggagacccttgccgatcacgcgcgacgggagccgatgctaagccgctatgaggtgctggcgatcgtcggcaccctggatccgcatcttgccgatctaccctggatctcgctggattcgctgatctctggcgaagggagtcgtccgctgatgcgcatttttggcgaactggcgacggcggagcaggtcagcgagatcaacaacctgatcctgaaaaacttttcgctgcgccgggtgatcgagtcggtgacgatcctcgatacggctaaggtgatcaaccaggttgagcagtttttgctgcgctatgagcatctggccgggcgcgatgtacctaacgatcgtaaggtcgcgctgtatgtgcatatcagctgtctgatagagcgattaattcgtcacgcttccccagcccaatacactggagggcagtgtccggatcgcgagctggctacgctacgcgaggcctttagtgtcatagagagcgggtatagtgtcaaaattcccgttgtagagctctgctacattcacgatatcctgacgcgggaaacggaatttattcaggaagatcaagacttttaa

SEQ ID NO: 232535 - DNA, 876 bp, Klebsiella pneumoniae
gtgctactgtgcggcgaagagggggtcgggaaagagctgctgagccaggctattcacaatgaaagcgaacgggcgggcggcccctacatcgccgtcaactgccagctatatgccgacagcgtgctgggccaggactttatgggcagcgcccctaccgacgatgaaaatggtcgcctgagccgccttgagctggccaacggcggcaccctgtttctggaaaagatcgagtatctggcgccggagctgcagtcggccctgctgcaggtaattaagcagggcgtgctcacccgcctcgacgcccggcgcctgatcccggtggatgtgaaggtgattgccaccaccaccgtcgatctggccaatctggtggaacagaaccgctttagccgccagctgtactatgcgctgcactcctttgagatcgtcatcccgccgctgcgcgcccgacgcaacagtattccgtcgctggtgcataaccggttgaagagcctggagaagcgtttctcttcgcgactgaaagtggacgatgacgcgctggcgcagctggtggcctactcgtggccggggaatgattttgagctcaatagcgtcattgagaatatcgccatcagcagcgacaacggccacattcgcctgagtaatctgccggaatatctcttttccgagcggccgggcggggatagcgcgtcatcgctgctgccggccagcctgacctttagcgccatcgaaaaggaagctattattcacgccgcccgggtgaccagcgggcgggtgcaggagatgtcgcagctgctcaatatcggccgcaccaccctgtggcgcaaaatgaagcagtacgatattgacgccagccagttcaagcgcaagcatcaggcctag

SEQ ID NO: 232536 - DNA, 210 bp, Klebsiella pneumoniae
atgcgcggcaaaagcgtgatgctcctagccgggttagcctctctcgcgcaggcgaacgaacttaacctctattcggtgaataccggttcctatgtttaccatctgaccaataatcacggacaatatacagagaatttcgaaaatcatttttctcagtggagcggaaattctctgcagactccaaatacagccttctgcttggcactatga

SEQ ID NO: 232537 - DNA, 549 bp, Klebsiella pneumoniae
atgtcgttattgcctctgcgtcggccggtggtcagccgcacgacttatctgattctctttgcttgctatatcggtatctgtctcaacctggctttttatcgccaggttttcccgttactgccggtaaatagcctgcataactggctggtattcctcagtatgccgatcgtggccattagcgtgatgaatatcctcaccactctcgcctcgttcctgaagctggaccggctggtgattagcctgttcattctgctcagcgcctcggcgcaatatttcatctggaactttggcgtggtgatcgaccgcagcatgatcaccaatatcctcgacaccactccggcggaaagctttgctctactctccggcgaaatgattgccgtcctcggcctttccggggttttggcggtattcgtcgcctggtgggtgaaaatccgtaagcccgccacgcggtggcgcggcgatgcgcctgctcaatatcgccgtttcggcgctgctgattattctggtggccgcgctgttctacaaagattacgcctcggtgttccgtaa

SEQ ID NO: 232538 - DNA, 1284 bp, Klebsiella pneumoniae
atgaacagcaataaagcaatgatggcgcgtcgcagcgacgcggtcccgcgcggcgtcggccagatccaccctatcttcgccgaacgcgcggagaactgccgggtgtgggacgtggaaggccgggaatatctcgattttgccggcggtatcgcggtgctcaataccggccacctgcatccgcaggttgtcgccgccgtcgaagaccagctgaaaaagctgtcgcatacctgcttccaggtgctggcctatgagccttatctggcgctgtgcgaaaagatgaaccagaaggtgcccggtgatttcgccaagaaaaccctgctggtcaccaccgggtcggaagcggtggagaacgcggtgaagatcgcccgcgcggcaaccgggcgcagcggcgctatcgccttcaccggcgcctatcacggccgcacccattacaccctgtcgctgaccggcaaagtgaatccttactccgccggtatgggcttaatgccgggccatgtctatcgcgccctctacccgtgcgcgctgcacggcgtcagtgatgacgaggcgatcgccagcatccatcgcatcttcaaaaacgatgccgcgccggaagatatcgccgccatcattattgagccagtgcagggtgaaggcgggttctatgccgcctccccggcctttatgcagcgcctgcgcgctctgtgcaacgagcacggcattatgctcatcgccgatgaggtccagagcggcgcgggccgcaccggtaccctgttcgccatggaacagatgggcgtcgcggcggatatcaccaccttcgccaaatccatcgccggcggtttcccgctggcgggcgtcaccggccgcgcggaggtgatggacgccatcgcccccggcggactgggcggcacctacgccggcaaccccatcgcctgcgccgccgccctggcggtattacagattttcgagcaggagaatctgctggaaaaagccaaccagctcggcgccaccctgcgccagggcctgctggcgatcgctgaagatcatccggagatcggcgacgtgcgcggtctgggggcgatgatcgccattgagctgtttgaagagggcgaccgcagcaggccgaacgccaggctgacggcggatatcgtcgcccgcgcccgcgacaaaggcctgatcctgctctcctgcgggccgtactacaacgtgctgcgcatcctggtgccgctgaccatcgaagaggcgcagatcgagcaggggctcaagatcatcgccgactgctttagcgaggcgaaacaggcatag

SEQ ID NO: 232539 - DNA, 348 bp, Klebsiella pneumoniae
atgaaatgtctggcaattgccgatctgtttatcaatgcagcgatgatggaatcaggactgaaagcgctcagggataacgggattgaagtagaagtacgcgagtggtcacatggctccgttgagaaacttcaggaagataatctgcgggttgaacaggaaggagcagaagccgtggccttaccggaagcgctgcttcagggaacggatgatattgacatcctgatcactcagtttgccccggtcaatactgcggtgttcgataaactaccaaagctgaaatatgtaggcgtgctccgtggtggcgtggaaaacgtgaatcttcaggtggcgaacgcccggggcgtttag

SEQ ID NO: 232540 - DNA, 1518 bp, Klebsiella pneumoniae
ttggagtcattacccgaaaagctacaccgtatccgccactggatcgctattccgctgggattcgcgctgttctggcacgatacctggctgcccgggccagagtcgatttttagccaggggtcgcaaatcgccggcttcagcgccagctatatctgggatctgattgtccgctttatcaactggagcatggttggcgccttctttgttttgctggtgctatggttgtttatcagccagtggctgcgcgtcaccgtgtttgtctcggcaatggtcgtctggctggcggtcagcccgctgctgccggcctttatcctatggccctccggtcagcccaccacggccgccgccacgaccgcacaggccaataccggggccaacgccgccgctggcgccgcgtccagccccgccaacagcgatattccgccgcagaccgagccgccgacctcagccaacctgaccaactggctgaacgctttctatgccgccgagcagaagcgcaagacgccgttcccggaccagctgccggcggatgcgcagccgtttgacctgctggtgatcaacatctgctccctctcctggtcggatattgaagccgccggtctgatggatcatccgctatggaagcactttgatattgtcttcaaaaactttaactccgcgacctcctacagcggcccggcggcggtgcgcctgctgcgcgccagctgcggccagctgtcgcatactaacctgtatcagccgtccggcgccgactgctacctgtttgaaaacctggcgaagctcggcttcaaccagcagctgatgctcggccataacggtctgttcggcgacttcctgaaagagctgcgttcgctgggcggcatgcagagcccgctgatggaccagaccggtctgccggtcagcctgcaggcgtttgacggctccccggtgtatgaggatctggcggtcctcaaccgctggctgaagaccgaagaggccagcagcaatccgcggaacgccaccttctataacaccctgccgctgcatgacggcaaccacttcccgggacaaagcaaaaccgcagactacaaagtgcgggcgcagaagctgtttgatgacctggataacttcttcaccgagctggagaaatcggggcggaaagtgatggtggtggtggtgccggaacacggcggcgcgctgaagggcgataagatgcaggtatctggcctgcgcgatattccaagcccgtcgatcactaacgtcccgacggcggtgaaattcttcggcatgaaggcgccgcatgaaggggcgccgattatcatcgatcagcccagcagttatctggcggtgtcggagctggtggtgcgcgctctcgacggcaaaatgttcagcgaggacagcgtcaactggcagcagtatgtcgccaacctgccgcagagcgcggcggtgtccgagaacgccaacgccatcgtcatccagtatcagggcaagccttatgtccagctgaatggcggtagctgggtgccttatccgcaataa

SEQ ID NO: 232541 - DNA, 465 bp, Klebsiella pneumoniae
atgacggcgctgcttgagctgcgagatatacgtcgcagctatccttccggcgacggcagcgttgaggtcctgaaggggatcaccctcagcatccatgcgggtgagatggtggcgatcgtcggggcctccggctcgggaaaatcgacgctgatgaatatccttggctgcctcgacaaacccaccagcggcacctatcgggtagcgggaaccgatatcgcgcagctggatggcgatgcgctggcccgtctgcggcgggaacactttggctttatctttcaacgctaccatttgctgtcccatctgaccgccgcgcagaatgtcgaagtgccggcggtgtatgccggcagtgaacggcgcgcgctcatgagctgctggtgcggctggggctgggcgagcgcgccgactatcaaccgtcacagttgtccggcggtcagcagcagcgggtcagtatcgcccgcgccctga

SEQ ID NO: 232542 - DNA, 2157 bp, Klebsiella pneumoniae
atgcaaaacagggcacagaaatggccatcgctgaaaccactcagcttggccttgatggcaatcatggtggcatcgcaggccagtgcagaagagacgataaatgtcgtcgccgaatctgccgacagcagtggattggtcgcaacacacagtcagagcgcaactaaaagtgatacgccattactggaaacgccgcagtcgatctcagtgattactcgtcaacagatggatatgcagaacgttcgctctttaaatgaagcgctgcgttacacaccaggcgtggcggcggagcaatggggtggggtgagtgcgtttgaccagttctcaattcgcggattcaattacggctccactggattgaacgatcagtttctcgacggattgcgcatgaacaacgggatagtttatggctatcaacaggttgatcccttcctgctggaggatattaccgtggtgcgtggcccggcttctgtgctgtatggcctagccagtccgggtggaattatcgcgatgcagagtaaactgcccactgcgaagaccattcgccatgttgagctggaaggaggaaatcatcagtatcagcgcggctctttcgattttggcggaaaagtcaatgatgacggcacgatactttaccgcgtggtcgggacggcaactaccaaagaaggtcaggggcggagcaccgaaatgcggcgctgggcgttagcgccttccattacttttcagcctgactactataacaagctcacgatttatgcgcgtgcgcaaaatgatcctaaaatggcagccctgccttccctgcctgttgccggtacggccaaatacaatcctaacggtaaattaccgacagacgcttatccaggcgagccggatcacaataccttttcgcgtaagcaggccgctgttggctatagcgcagaacactactttaatgatgactggaatgtcaccctgaatggtcgctacagtcagatgacatcaaaatataacgcggtgatttttgccggattgcgggacgatatgcgtaccatcaaccgatcaatcgccgcatctgacgagcatttcaataccatcaatctcgacaatcagctgcacggacatttcactacggcggatattgatcatcaacttctggttggcatgagctgggatcgctttaccgggcacggcaattacgccgcttcttatgatgtccccacgctggatatctacaacccggtttatggtcaggccacctacggcacgcctaagaactatcaggatacgcggctgatgaatacacagaccggtttgtatgctcaggatcagttgatctatgaaaaatggcgcgccacggtgggggtgcgtcatgactggtcaagcgtgcgtaccactgacttaatgggtaaccgcgcggataccaaacagcgtgatgaagccacaacctggcgtgccggcgtcaattatctgtttgataacggtattgccccgtatttcacatacgctcaatcattccagccgatcaactctgtggacagcagcgggaacgcgtttgatccctcgcacggcgagttgtatgaggcaggtattaagtatcagcccaaagtgctgccggcactcttttccattgccgcgtttaacctgagtcaggataaagtgctgaccaccgatcccaacaacagctactactcggtacagcgcgggaagattcgttcccgcggcattgagttagaagcgcgtggccaactgactgaccagttcagcatcatcggatccatgacctggcagaatgtggaatatacccaggacagcaatcgcgatgtcgttgggcgcaccccactgcgtatacctacccgtttcggttcgttgtgggtcaactgggaagcgccggagtccagctttgcttccgggtttggtgcaggtgtggggggacgtttcagcaatggtaccaaaggcggcaccatggagaaccagttcagcaccgctggctatggcgtgatggatgccgaagtgcatttcgatctgggacatctgacttccaacctaaaaggtggaaaggtgcaggtcaccgcgcaaaaccttaccgatcgtaagtacatcaccagctgctttaccgaatctcagggctgtttttatggggctgagcgtgccgtgatagcgaagctgagttgggatttttaa

SEQ ID NO: 232543 - DNA, 1734 bp, Klebsiella pneumoniae
atgatgcgcatttatcacaacatgattgcggtggcaggggagttcgctgcgccatttcgccgaacgttagcgtgtgcggtggtggcggcgatgttgcaagccgcgggctggattatcacactgccgctgttttcgctcgtattaacaccgggcgcactgcccgtgcgtgacatcctgagctggctagtggtgctcattgttttgctgctgcttgaaggcatggtgcgctggcgtgaaatggcttttgtctatgactactggcatcgcgtgacggaggccatgcgtcagcggctggcacatcgcttgcgtgccatgccgctggagcagctggcacggcgaaaaagcggcgatctggcaacgattcttggcaataacgtcacctttgcggcaacggcgctctcttcactggctacgctggcgattcaactggtggtggtacctgcggtggtgctggtgttgatcttcacgctggactggcgtctgggggcgctgctgctggcgggaacagggctcatcgtgccgctgatacggcgggcacaacgtgatgccaatcaggattttctgcgcattgatgaagtggatgcggcagccagcgcagccattgttgagtatgtgcaggctcaggcgatgttacgtgtcagcggccgatctggcctgaacgcgccttgtttacgcggggtttttgctcaccagcatcaggtgcagcatcaaagcggcaatactgcacggctgattgccaaagcacaactgatcatacagctcactctggtggctaccgtcgcgttggggatggggttatgcgcaacgcaacagttgccgctggcatcactgctctgcctgacggtgctggtagcgcaaatggtagagcctctgacattgggactttccatggtgcgcctgtttgaactagcggacgcggcgttgcagcgggtgaatgcggtgctcaatgaagcggatctggtcactgaactgccactccatcaaccacagcactttgcgattacgctcaacaatgtcagttttcactatcagcagcaggaaaaacctgcactccaggatgtgacgctacacattgcagaaaaatccctgacggcgttggtcggtccttcgggcggggggaaaaccacgctaatccgattgatgagtcgctttgccgatccacagcagggcactatcacgttgggaggcgcggaattaaagcatatcccccccgatcagcttttagcacaggtttcggtggtgtttcaggatgtgtggctgatggacgatacgctggcgaataacatcgcgttaggtaaaccgcacgccacgcaggaggagatcatcaacgctgcacgtaaagcgcatattcaccacgtcattgaaagtctgccgcagggttatgagacacgggcgggtgaagcggggggggcgttgtcgggtggagaacgccagagggtggcgattgcgcgcgctattcttaaagatgctccggtcgtgttactggacgagcctacgtcatcgctggacagcgaatcggaatatcatgtgcagcaagcgatagacgcactggtggcgaataaaacggtggtgattgtggcgcatcgtttatccaccattcgcgcagctgaccaaattgcctttattgagcaaggccgttgcgttgagtgtggcgaccacgccagcttaatggccataaaggagggacgttatcgggcattaattgaggctcagcatcacgccctcgacaggtaa

SEQ ID NO: 232544 - DNA, 1767 bp, Klebsiella pneumoniae
atgaagttactgggacagcctggcaggctagtggcaagcgtgccgaaggtggcgcactcacttaacctggcacttctttttggcagcgtggcgggcttgctaaacgtcagcggcatagcgctgctggcatgggcggtgacgccattactgtctgttccgatgttaccaccgccgtcatttatcgccctcaccggcagtgtgctgctgttggtgctggcattctggttgcgcttacaggcagaagcacgggcccacgaagccagttatcaattagaggaagtgctgcgcgggcgtcttgtggagcacctcagttgtttgccgcttggagtggtacagcaatggggcagtgggcggttacgtaaaatcctccaggaggatgttaaagcgctgcatattgcggtggcggatgcggtgccgtttatcggtgccagtctgagtcaaccgctggccgcgctgctggtgctggcgctggtgcagtggcggctggcgctggtggcgttgctgtttttgccgataaatctcgtgtgtatggcaatgatggcgcgtgaaaatccccagcaacgcaaccgatacaatgaggccagtgagtcagtcaatgccggggtgattgaactggtgcagggtatggcggttatgcgtacctttgataatggcgccgcgggttggcggcgctttaacgcgcggctgcaacagtttacgtcggcggtggaaacctggatggcaggcagcaaagtgccctggaaaatcaatcgtctggcaggtgccgcgttaccgacggctgcggtgctgatgatagcaggttttgtgctgtatcaagccgggcaggttaccctggcgcagtggctgctggcgttgatgttgggtacgttacccatcaaagcgctcgaaccgttagtgcacctggctaactatctgaatgacgctggcgcggcctcaggccgcattgaagaggtgctgcggcaggacgtgctgccagagccactacatccgcagcaaccgcaaggacacgcactcagcctgaacaaggtcagttttcactacccggatcagccgcagcctgcactcagcgacgtgtcattaacgctcgcagcgggaacacgctgtgccattgtcggggcttccggttcgggaaaatcgacgctggtgcgcctgatcccgcgtttttatgacgtgacagagggtagcattacgctgggggggagcgatatccgccagatgcgcagtgatgtgttgttgaagcaggtggcgctggtattacaggagccgtttcttatcagtggcacgctggaggaaaatttacgactggctgcgcccgaagccagtgatgcagcgttgcagcaagttatggccgcgacgggggtgagcgagatcgtttcggcactgccacaaggattaaacacgcagatcggtgagcgagggagctcgttatcgggcggccagcgtcagcgtgtgaccctggcccgcgcactgctgagcaatgcgcccgtgctggtgatggatgaagcaacttcttatctcgatgcacacaacgaaaggcatattcagcaggcactggcgcaactcgcgccggatcgcattgtgatcactattgctcatcgtttgcagacggtcattgacgcggatgtgattgtggtgatgcacgaaggcagagtggctgagcaaggccgtcatgctgacttgctgaagcagggcggttattacgcgcgtctgtggcagcactatcagcttgccagtcagtggacgttaaagcgggagggagaagtatga

SEQ ID NO: 232545 - DNA, 5412 bp, Klebsiella pneumoniae
atgactgaccactccatcgcctttgagctgcttcaacgcctgcgcaaccgtggcgcacaactgtgggaggagcagggcaagctaaactaccgcgcgccgcagggcgtgatttcagcggatgatttacacacgctgagggcccataaagccaatgtgttagccattctcgcaggagaacagcagcagaccacgctcatagccgatgagactgcgcgcttcgcaccgtttcctctaagccaggtgcaggcggcgtatctggtcgggcgtaatgatgcctttggctatggcggtgtggcctgccatgtttatctggaggtgaattatccactgctgcaacatgccagagtcagcgctatctggaatgagctggtcgcgcgacacgacatgctacgtgcggtatttgatcgcagtggcagccagcgcgttttacccgatgtgccagaactgatcattgactgcgcgagtagcggagcggagcagggcgaagcgctgctggacagcgtgaagcagcagatggggcatcgactctaccagcccgagcagtggccgctgttcagcctgagtctgtcgcagttgccggcacgcagcgtgctgcatttgtcgatggacttcctgattgccgactgggccagtatctggctattgttgggcgagtttgaaacgcgttaccagcatcctgaccagccgctgcctccgctaaagattcagttccgcgattatctgctggcggagcgcggcatggatgagtcaccggcggcccagcgcgatcgtgcctggtggcagcagcgtattcctcagttgcccgcctcgccgcagctcccgttgcttgatacacaggaacgacagcccgcacgctttacacgacgttttttgcaactgccggaggaacgctgggcggcactcaaacagcaggcggcacagtgcggtattacccctacagcggcggtgttaaccgcctatgccagcgtgctgcagcgttggtctgccagcgaacacttctgcctcaatctgacggtacttaaccgccagccgctgcatgagcaggtggatcgtctggtgggcgatttcacctcggtcagcctgctggaggtcgatcaacgccgtccaatgagctgggcggagcgcgccagcgccatcagccagcaattgtatgatgacctggatcatcgcctttgttccggcgtcgaggtgatccgtgaactggctcgcgccaaagggcgcgattacgctttgatgccttatgtttttaccagtgccatcggcctggtacctgccgatgcagaaaacgcgttgcagggcaaactggatggacgtggcattacccagacgccgcaggtgtttatcgactgtcaggcgatggacagtgctgccggtttacaggtcaactgggatgtgcgcgacggggtattcccgtcggggatgatcgacgatctgtttgcgagctttgaatcactgctgaatgccatggcgcaagaagatgcgatttggcagcagaccgcgcaggttgcactccccgaatggcaacgtgaacaacggttgcaggtcaatgatacccacgcaccgctacccgaaggcgggctgcaccagccattcttcgcacaggctcacctgaccccggatgcgctggcggtgatcgatccccagcagcagatgacttaccgtcaactggcggacgcagccttgcgcattgccggccatctgcaacggcatggcgttgccatcggcgaaccggtcgcgatcacgttggaaaaaggcgtaatgcaggccgcggcggtgttgggtgccatggctgtgggggcggtctgggtgccagtcgatgtctcacagccggcggaacgtcgccggcaaattctggcaaacgcgggtatccaacgggtactgacccagcaacaggtagtagagtgcggcgtcagtggagagtggcgtattgatgtggatgcactgaacggcagcgagcctctgctggacccacacgcgtcgcgcagtagcgatgcggcctatatcatctacacctctggttccaccggccagcccaaaggggtggttatgggacatcaggcggcacggaatacagttgaagatatcaaccgacgtttcgccgtgcgggccaccgaccgcgtgctggcgctggcgcaactcggctttgatttggcgatttatgatctgttcgggccgctgagcgtgggtggcgcggtaatctatcctgaaccggcacgcgccaccgatccctcgcactggattgaatgcatcgaatcacaacaagtgaccctctggaatagcgtacctgcgctgatgcagatgctggagagtgcgctccagcaccagcaactggcgagtttgcgactggcattactctcaggtgactggatccctttaacgctgccggaatcactggcgacgcgtctgccacagcttcagctggtagcgctcggtggtgcgactgaagcagccatctggtctaactatcactgctggcagggccgtgatgccacgtggcgcagcatcccttacggtctgccgctcagcaatcagggtttccgcgtgctggatgacaacatggcggattgccctgtgtggttgcctggcaatctttacatcagcggtgcgggactggcgcaaggctatcttaaagatgctgagaaaactgcgcgccactttatccatcatccgcatgatcaacagcgactgtactggaccggcgatcgcgcccgctatctgccgaacggtgaactggaatttcttggccgcgcggacaatcagctcaaaatcaaagggcaccgcatcgaacccggggaaatcgaagcggcgcttagcgctttaccaggcgtggagagtgcttgcgtggtgccccatggcgaaggtagccagcggcaacttctggcattagtcagcgcgcagcgtcaaccagcgaaccccgtggattacgaccgcctgacagatagtattgatactgcaaccgcaggtcttgtgcagaacatcaccgctacgcagttacaacaggcgatgacagccctggatgctgtggtattacaacagatgcgcgacacgctgcaagcttatggtcttaatgatgaattcagtgaagctcagctacgagaaacacccgtgaatgctcgcttcttctggctggtgcgccgctggcaagcgatgcttgcgcaggctggcgctttgcctgattacagctggcagcaggttgacgcgctgtggcagcctctgctcgatggcccggcatttctggcttacatccgcagcaacctagagaatctcgccgggctgctcgaagggcgtgttgatgctcagaagctgctgttcccgcaggggcaactgaccaacgtgcaagcgctgtatcgtgaaaatctgatggcgaagtacctgaaccaggcagtcagtgccctgacgagcctgattgcacagcagcgcgtccagcggcctttacgtatcctcgaagttggcgcaggcactggcggcacgacggtggatgtgctggcagcgttgagcgagcagacgattgaataccactttactgatgtggcggccttcttcctgcctgaagcgcgtgcccgctacggccaacgagcgggcatgcattttggcctgctgaatattgacgatgatattcgctcgcagggctattgcccggagagctttgatattgtgctggccgccggggtactggaaaacgcccgtgaccaacgccgggcactggaaaatatccagtttctgaccgcgccacaaggctgggtgatcctgacggagccgacgcgtgaatgtccgtggatcatggcttctcaggcattcatgatgacgccaccggaagacagcgaacgtcagcaggagagctatcttgatcagcatggctggcaggcgctgatgcaatcggtcagcggtgatccggtgctgtgcctgccgcgaccaggtcacgtgctgcattatcagggcttccatttgctggcacaacaaatcaaacgcgatcgtctgccgctgtatccgcaagtgctgcttgatgcgctgcaacagaaattaccgcgctatatgatcccggcgcagattcaggcggttgcagcactgccgctaacggcaaacggaaaagtggatcgtaatacagtcgtcaactggtgggtggaggaggctgcagagcatgatacgccgccaggcctgcaaccgcagggggatgcgcttgagcagttgctgtgccagcattgggctgaaacgctcggaattaaacagatcgcgctcgaccaggatgtgtataacctgggggctgactcgctgatcatggcacgcatggcaggcaagttgcggcaggtgctggccgctgacccctggcagatgggagatataccctttgacactttgctgcgtcatatgctgaatggcccaacggtgcgcgcgctggcgcaggctatccgttcgcagcatgcacctgatgcggctgccgcagcgcctcaagccggagagaaactgcagccagaaatcgagggacgggctgagggcagcaacggtattctgctgccgatggggggcgggagtgaaggcccgctgcgggtggtgttccatgccggcctgggtaccatggattgcttccgcccgatgctggcggagctggagaaagatccacgcgggccggtcatcggcattgtgattgccgataccgcacaatattgcgccttgtccccacaacaggcggttgagcgcatggcagatgattacgcacaacgcctgctggccaccggacatagccgcttccagctgattggctactgtctgggcgggttgtttgcggtagaagtggcgcgtcgcctcagcgagcagggcgcagaaatcgctgacctggtgcttatcagcagccatccggtgttgttcgaggtgcaggatgatctgatgatcgaatcgctgtttatccccaatctgcacattacgctggcgcaggccggtttcggtgaggttgatggcgatgcattagtgaagggctttatgcaggtgattgagcaacatcatggtcgcattccgcagggtgcgctggcgcagttatccggtgcagcaggcttgtttttccaacagatgcagtcattaccgattgaagagcgttttgcgcgttatgtcgcgggtgttgaacagttcaccggtcagcagatgccagccgaaatggcactgggcctgttccgcgtattccgccagagtttccatgccgcacacttcacccccagcacttatgtcggcgatatccgcttcctgttgcccaatcagggctctggattcgcaccgggtatggatgacaatacgctgaacttctggcgtaacgtctgcctgggcgatctgcaggttacttcgattgcgggtaatcacttcagttgcatcgatacgcccaacgcacaagccgtggcgcagcgggtgaatgaggggctgaaatga

SEQ ID NO: 232546 - DNA, 1401 bp, Klebsiella pneumoniae
atgcgcgagctattttctgccttacagcaggtgctggaaggggatttactgttgccgcagcatgcggaatacgaagttgcacgccgggtacgcaacgcccgtattgactgccggcccaccgcgattgtgcgctgtgtcagcgtgcaggatattcaacagtcacttcaactggcggagattcagcaactgccggttgcgctgcgaggtggtggcgcccacgtggccggttacggcacctgccaggatgggctggtgcttgatctgtcccgcatgaagcagatcgctattgacccggataaacgcctggcgcacgtcgcccctggaaccacctggggcgaactggatgcggcaacgcaggcgtacggtctggcggtacccggcccgcgtaatcccacgatcggtatcgccgggcacaccctgggcggcggcgttggtgacctgtcgcgccagtttggcctgaccagcgataacctggtgagctgcgagctggttacgttgtccggtgacgtgctggaagtgaacccacagcacgatgctgaactgttctggggtttgcgcggcgcgggtgccaattttggcgtggtatcgcgttttacgtttcaattgcatcccgttgagggcgtcgtggccggcgtgctcgcgtggcctgcacgggacattcctgttgtgttgcgccgggcacgtaactggctggcgcaggcaccggatcaggcctcgttgattgcccttgtctggacggcaccgccgctgccatttttgccagaatcactgcattttgagcgcagtatcatgctcattcccacctggtttggtgcgccagagcaggcggaacaagtacttgcgccccttaaggtgggcgcgttgtgcgacacgctgcaaccgatgcgttacgtcgattatcagcgccttctgccctcggcgcccaactacctacagcagcatgtttacaaccgtggcgaattgctgcgtgaactggatgatgacacgctcgaacgactgctggcgctgttccagcgtgctggcccgaatttctcgctggtgtttggtgcacttggcggtgccattgcccgcgccccggcgggcgcaactgcgtttgctcatcgagatgccaactggtttgttgaagtctgcgcccagtggtacggcgagcccgataacccagcgatgcttgcaccggccattgaggcctggcaacagctgcaagcggtgagctgcggtccttacgccaacctgctgcctgaccatgagccgcgttgggcgcaggccacgtatggcagcggctgggcacgcctggcggcactcaaacagagatttgacccgactaatcgcctgcgttttaacgtcaatattccgccccggtcatcccgcgcgatggctccgggcaaggaggatttagcatga

SEQ ID NO: 232547 - DNA, 711 bp, Klebsiella pneumoniae
atgcttaggtgcagccatattctctgcaaagtcgataacattcgtgactgcgtagcccagcttgaacaggctgggttcagcgtgcagtgggggggcgatccggctcgggcacacaatgcgctggtgtggtttgaagagggaccgtttctggagttctttgaactgccgcgttggttccgctggctgagctatccctttggctggcgcttcggttccagcgccggtcaacgtcttagggggtgggcgcaggctggtgagggctggtgtgatgtggcgctggaacctgaacagtatcagcccgaagcgccacttagcctggataacgtcagtcagcatttgcgtcagcaggcgctggcaggttcgcgtgtcgtaaatggcagccgtaaatcggtacagggtgaaagggtgaactatcgctttatgatgccgcgcggtaaccatctgccgtttatcgtctctcattaccacccgctgcagcggccggtttgcgtccggcatgccaatggcgcacgcgccgtgacccgggtggattttcatatcccgcagcccagccaccgccagttacaacgcctgttgcctacggaccgctggctcaagagtcagcacggtgagcggcgctatgtcagcagcgtggttttacaggggtggcaggcactgccgcagacatccgaatttattcagtcgttatttaacccgtcgcaggaggcgtaa

SEQ ID NO: 232548 - DNA, 2223 bp, Klebsiella pneumoniae
atgaacgcggtaccgttaaaggtgctggtatgtggctccacttttggccagttctggttggcagcactgcagcgttatccactgcgctttaaagtggtgggactactggcgagcggcagcgcacgtagccgtgattgcgcgcaacgctatgacattccgctctacaccgatatcgcctcattacctgaagacattgacctggcctgcgtggtgttgcgtgctaccgtgatgggcggtgcaggcagcgttctggcacagcaactgatggccaggcgcattcatatcattcaggagcagcccgtacatcatgatgaggtggtggcgaacctgcgctcagcgcgtgaattcggtgtgcagtatcgggtcggcaacctctatccacatctgccggcggtgcagcagttcattcagtctgcccaccgcctactgcggcggcaaaagcttcagtttattgatgcagcgtgtgccagccaggtggcgttcccactgatcgcgatactggtggaagcccttggtgcacctcgcccgtggcagtttcatgcccaggcgcaattaccagaggcacctttccaggtggtgcagggacagttggcaggaatccccttaacgttgagtgtacataacgaagtcgatccgcaggaccctgacaaccatttccagctgttgcaacagatcacgctgggcttgcccgcgggacggttatcgttgatcgatacacatggacccgtgatgtggttcccgcgtttgcatatccctgaggcggtaaaacgcgaccgcgattttagcagcccgcaatcagcacatctgatggaagataccagcgccattatcggcgaggtccagcgtgccagctggcgcaccacattggcggaacactggccagaagccattgcccaggatttactggcgctggcggagagcatcttgtctcctgaggccccccactggagtccgcaatccctgttagctcaatgtcagatgtggcaggcgctgaccaaaacactcggctatccgcgcctaaatccggaccagcggtttgaacctctggcgcgtaccttgctgcctgtcaccaccgggctggaacctaaagccaccccacagtgggattttacccagcgggcagagctgctggtgagcggcattactgctcagcaggtgacggattttgtcgcgcggatggatgaagcttgcctgaacgccatgctgtttagcctgcaacagggaggcgcgttgacgcatcccgatcagggtcacgacctgccagggattttgcaacaactccaggtggccgaagcgcatcacgccctgattggacgctggctgatgctgctggccgatgccggtctggtgatgcaacgaggcgcgcactactttagccgacgaacgatcggctataccgagctgcatcacagctggcaggcggtgcacagggtttgggacaaccgcctgggctctgccacttttatcgattatctgtggcaaaacgcggaaaagctgggtgagctgatgtgcggcgaacagaaggcggcactgttgctgttcccggaaggccgtaacgatattgccgatgcggtctatcgccataccatcaccgcccgttatctcaacaccctgattgccgactgggtcctgaagcagctcagccagcgaacggcaccgctaaaagtactggagattggcgcaggcaccggtgccaccaccgaacgggtacgggaacggctgcatgaggtgtatggggaaacgccgccgctcaactggctgtttagcgatgtctcacgctttttcctggtgaatgcgcaacagcgctatagccatctctcctggctctcgactgcactgatcgatattgaccgccccctgaccgaacaaggcatcgctgcagattcccaggatctgctggtaatggcgggggtactgaacaatgcacggaacagcgagcaaaccattcgttggctagcggaggtgttacaaccgggcggtgccatgttaatcaccgaaccgacgcgggaacatctggaaattctcacctcacaggcctttatgatgccgccaccacaggatgaccgacagcgcagtgaacagcgttttctttcaccagagcagtggcaggatctgctacagcgctccgggttgatttgtgaggcttgcctgcccgacgaggggcatgtgctcgcaccgctcggacagcgcctgtttatcgcacggaggcccggcaatgcttag

SEQ ID NO: 232549 - DNA, 1041 bp, Klebsiella pneumoniae
gtgattggtattttgggaggatttggtgccgtaggcagcgaggtcgcacgtatcctgcatcagtggggggaaacttcgctgcgcgtgggagggcgtcacccgcaacctgtcgcctgggcacaaagctgctatgtggatgtgagtgacgaagaaagtctcatggctttcgccaccgactgtcggttgatcgtgaactgtgctgcgccttcggcacgactgtcacaacaggtggcgaaccgactgcacgccgcaggtattccactggttgacgcgggcggaattgattgcccggcagcgttaacacctccggttggccggcatccgggcagcgcgttgttcgcagcaggcgcattgccaggtttgtccggcattcttcctgtgtggctggcgcgtaagctgggccgcgtcgatgcgttgcactgctggtttggcgtgtttgatcgttttaccccaggcggagcagaagactatcttgagggtgtgctgcgcacgccagcctctcagcataccctgccgcggcgacagtccaacgtcatcctgcctttctttccacgcccggtgctgctgcagccgtatgaagatgaggagtcgctccgggtcaccgaacaactggcgcttcgttacagtcgatggtatctcgcgcttgatggtgaacacctggcccgcgcgttagaaacagcgcgtgtattaccacgagaggcagcaatacaggcggtggtggagggggcgacactggatgtggcgggtcgacatgcatgggttaactttttgatccaggtagatggcgtgcgtcagggcactagcaccacgttaaccttattgctgagagcgccgggcattgctcagttaaccgccgcctgcgcggcggcatgcgctaaatggctgctgaagtcacctgagctagtcctggggctggcagccgaatgcatcgatatcgaagcgttcatgctgctgttctgccaggagcaaaccggtattgatattgagttgtttgaccgcgggattgagcatttaaacgaaatgagcggaggtgcgctatga

SEQ ID NO: 232550 - DNA, 7449 bp, Klebsiella pneumoniae
atggcaagcccccttcagcataaaatatgcacagatatggccccctttctccccggcatattgccggatcgactcgctaatgactgcgacctgatcggcctcgggctcgactcgctggcgatgatgaaactggccgctatgtggcgtcggcaaggttacgatgtgtcgtttgcccgcttgattgaacagccacgcctggatgcctggttggctttgatgacgcaacaaacgccatccgcggagcaggaaaaaaaggccgtgttgccaggcacacatgaaaacgaacctttccctctggcgctcatgcagcatgcatattgggtgggacgcgacagtgctcagcatctggggggtgttgctgcgcatttctaccatgagttcgatctaccgcaactggatgttgaacgcctggaaaatgcggtacatcagttgcttgcccgtcacggtatgctaagggtggccattctggaggaggggctgcagcaggttcttgaatacgcgcagtggcccgggcttagggaatatgatttacgccaggagacagcagatatcgccaccctgcgaatggaggcgattcgcgccgcgctgtcacatcgccagttaaatattgcacaaggcgaggtgtttgatgtgcgtgtgacgcataagcccgccgccctcggtggtggctgccgcctgcattttaatctcgatatgatcgcggcggatgccatgagcctgcgcgttctgttggacgatctggcgaggctctatctggagccgcaacagccgctgcctgtgctggatctctcctattgccagtatcaacaactgcgccacgcctggctgcaggaaccgcagcagcaggcgcgctacgcacaagacaagcagtggtggctggagcgtttagccgatttgcctggcgcaccaatgttgcccagcgttgggttaaacctggacagtgcgcagcagacggtggtccgtcgccatcgctggtttgatgccagggcccgtcaacagctggaggccagtgcgcgtgaacatcaactgaccttgccgatgatgattgccgctgcgtttgccgaagtgctgacccagttcagtgacgacgaagatttcattcttaacctgccgttgttcaaccgtgaaccgctgcacaccagcgtacctgcgctggtgggagatttcacttcgtcagtgttgctggcatggcggggcagcaaccccggcagtttccttgaacgcgcgcagcgcctgcaacagcagttccgtcaggatgcggcacatgcctgtttttccggcgtagaagtgctgcgtgaagcggcacgcgtgcgcggtcagcagcagtttgctcccgtggtatttaccagcgctttgggactgggagagctgttcagcgaacgcgtccagcaggcctttgggcagcccggctggattgtttcacaggggccacaggtgtggctggatgcacaaattaccgagttaaatcaaggttttctggtgaactgggatgcgcgtgagtcccgttttccagcgggtatgcttgatttgatgttcaatcaatttacagggctgattgaggcactcatcgccagtgagcaggcgtggcaacagccggtgcagagtgcgttaccctcagcacaacaggtcgtacgccagcgggcgaatgccaccgatgcccctttacctgagagcgatttgcacagcgctttctttcgtctggcacagctgcagccggaagcgcccgcgttgtttggaccccatcaggtgctcagttatggtgagttggctaaacgtgcacgccgcctggcgacccatctgctcaatcagggcgtgcagccaggggaactggtggcgatcgctttgcccaaaggaccggagcagatcattgcggtgttgggggtacttgccagcggtgctgcgtggctaccgctcaaccacctgcaaccggagccgcgcattaaagccatcctgcaaaatgccggggtgaaacaggttattgaccaactaccggatgaagattcgcggccccctctggcggaagtcactcacagcgatccgcagcatctggcttacgttatttacacctctggctcaaccggcacgccgaaaggggtggagatcagccatctggcagctaaaaacaccatcgacgatcttaaccgccgctatccactgggcgatcgcatgcgcactctggcggtgtcggcactgagctttgacttggcggtgtacgatatcttcgcgccgctgtcagtgggtggggcggtggtatgcattgaggatgagagctggcgcgacgcgcagcgctgggtgacgttgatacggcagcatcaggtcagcgtactgaactgtgtgcccgccattgcggagatgacgttcaccagtgccgctgcggataacctgacgttaccactcaggattgtgctgctgggcggcgactgggtcccgcttgatctgccgaagaagttacgcatagtcgctgagcagtgtcgctgtattgcgctgggcggcacgactgaaacggcgatccactcgacggttcaggagatcaccactgtgccggctgaatggcgctcggtgccctacggatatccgcttaacaacgttcgttgccgtgtcgtggacagcctgggccgggatcgctgtgactgggtcagcggtgaactgtggattggcggcgcaggcgttgcgctgggctatcgccacgatcccgagcgtaccgccgaccgttttgtcgtagagaacggtgaacgctggtatcgcaccggcgacttagcacgctatcaccccagtggctctctggagtttctggggcggcgcgatcatcaggtgaaagtgcggggctaccgtattgagctgggcgaaattgaatccgcgctgatttcccaccctggcgtggcacgcggcattgttctgctcgatgatgaacaacatctggtggcggcctataccagccagcagccggtggagagtgcggcgctgcgtcagcatctgcaacgttatctgccgcaggaaatggtaccggaacgactggtggcactgtctgaacttccgctcagccacaacggcaaaattgatcgcaatttactgcgacagttactggccgaccttacaccggaaacggcccatacctacgaggctgccttgccaggtgtagaacaacaggtggctgcgatctggcataaaacactcggtatattaccgggtcgtcaggataatttcttcatggcaggcggtgattcactgctggctacccgtgccgtggcagaacttcgtcgccagggatttagcgatgttaccctttcaaaactctttgctcatccggtattggcagatttctgccagacattgcgcggcaatcaaccgacaaccgccacgcctgccatcgttcatgatgctaacgggcgttacgataccttcccgctgacggatgtgcagcaggcttacctgtttggccgggaaagtgagtttgcgctgggcggcattggctgtacgttctatcgtgaatttgaggttaatcatctggatctcgcacaactggagcgcgcggtgaaccagttgattgtgcgccatgacatgctgcgggcggtattcagtaacggccagcagcaggttcaaaaagaggtgccgcactatcagatcccgctgttcaaccagccgggtgaagataacattggtctgcaacgcgcagaatatgcctcacatagcttcgatccacagcactggccgctctttagcgtcagcgtggcgcagtggggtgaagcgcatcgagtggcaattgctatcgacaacctgatccttgatgcgctcagtatcctgttgttctatcaggaactggacgcgctctatcatcagcgttcgttgccgaccgtccccgctgttcagttccgtgatgcgctactggcacgcctgccacagcaggcgcaacgtgaggctgcctgggactggtggcggccacgtctcgaccacctgccgctggctccgcagttgccgctggcccggcaacctgaagcgatatcggtaccgaagtttacccgccgtgagtactggctggattcggatcgctggcagcagctgatgcgaaaagcccgccaacacggtgtaacaccttcagcggtgatgctcaacgcatttgcgacagtactgcggcgctggagccatcagccggactttaccctcaatttgaccctgtttgatcgtcctgaaggccacgatgatatgacccgagtgatgggggatttcacttcgctggttttggtgccgtgtcgtcatgccgacggcggctggctggatgaagtttgccaggtacaacgcgatatgtggggcgcgctggatcaccgttcgctctcagccgttgaggtactccgtgaactggctcgtctgcatcaggcgcctgaactggtgatgccggtggtgtttaccagcgctttgggaattagcgcagaaccggagcagggcatcttcagtcaatccgtttatggcctgtcacaaacgccgcaggtctggctggatcaccagttaaccgagctggcaggcggtgtctcgctggtctgggatgcggtagaggctctgttcccggcgggtatgctggatgcgatgttcaccgcctatcagcagctcatccatcatttatgtgaccataactggctgcagtcgcttcccgacctcttgcctgtgccccaacgtcaggtgcgagaggcaatcactgccgccgcacatcacccctatgtagcggaaacattgcatcacgcttttttccagcaagccagtcagacaccgcagctggtggcgttgatttggatgcaagagcagcaaacctgtcagctttcttatgctgagctggcacagcaggcgctgaaactggcgcactggttgcaactgcaggggacgctggcgggcgatagggtggcgatttcactcccgaaaggcccgcagcaggtgatcgcggtgctgggggtgttggctgtgggggccagttgggtaccgattggtatcgatcagccacaggcacgcaaacaggcgattttgcaaagggctgacgtacggctgatgctcgatcagaacacgcccttgaccggcgatcaggccgtgcagacggaagtcgcggcgttggctcatccggtagcaatctccccccaacagctggcgtatgtcatcttcacatctggctcgaccggagaacctaaaggcgttgagatgtgccacgccgccagccataacacggtgcacgatttgcgccagcgactggcgatacagccgcaagaccgcattctggcgctctcggcactcgattttgatctttcggtatttgatctgtttgcgccgttaggctgcggggccgcgctggtgatggtggatgaggagtaccgtcgcgatgcagctcactggatacacttaatgcaaactcatcgggtcaccctgtggaattcagtgccagcgctgctggaaatgctgctgacagccgcgcaaaacgtcacgttgcctgcgctgcgggcgtcgttgatttccggtgactgggtccccctgtcgctgccggagagattacaaatgagcgccccgggatgtcgtttactggcgttggggggcgccaccgaagccgctatctggtcaaacattttcacggtgaccacgatcaaacctgactggcgttcgatcccatatggctacccgctacataatcagcgctggcgtgtgcttaatgcggtcaatgccgattgtcctgactgggtggagggcgaactgctcatcggcggtgcgggtctggctcgcggctatctcggcgatccagcgctgactgaggctcgtttccctgtgcttgatggcgagcgctggtatcgtaccggcgaccgcggccgctactggccagacggtacgctggagttcctgggtcgactggatacgcagatgaagctgcgcggccatcgcattgaggccggtgaggttgaacaggcattgcagacgcttaaaggcatcgaccaggcggtggtctcattgtggcacgatggcatcacacagcgacttgtagctgccgtcgccccccacactcctacctgtttcgagctggatgaggtattccatcctgacagtactcaacgcggtctgctgcagtatgaatcggcggtggccgaacacattctgacggagctcctgcaactgcctgcgcaagtcggtgcagtctggcaagtgaacgcgcttcagcccgatgaaaagggcgagcaggtgctgcagctgtggctgaaatggctggtgtcgcgtggtgtggttcagccacaggatacacactacattgccaccggaactgctgccgtgatcgccagacctgaaacggcgcagatcgttgcggcacgcacccgttatgccagctggcgcgccatgttgcgaggtgagcaagaccatgtcgcactgctgaccgacagcgtattcagccctgccagcctgtcggccgcggatgatgagacacggcaatggttgtcacagctggcgctgcatgttaacagcctgcaccaccagagcggcaagccgatcaacatcgtggaactcaacggggccagcggtcagcacagtgctgcgctgctggcgcgcctgccgcagggcagcgtgcattacaccttgcttgaatcctccccattggcgctggagcaagcgcggactcaactcgcaaacagcggtcatcagatcgatttcttgttgctgaatgaactgtatgtgccggaagaactgcaaaactcggctgacatcgtgctggcggcgaatgcgttgcaccgctacgtccaacccttacatgggttgaaggcagcttctcagttgctgaggcctacaggagagctgtggatgatggaacgccagtgcctgacaccggttgccatgatcagcgccgggctgctggcgggaggatatggcaatagcaaaaaagatccgctgcgtactggcgcggtgtggcagcaacgagctcaggccagtggttttacatcctgtgagtgtaacctcagcggtctcgccgccaccttaactctacgcccttcacatcatcatacgctgcccgatgactggtcgagtcagctggcggaaaaactgcccaaagccatggtgccggagcggttggttctgctgacacatctgccattgaccgcaaacggtaaggttgatcgtaagcgcctgcagtcactgtatgacaatctgcccaggtcacaacaacagcaggaaacactcagtgaaactgaagaaaaactcgctcagctatggggaacattacttggcattacgccgcacatcggccgccggcagggcttttttgaattagggggggatagtttgctggccacacgtctgattaaccttatccgtgatgaatttgccgtcgatatcgcgctgcgaaaagtctttagcgcacctggcctgcaggcaatggctgccgagattgaggcacagcaggctcaggttgccaccatggaaggaggtgttctgtga

SEQ ID NO: 232551 - DNA, 1533 bp, Klebsiella pneumoniae
atgttgatgaatgaagaacaggcaaaaaatcgtagatgggccacactggtggccgcattgagtgctgctattatgacgctggacatcacggtcgtgaatattgcgctaccaaaaataggtgaaggtttccttaccaatctcgcacagttacagtgggtaattaatggatataccctgagcttcgccgccttgttattgctggctggcgccatctccgaccggttgggtcggcgcccgatttttttgtgtggtaatggattatttgttttggcttcattgggctgcgcaatggcgcctaccatcaatgcgttgatcgttgcccgtgtactccagggcgctggcggtgccatggtcttggggactgcgctggcactgattgccagtgcctgtgagggtgaatcacccaaggttcgcaccagcgcggtggggttatttgccgcagggggagccgtgtcagcagcaactggtcccctgattggcggcatactcatccaatgggccagttggccatggctgtttgccatcaacatccccgtcggactactgatcatttttctcaccctgcgccatgttgatgaaaaacccgtacccgcaccgcgttatcctgtcgatgtcgctggcgcggttttcgtcactctcagcctgtttagcctcaactacgccgcactgaacttttcatctgatgccactccctttgtccacctcgcactgctcatcgggatcgcttcggctttattgtttttatggattgaggctcagcggggcgatcacgccctgctgcatttacgtttgtttcgcatccctacgttcctggcggcaatcctgctcagctttgcaggccgcattttcagttttggcttgctgccgtttattacgctttggctgagcggcctgttgcactattcggcgtggcacaccggtttgattcttttgagtcagtcactggcgatggtggtcgccgccggattaagtggtccgctttcaagactgattccagtccgcatagtgctggcaattggcatgttcattgtggctctcggtctgaccctcagtagccatgtgcaaatccacagcgactggctggtgatccttccgctgctgttgatgctgggtatcggtgcaggattaaccatgccgcatctgatggatctcgctgttagtgttgttcctgcgcgtcaggctggcgctgcatcgggcactgcaaatacgttcttcccgctcggtactgccgtgggtatcgcgttgtttggactgttactcaaccatgtgatccagcaagctttgccgctctccctgttaagtgcctctggtatcagtcagcctgcatcagcccttcaggccatcagcagcgcgcagtttgatgtgctgaatgccgtgcccgaactgcagcaacgggccttgcaggcatgggtagatggattaaacctcttattccgcgttgccgccgttgcaagtgccctcgccggtctggcggcactgtggttgattcgtccggtacaaccacagccggaacagactcaggacagtgcctga

SEQ ID NO: 232552 - DNA, 750 bp, Klebsiella pneumoniae
ttgacttccccctggatacgaacattaagcggatacattaagcctgagttacaactgttttgtctgccgcatgcgggcggcaacgctgggctctatcgcggctggcgtgaacatcttccgccggaaattgaattgaatgtgatctgctatcccggtcgtctggagcgttggcagcatcccatccccgcgacgatgccggagctggtgggggaagtctctcgggctattgctccgcatcttggcgagaactgggctattttcggccacagtatgggagccgttgtcgcgcatgaaacgattctggcattaaaatgcgatgagttacctccaccgcaactgttggcggtctccgcccgtgaggcgccgcagtttcatcagcctggccttttacatcaacaggatgatgaagcactgtgccaagagctactgcgcttggacggcaccgatcccgtgttgttgaccctacccgagatgcgcgaactcattctgcccacgatgcgggcggattatgcgttgattgagcagtggcagctgagttccagacaactgctgtcatgccccatcgctgccttcatgggcagcgaagatccggaacttgatcagatgcaggcggaaggatgggcaagctggacaacagccagtttcaccctggactgtttttgcggtggacatttttacttcagggaacacccacagccacttctttcacgattactggcacgcttaagtgcgattcaggcactgtcctga

SEQ ID NO: 232553 - DNA, 2397 bp, Klebsiella pneumoniae
atgcgtaaatggccatatgcaggattcgttttcttcagcctgatggcattcatcggtcttatcggcccctggctggcaccttatgcgatcgatgagatacgtgatatgccctttgctgcgccaaattcaacggcgtggatggggacagattatctcggcgcagacgtcttcagccgcctgctcagcggtggtcaacaactcttattgctggcctgcctgagcgtattactggcctggctgcttggcgggctgttggggatgcttgcggcgctgaaaggacgctggattgaacggatgttgttggcgctggctgacatcctgctcagtattccggggctgctgttactgacactggtggttaccgttagcgggcgcggttatacggccgcagtggtggcggcgatattggtgatggtgcccgatattttccgtctggttcgtgccgcgacgttgcaacaattacagcaagattacgtcgacatggcgcgctgtcggggagagtcactggcagcgattctctgtcgggagatcatgcctaacctgttacccctgctcagtgcagatattggccttcgcctgctggcagccatttttattttggccaccgccagttttcttgggctggcggcgcaacaacccctggctgactgggggctgatgatcatggagaaccgtcaggggttattgtttcaaccctgggcaaccctcgcgccgatctttgccatcctgttgctgcttattcctctgaacctgagtctggatggattgtttgtttctgcgcgtagaagatatgcgcctccggtggcctcgttctcgcacgcacaaagcattgccgatagcaggctaaatattcaacagcttagcgtggaacttcctgaacagacgttgatcaacaccgtttcgctgcagataaaaaggggtgaaattgcggcgctggtcggtacttcaggcagtggtaaaagcactttactgcgtgcggcactggggctctttcccgacaccacaactgccattcgcggtgaggtatggctcgcagggcagtcgctcttttcaatcaatgcccaagcattgcgaaagcttcgtgcccggcacgttggctttgtgccgcaagatccccgtctgagtatggtaccttcgcaaacgctgggcgcgtatttacgttggatggccgcccgtcgcggactcacagatgctcaacgcgatcagcaggtgacgtctcatttccgtcaactggggctgcccgatgatgcggcttttttgcggcgctatccacatcaaatctctggcggacaactgcaacgcgtgatggcagtggccgccatgcttggctatcctggcttgctactgatggatgagccgaccagcgcgctggatggattgagtacccaggcggtgatgcactggatcgcctcaactgcgcgcgcacatcagatgagcgtgctgtttgtcgcacacgatttaccacaggcgagtcagatagccgaccggattctggtgatgtcagagggggaagtggttgaacaacaatccactcaggcatttttgcgcacgcctgatacccaggccggtcagcgcctgctcaatgcctggttgccttgccccttccctgagcaggaaacctcctctgctcaggtcgtcctgcgtgctgaggccgtagaggccgcttatggcggacgcaccgtactgacctcacttcagttctctctgagacgcggtgagacactgaccattgcgggccgatccggcggcggtaaaaccactcttctgcgcattctggcaggtttacaacctgatgccagcggcaccttaagcctgcataacatgccgctgcctctcagtatccatcaacgcagcccgtcgcaaaaatggcaactgcaatatgtcgcgcagaatcccgccagctccctgaatgctttctatagcgtgcgtgcgctgctgcgccgtcctctgcgtcttagcgatcccacattaagcgctgaacagtgtgaacagagggtcatcagcgtgatgtcgcaggtcgggcttgaggcccatttgcttactcgaaaaccgtcgcaactctccggcggtcagcagcagcgtgtggcactggcaagagcattaattacccgccctgacgtgttgttgtgtgatgaagtgaccagtgctttagatgggccgacgcgtatggggctggtcctgctgttgcaacagttgcaacagcagcagggtatcgctctgttaatggtgactcatgatttaacccttcctgtacagttgggcggtttgctcatggtgatcgagcacgggcgggttgtcgaacaggggcgcgtttccgaattgcttacacggcccacgcattcagtgacgtcccggctcatttcagcagcgcaactcatagaggagactacgcgttga

SEQ ID NO: 232554 - DNA, 972 bp, Klebsiella pneumoniae
atgaagtgtcaggttttaattaaacgcctgctatggcgtacatcgcaggcggttttcaccttgtggcttctttcggtgatgatcttttgtgccatgtcgctggttaaaggtgatgctgccagccagcgtctggcagggacggggagccgcgagcaggtgacggcgttacgcgcgcagctgggtcttgatcagcctttagctgcacgctatctgcagtgggccaagggtgtcatgcacggtgactgggggaccagctacttaaacgggcgatccgtaagtacgctcattcgcgagcgtgggggggcctcactggcattaggggccagcgccagcgtgttgctggtggtgatcgccctgggcttaggcatctattgtgggctgcacccaggcagtgtcatcgacaggggcatcagtcttctttccctgggattcgtggcgttaccggaatttgtgacgggcacactgttggtgatggtgttttcgttaacgcttcactggttgcctgcgctttcacttctctccccgggccaatcgttgtggtcacagtggccactgtttattttgccaataatgacactgctcagtgtcgcgttagcgcagaacatcaaattggttcgccttggtgttatgcgtgcttctcagtctccagcctgtgaatgcgcccggttgaatggaattgcggaataccgcgtggtattgcactggatcctgcccgaagcattaggccactgtttatcggtcctggcacgttacatcacttatctgtttgctggcgcactggttgcagaaacactgtttggctggccaggcctggcagcggcacttcttaatgccacgctatcgcgcgatacgccggtggtgatgggcatctcgatggtgatgtgtacactgacggtgctactgaatctcctcgcggatagtttgaccgcgttgcttaaccccgcggctttccggggagggcgcgatgcgtaa

SEQ ID NO: 232555 - DNA, 1545 bp, Klebsiella pneumoniae
atgaaccaggggttaaccagacgaacgctgataaaaacaatgggtattggcgcgggcatcgcgctcagtaatggatttttaccgctggcatgggcggatgaacccaagccgcagcgagggggagttctgcgtgctgcgttcgcaggttccagcagtgattctaccgatgtgttgcgatccaccaacagtaatatcgactatgtacgcgcacgcttagtgtgggattcattagcggaagtagacaaccaacgcatcgtatggcgcctgatggaatctgcagatcctaatcacgatgcgacacgctggaccgtaaaacttcggcagggcgtcacattcagtgatggtcgtcaactcaccagcaaagatgtgatgttcagcctgcgtacctggatgaaccagccgggtagccaaagtggctggctgaagccactcgacctgacggcatcacgtcttgaggatgatcacacactgacattgcagttgcacaaaccggtgggttcatttgatttattactggcgcagtcaatctttatttttccagaaaatacgcaggactttactgcggcagtggggagtgggccttacacactcaaatcctggtcacaggataaaagtgtgctgcaggcgcgttcagactattgggatgcggcaaacggtggtccgtggttggatgagattcacctctacagcgtaggtgacaccactgcacgcctcaacggtttgaaagcggggcagtttgattatgtgggggggatggcgctactcaccgcgcgatcagagcaagctaatccggcagtgaaactgtggcactctccgaaatcggagatgagcaatctggcatttagtatgaatctcagtaaggcgccctttaatcacgccgcggttgtcgaagcgctgaaatatgcgattgaccgggaaacgatggtacgcgcagtgaccatgggattaggcgaagtcgcgaatgatgccctgggcgcggggcaaccgtggttcaatggggaattgcctacccgccattacgatcctgaacgtgcccgtgcgctgttgcagaaggcaggcatagcctctgttgccgcaaagatacgcaccagcgactacgaatacggtacggccgaaagcgctacattactgttacgccaggtaaaagggacgggatttgatctgcaactggaccgcgttcccgctgccgattactacagcgattttaacctgctgctgaatacaccattacaaaccaatctttatcgcccgatgccgctgcccgttgcgttgccattctattatggccatgcggctccctggtcattcaccggcccggctacgccgcaacttgacgatctgatgaatgcgatgcaggcagcacgcggtgatgcgttgcgccagcgtgttgctgatgtccagcactacctgtggcagcagggcggtgatgcgatctttgcgcgaattccgtctattgccgcttctgcaccaggagtgtttggcgtcaaagcggctggcttctttgactatccgctgctgcgtgatgcctggctgcgttcagcatga

SEQ ID NO: 232556 - DNA, 2079 bp, Klebsiella pneumoniae
atggaacacaccgcttcgtatttggcaggaaaaaaaatcacacaacgtgcagtaacgggcctttcactttctttactcaccctcgcgcagcaaagtgcctgggcgcaggctcagccgcagcagaacagttcaacaataacggtcatcgcacagggtgaggaaccacatggcagccggctttcggcaaaaaaaagcagccacgcaactaaaaccacgacaccgctagtggaaacaccgcaatcgatctcggtgattccccgacagcagatggatgatcagaacacgcgtagtcttaatgaagcgctacggtatacgccaggtgtggcttccgagcaatggggcggcgtaaccgcatttgatcagttcactattcgcgggtttaattacagcgacactggctattctgatgtgtttcaggatggtttacgcaataccaatggcctgctctttggtgtgcagcaggtcgaccctttccttctggaacagatcgatgtcttacgcggacccgcttccgtgctgtatgggttatcaaatcccggcggtgtcattgcactcaccagaaaattgccgacgagtgaaacgattcgtcatgtagaagttgaaggtggtacgaagaattacggacgggtcggcctggactttggtggggcagtgaatgacagcggaagcgtactctatcgcttcgtcgctaccggccatctcgccgacggcatgcagcagggcacgaaactcaaaggctatgcgttggccccctccatcacctttaatcctgatgacaacaatagtctgacgctttactcacgctttcagtacgacccggatttaggggtgatcacttctttgcctgcctatggcacggtgttcaccaacccaaatggcaaactgccgcgggatgcttaccctagtgagccaaatcacaacacctttagtcgtaagcaatcaacagtgggctacagctacattcataatttcagcgaagactggtccacggtcttaaaaggtcgctatttcggcgaaacgtccaattatgatgcagtgatcatgtcaggtctgaacgacgatatgcgcaccattagccgcaacaccgctgtctctgacgagcattacaacacactcaattttgataatcagctccatggctttttcgataccggcaccttgagtcatgagttactgacgggtgtgaacgttgaccatatgcgcggccatacttactacggtagcggtagcgtgtcatctctagatatttatcatcccgactatggtgtcgccgaatttggcccaaccgcgctgtggcaggatagccacgtctcatccacgcaaacgggcgtctatctgcaggaccaaattgcttggcggcagtggcgcaccatgctgggtatccgccatgactggagcaaaatcatcagcaaagattttctctacggccagaattacgagcaacacgatcaggccaccacgggacgtgtcggcctgaattatctgtttaacaatggcatctcgccttatttcacctgggctcaatctttccagccggttgccggtctttctcgcgatcaacaaccctttaaacctagtcgcggcgaactctatgagtttggcgtgaagtatcaaccaccaggcaccacgaccctgctttctgccgctgtgtacaacctgacacaggacaagagcctgagcactgacccggcgaattcagctttccagactcagggcggaaaaattcgtgcgcgcgggctggaactggaggcacggggcgccttaaccgaacagttcagtgtgatcggtagctacacactgcagcaggtgaaatacacccaggatactcaaggccgcgaaggcaaaaccccactgcacgtactacggacatttggtgcgctatggctggactggcaggcgccagcaggcacagaggttgagggtttaggcgtcgctgtggggggcgtttcagcggcggcaccaaaggagggaccatggaccgtcagtttaacaccgggggttatggccttatggatgcttcaattcgttatgagctcggcaaactcgatccttctttacgcggttgcaaagtgcaactga

SEQ ID NO: 232557 - DNA, 2943 bp, Klebsiella pneumoniae
atgaacgaacgtcaactttacagcgcctggagtgacagtgagcgtgaacactatcgacaaaatggttattgggtcgatcaaccactgggcgaacagttacgccaatgggcaattcggcaacccaccagtatcgcactggtggcaggaaagcagcatctgagttacgccgggctggatagtctggccgacagacttgctgcgggattagccgcgcgtgggattcgctcacaagataatgtgttgctgcagttgccaaactgcattggcctcgtggcaacactgttcgctctgttccgtctcggcgcacgcccgattcttgccatgcctggccagaaagcggcagacattgacgccttgagccaactggcagaacccaaagcctggttttatcctcatcactatcttgggcatgattatcaaacattggcatcggatatggcggttaaacatcccggtatgcaacgctggcaggtgaatatccatgacgatgcagactcagtgatgacagcgtttcagtccgagcccaagcctttgcctgcaccgcatgctgaggatattgccctcctcctcctttctggtggcagcaccggtacgcccaaattgataccacgcacgcacgccgattacttttacaacgcacgtcgcatggcggagatctgccagctttccagccaaagtgtgtatctggcgacattggctgtggcacataacttcaccctctcctgcccgggagtgctgggcacgctattctcaggcggcaaagtggtgctggcacaaacatcaggttgtgatgaagcgttccctcttattgagcaggagaaagtcactttcactgcactggtgccaccgcttgtcaccctgtggctggagtgtcgggcatgggacgaaagcgacctctccagcttgcaatttattcaggtagggggagcacggctggatagtcaactggcagcaaaagtcaaacccacctttgactgtcagctccagcaagttttcggtatggctgagggactaatttgttgcacacggcttgatgatagcgatgacgtgattttacacactcagggtcgtccgatttcagatgcggaccaaataagagtggtgaatcaggatggacttcccgtaggaatcgaagtctccggcgaacttcttacccgaggcccttatactatcggcggctattatcgcgctgaagcgcaaaatctgaaggcgttcacaccggatcatttttaccgttctggtgacctggtgcgccttacagatgcgggcaacttcgtcgtggaaggtcggctcaaagagcaaattaatcgtgccggtgagaagatgggttgcgcagagattgagtcgtttatcgctaaccaccctgatgtggcaagctgcgttgtaattggtgttgaggatgcacgcctgggtgaacgtatctgtgtctgtttaccgggtgatacccacctgacgctcgctgatttacgtggctacctgcagcaacaaggcgtcagcaataataaactgcctgaccagttattgcctgttaagcgttggccattaaccgccgttggcaagatcgataagcgtcagctggctaatattgccgcgcttgccctggacagcagtgagtccaggcatacgctcatcctgcaggctgaccctctcgatgtcatttatcacttgctgaagaacgaatctgattgtcacattgcctatgagcgcgacgaatgctgggatattggaataggcagccaggtaaaaatctcactgtatgttgatcgtgctgaacttaccctacacaacgccgtagaaaaaagttggcaaggtggcagctggcagacaaatctgcaacaggcgctggatgcaattcccattagcgactggcaggcttatggtgtgagccatttcgagttctcacaccagatacacgatgtgcggccaaaacacttacctgaggcaacgcccctgctgaccctctttatcccgcgtgtgcaaatcaaattaaagcagggagaagcacaactgatcgcgtcttctgatcaggatttatcgcaactggtgaagcgtgttcaggcagcggatcgtgttgtagtgtttccagaacctgatgctcaatggcaagcttcaatcgccaaacagattcgcgaacaggatgcgcgcgactattgccagcgcgttgccctggcagtggaagaaattcagcgcggtgaatatcagaaaattattctttctcgtcgaataacccttgccgaaccagtcgacttattagctagctatcacgttggccgcagattcaataccccggcacgttcgtttgttgcccgattaaacgacgatcacttcattgggtttagccctgagacggtggttgaagtctccgattctggcgcggtcagcactcaaccactggctggcacgcgagcacttaccgctgacgaggccgaaaatcggcgattacgcgaagtgctcagtaacgatacgaaagaaattgctgagcatgcggtgtccgtcaagctcgccattgaagaactgatccccctatgtgagaaccattcaacccacgtcagtgattttatgcatgtctcactgcgcggcagtgtgcagcatctggcctcccggataaaaggacaacttcgcaaagagttcgatgcctgggatgcctttggcgcactgtttcccgcagtaactgcttcggggatacctaagcgcccggcgatagaagcgattgagcggctggagccggtctcacgcggagcctatagcggcagcgtgttcatggtcaatagccagggtgaaaaggatgcggcgctggtgctccgctcgctatacaagcatggtcgtggagtggcgttacaggctggtgcgggaattattgaccaatcgttgcctgacagggagctggaagagaccatcgaaaaattacagtcggttagccgttttattattccagataaatga

SEQ ID NO: 232558 - DNA, 3156 bp, Klebsiella pneumoniae
atggccgaacttaacccgcctttgggaacgacgacgcctgaaatattcctggataacgtcaagcgcgctgacgagctggttaacggtccggccggaacggttaacgaccgcgcaggtgaaccgctcgatacctggcgccagatgatggcgaaaaacgatgaggtcaggcagaaccttatcccgctcaataagcaataccagacgctggcagctgcgcaggcggatatcgcgaatattccggtgggctcgaccacgtattaccgcagcccggataacagtgcgctcgcaatcgaggtgatgaatgttggcgggacgctgcagcctaccgggcgccgtatggtttcacagaaaaccgtagaagggattatccccagtcttgttggtcccggcatgaacctgttcaacaagggagcggtgatctccgggttctatctgtttgagggaacggggatccccagggaaaatcctaagtactgctattcagaaaagatctctgccgtggccgggggggcttatacctccaggcttctcactcgtgtagtgacattttttgatggtaacgacaattatctgtctgatatctcatctgttactgcatttacagcgcctgccggaactgcctattttattgtttcggtaccgctgataaacatcgacacctatcaggtaacgtttggtgctggcgaaatgccctatcgggcatatcaggcagtactgcgggataagatcaaaggggcaccgacaaactcctatcaaacgctgggctttactgcaggtaaaaacttattcaatcctgccgatgctatgcccggcgtgcatctttccagtatcggcacaattcttacagactctgataccagcatgaccgtatcgggatacatccctgttgacccgactcagccttattgtgtcgatcatccgtggaaagcagctacatactatgatgcgaaaggcgtgtttatcagccgccagtatgattcgtcctattcaacaaaacctgtcaatccgctgacattaccgtcaaatgccgcgtatatgcggatagaaattcctgctgtcgtggcgtctgttaccatggtggaaaagaataataaggccaccgaatttgagccgtttaaatcaaaggccccatcggaatactcaggtgtgccagtagtcttttctgaaccggtaaaagccctgacggaaacagacctctacggccccggtacgaacctgttcaataagaacaaggtggttgatggttatatcaatgagttcggtgcatggttcccggttccggcagccagtgggtccgtatacatcacctcggaatacattaaagtgtcggcgggtgatgttctgaattcaagccggtcgatgcgcttcattaacttctacgactcggacaaaaaacatctttcgtcggtttcagcagttaatgttgtcactgcgcctgcatcggcagcgtatgtgagaataaccactcttctttcaaacaaagatgcgatgtttgtcgccagagcgtcagtactgccgcccgttgaagactatatgcatgtcatgcgcaaagcactgcctgacggttttcagatccgaatccctggcgatattgttgacgcagaccagctcgatattgattttgtaaagcatggactgatagtactggggaaaaacctgtttaacagggcgaccgtgcaatcagggtatattaatgaatcgggcactgttatatcccctgactcacgttacgtgtactcagattatattcccgttgaattcagcacgtcttacgcacttcgtgttggcgccaggttcattacgttttataacgccagtaaaacgtttatccgtacggatgcatcctccactcaggcactgacttcgttcgttactgattcggaaattgcctatgtgagaattacatttggctcggatcggtatgtagaagcccaggttgagaaaggagacagcgccactgcattcgaggaatacgcgttctattacctttcagaaatgcctgacggcacgcctgtcaaagtgaaagacgctgaagttgtatcagaagcggtaccggatgtttttggtattgagcgtctccgggaaacgcatatgcggatgaccaaaatgtcttttggggatgctgttcgtcttatcgttgcgatgatgggagacagctacaccaggacgtcaccacgttatgtgctgaaagtggcacaaatcctttggcgctatttcaatagtgcaggcacggccgcaactgtcccccccattgggtacggctggcgttcgtttggttttgatcctaacggcgataatactgatgttatgggtacatcagttgtacagtccggattttcctgcgcttacaacacagggcatggcccggatatttcgtctgtgacagcaagtgcaagcggagcaacgatttcatacagccagaattttgcgctgggttttgattcgttcctgtttgccgaggggggatctggtgttattcagtgccaggcaaccgggatggctgaccccgtcacgattgacctgtcggctcatcccgccgggatgcagattatcccgctggcgttaccaacaaccggtagcggcacagtaacgtttacggttatcactcctccggtgacgttgtacggagcgaatatcctcaatcaaaccatgtcgggtgtcctggttcataaaatggggggtagtggttctcataccaatcactgggttaatgcaatggatcagcgctggcttgatgcttttgataacctcggggccgacctcgtgacaatcatgctgggaacgaacgaccagggcgcgcagctctctgccgcaacattccgggctaatattctcacgatgatagatcgggttcgttctgtgcggccaacggctgatattttgctgatttgcccggcggaaaataaccgcgacggcggaaacagtattcccatgtccacttacgcggaggtgatgtataagattgcgcgggatgatcgtgacgtggcctttatgaacctgcaggcgtccttcggtcagaaacacgaagactacgcagctggatcagacagaccatggatgataggggatgggttacacccagacccatcaacgggagggtatgccattgctggagcaatcgcgcgggcgctggccctgccgatattcttcaagtga

SEQ ID NO: 232559 - DNA, 156 bp, Klebsiella pneumoniae
atgaaactaccacgaagcactcttatctggtttttgttaatagtgtgtttgactctgttaatattcacctatctaactcgcaattcactttgtaacatccagtataaagatgcagaaaaagaggtgaatgtgttcgtaactcatgagtcaggataa

SEQ ID NO: 232560 - DNA, 375 bp, Klebsiella pneumoniae
atgaaaaagttcagtttcagtcatcgtagtgagaataatctgaaaggagttgatcccagacttgtgacgattgctcgtcgtgcgctggttctttcagaagttgatttcggtattacagaaggattacgaacaaaagaacgacagaaacaactgtttgaacagggaaaaagtatgacaatgaacagtcgccatctgaccggagatgcaattgatgtagtggcttacatcggtggaaaggtgtcgtggaactggtcattatatgaaataatttctagggcatttaagcaagcagcagcagaatatggagtaaccatcgaatgggggggggactgggaaaaactaaaagacggtgttcattttcagttaaaaaaataa

SEQ ID NO: 232561 - DNA, 7800 bp, Klebsiella pneumoniae
atgtcagcgaagatcatacttaatactgaacttaatcaaacttccatgcgtgcaggacaaatgataccactcaatgaataccagtatgagagctcggcattacttcctgattctgtcagacacagaaaaaaacgagccggtggaaatgaagaggcttcccgtgagccacagactactgagcaacatgctccctcacaaaaaaggcccaggactgagtatgaacaactgaatgtgggacaatggtcagaagatgacagaaatatgctgcaaaatattgatccggaactgataacaaaaacagaacatttatcttcagagttagagacaaatttccggaatatctctcaggattacttttctgcgattatacagagcctgaatacgctgctacttcaagttacaggagagcgagcaaaacaacaactgtacggaaaacttgaaggtctacaggatagtatcgagggcaatcctgactgtcatctgcaaatgcctccattgcccccccgcgaaccagaaataagtatacagcagattcagccggagttccgtgcctctatcagaccgtccaagtggtcaaatgatgactgggtcatgatgaatactaaatgcccggagcttattcgtgaccttaaacaatttcgtcatcgaataagaaataaaaagaaaatatcccaggtccgactgtccagccttgataaacgattacatgaattgtttcgctcgctttccagtgatgtagccaaaacagaagtgttttctgttctggaagaaatgcatcgatttctacctctgatgggcaatccagccttacatctgaaagaattgcctgctctaaccggtgagggtgcacatactgagagcattaaacatatcacattgaatataaaagaatgggatgaagatgaaagaactcgtttgagtgagatttaccctaactttgagcagaaaacgaatgatatgttgatacgagccgttcaaacagactctgcggcgcaacgggagacaggagagttttataatactcttcacttgatgtgggacggtttaaaaactgatatggcgaagaatgatattttcagcgtcatgcagtatatcaggggaaaactctctgatgaactcgtcatagatatgaatatacagccactgccacaatatcagtttcaggccatttttaccgtgcttcttcatccattaaaatggactttaaatgaaagacatgccgtcgaaaacattttccccaatatggtctctgtgattacccatataaaagataatataaagagacataaaaaaatatctcaggaaagactttatgaggcagaaagaaaactccacctgttatgggaacatttaacttctgaagaggccaggtttgaagtatcccagacactcagggaaataaaggcgagccttcccgcctctggtaatcccgaactggagatgaaagatccgccagtttacaaaccagtacctgttgtaatctaccgtccggaaattaactttacaagaggacttcatccggcacgatggcttccggatgaaatcaccgctgtaaatacgatatttcctggcattgtaaaaacattgactcgtctgagagcagatataacccaatatgcaaatatctcagatgagcgtttactggctttcgaaaataaatgtaatttaatctgggctcatctgaagggtgaaatagcaacgaaagaatttcgggaaatgtatcaggagctggcatataatgtatccgtcttttctgaaaacagggttcgcttcagagaacttgtcattgtatcagcaaccacatggctgatgacagacttcacgcaacggaacccagggatgactgatacatggctggcggaagataaaaggatacagtcctcagtagccccatctttaacacatgacctgagaagattagcaacaaaagagaatgttcggcttgatgatatagaaaaagttgacagaaaacttcatgatatgttggatagattccaaggtattaatgcccgggcaaccgtgcagtctgtcattgatgctatgtatcgccactttattcataagaaaagggaggtacccaaaaatatccatatattttcatcccagtcatctgaaaaggtctacagtgaacctctgcacatgctgaaacaaatggctgattcggtaacgatatgggtggacagtgtcagattaagacataaacatttgcaggggattatatcgaaaataataagggtccgttttatcaatgataaaattacggaaatacagacccgggaggggccctcatctgcgagccaggatcgcagacatatatctctactgacacgttaccgtgatcttatgtgccaacagacacctgacagcgcacagcgtaatgctctgatacaggaaataaaggccgaagcagagttatcccgatttattcgtagggtggaactttcgcttccctctcacacgaatcagatactgaatgagaagcagggagaatggggagaactgcaacatcccgaccagaagcaaaactttcaattatatgtggataaataccgttctgcagagctatccgcacttgcccggggatttatacttcattacagcgatccccggatcgtcacaggtttacccgaaaaaattcaggtccgggagctgaaagatgtctttaaagagggcgcattatatcaccgtcttaattctgcgcattatacctttgatgaccgtgacacgattgttaaatttcttcttattagtgagggaatgcagagattattcacgagtgagtacaaccctccgctgtccggtgaaattatgtcattactggagcagtacctgggagaaaatgtcagcaaaagtgcttcattatacagagtgctgcaacaggctgcagaagccagactggcagatccggaggcaccttttcatctaaatatccctgatgttctacaggcaggacaggtggaaaattatcaggcattaactttaattctttcaatgatgccagttgagcaatggtttgtatatcctgaatgggccgttccggtactgagtggagccattcgcttcagtacagatggacaatcgttaactgacagagcatttattgctggcagtgataacaaaataagtcaggacagcagtttccttcattatcttgaactgctctttaatatccagcaggatgcgctgaaaggtggactgacagaagaaggggtggcacaaaagctgtcacagtcaggcttaacaagccatattactgaagaaagtatacgccgtcttgtacaggggatgtccggaaatccatggaaatcattgacacagataaacaatctattgagaggttctgagaccctggcgcatgaatcgttatcgtggtatgccggacgatatcctgttttaaagtgtctgttaccctacatgaatgatgtaagtggttccggtttgttgtttgtaagtgaggaaatcgcggggatactgcatcatacagaaccatctcagggccaacattcgtccgatgtaccaaaatacacattattatcatggcctgatttttacggcagccatgctcgtttgtggaatgaagtggctgccacattccgggcaacaaaaacagaatttcatccccagtctctcattgtgtcaaatgaagggcgctgtatggggcttacgctactttacatgaatgccggaacaacctccgagtatgacatcgttacacaaaatctgctgacagcgggaggtttgttacagacacgagacagcatgcatctaccactgacgttacaggataataagtttttgaatgacactatcagtatgatagacagactgcaattacagggaaatactctcatatcggaatattctaatcagcaaagaatgccatggagtgaggaaagtttatccatattttttaataatgatgttaataatttattaataaccacacctgcacatacgttaattatccagcattttgattctctgtatcgggtcacagaccctaactttgggcacgcggagtttccctctctctctgatgccgttcactttcttgaagcaggcattcaactgactcctgttctcagtaaatattatggtttatcggggagcaatgttcggagtcatctgtttgtgtatgatataagcaatataagccaacctgacctatcagaacaacggacattctcatcagaagtatacataacatcacaggaaaagttatcgttacgcacagagcagattattctggctgataaaaatgtcacctggagactgctatttgatattggtgcatatacaaatggacatcgaatcaatgaacaaaccccttccagcgcgctggcaggaatgactattcatggtgatattctgagagattatctgtcccggacagtcctgaataaacagcatgcagaaagactcagagctattttgtatgctatacccccggagacaggaacattaccagttaatccggatattatccaggccgttcctgttgatatatcggcagatgcgttcaggttcaaaagacaggtccagaaaacaatcagaagaatggctgtgacagttgaatctctctctgaacgtttttcccgaatgaaattaaaaaaactgcctgtaaatatcactctgtctgatatagagaagggacgattttcaattctgttccgtgcatctgatggaacggaataccatatgtctattgatgttccggagattgtccacagttttaaacatgtcacacaaatgttttctggtattacggatagtggtatttttgattttgatattggactgagcattgcgggaattgttcagtattccagattacttgagcaaaaaggtacgggggaaattctttcacatctgaatgccgttattgacataaaacaactggcagaatctacccttggaagcatgattcaggtggccggaaataaattttttaatcctgatggtctgcaggcattcagaatggaaacatggctggcaaataacctgcggaaagcagcctcacatagcggcgtcactcttgcacaagcattaaattcttgtgcccgaattctggaacttcccatactggaaaccatcaccggtgtctggggactttacagcagtatatctgaattgcagcaggccaggcaccatacggaaataatgagcgcaagagtccgtgttgcctttgattctatttcattaagtctcacctttgcttccattgcctttcctccactaattgtcgctgcgggtcccgttgcagcagtaggtatgggagcagtcagtattgcccataatgtggccagtaaggaagaaaggcatcaacaatggatgaaatatcggcagtttttaattgatgggagcagaaatattatgacggctgatcccgaaaatggcattatcgatttttccggtaattatgtgatgggagaactgtatctggatctcagggatgcaaaaccagtgctgaaaggccgaccatcttttaacagtaaccggaaaatcggtagttgcccggaactgaatgactggcagataaggcagcgtcttgggtatggatacagcttcatgccagcatcttcactggctcgtggctatgctaatacacaatggcctgcacatatccccctcataccagaaggtgaatacagtactgttattgtcgggtatggaagacaatttcgcgccaatacagaaatagaatatctgtcaaacagtcttgtgtggagggaggtcatttactctcctgattcaagatatgcactgccgcctcttgaggttctaaatcagcaatgtaccgtcatctgtggaaaaaacaagacaacaattattcctgttcgtattcttaatgagttaactccggaacggatcagatatgcaagaacctttaaggattatacattcacttttattggaggagatggaggtataactgttcaacctggaggcgtgggtatttataagattgatgcctcacctgtagcagaagataatgttctgtctttcagaggactgccagacagctttgagctgatatttgacctgtcactggagacacaaaccgtcatgaccaatattaatggtgaagagcttccagtcatgaccatttcacagtcaggaataaacactattattggttcattatctggtcgcaacagactaaaaggaaattcacttaataacacgttccacacaggacacggtggaggtgaaatttattccggaggaggaaataacaggtatattattcccgggaagttaacatcccccctgtctattcatctggatgatgattcggcacgacatgaaataattttaccggaaaatgatttatcccatattcgtgcagatgggatccatttgcgaatgagtaatggtgaagatattacagtacaggaggtatccccaaacagggagcacagtacttcagaatggctgaaagtgtacaccaatgacgggttcatgttgagtcccgtcagagaaggaaaacagactatcctgaaaatatccttatgtgatgtccagcgatggaaaggctgtcacccggagagagatagtactcctgaagggattctggcagttttgcatgactggggatggggtctggatcaagaggttgtttttcattccggaaatatgtctgcacgctatatacctgcggccagaaatctctgctggcaggttagcgttgattcctctgaggttacttttacaggacactcatcctgtaagacgactatttatggttccagtggcacaagatataatttacggacttatgacgcaaactctgctttttgtattgagttgtatggtgacagcaatcgtccggaaatagtggacctccgcgaacttattcccggaaaggttacggcagaaagagacgggaatacactgaaactaaccgtacatcattccgaaggcatcgtgtctgttgatattgtatataatgataactcaactgaaacgtgggtttatttttctccatcggagatgataaaattaaaggatattattggcctgacagagagcaatcaccattcagttattctttatcagacaacaactgagatttcagctaataaagttctccgtattgataatctcagtagcattacaacatttatcccttcaatatcaaaggataaagagattatcttatgcctagaaaattccggctggacagagaaaaatgttaaactttctctgttgtctggtaagttaaaggacgctataaatctgcataaagagccattatcaattaatgtaaaaccgtcctcagtagaatatgtcattttctcgggagaagaaaatgtatcattgacaggggaaatatccacacctccattgtttattacttcatcaggaattgtttcggttcctgaatatcgctggagatctgtagaacagattattatttctccggtaaatgatgcaccaacagttaagttgattgactttattcgctatgaacttccactgagtaatgaaaaggaaagtggtgtaatgtatcaccctggttttatccgtattcataaccatgacctcactatcaagtttttctatttgtctgagaaaaatgtagttagaaccctggatattacattaagaaactattttacaaaacggatagatgatatttcagaaccagaaaaaatgatagcaacaaccccattgcctgattctcgtttgataagacaaaaatatcactggcgacttatttatatgggggatacaccattaagtatcatcgggcttgtatcagtaagaaattacagtaagtatcgaatgaaaaactga

SEQ ID NO: 232562 - DNA, 366 bp, Klebsiella pneumoniae
atggcccgttcagccaagccccgtaaacgaatacctgcacctcaaagaagcaaatatccccgctatgtcgtgaaacttcacgaagatgacttctttgacgaagaagacgcagaagttctgcgctttgatagttttgacgataccgttgagtgctgcgcagacctgaatattccgttctttgtggatgcgggaaacaaaaagctggtcttctggtttgtacgtgttgatgacgaagggtatccggaaatagcccgctgcacggagcgggagtttgcggctattcttgccggtatcagcgccggcggtatgtactgcccggagtgtggcactgttcactggccggatcgtgttaccccgcccttctga

SEQ ID NO: 232563 - DNA, 420 bp, Klebsiella pneumoniae
atgcttccccgttttgcggatatttttcagcagggtaaccgctggcttaactggctggagaaacagccggaaggttccgtgcgtccggtggtcattgagtctgtgacaaaaattatggcgtgtgggaccaccctgatggggtacacacagtggagctgttccttaccggactgctgccatacaaaaaaggtctgcttccggtgtaaaagttgctcctgtccgcactgcggagtgaaagctggcgcacagtggatacagtatctgctgagtctggtccccgacagcccgtggcagcatattgtgttcacgcttccctgccagtacaggtccttggtgttccacaaccggtggttactggcagagatgagcagtatcgcagcggatgtcaggcagatgtggagccggggatattcacggtaa

SEQ ID NO: 232564 - DNA, 501 bp, Klebsiella pneumoniae
gtgaagttccgcaccatgcagactaactcactgcacggcacgctactggaatttggtgaaaccattcacaaaggtcggacagcaatggagcgagagtttccagaagcactggagcgaatgaaagagagattgccaccgtctctcattactgtgctggaaaaccagtacaaccggctgaatgagctggactcactgatagaggatattgaaaaacagattaccagcgtggcgagacagaatgaaacctgtaagcagttgctggatattcccggcgttgggccacttattgcgacggcagcggtggccaccatgggggaaacatcaacgtttaaatcagggcgagagttcgcggcttatgttggtctggtgcccaaacagactggctcaggagggaaaatccgcctgctggggatgagcaaacgtggtgacatttatctccggacattatttatccacggtgcaagggctacggcattagtagctaaagaacctagtccatag

SEQ ID NO: 232565 - DNA, 156 bp, Klebsiella pneumoniae
atgttgttacaggagaaggcttttgatgacatggacgagtggcatttgcttgctgacgagctttccctgctaccggggatgaccgatacggggcgtctgggatttgcccttcaactaaaattccgacaggttcagggctcgttatgggcaacgtaa

SEQ ID NO: 232566 - DNA, 483 bp, Klebsiella pneumoniae
atgggcaacgtaatgcactctcttaagacacttctacagttaccttgcggatggcgatgcagtcgacaaattattagctctggcggtataaccctccatctccacggaaaacgcaaaacagcacaatgtcctgaatgctttaagcgtagcgactctgttcatagttgtcgtcggcgccggatacagcatctaccctgctcagggcagacgctatggcttgtattttccgtccgccactggtactgccgtaacccggcttgttcacgtaaaatttttgccgggtcgcttgttcccttcgccagttcacaccagcagtcttcacaggcgttacaaaatttacaacgtcaactgggattaatagctggaggtgaggctggaaaacgagctgcaacggcagtgggtctccgttgcagtgctgatactcttcttcgcagggttatacagcccgtatacggactgtttcctggtgcccttatctcctga

SEQ ID NO: 232567 - DNA, 789 bp, Klebsiella pneumoniae
atgaataaaaccttagcagaaagatttgaagaacttgaacgtgactaccattccgttgtctcgacaaaatatataggaaaaaacgtgttcagtcatagaaatcaagaatttattgattcagctaaaggtaataactggattgcgagagcaaaaaaattacttgaagacagctatggaaagaattctgattactacaatgattttaatgatacaaaaaaaatctcttggtctagtaattatcagagtctggtgagtcattacaaacctatttttgatgcagccagagaagatttggtgaattgtgctattgttcagactaatacaactgaaagttccgagctggaatggattataaatattcttgagcgattccctgcattctgtcgtcagttaaaagaacggcacgacggtaggacaacacttttaattaacgatgaatacgacgtacaggatctggttcatgcacttctgacgctgcattttgatgatatcagagaggaagaagcttcgcccagttgcgcgggatcatcatccagacaggactttcttctgaagaaggagagaatagttatagaggtgaaaaaaacccgacaatctcttggcgcacgtaaaataggcgaggagctgattatagatatggcacgttaccgagcacatcctgactgcgatacgctgatctgttttgtgtatgaccctgacggctgggttaaaaacccaaaaggactcataagcgatcttgagcggtgtgatacagaaggaaagaccaaagtagtgatagcgcagttttga

SEQ ID NO: 232568 - DNA, 948 bp, Klebsiella pneumoniae
atggccgcacaaccccaaaacagaactcgcctatatcagaaatctacacaacctattccggatcttatagccaaacttcagcaacgtggactcatcattaatgatatgtctgcggcaacaacagctcttacctttattggctactttagattacgtggctattgtcttccttattatcaaatgactcaggaaaaaaaaccaaagccactagagccaaagattttcattcccgggacgacattagaggatgtaatttcactgtatgagtttgacagaaagttaagattgattgtattggaacaaatccagaaggttgaaattggattacgaacttgcctgtcggaatacatgagcgaaaaatatggctgtcattggtttatgaatctaacagctatgagtaaagattatgattatgaaggattttcaggccagataagagatgccaaagaagtattcatagaccattacaaacaaaaatatgaacatcccgtacatcctccatcatggatgattaccgaaactttaagctttggtgcttggtcgcgtatgtataaaaacttacaccattttgatcaaaaacaaattgctgctaagtttaatattcaaaatgctgatgttatggcttcatggttccatactttatgccattttcgtaatttgtcagcacaccataatcgaatttggaacagatcatttaaagcctttcctccggcaaaactgaatagtctttcccatcatatgactaacccacagactctatatagtcgtcttgtcgttctgaaatatctgtctgatcaggtgtcgtggtcagatggacttaagcaacaaattcatgagattatgcatactaagcctatctgtgtcacatttgaaaaaatgggctttattccgggctgggataaagaccctttatggtcaagagctgtgaaccaaccaccacaactttag

SEQ ID NO: 232569 - DNA, 243 bp, Klebsiella pneumoniae
atgagtgcgctggctaacgtcattgcagctatagaccaaggtaactatgaagaagcgcgtcagtggttcacgaatccgggattactggatatgatgaaaaaaatcatccatgatctggttggccgcgtcagcagccttttttcttccctcgtaaaattccctgcgcagttagacattcaggtgattctgtccaatgccataaatgccgctttagcggctctgtttgcacctgaacagaactag

SEQ ID NO: 232570 - DNA, 213 bp, Klebsiella pneumoniae
atgatgaacaatcctatgacactgaatgaactcgtcaccgtaaccgaacaggccagagacagttaccggcggcgtggcaccgcgttatccaaagcgctctatgaattctggtatgtgcttttgggtgtggaagcgtttgaccaacagaaactgaagatcaaaagtccggtagcgttggtagaaatgtatcgcctggcaattaatgctccctag

SEQ ID NO: 232571 - DNA, 1227 bp, Klebsiella pneumoniae
atgaaagatgtcagtattttgaatgaaatgatcttcagtgcatcaacagaaaatgaactacaggaaaaatttgaagatatatatcaccgtatcaacaacgagagtgaatatgatgattcggagtcagtcgaatttctgccacttccaagactgaattcccgttctgaacgctcagaagtacaggacatcatttcagttgtaattaaaagcggatgttttaccagtggcccctatattggaaaagtagaagagacattaagattattttatggtgctcatacctgtattgccaccagtagcggcaccgatgcgttaaaaatagctcttaaatctgttggagtggaacccggagatgaagtcatcgttccgctgaactcctttgcagctacggagaatgccgtgatggccgtgggagccgttccggtcttcgctaatattgacagttctttcaatatgcttccggatgaagtggatcgcctcagaacttcaaagacaaaagccgtgttaccggtctgcctttatggctcatgcatgtacattgatgccattcaccagattgcccgcaaagccgacattcctgttatcgtggatgcagcgcagtgctttggtatcaggtcactaatcagccactgtgatctgctggcgttgagttttaatccatttaagaatattggttctcttggtaaatccggtgcagttctgaccctttctcctgaactggcacgtctggcaaggcaatattcatatcacggatttgctgaaggtaaaaagaatattaaggcccagaactggggattaaacagtcgtatggataatctgcaggctgccacgcttagtgtcaaacttcaacattttgaaaataatgcaaaaaaacgctgccttcttgcagcccgttaccatcttttactgtctgacctgtcacataacataatacttccgacagagacccatcagaatacatggcaccttttcccggtactgctctgcaaaggcgaacgtgattctctgttcgcctttgctcgtgaaaaaggagtggagttagatatttactatcccgtcctttcacactgcggagagcatccattggcaaccggatattcccgtcgagagcagttccgtgattctgaaaaaatacattctggattaattcatctgccgctgcataaccatatgtcgctccaggagcaaaacatcgttatcgaggtactgcatgactattttaaataa

SEQ ID NO: 232572 - DNA, 831 bp, Klebsiella pneumoniae
atgactattttaaataaaaactggcccgtcgaattcccgttcccgacagtaatccgcactgtggtgtgcagcgatcttgatgaaacttatattccttcggacagtgataaaaaaaaactggggggggtcgttcagctggagtcctatattacatcccatgctgaaaaaaaggggattctcgctggctggatcacgggaacaaatctggattcagcctggcgaaaatccaggggatatatctcgcgaagccctcactttatatgttgcagtctcggcaccgaattttactgggtgaaaaatggccgtctcatcccctctgaaacctgggcagaaagaataagccgttcaggctacagccgtcagaatgtcaactgtctggttaagattctgatggaaaaagagatcccccttctgaaacaaccagaggattatcagggcccctttaaagtgagctattactaccctgagagcccatctattgccagcgattttgccaccattcaggaactggctgacgaacgacgaattcgtgttgtgtttacccgctgtaacccggcggctggcgatccccctggctattatgacgttgaatttatccccctctgttgtggcaaggatcaggctgtgtcttttctgatggaagaaaccggactgccgaaagaagccattattgcctttggtgacagtgcgaatgattttgccatgtttgcacaggccggaagtggctatctggtgggtaatgccgacccgtttgcagtcagccagtacggaaacagactggacagtgcttactgccacgggatactgagcgttcttaaggagctacagtga

SEQ ID NO: 232573 - DNA, 1017 bp, Klebsiella pneumoniae
atgattatcggaattgtcggctgtggggggattgcccgtgcccatgtcaacgcactttgtctcaatccgctagtaactggtctggccctgtacgatgtgagtccggacaacgtccgacagctcagcgaaataagctccctgccggtaacaaactgccaggatctggagcagcttgccggagtcagtcaagggttcattatctgcacaccaaaccatctccacgttagcgtggcagaagaagtgcttcgctacaaacagctcccgtttgtgtgtgaaaaacccctctcaacagatctcaactctgcacgatatctacaggagattgctccaaaaggtagtatcgtgtcttttaactaccgatataaccccgtcatcgacatgataatgcgtctgagaaatgagaggaaattaggtgaactgcatttcttctcagcagaatttaataaaaattctgcactgacccgccatcacctgacctggcgagactccgcacaacagagcaaaagcagcggtgctctgggcgatctatcctgtcatctgcttgatttattttgttttataggggaaagcccggtagtggttcatgggatcaaaacggtaaaggggacacgggtgggtacaaaatcagatggtcaggttgaagtggatgataacggctatgtaatgggcagttcagaaaagggagcttatttcagagttcatgccagtaaatcggaaacagatcagaatttgggactgcatatacagcttgtatttgaaaatggtgaaatcagatattcaacccaccatgaaaatcgcctgctcctgattctatttaatgatacgaatacggaaacaattggcttcgacgctctgaaacgcttgcctgatccaccacgggagcttccattctggtctgattcgtttattcatcttcatgacgactggtgtgctcttattaaatatggtcactcgtctcctaagctggcggacctgtcatccggccttcatatacaggaaataattgaggcattctga

SEQ ID NO: 232574 - DNA, 270 bp, Klebsiella pneumoniae
atggatacaattcttttaaccgggctgtttgctgcatttttcacaacgtttgcgttcgctccccagagcataaaaactatcaggacacgcaataccgaaggtatctccgttgttatgtatatcatgttcctgacaggtgtaatctcatggatagcgtatggcattatgcgatctgattttgccgtactgatcgccaatattgtcacactgtttctggctgcaccagtgcttgtaataacacttatcaaccgcaggaaaaaacacgtatga

SEQ ID NO: 232575 - DNA, 1533 bp, Klebsiella pneumoniae
atgaatattgcaatcatcggcgcgggtcctgccggcatcatttctgcccgtaatgcgattaaagcaggtcactccgtggttctgtttgagaagaatacccgaattggggggatctggaacccctggagtggtggcgcttaccgtaatgcctgtatgcagaactcccgttatacatttcattatactggctttccccctggcgatatcgatgaatttccaggagtggaacaggtattcagatatctttcggccgtggccggagaggatgccctccgtgagtcgacccgactgaatactgaagttgtttcactcagaaaagacgccggacactgggtgatccgctgcgcttctgaaggaaaagacacggaagacatttttgaccgggtcatcattgcaacaggtgaactctggcaaccccgccggccccccctgccaggtgaggaaaacttctccggaacgttgatcacgtcgagagattatcaggagccagaggcatttaaaggaaaaaatatcctcatcattggcggcggtgtcagcggtgcggatattgcctcagaccttgttccctttgccagaagcgtaagtctgtccgtcaaaaagatgggactttatctgccgagacaattcccgactggcccgaatgacatgatgcactcctatctgggcaggtgtctgctgagccaaatgaattatgaagactttatcggttatctcgacaccatgatgcctgactacatgcaggcctaccgagcatccggtctgttgcccgacatggcgaacaataacgcggtacatgttaacgaaaaaatcataccgaatgtggccgccggtctgataaaagttaaacccctggcagagcgtttcaccggagaaggcgctattgagttcgtcgacgcatctcaggaaaaatatgatgtaatcataacctgcacaggctatgaaatgcctgattactcgttcattcagggatttgacagaacacagctctatgagcactttttctggacagaggacccttctctggccgtcattaatcccccggtggataccgccggtttcggggctgcgtttccctattttgatatcatcagccagtgggtaatgaacgtattctccgggaagacttcccttccggaaaaagaagctatgcgcaaatggtgtgctgagcacatggcttcacttcatgttaagcgattttatgacagctggctggaaaccatccggattgggttgctgtcaggtcttctcccggacccggcccgcgacttttcccgatactggaacatcatcagcagtatggtcaaacctgcctatctggccactcctcccgcatttccggagcatggtatgatggacagcctgtttgatttccggatcgccagaatacgcatactgtcagggctgggaaacgatgctctcggttatttactgaaaaaaggtgatatcactgacgcagaataccgggcggccctggaaatcgatccccggcagtcgatttctgtacacctgccgtattcacaaacctacctctga

SEQ ID NO: 232576 - DNA, 294 bp, Klebsiella pneumoniae
atgagtatgttggttgtggtgacagagaatgttcctccgcgactccgtggacggttagccgtctggttgctggagattcgcgctggtgtgtatgttggggacatctcaacaaagacacgagaaatgatatggcaacaggtttccgttctggcagaagaggggaatgttgttatggcttgggcgacgaataccgaatccggatttgagtttcagacatatggtgtgaatagacgtattccggtggatttggatggactgcggttagtatctttccttccttttttaaaacaatga

SEQ ID NO: 232577 - DNA, 918 bp, Klebsiella pneumoniae
atgagctggctgccgttaaatccgatcccgcttaaagatcgtgtatcgatgatctttctccagtatgggcaagttgatgttatcgatggggcattcgttttaatcgataaaaccggcgtccgtacacatattcctgtcggatcggtggcctgtctgatgttggaaccggggacgcgtgtttctcatgccgctgtaaggctggcggcgacagtgtgcacgttgctggtatgggttggtgaagcgggtgtccgtctctatgcctctgggcaaccaggtggcgcccgtgccgataaattgctctatcaggcaaagctggccttagatgatgagctccgtctgaaagtagtgcgtagaatgttcgagttacgttttggtgagccagcgccaagccgacgttctgtcgaacagttacgcggcattgaagggagtcgtgtgcgggcgacttacgcattattggcgaaacagtatggcgtaaagtggcagggacgccgctacgatccgaaggactgggagaaaggggatacggtcaaccagtgtattagttcggcgacggcctgcttgtatggtgtgacggaagcggcaatacttgctgctggatacgcgccagcgataggctttgtacatacgggtaaaccactttcttttgtttacgatattgccgatatcatcaagtttgataccgtcgtgccaaaagcattcgagattgcgcggcgtaatccagccgagcccgatcgcgaagtccggctagcctgcagggatattttccgcagtagcaaaatgctggcgaaattaattccgcttattgacgatgttcttgcggcaggcgaaattcagccacccccaccacctgaaggcgctcatcctgtagctatcccactccctgtctctttaggtgatgcaggccatcggagtcgttaa

SEQ ID NO: 232578 - DNA, 705 bp, Klebsiella pneumoniae
atgtacttgtctcgtgtccagcttctgttcaaaaaccttcgtcctgaaatgttgaaaaaatgggaatcagctaggccttatgctagtcatcagtggctttggcagctttttccacaacaaacggcacgtcagttcttgtttcgtcaggaagcgcaaggctgcttttttgtgctctcgacaacgccgccactgtccaagcattctctgtttgtgattgaaaccaaaccatttaatccacaactgacggagggcttgatactagattttcagctacgggctaacccggtgattacccgagatggtaaacgcagcgatgtaatgatggatgccaaataccatgcaaaagcaagcggcgttgtaaaagaacgctggtgggaggtacaacaacaggctgctcaggcgtggctggagaggcaagggcagcagcatggtttttggttgcttgagccagaggctgatgctttggctttgtgggcaggtgaggaatacagggaaatgcagacgcgctgtggctgtgtgcaagcgtatcaacagcatcgttttgttcgccataatcgggaagaaccgatcacatacagcagtgtggatttttgcggaacactttgtgtaacagacgttccgcttttctcccaggtgctgttctctggcttaggtaagagtaaagcgttgggttgtgggatgctgatggtaaaaaggaagcgctaa

SEQ ID NO: 232579 - DNA, 726 bp, Klebsiella pneumoniae
atgaaggaatatctggtttttcagctctatgcgccactggcatcatggggagaagaagcgtcaggtgagatccgccactctgcggcagtacctacgcgatcggcattattaggattggttgccgccgcgcttgggatacgccgcgatgaagaagaacggttaaatacatttaaccaacactatcatttggcagtgcatgcgctagcctcgcaagagcgttggctacgggattatcatacggttagtgcgccacgagaaaataaaaagtatcgttacttcacgcgacgggatgaactgactctcgcgcccgatgaaatcggcaccctgatttcgcagcgtgaatatcgttgcgatggttactggcacgtggcgttaagtgctaccgctggtgctccgtatgcgttgacggcgttgcgtgaagcactgctgacaccttattttccgctttatctcggaagaaagtcttgtccgttagccttgccgctggcaccccgattaatgaccggtacgttaaaagagatattcattcttgctgctcaggaaatgtccgccgcggaattaaatgggtttacctcgaaagagggtatttgctactgggacgatcccgatgaaaagagtctgcaatggcagcagaaaatccatagccataataacccactcagccgccagcgttggcagttcggcagctatatccgctttagcggtctgttgcaagggagggcgtga

SEQ ID NO: 232580 - DNA, 1056 bp, Klebsiella pneumoniae
atgaccacttttattcagttgcacttattaacggcatatgcacccgctaaccttaaccgtgacgattccggcaggcctaaaacggcatttatgggcggtgtagagcgcctgcgagtgtcgtcacaaagcctaaaacgtgcctggcgcgtttcggaaacgtttgaagaagcaatggatggtttcatcggtaagcgcactcgtcgaattggagtggactatgtctatcgtccaatgattgctgcagatactgcagctaaagtcgcaaaaagcgcggcagagaaaatcgctgagcagttcggtaaattgaaaaatgacaaaaatgcgaatgatgaaaaaaatctagagattgagcagatcgtccacgtcagcagtcatgaaattcatttgattgagcaattggttaaaactctgatcgctgaacagcgtataccgaccgatgaagaggttaaattactgcgtaatgaacagcgtagtgtggacatggcattgtttggccgtatgctggcatcatcacctgagtttaacgttgaggccgcatgccaggtttctcatgcgctgggtgtgagtgccgtgaccattgagtctgatttctttactgctgtagatgacctcaataataaagaagatgccggttctgctcatatgggggaacaggggtttgcctcagcgcttttctatacctatctctgcatcagccgggatttgttggtagaaaacctcggtggtaatgaggaactagcgaaacgcgccattgcggcgctcaccgaaacagcactaactgtttcaccaacgggcaagcaaaacagctttgcctctcgcgcttatgctacttatgcgctggccgaaatcgggaaaaaacaaccgcgagcgttggccgcggcatttttccagcccgtacgcgataccgatcagataccggcggcgattgctcgcttaaaacagcagcgtgatagcttcgatcgggtctatggcaactgtactgacgcttatcaagaactgaacgttcacgaaggcatcggatcgctggcggaattactggcctttgtcagccagtaa

SEQ ID NO: 232581 - DNA, 600 bp, Klebsiella pneumoniae
atgaacagtcatactgcaatgttgtgcaaaatcacgcaccctgatgcacagaaagcattgctggaatggtttgccatcctgtctgaacgctatgagcgccgggacgataagcgaatcaacggccgggcctggcgtgcggagctgaaaaaaatgaccccgccatatggggtgatgatgtgtgaagcttatggcgcgcttcgccaggccctgcttaaatatattcctttacagcctgttgatgaaatggctctggcgctgtttatcagcgtcgctgcgcatattaaaagtcataaagaaaaagccagttttgccgcgcaattgggagaaaagctaaatggaacaacggcatgtgtttctgctctgcgctttgaacgtttgcaaaaggcggccgatccggaaactttctgtcagttgctaattcaggtggtgaatattcgtggggcggaaggcgtgaatgtcttgtctctggccgacagtatttttctgtggatggaagaatggcaacgtcgtgaaaatcatgagccagaacaccgagatccctttaagcgaaaccgcatccgctgggctaacgaatatctttcaacatcctatgtcaaataa

SEQ ID NO: 232582 - DNA, 1554 bp, Klebsiella pneumoniae
atggatttaaccagggaaaaatggcttcccgtcgtcttatacagcggcaagcatacaaaaatcgcattaactgaacttcttgataatcaaattcgtgatgtagcctatccacgatccgattttcagggggctgcatggcaaatgctcattggcattctacagtgcactatcgtgccagaggataaagatgactgggaggatatttggaacgaaggtatcgaacctgagcgctgggaggaagcactccaggcattgtctcccgttctccaatttggtgagcaaaagccctcgttcctgcaaagttttgatcctctggatagcgaatatggttccattgccggattgttaattgatgcacccggcggtaacacgcttaagctcaataaagatcattttgttaaacgtggtcaagttgaacatatctgcccggactgcgccgcgatagcattatttacgattcagaccaattcccctgccggtggggcgggttatcgggtagggatgcgcggcggcgggccgcttactacgctggttgtaccaaaagaggaagataaatatcctctctggcaaaaactttggctcaacgttttgccgctggcgcagaaacctacccctgcacaacatgcgcttattttcccctggcttgcaccaactaaaaccagcgataaggccggaaatgtcgtgacgcctgaaaatgcccatccgttacaggcgtactggggaatgccgcggcgaatcgaattggatttcactaaaaccgtggccggtgtttgtaatttatgtggagacagtcatccgtcgctactattgcaaatgcgcagtaaaaactatggtgttcaatacgatagctggatccatcccttctcaccttatcggcaggcattgaaagatccctctgcgccttggctggctctgaaggggcagcctggcgggttaaattataaagactggctcgggttgctcatgaaacgcgaggataaatttaaccgaatgcaacctgcaaaggtggttctggctgccaggcggcgtaaaaaattgggcctgtggtgttttgcttgggatatggataatgcgaaagctcgctgctggtatcagcatcgtattcctttgattcgtgttgctcatgaagagcaatttattgccgtcctcaataacgtattggtattcgcatcggaagcgctgtcgctgctgagatacgcgtttaaaagcgctaagtttgatacgccaaaagaagccaaaatggatttcagtatggtggatattgcgttctggcaggaaactgaacccgcttttcggcagcttctcgacgcactggagcaggatccgttacgccaggatgccccttcccgttatgcattgcgtcagtgggatcgggaactccttcggtatctcttacaggtatttgaccgtgatgctctaaccgatcctgatagtcccgacgacattctgttgcgccagcttgcggctcgacgagaacttgagagcagctaccgtaaacacaaagcgcgcaaggaaatcttgatgcttgccgaggaaccaaaggagactctatga

SEQ ID NO: 232583 - DNA, 2694 bp, Klebsiella pneumoniae
atgagatatatcaattatcttcgttattggggaaaaaccagtaaagtaacttccacaaaaataaagccttatcatctactggcatatcattgtctggatgtggccgcctgtggatattacataataaaaaacaatatttttaattccagaaatattttggaagaatgtaatattatcgataaggatgctgaaagatggatgatatggttgcttgccagccatgatatcggcaaattcgccagaggctttcaaagatatgcctcgttccccgatacgccactggttccacctgtgaacacaattgctgcatttgagcggcacgatacgttaggcttctatttatgggaaaaaattagcgacgcctggcaggaaggaaataacgacatcattgccggtattgatcccgaaaaccgtggtagtttcaccagtgccttaaacatctggatgcagataagcactggtcatcatggcattccacccgacaccctgcaaaatagcagtgcactggcatttaccgatgaggatatcatcgccgccacgcattatcttgaaacgctaagtcagttgtttccttttacgttgccttcagtctggaaaaccaagaccggacggaaaagtttaaagcgccacagctggttctttgccggccttgtcaccctcactgactggctgggatcagatgaaactcactttcccgccgtcagcaatgcgatgcctttgcaagattattggcctctcgcctgcgaaaaggcgcaacaggccatcctcaccattccaccattatcaccacacagcttttatcataatcatcaagctctgtttccctttatccatacgctcactccgctccagcagcgagctaatactctggatatctcatcgccaggcccgcaactcattattctggaagacgtaaccggagctggtaaaacagaagcagcactgattctgactcatcgtttaatgtctgcaggtaaaggccatggactttacgttggactgccgaccatggcaaccgcgaatgctatgtataaacgcttgtcggcggcttaccgtgcgctgttcgccgatgatgccaggccgtcgcttatactggctcatggcggaagagaaatgtcagaaactttccggcaatccatctggcagccagtcaatgagacggcagaagattacgcgcaagacgatcgcaacgccgccagtgaatgccacatctggttcgctgattcccgcaaaaaagcgctactcgctgaagttggtgtcggtactctcgatcagcttttaatggcggtgatgccatttcgccatcagtcgcttcgtttacttggcatgcgcgataaaatcctgctgctggatgaggttcatgcctatgatggttacatggtgaaattaatggaaggattgctcagtttccatgccgcccagggagggagcgccatcatactgagcgccacactacccgccaccttacgcgaaaagctacttaatgcgttcagtcatggcgccggtagttcggtcgttatccccaacgtcgatgctggttatccatggctcagccacctctcgtcggcaggcctgctggaacaaccgctaaccacccgaccagaagtccagcgtaccgtaaccgttaactggatacagcagcgccgggaagcactagagcttatttatcgcgttgttgcagccggacagtgtgtttgttggatccgtaatacggttgacgaggcacgagagattttccagcagttgcgcagcgacgggcgggtgcccgaacaggatatagtgctctttcacagccgctttgctttcgctgaccgcattgccattgaagataaaacgctgagctggttcggcaaccatgctcccgctactgcacgaaaaggaaaagtattaatcgcaacacaggtcgtcgaacagagtcttgatctggattttgactggatgatctccgatctggcaccagtggatttattgattcaacgcgcaggtcgtctacaacgccatatccgcgatgctgacgggcaacgcaaacccgctcttcctgatgggcgccaacctccaatattacatatcctggcccctgaatggcaggaacaagcagctgcgggctggttgggacaagaactacgaggtacaggttatgtttatctcgaccatgcctgcctgtggcgtacccagtcgttgctgcgtcagtatggtgaaatcagcatgccggataacgccagaaagctagttgatggtgtttatgagcagacgatagctgccccaccagagctgcaaaccttatctgatgtcgctttcggcaacgttctcagtcaacgatcggttgctgcgcaaaatctattacgtcacgatgttggctacgctcgagaggccagtgattttttatgggataacgacagagaattttcgactcgtctgggtgaagaaagcctggatgtctaccttgcctggcaagatggtgaaggggaattacatcccatagtcgccgaaggcgatttccgctgggaaatgagcagactgtcggttcgcctctcatggtggaaaaagcatgcaggtgaattttgcctgcccgatgctgaatcacttgaacaattccgcaaggcacaacgtcgccccgcaggtcaagtactactggtttcgtcagacggcgaagcgagctattacagtaaacaaagtggattaggtaacggatag

SEQ ID NO: 232584 - DNA, 1215 bp, Klebsiella pneumoniae
atgacaccgacttccctttccacccgcgacgcaggcttgattatcttcattctcgcactcggcgccggctttagcgtcgcctctatttactacgcgcagccgctgctgccgttgatgggcgccaatctccacctgactgtagaaggtatgggtctggtccctaccctgacgcaggcgggttatgcgctcggcattctgttcctgctcccgctcggcgaccgccacgatcgccgccggctgatcctggtgaaaagcgcgctgctggcgctcctgctgctcctgtgcagcctcaccggccagctcagctcactgctggtggtcagtctgctgatcggtatggcggcgaccatggcgcaggatatcgtcccggcggcggcgatcctcgccccggcgggcaagcagggaaaaatggtgggcacggtgatgaccgggctgctgctggggatcctgctctcccggacggtcagcggcgtggtgggcgccgtattcggctggcgggtgatgtatcaggcggcggcggtcagcgtcgcgctgattggcctggtaatgtggcgcgtcctgccgcgcttcgctgtgcactcgacgctgagctatccgcagctgatggcctcgatggcgcatctgtggcagcgttacccggcattacgccgcgccgcgctagctcagggcgcgctctccatcgcctttagcgccttctggtcgacgctggcggtgatgctctccgaacactatcacatgggcagcgcagtagcgggcggtttcggtatcgccggggccgccggggcgctggccgcgccgcttgccggcggtctggccgataaatttggcgccggtaaggtgacacagatgggtgcggcgctggtcaccctctcctttgccctgatgtttgtgctgccgctgctgccagtgcacgctcagttggcgctgattgccctgtcggcgattggctttgaccttggcctgcagtcaagcctggtggcgcatcagaacctggtatatggccttgagccacaggcccgcggccgcctcaacgccctgctgttcaccgtggtgtttatcgggatgtcgctgggatcggtgctgggcagtaagctgtacgtgctggcaggctggaacggagtggtcacgctggcagtgatcactggcgcgctagccctggcgatccgcctgctggagaatgcccgcatcctcgctgccgaacgcagcgcatcataa

SEQ ID NO: 232585 - DNA, 825 bp, Klebsiella pneumoniae
atgtttaagaatgcatttgctaacctgcagaaggtcggtaaatcgctgatgctgccggtatccgtactgcctatcgcaggtatcctgctgggcgtcggttccgctaacttcagctggctgccagccgtggtctcccacgttatggcagaagcaggcggttcagttttcgccaatatgccgctgatcttcgctatcggtgtggccctcggcttcaccaataacgacggtgtatccgcactggctgcagtcgtggcttacggcatcatggtgaaaaccatggcggttgttgcgccgctggtgctgcatttacctgctgacgagattgcggcaaaacaccttgctgataccggcgtgcttggcggtattatctccggtgctatcgccgcctacatgttcaaccgcttctatcgcatcaagctgccagaatatctcggcttctttgcgggcaagcgttttgtgccgattatctctggtctggccgctatcttcaccggcgtgatcctctccttcatttggccgccgatcggctccgcgatccaaaccttctcccagtgggctgcttatcagaacccagtggtggcgtttggtatctacggtttcatcgaacgttgcctggtgccgtttggtctgcatcacatctggaacgttcctttccagatgcagatcggcgaatacaccaacgcggctggtcaggtgttccacggcgatatcccgcgctacatggcaggcgacccgacggcgggcaaactgtctggcggcttcctgttcaaaatgtatggtctgccggcagcggctatcgctatttggcactctgctaaaccgtaa

SEQ ID NO: 232586 - DNA, 585 bp, Klebsiella pneumoniae
atgatctccgccgcgctgacctcgttcctgaccggtatcaccgagccgatcgagttctcgttcatgttcgtggcgccgatcctgtacgttatccatgccattctggcgggcctggcgttcccgatctgtatcctgctgggtatgcgtgacggtacctcgttctctcatggtctgatcgactttatcgtgctgtccggtaacagcagcaaactgtggctgttcccgattgttggtatctgctatgcgatcgtgtactacgtcattttccgtgtgctgattaaagccctggatctgaaaactccgggtcgtgaagacaccaccgaagagagcaaagctggcgccaccagcgagatggctccggctctggtcgccgctttcggcggtaaagagaacatcaccaacctcgacgcatgtattactcgtctgcgtgttagcgtggcggatgtagcgaaagttgaccaggctggcctgaaaaaactgggcgccgctggcgtggtagtggcaggttctggcgtacaggccatcttcggtaccaagtccgataacctgaaaactgaaatggatgagtacatccgtaacagttaa

SEQ ID NO: 232587 - DNA, 543 bp, Klebsiella pneumoniae
atgattatctatttacacggttttgactcgaacagccccggtaaccatgagaaggtgatgcagctgcagtttatcgacccggacgtgcggttgattagctacagcacgcggcatcccaagcacgatatgcagcatttgctgaaagaggtcgataaaatgctgcagctcactgccgatgaccggccgctgatctgcggcgtcggccttggcggctactgggcggagcggattggttttctgtgcgaaatccgccaggcggtgttcaatccaaacctgtttccgcatgagaacatggaaggcaaaatcgaccgaccggaagagtatgctgacatcgccaccaagtgcgtgaccaacttccgcgagaagaaccgcgatcgctgcctggtggtgctttcccgccaggacgaggcgttgtacagccagcgttccgccgatctcctgcaccactattatgaaattatctgggatgaagagcagacccataagtttaaaaatatctcgccgcatctgcagcggctgaaagcgtttaaaaccctcggctaa

SEQ ID NO: 232588 - DNA, 645 bp, Klebsiella pneumoniae
gtgaccagcgtgctgtctgaccagctgctgcgccagcgcgacggcctgtccgctcaggtaggtaatatcgtggcccgtcgctccgacattgcctcggaaaccgtggcctttgcgctgttcgctgatgtgaatcctggtagtcatctcgatggtctgaaagtggtgtttcaggagcgcgaccgccttaaacgctacgggctgcgccaagaggatattaatgccgaacgtcagcgcctgctgaaggtcgcccggcgtatgaagacgaaaccggaaatgcgcaccttcagcgactgggtgcaaatccttaacgtcagctggtcgaatggcaatgcctactatgacactcaggcacgcggcactgcggccgccgacctgctggcgaccatcaccccggaggaagtgaacgcccgactcagcagttggcttaacgcgccggataccctggtacagttcagcttccccggcaaagcccactggccactgccgatggcgaaaacgatagacgcgctggaagccgccgtcgcgacggcaccgctggcgaaaccgcaggctccgcggccggtcactgtcccgacttcccaaaatcggtgcggactggcagttgcgcggacagcaaaaacgagtggtgacgcttggtcagaatga

SEQ ID NO: 232589 - DNA, 357 bp, Klebsiella pneumoniae
atgaataaggtcacgcatcttgttttacctttaagccttatatccaccgacgtgctggcggaaaataaaactgaaacagtaccgataacggaaaaacagaccagtgataccattgtggtacgagcagcccccaccaaccagtcgatgggtacgcaaattattaatgccgacaaaattgccagccgcccgacaggaaatggcacggttaccgaactgctgaaatataatcctaatgtacgctttgccaatgacagtaattccagtctgaatcccggggaaatcgcgccagaaaatgtctcgtttcacggcgagaaattttataacaacaactttattataccacatgggggaaactga

SEQ ID NO: 232590 - DNA, 279 bp, Klebsiella pneumoniae
atgaggctcaaaacgaaggccaaaccagtgcagtatcgcaaaatttgccttgttaacactgtgcatatctccggtgatggctaccggcttcactacagaggtattatcagaaagtacccgactcaccagttcctggagagtggtgtaaccgggtctgatgattttatgcgcgttaagccagataatcagctctgtggcaataaagccgggtgttacatcacggcggacaatgtgaatggcctgttcttcgagtatctaccgcactctttcacgccataa

SEQ ID NO: 232591 - DNA, 1143 bp, Klebsiella pneumoniae
atgtctttatcatttgaagatcaacacaaacttgatgagttctggtcttattgtgtcaaacatcagtatttcaatattggttacccagaatctgctgatttcaattacacagttccggaacgtttcatgcgtttttccatcaacaactgtggtgactgggctgattactgtaattaccggctgaatacctttgattttgaaaaagaggttatagcctactttgctggggtgttcaaaattccatttgagcagtgttggggctatgtaacaaatggggggacagaaggtaacatgttcggatgttatctgggacgtgaattatttcctgatgccatactttactactccagagacactcactactcagttgcaaaaatagtcaaattgctccgaatcaaatcacaggtagtcgaatctcagccaaacggtgaaatggattacgatgatctgatgaaaaaaatatccgttgatagagaaactaatccaataatatttgctaatattggttcaacagtacgtggggcgatagataatattgacgaaattcaaaaacgtttgcaggcctatggtatcaagcgagaggaattctatctgcacgctgacgccgcactgagtggtatgatcctaccgtttgttgacgagcctcagccatttactttcacagacggtattgactcaatcagtgtttctggtcacaaaatgattggttcaccgataccttgtggtatcgtactggcgaagaaagatcatgtaaatcgtatttcagtagctgtagattacatttcaactcatgataagactattacaggctcacgcaatggccatacaccgttgattatgtgggaagccattcgcagtcactcctattccgactggaaacaacgtatagagcattgtatgaatttggcacaatacgttgttgataatttccagaaagctggcattaatgcttggcgcaacaaaaactcaattacagtgatctttccctgcccctctgaatctgtatggaagaaacacggcttagcgatctctggcaatatcgctcacctaatcactacaccgcatcattttgatagtagtaaaatagactcattgatcattgacgttattgccgatctgaagaggtataaaaaaaaaccgtaa

SEQ ID NO: 232592 - DNA, 192 bp, Klebsiella pneumoniae
atgcatcaggcgccaaacggtgccatgttgatggtggcgttgcccgaagcgcagattcgcgcactgattaccgccccgcaggcgattgccgctgttaacgcccctgactattcggttatcgccgggcctatgccggagatcctcgccgtcagcaagcgtctgatggagcagaacatcatcaacaaacagtag

SEQ ID NO: 232593 - DNA, 240 bp, Klebsiella pneumoniae
atgatggcgggatttatgattcatttctggatattctctcttattgctggttggtacaagccccagtttaagaaggaatatcaaacactccactatgagaatgtctgttattacgttcttgcacgctatgacgatcgtttggttttatcacaatcgtacaaaaacggaagtacgaagttcgttataatcaatagcggacatattgatgactttgagattaatgtagtcagagtgcgttaa

SEQ ID NO: 232594 - DNA, 492 bp, Klebsiella pneumoniae
atgaggaaaaaactgattggcgtgatcgccggcggtggtggcgcaatagccattgcctctgcgctcatcactggcccaaccgggaacgatggtcttgaaggtgtgcgatacaacccctatcaggatgtggtaggcgtctggactgtctgctatggccacacaggcaaagacatcatgctcggcaagaagtacaccgaggctgaatgccgcgcgctgctcagtaaagacctgaacgccgtcgcccgccagattaacccatacatccagaagccgatccccgaaacaatgcgcggggctctgtactcgttcgcctataacgtcggcgctggcaacttccagacctccacgctgctgcgcaaaatcaaccagggcgaccagaaaggtgcgtgtgaccagttgcgccgctggacttatgccaagggcaagcagtggaaaggcctggtaactcgtcgcgagattgagcgcgaggtttgtctctggagtcaaaaatga

SEQ ID NO: 232595 - DNA, 732 bp, Klebsiella pneumoniae
atgaaagttatcaagtattggaaagttcagcttctgcagttgcctcagccctccagcaatatttccggcattatcaatgcccgcactctggtcgaaagcctgttgtttgaggggtactcgaaagataaaccgaaaattaacctcggttccggagtaaatattgagttgtttacagcacccgattcgctggaaacccgtatctttcgtgaccacctcgttgacagtgtgcgttgcttcccggtgtgtgaagatgatgatgaaactgacggaactcaggaagagcagactaagccaccctcacgcgaagcaatgattgaatatatcaagcaggccattggggaaggctatcagcctaaaatcggccatgagctcattggcaatcctgatctgctttggcagtttcatgacgaggcggtcgattatgaatatcgcgattgttggcgctggtaccaaaacggtcatggttttcatgagacctttagcgtccctaagaaaatccacgatcactcctgcgtcaactgttttgccgataaaggcccatgccttggcaagtgccaggttcccgatgttaataaggctcgcagctcctccttcgaagacgtcgtgaagccggtaatcaaatggcttaacgaaaacgccaaccctcatacatcagtgaacatcgacgcaaccagtgctcatctgcttactggtgaaatcggcattcacacggaagagttcattaaggactga

SEQ ID NO: 232596 - DNA, 234 bp, Klebsiella pneumoniae
atgcagacaatcattcaacttgagccgaacgagtgggtatctgaggacctgctgatcgcagtgactggcatgaagcgcggtacaattacccgcgcccgcaaaaagtcctggctgctgggtagggagtataagcacgtttccccagagggtgatccaaagcccaccagcgaatgcatgtataaccgcaaagcggttgatgcgtggattgcagcacaaaagcaaccaatttggtga

SEQ ID NO: 232597 - DNA, 348 bp, Klebsiella pneumoniae
gtgaaaacaaatctgattgaaacacgtcgccgccacctcgttcgggcaaagctggactcaatgatgcgtagaaccggaagttatttccagatagtcaaactggaagatggttcgaaattacccgtggagcttgacgaagatattttaacgaaagcactgattaaactttttgaagcgatgatttatgacacccataaacgcgagcaggcagaaaatttaatttctgaacattattcgaattgcatgggagttaataaattaacgcccgacggagtggatttcatgaatgcactcattgcaacactggccgaacagtcattaaaagcggagaaattaactaatggctaa

SEQ ID NO: 232598 - DNA, 204 bp, Klebsiella pneumoniae
atgaatatcccccatcaagacctggaatctatcacccttgacgcggagaacctttataacctgctcgatttaatgctgctgagttccgaaaaacttcgtggtgagcaattagagcggttattaggtctcgcactgaatttatctgatgaccttcagcaatggtttagacaggagtatgaacgccgtgaaaacaaatctgattga

SEQ ID NO: 232599 - DNA, 123 bp, Klebsiella pneumoniae
atgaagatgaatagccgaaaccttattactgattatgaggcttacagaacagcacataactactttatcgacggtcatgcggtaatcgccaatctgtttctgcgcaaagcctacgggaggtaa

SEQ ID NO: 232600 - DNA, 444 bp, Klebsiella pneumoniae
atgaaaaaattcgaactcgttgcagaaatgacaaaagaaatcttcggcacaaagttgtttcgtattcgtgcgcttatctcgttcggcgttgtagataaaggtgatttaggtggctgggtagagaaagaagacaaccttagccaggaaggcgatgcgtgggtctctggcaatgcgcaggtctctggcgatgcgtgggtctctggcaatgcgagctggcttacagtcggccccgttggctctgagaatggtttcctgtccgccttccggcaaaaagacaactccattatggttctccgtgggtgctttgaaggaacaattgaagagtttgagtctgccgtaaaagaaactcacggtgataacgaattcagtgaacagtacctggccttaattccgttcatcaaactgcgcctggaagaagttgaggtgagcaatgaagatgaatag

SEQ ID NO: 232601 - DNA, 393 bp, Klebsiella pneumoniae
atgaaagcgccactccctattggaatgcttgagactatcgcggcggatattgccgaaaacacagtgcttctggagctgatttataagcacagtaatgaagatcacgaaactgattgtgcaatggcttgcttaattcgctcaatgaaaaagacgctggataccactaacgaatatatcaaatcgttaagcgactctcctgccccccccaaagggaacatggtgagaacgatatttctgatgagatatttcacgcgaccattacagccagaaaactcgaagagcttgcgcatatttataacgagttttacttcacagattgcgacaatggtaaacccgcaatgtatatggcagctgcaatttttgactatgcgattaaggtttgcagtgaactga

SEQ ID NO: 232602 - DNA, 453 bp, Klebsiella pneumoniae
atgaaacctgaaatgcatgattgttcaatagagtcgctttctatcggcgtgcagcaattgcagtttttacaggaatattccgtgcagcaggatgtcgatggccgacatattgccgataccttaattttagatgttatccaaaagctaaagcagcttctctcgggtgaggaaatcgcatccttgagaaaagaacttcccgtaaaagttatccccacctgtaagcggatttctgacacgcaggagatcagcttacgcatccaattagcccgagaaaatctcggcctcagtgaagccgatctcgctcgcaagctgaatacctacagtgatcacatctccgactgggaatgcggcattgcagaaccgccggccagcatgattatcccgctggcgcatgcgctcaaatgcgatccgctgtggctgctgactggcaataatccgaaggtcgtggaatga

SEQ ID NO: 232603 - DNA, 414 bp, Klebsiella pneumoniae
atgggagagagaattttagaaacgatgggggaccgaattcgtcggagaagaaaggagcaaggcaagacactgaaggagttggcaagcgatgtcggggtttctatggcagcagtttcactatgggagagaggggatacctcacccaccggtgataaaattaaccgtttatgcaaagccttagactgcacacctatctggcttcttgaggggctggaacacctaacagccagctctgggagtgttgcaaacaaatacaccaagtatgagctagataagttgagcaccatctttgatatactgccccgcgagtaccgattgaaagtggttgagtacgctgagacccttcttgaggattaccattctgaagtcgtggcaaagattaaagatgtaaaatccatgaaattcaaagagtaa

SEQ ID NO: 232604 - DNA, 864 bp, Klebsiella pneumoniae
atgactaaaaaactccagcccattactaccgattaccagcccgtcattgctggcgtggaaatcacagccgatgccgctgggcgctttaacctgaatgctttgcataaagccagtggcgcaagtgaggataaatctccgagtcaatggttgcgccgcaaaagcacaaaagaacttattgaagagcttaaacgcaacctgctgaaagatagccagaatgtaaatttacactctgctcaaaaaccaatcgatacagtgaatggtggcattgcgcctggcactttcgcccacgaactgctggccattgagtatgcgggctggatctcgccgtcattccgattgcgggtcaaccagacctttctcgactttcgtactggcaagttggcgccagtcaacagtagcctgccggacttcaatgaccctgcgtcagctgcgcgcgcctgggcggatgagtacgaggccaaaaacaaggcgatcacctacgtccgccgccaggcccagtacatcgagcaccttgaaaatctctttcagcctggaatgtctccttgccagttctgcaagcggctgaatggcgtcaatatccagcaggtgaatgcgttcttggcagatcacaactggctttatgacggccagccaaaagccaagcgtccgctttggcgagtccataactacgcccgcgatctttacctcagtgagcggaccggacaggtagaacaggacgacggtgatatgcgggacatctataagccgattctgctgcacaagggcgccatttggatctatcgccactacctcaaaggtcacctcccgatgaagaagacttgggatggtgaattcacccacgacactgagctagagggggcgtga

SEQ ID NO: 232605 - DNA, 402 bp, Klebsiella pneumoniae
atgcgtgatattcaactggttcttgaacgttgggggacatgggcctctaacgaaggctctcgggttgactggtctccggttggtgctggattcaaaggactcattcctcagacaggaaaatcccgcccgtcctgctgtgataacgacggcatcattgttgataccgcagtgggtatgttgggtaagaccgggcgccatgatgagcttaagcttattatgctccactacatgtatgacgtttcgaaatccacaatttcccgctgggagaaatgctctgagggtaaaatcaggcagaaactgatgattgcagaaacatttattgacgcctgcatcatcatgtcaggagcgacactagaaatggacgactggacgcagcgaaatagagttgtaaaagttgcataa

SEQ ID NO: 232606 - DNA, 492 bp, Klebsiella pneumoniae
atgaggaaaaaactgattggcgtgatcgccggcggcggtggcgccatagccattgcctctgcgctcatcactggcccaaccggtaacgatggtcttgaaggtgtgcgttatgacccttatcaggatgtggtaggcgtctggactgtctgctatggccacactggcaaagacatcatgctcggcaagaagtacaccgaggctgaatgccgtgcgctgctcagcaaagacctgaacaccgtcgcccgccagattaacccatacatccagaagccgatccccgagacaatgcgcggggctctgtactcattcgcgtataacgtcggcgctggcaacttccagacctccacactgctgcgcaaaatcaaccagggcgaccagaaaggtgcatgtgatcagctgcgccgctggacttatgccaagggcaagcagtggaaaggtctggtaactcgccgcgagattgagcgcgaagtatgtctttgggggcagaaatga

SEQ ID NO: 232607 - DNA, 468 bp, Klebsiella pneumoniae
atgagccgattagcagccattatcagcgctgttgtgatctgcctgatagtcagcctcggctggctggccagtcactaccacgacaacgccaccgagtacaaaaggcagcgcgataaagtgactgagcaactcagcctggcgaaagataccattgctgacatgcaggtaaggcagcgcgacgtcgcagcgctcgatgccaaatacacgaaggaattagccgatgcaaaagctgaaaatgatgctctgcagcgcaagtttgataatggtggtagggtgctcgtcaaaggcaagtgtccagtgtcagccgcaacccaagccaccggcgcccccagcgtgggcgatgatgccaccgtcgaactctctgcagttgctggacgaaacgttctcggtatccgatccggaatcgtcagcgaccaaacagccttgagggcgctgcaggaatacatcaccacgcagtgcctgaagtaa

SEQ ID NO: 232608 - DNA, 390 bp, Klebsiella pneumoniae
atgacacctcctatgcacaggcgggttcgaaatgtctttgttgagtcaggattgactgtcggatataccgttcagtcgctgacatggaccgataccgggaaattgacggagcgattcatcgtattccggcccaacggcggtacggcagtagatcgtgatatggcagctgattattacgtcctggtggatgtcataactggtaagtctgctggcgactacgcgaaatcagagaccgatgtgcaggccatcatcgattacgtgcagcaaaacccgatgacgcacacctgccttgggcagatatccaacatgggcggaattccttcgcctgttatcacagccgaggggcgtatggtgtggcgcctgcagttcgcctgcctctttggcggataa

SEQ ID NO: 232609 - DNA, 753 bp, Klebsiella pneumoniae
atgaaaggctgctccggcaacggacaactaattggtagcgctaagacgctggaactggcttacggctgtgccgacaaggttccgggggaaggcgactggaaactgatggggttgccaacatcggcaacgtgggaccttagcccggaggccctgacctctgatgctgataacggcggattgagttcaaacctgattgccagtctggacccgacctactccatcgaaggggaggttcgcgttaaagaccgcactgatgagtttggcattcagcagttcgtgaaatacatcgtcgatgaggttcgtgcccgccgccagccaggtgtatggatgcgtttccactggggcgattattaccatatcggctatatggtcccatcaggagccagtgacggcggtggtgtgaaagaaatcgtgacctacagctttgagttcaaactggctgacggcaacacgttccagatcaccgaagcggacgaaggcattccggtaactggcgtgacggttgcgccaacgaccagctctatcgccgccggaaaaagcaccaccttcaaagtaacgattgaacccgcagctgctgacgacaaggccttcacggttacttcatctgatccagcgcgcgcgacagtagcatttgttggcaatacggtaaccgtgtcagcgccgtcaggtgcaaaggcgggaacagcaacaattaatgtgaagacggttgatggtaaccacgtggctacccacgaggttactgtccaggcgtaa

SEQ ID NO: 232610 - DNA, 195 bp, Klebsiella pneumoniae
atgaaagcaacagtacgccgctacttacgcgctgccggaagcattcttgatatcgctccgtcagccagatacacaaggaacgtcaaaaaaaccagcgatatgcaggaaatcgagaaagatttctatcgcataggtggtgatttcaggcgttcacttgcaatagcaaatgccgcaaagcaagagccaacaagctag

SEQ ID NO: 232611 - DNA, 243 bp, Klebsiella pneumoniae
atggcagaaaaggaacaggcagccaggcacaagtacaaccaggatgcactggacggcgaaattaacctcgatcgccgcggtcaatggatgggtttttctatcgccataattattcttgtcatggctgccgtgtttgcatggaaagggaatactacttttgccggaacgctggttgccatagacctcataggtcttgtgtcggtttttgttctcggaagacgccagggtaagaaagatgagtaa

SEQ ID NO: 232612 - DNA, 171 bp, Klebsiella pneumoniae
atgtctggtcttgtgaatccaaaatattcccctgaagaagctgcatacgcactgataattgagcttgtacgggcccagcgtgtgccggtttactcatcaaatatttcaggactattgtcgttctatgatgaagctgtcgagcatttcaaagacgacgcgaagaagagctaa

SEQ ID NO: 232613 - DNA, 552 bp, Klebsiella pneumoniae
atgaatatgcgagacggcagcacaaggggcctcctggtggccagccttttgctgctctcccttccggcgctggcttatgagggcagcagcacggtcaattttaacgtcacgggcaccatcgaagcgccttcctgtgaggtggccgtggagccgtcgaacagtatcgatttaggcaccgtctcctcgcagacgttctccggacatgccggggcgagcggcgccagcgtgccggttaagctggtcttttccagctgttccgccgatgcgtcggcggtgaccatcgcgtttagcggcaccagcttcgatagcacccacgcttcaatctataaaaacttccagactggcagcagcggtgccagcggcgtcggtttgcagctgcagagcatgaccgaccagcagccccttggccccggcgaccagtatctctatacctttggggacgatgcggatatccataccttgaatatggtggcacgtatgtattcgccctatggccaggcgaaccccggcatcgtcgggtttaccgccacgtttgatgtggtctacaaataa

SEQ ID NO: 232614 - DNA, 174 bp, Klebsiella pneumoniae
atgctgataaatatcctgaaccttttcttcaggcccctcaatgagttgaaaaaatgcgtcccgttaaaaagtaaaataccggtgacgtccgcctgcccatttctttcgtttgccctggcgaccatggcctcgatcgatttgaatgagacattgtcgcagatatggctgcgataa

SEQ ID NO: 232615 - DNA, 741 bp, Klebsiella pneumoniae
atggcaaaaccggactggggagcactgcaacaccagttcctcgccgagcatgccaaaacaggaatatccccgaaagactggtgcgcagcgcagggactgaattactcatctgcgaaacgctatatcaaagtaacgacttacggtgcgaattcgcaaaaaaaaactgcgaacaaatctgcgaattcgcagaaggagaaaggcggggccaataaaaacgggaaggtgaaaaaaaaccagcccgacacaggcacccgctcaaaatctccagaaacgaaaccgatacgcggatcgcgcaccgcaccgccgacgaacgctttccagcctggcaaccagaatgcattaaagcacggtggctacggccgccggatgctgctctctgacgctatcactgaagatgcccagatgctcacgctcgacgatgagcttttctggctgcgtgcggcgagcctgacagccgcagagaatatcgggcgctggcagacagagctggagacagccgacagcgatcaggccaaagatttgcacgaccttatctctcaggcgcagaaggctatgcatcgcaacacagcgcgcattgagtctctggagtacaccaaggcggcgattatcaagcagcgcgttgatgctgcttaccgcgaagctgcgaccgaaaaggttgagctcgaaatcgatgtgctaaaagacggcgacaaggataacgcgatcgtcgtgcataactcgctgccaatcccgggaagataa

SEQ ID NO: 232616 - DNA, 1332 bp, Klebsiella pneumoniae
atggccgacatttacctacccacgctacacaacgggcagttaacggtctggtctgactcctgggatcaccagttgaatgcggttcgctgtggccgacgctgggggaaaaccttcatgctgtcgagcgctgcggtgacctacgcaacgtcacagttccggcgtccgggcatggacatcgagctgggcgggcgggtcggtatcttcactgccgaatatcgccagtaccaggagatctacgacaagctggaagaaatcctgctgccgctgaaaaagagcttcagccggcaggaaaagcgcctgctgctgaagaacggcgggaagattgacttctgggtcaccaacgacaacaaactggccggccgtgggcgagagtacgaaattatcctgatcgatgaggcggcttttaccaagtcgcctgaaatgctgaaggaaatctggccgaagtcgattaagccgacgctactgacgacaaaaggccgggcctacgtattctcaacgcctgacggtgtggacgaagaaaacttcttctatgccatctgtcacaacaaagaccttggcttccatgagcatcatgctccgacgtcatcaaaccccttcgttcctcccgaggagctggagaaagagcgacaaaacaacgacccgcgcgttttccggcaggagttccttgccgagttcgtagactggtccgctgcatcgctttttgacgttcgcaaatggttcgagggtgaaaaccaggaccagccagtcgattaccctgaaatgtgccaggccgtcttcgctgtcatggatactgcagttaagggcggtacagaacacgacggcacggcggtggtttactacgccgtcgacacccgtccaggcattcagcgactgaccatactcgactgggatgtggtgcagatcgacggcgcgctgctggaagagtggattccgtccgttttcacccggctgaatgagctatccggccagtgcgtcgctgtaaatggcagcctcggcgtgttcattgaagacgccagcatgggcagcatcctcctgcagaaaggtgaaagcctgggatggccggtcaacaaaattgaatccgccctgaccagcaaagggaaggacgaacgcgccattatggcctccggttatcactaccgcgggctggcgaaaatatcccgatacgcctacgagaagacagccgtcttcaagggcgaaacagcaaaccatctgcataagcaggtgtcacgattccaccttgccgataagaacgcgcacaagcgcgccgacgatttgctggatgattacacctacgggctgatcatcgcgttcggtagcggcgacgcactctag

SEQ ID NO: 232617 - DNA, 1419 bp, Klebsiella pneumoniae
atgaacgaagatgatttcgaaatcggcagctgctctcactcagagttgatggcattgctggacagcgacgacatccagcccggctctacggctggctatcagacctgcaaaacgatttacctcttccacccgcttggcgggaaaatggtggatcgcccgatcaagatggcgatgaacgagtcgcgcaccgttcacatttcgcaggcgtatggaatcgagcagcgtctccgagatgcatttgagcgggagtggaaggcactgggtgctgacaaccacatcgctaacgcggcgcggatatcgcgcatttatggcgtttcggcgatcgcaatgctggttgataaccaggagccgtcctcggcggtggactaccgcacgctgtataagcacaacgtgacattcaacattctcgacccgctgaacaccgcggggagcatcgttctgaaccaggacccgaacgcgcaggacttccagaaggtcgaagggatcagagtggcgggcaagccgtatcacaaatcccgctgcgtagtgcaacagaacgaggacccgatttatctggcctataactctgcggcctttggctttaccggtcgcagcgtttaccagcgcgcactgttcccgctgaaatccttcatccagaccatgcgcaccgacgacatggttgcggtgaaaggtggtctgcttgtgacgaaaattaagggcccaagctcagtcgtcaacaacatgatgcagaagctaagcggcattaagcgcatgatgctgaagcgcggaaagacgggagaagtcctgcagatcggagatggcgacaacatcgagtcaatcgacctgagcaacctggaaaagcctctcgattctgcacgtaagcacatactggagaacgtggccgccgccgctgacatgccggcgatcatcctcaactctgagacgttcgcccagggcttcggtgagggcactgaagatgcccgcgccgtggcggtgtacatcgacaacatccgcgagtggctggaccagctttacgcgttcttcattcgtgtgtgccagtaccgcgcctggagcattgagttcttccagtcgctgcgtgccgacttcccggatctgaaaaacacttacagcctgtacttcgcctcatggattaacaacttcgaatatcgctggccaccatccctgaaggagccggatagcgaaaaagtgaaggtcgatgaaacccgatttaaggcgatcgtcagcatgctggaagtgctgcttccccaggtcaacacggatgatgagaaccgcgctcttcttatcgagtgggcgcaggccaacacgaacgctaacgaaaacctgttcccacaacggctcgatctcgatatcgactcgctaaaggctaaccgacctcaacagccgcagggagaagatcctggcggcgggatgatactatga

SEQ ID NO: 232618 - DNA, 822 bp, Klebsiella pneumoniae
atgaagactttcacgcgcaccgtacgtgaggcggtgaagttctttctgcgcaatggctacacctcgcggcaggagctggagcaatggcaggccattatccggcaggcggccgaaagcgaaactgatgacgactacatgagcatggtgtccgatcggttgcgtaaggcctatgacctgcaggttagcaaggctggatcgctgaagcgccacaaggggctttcacgcttcacgctgaactacatggagccgaagttacgcagcgagctggatcgccgcatcctggccagcgctgacctgataaagctgaatcgcaagaaagccatcgatactactctgtcgcggtttagcggatgggccagcagcattccctcagcagacagcattgcgctgaccggcattcagggatcgatgcgggagacggcggcgcacattcagaaggccgccgagatggtggactatgaagcgcgccgcgtgatgattgaccagagccataagctgatcgccaatatcgacaacatcatcgcgacgggcaacaacgcgattgctgccgagtggcatagccactggcgccagccagggtacgactaccgggaagatcacaaggagagggacaagctgatctatctcatccgcgggaactgggcgcagaaaaatggctatgtcaaagctggccctgccggctatctcgacgaaattacgcagcctggcgaagaggttttctgtcggtgctacgtcacctatctgtacaacctccgcagcattcccgaggacatgctgacccagaagggccgcaagttcctggagtccatgaaagcagcatag

SEQ ID NO: 232619 - DNA, 1614 bp, Klebsiella pneumoniae
gtggctatttttggcagcgggataatgttccgtcaggggaagttcgtcttcctgattcagcgctcggatgatggcacatggtgccagccgggcgggacgatagagccgggagagttagccatagacgccgcacggcgcgaggtgctggaggaaacaggctatcagtacgatggcccgctgacgccgcacagcgtacatggtgactacctgacctaccgcgccgacgtgccggagcagttcgaagcgaagataaacgacgaatcgctggccgccggatggttccatattgacgatctgccaaagccgctgcatcagccattcgctgaaatgctggcgcagcaggcgctcaatgaaaccgacgtggccgcgctcatcgctgacggaaccctcagcagcccgcaatatttttacaacatgtggatgttcgccatccgggtgaccggaacaggggttacctggcgatctgcagatcaggagatgacgttccgtaacccggacgactatctcacccctgaatttctccagcgggtagctggcgtaccacttatctggcttcaccccgaaaaaagaacacttgatagcgacgagttctcaaagcgcgttattggcaccctgacaaatgcctgggttgccgataagggcgaagtgtgggccgttgcgcgtgtgtacgacgccgaagctgctgaaattatggcaacaaggcaattaagcacctcgccaactgtgaagttctccgaggttgctcaatcaatcattgtcgacggtcagcctctactggtggagccatcccccgagctgctcgaccacgttgcaatttgtgaacagggcgtgtgggacaagctccttgcccctaccggtgttaaatctgattccattcctgaagaggctgaaaagatggacgaggaaaaaatcgtagcgctgattaataaggcgatcgatgcgcgtttggctaaggccgacgaagagaaggaagcgaaagccaaggctgacgccgaagaggccgccaagaaagaaaaggctgacgcagaagacaaagaagcggaagaggcgaaagctaaagccgacgcggaagagaaagccgcgaaggaaaaagctgatgctgaagccaaagaaaaggcggatgccgaagaggctgagaaaatggcaaaagaaaaagccgactctcaaatcctccaggaaattgctgagcttcgctcacgcattcctaccgaactgagcgacgaagagcgcaacgaagttgcagaagcgcaggtgaaagccgatagcgtcttctccagctttggcaaacgcgccccgatcccgctgtccggtgaaaaaccgatggcgtatcgccgccgcctgatgattcaactgcaggagcattcgccggactacaaagccgtcgatctctctgctatcgctgattctcaactgctgagcactgccgaaaagcatatctacgctgatgcgcagaaggcggccagcctgtcagttggtcccggtatgctgcgcgagattaagcgcgccgatgctaccggccgtcagatcagcacctttgaaggcgatcccgccgtcacctgggcgccgttccagtctggcaagcgtcaggtcaccagttttaacaaccaggcttaa

SEQ ID NO: 232620 - DNA, 861 bp, Klebsiella pneumoniae
atggctaatttatctcttaacccgatggcgaccacgaatgccgctggttccttcggtgtgcagtctgatggcttcattcagggcgttgctctggatgatccggcaaaccgctttaacctggcgtccggcactgttgctgccaccgaaaccaaaccgctatggggcggcctgccggttgccgagttgctgcccggcgtgaactccagccctcgcgggtcgactattcgtcgcgctgtgtcactggctgagctcgaaggcttcaccgtcttcaaccaggcccacaacgggcttaccactccgcaatcaccggttccgctgtatgcgtccggcatgagcgtttcattttatcgccttggctccaacatgcgcgttccgctgaaagcgtcaacgcaggtggtcgcgctgggaactgctggcgcatcagtgaaaacgccgctggcgtgggacttcgtcaataaccaggtgaccaccgcagccgcggcggcttttgccggtgctgacattgccacgaccgctgttacctactcgaacggcgtggccaccgccaccactgcctctgcgcatggtctgactgctggccagtacgtgaagatcagcggcgtagctccggctgactataacggcaccgtcgttgtgctgagtgtaccgagtacgacaaccttcacctatgcgcctgccagcgcgccgggcggctccgcgaccacgcagggcactatcggcgcagtggctcaggcagacatcaccctgccggtgaaagtcatctccatcgagagtgggaactctaaaaccgtcagctatgacagcgctacgggcttccttacctggaacaacaccgacagctgcgcgctggtcttactttaa

SEQ ID NO: 232621 - DNA, 1032 bp, Klebsiella pneumoniae
atggctgcaattacccccagctacaccatcgtcaacccgtcgtatattgcgccggagttgatcattggttaccagcaggcgtccggtgcgttcgaaaccatcgccagcggtaacccgcaggtccgccttggcgtaggcgaccagtacgtttatatgcgccgcctggatattcgtacccaggtaacctccagccagtccggcaacgccaaccagctgccgagcgtggcgctcgaggcgcgcatgatctccactccaacctacctgttccgctgccgtggtatctacgatcaccacgacaccgcggcggccggtaactggaacgtggcactgccagaagctcagcgtctcggcatgcgacagggtatcttccagcagttgcgttctgcgttgctgtacggcatgaacccggcaggcggtgaaggtctgttgaacaccgcaggcgcgaccaccgaaaccctgccggcggacagcagcggcaataccactgtgctgacctatgaccacggacaaatggcggtctatctgctgggccatgtacaggccgcgctgacccgcaccatgcaactgggtcgccagcagcgtgtcgttatcctcgggccgcagcgcgtgctgggcgcaatggaaattcagcagatcgtacagctgacctcttatcagcgtcctggcggcggtactgataccgtcggtggaactgtgaaagaggtgctccgcggcgcgaatgtccaggttgactgggtatacgacgacacgctgatcggcgccggtgccggcggtactgacgcggtggttatcaccatcccggaagtggaagtgccgatggtcaactccaccgtgaacaccaacgaattcgccaaactgagcccgtctctggcggcgaacgccctgatgttcaccgacatggcggcaccgatggaaatcccgacgccaatccccgggggcgctatcgacgtgctgtcagaaatgcgctctacggctggctgggcagttcgtccggaagctatcaccatcctgtcgatggcatacagctcctaa

SEQ ID NO: 232622 - DNA, 483 bp, Klebsiella pneumoniae
atgaaactgtacatcgccaacactaccaaacagcgccacatcttcactttccgccagctggaaaccgggcgcctccgccagatccccattgagcacggttcgcagatgcaggttctggatggctctaccgaagaagtcgaagcggttattcagcatcatcaggtttacggcctggttgactcaaccaaaatcgaccagagccaggcatttgtcggtctgtgctacagcatcaacaaacccgtttccgccagcgttattgagaaaaccattcgcgataacgatggccatctgacccgcggagctcataaccgccggcaggcatccgtcgccgcactggataacacactgcgcgaaagtggtatcggctacgagggtgacatggaattcagcgcagagcaggccaaggggcgcgatgaccattctgacgatccgaccatcaacgaaaaaattgtcacgccgaaagccgggagcaagaagaaatga

SEQ ID NO: 232623 - DNA, 429 bp, Klebsiella pneumoniae
atgaccaccagtctgtcgggatttatcgaattcgttcgatctgatatgggcattacccccgaccaggttcccgacgactcgccgtctttttctctcgcctatggcggcgccgttgaatgggtaaaccctgacatcgcgtgcgttatgccgaacatgtacagcatcgcggtttataaccttggggcgtcgtttctcatcaattacgggacagaggctgtgtttgctgagttccgtaaacaatatggtctgaatgacttcaaagccggggttattaccggagccggggataactctaccagcgcccagcgccttgttccggacttcttcaaagacctgtcgctggcagacctgcagatgctccaggacccatgggggcgtcgctacctgatgatcgctcagcagttcgggagcctgtggggcttgtcatga

SEQ ID NO: 232624 - DNA, 435 bp, Klebsiella pneumoniae
atgatcacctttcatctgggcgttatcgatatcccctacgagggcgaggacaccacgacggggagcgtggcggaagagctggaagcaaggtatcagattatgcagacgttctttgaccgctacgggaacgatattgctgatttgatgagcaaagacctcgctgcagcgcttgaaaacatgttcgctggcgcgccgccggcaaaagacccgctcgctgagtcaatgtccaaagttcacgatctctttgtcggcttcctcgataacaccgagatgaacggcctccctggcgttccaacgcgccgcgcgcttgagggtatatcgaagcgctttaaaggcaaaaaggggccgccgcgcccttcattcattgacacaggaacctatcaggcagctatgcgcgcctgggtaagcggggtgctgaatgccttccctgagtga

SEQ ID NO: 232625 - DNA, 939 bp, Klebsiella pneumoniae
atgccttccctgagtgagttacagaacgccaaaaccgagcttaacgctaccctgacgcagggtctggatgatctgagccggtttcaggtggtgacgttcacgaagtacatcagaaaggtgcttccgctcgatggcttcgtgttctgggtgaaagcctcggtcctgtctgacgatccgagcaatgagccggacacggtggatgtgaaaggttatttgcacctgacgaccgaaaccattcaggacgatgaacaactgtacgatcgcaacgtggtgacgttcaccgcgcaggcggacatcgacccgtttaacgacatcgggtcagaggtgctttacatcggcgagttttttggcgtgcagttctcgttctcccggcgtaccggtctgaatgagccggcgaacctgtaccactatactggagaggctatttttccgcacatgcggtcgcagatcatcaactctgcggatgacatagacctttccgacgtagtggtgtcaagctcgttgccgatctggctgaccctgaatcagtacatgccgatgttcccggcgatgctctcaacacagaacctttcgccgccctatgcgaccgtgaagtgcagtaacacgtcaccgatcgccggcgctttctatctggacgagaagcaaaaccagtatcaactggtatcggaagatgtcacgctttcggtcaccggcctgcgtaacgcaagcattgaggacttcgtgcggtatgtgcaggactacacgaccggagatgccccggagatggggatcatgaacattcccgtcgtccaggatgagcgagtcactcagaacgagctcaatatcatcgccatgcgtaagaccatcaaattcaaaatcaactactaccagcaacggatgcgtgacctgtcgcgccggctgatcacatctgcaattccgaatatttacccggagaaataa

SEQ ID NO: 232626 - DNA, 1395 bp, Klebsiella pneumoniae
atggcaattgttaaaattaacgtgtcggtgacgaatccgccgaagccctcgcagttgttaaagtccggggcgatgatttctatgggcggcacgacgctgaatgccggtgaatatcagctgctgaccagtgaaaccgacctggccgacatcctcgcaccggcgaaaactatctcaacgctcgcctgggctactggcgtggtaactgtcacgctggctgccgctcatggatggactaacggatcacaggtcccggtgatcatctccggagcgactccagcggggtacaatggcgcctataccgctacagtgacaggcaccaacaccttcacctatccgctgacgaccaaccccggcaccgcgacggcaatgggaacggtaaaaacggtagttcagaacgaaatttcccagatgaacacctcgttctgggctcagggaaagacgcgggcagtttatgttctggagcttggcgatgtgtccatgacagacgctgtcgaggcgctgacaactttcattgctgaagatgtttccctgggaaacacctaccagaagtttttctcctatctggtcccgcgcgaatgggattcggttgctgaatttaaaactctgacgggtctctatacctcgccgggaagcctggtttacttctttgtcacctcgacgatcgccacctatgaagcgtggactgcgacgaaaaacaaaactgtctttgccggcgtcgaggctccggatattccggcgagcgagttttccatggccggcccgttccagtcatccctggcaaacgacccggggtcgagcaacatggtgccgccgatgtcgtaccgctttatgtacggcctgactgagtacccgctggaaggcaacagcgcactgctgaaatcgctgcaggacagcaacatcaactacatcggcaccggcgccgaaggtggtctcagtaacaaagtgctgttcactggccgcatgctcgacggtaacccgtttaactactggtattcggtggcgtggacggcgatcaaccttgagctcgacctggcgaatgaaatcatcaacggctccaacacaaccgttaacccgctgtactacgagcagaagggcattgaccgcctgcagcgtcgcgctctgaaaaccttgcgtaatggcatcagctacgggctgatcctcggtcgcgtcattgacacgcaactgacacaggaagatttcaacaccgagtatgacaaaggcacttacgccggcaacgccgtgatcaacgccgttccgttcagtaactacaacagcctgaacccatccgattaccaggaaggcaaatataacgggctgagcgccgtcatgacgccgcgccgcggcttcgaatccatcacgtttaacgtgaacgtaacgaactttgtaggggcgtaa

SEQ ID NO: 232627 - DNA, 438 bp, Klebsiella pneumoniae
atggcgaacccattagtaccgcagggctttcttaaccgcgtacgcggggctctttccgtcacggatacaccggcgctgaacgtctcggcgtcgtacctggcaaaggacggcattagcctgcgtccggacggcccagctaccgacatcatccctacgatgaccggcaccgtcggcagccaggcgccgtatcagcaggtaacgctgaccgtgcatcttctgaaaactcaggggctgggtgaaagctaccggcagcgctttttgaccgacacgtcgttgggtgaaatcgtggtgacgccggatgcaacgacgttcggcaatattacgctgctcaactgctacctggtcaacttcaatgagctggcttttagcgggatggaaccggcttttgtggtaaccattggcggctatatggtcactaacgacaacatgtgggtgtaa

SEQ ID NO: 232628 - DNA, 573 bp, Klebsiella pneumoniae
atgaaaatcgacaagaaattgaatttggtcaccaacattacccgcgaagacggctctatcgtctacctacatgtaacgccgtttccctatgaggtagtagaagagcattgtgtcctgctggggaacctcttcaccagattcatctcgcaggttggcggtcttggcgccgccagaattgccgcgatgatgctgaggcagagcctgaaagcggaaatagataacggtcggacaggtccgaacatcgttgatgaaattcagcgactgacggtagttatccataacgtcggcggccagtggaaaaccacgccccttgaggtggcattcaatcaggggattatcgaccctgatgagtatcgcgaggtcgaaggcgaagtggttttttttatggtttcctctgctattcagaaggcaaacctgatcgcgccgaccgtgggaacggtaatcaaaatgtacgatgggcaactaacctcatcgagcgttacggcgttccgcgattcgttgcagacgtcgaagccggataccgatacccagacccagaatgccccgccggaaacgtcatttataccctcttag

SEQ ID NO: 232629 - DNA, 1902 bp, Klebsiella pneumoniae
atggtagctaagtcgatcgtcgacattgacgtaaatgacgacaagtttgtcgcgtttatggaaaggtttcgcgagtaccagagcgcgctggatgatttaccggaagcctggcgagtggctgccgttggtattggtgaaagcagcaaacagaccgaaaaggccaaaggtgaggcgaaggagttaggcgcggagtttaatgccgtggccgaggccattctgaccatcaacagcggtatcgatcggctcaacaccaacctggaagactcgaagaaaaagcaggacgaattcaacaaaagcaccagatctgcgaagggcttcctcagcgatgcgacgaaagacgctaaatcgctggcagggcatatcaaggaagcgacggccagccttctgtcatggggtggcattgtcgggatatttaccggcgtccttggcgttggcggcctgtttggcatcaaccgcctggcggccaccaccggcgcccagcggtttacttctctcgggctggggaccagcatcggagcgctggattcaaccgccataaactatcagaaagcactgggtaatccggctgggacgctgggcgcgatccgcgattcgcaaatggacctgtcgaagcgctggacgtttcaggcgatgggcattaacaatcccgaccaggacccggcaaaactgctcccgcagatgatccgcaacgcgcgagatatcttcgtgcagaacggcagcacgctgcagggcgcgcaggcgcacggcctgacaaacttctttacgctggacgacctgaaccgcttcaaaaacatgagcgatgaggagatcaccgccatggagaagcgcgcgcagcaggatgcgcgtatgttgcaaattaccgaccagcaggcgcgccagtggcaggattttaacgtccaactcgactacagcagccagagcatcagaaacacgtttgtgcgcggcctgggtcctctcacgcctcaactgagcaaactgtctgatgcgctggcaggtgcgatcgataccgtcctgaaatcacccgagctcggcaagtggattgatgcgcttgccggcggcattgagcgattcggtaattacctagcttcgcctacgttcaaaagcgacgttgagtcgtttatgtcgggcgttgagcggctggggcgagtcatcatgaaagtgctcggctggctcgatggcggatcgtcggcgatggacgatattaagtccgggtcctcattcctgaataatgacgtccagaccgatgccggaggaaatcacttcgtaaaaggcggactcagcgatccgaacacgccagcggtttcgaagtggctgacgcgccatctgtacagttggactggtacggcccctgccgagtacgaccagtattttctggatgcagccaataagtacaacgtcgatccgcgctggcttaaagccattactgcgggggaatcttcatgggaccagaatgcgcaagggcctgttacaaggtctggtaagcgtgcattaggcttaatgcaagttatgcctgataactttcagcctggtgagaatccatttgacccacatgacaacatcatggctggcgccagagttttctcctgggcgatgcagagcgcgaatggtgatctcgacgaggcgctgcgttattacaacggcggaagccgccgcggtagtgcagaaaatagggcttatcccggcaggatcagggaaaagtatgctgcgatgtatggagcgccgaagaacaatgacgcttctggcgtcgatagttcagagattgccaaaaatacctcgaaaactaaccagcttctgcagcagatcgtcgataaaaatggcaatggtagtcgggaaatagtcgtttacaacaatacgggtgggaacgccattgtctccggcgcccttcttagcggagtgcgatag

SEQ ID NO: 232630 - DNA, 726 bp, Klebsiella pneumoniae
atgggattcactcgcgaactgtataagctgggttttgaagtctcgccggtgattctgtgcaacgggattgcgcagagcatccccggcggaatgctgcccattgtagctttgacgcagagcgcgagctttgtcacagggcttttgggcggcgcattcaaccttactgacctcgataaatatttttgccactggaagccggttcagggtgggacgatggtcgattacgacatcgccaaatacccgtttgctaaccagaccgttgccgctaacgcgctacttgctcagcctttgcgcattgcgttgatgatggatgctccggtgaatgaaaatactggagcgatgacaaaattcgtcactctcagtgcgctgcaagctgttctgcaggcgcatgcaaaccttggcggaacctatatcgtcgctacgccagcgctgttttatagcggctgtatattgcgtacggttaaagacatgaccagttttaatgaggctgtacctcagcgatcctggttatgggattttgagcagccgctggtatctgaaacaggggccgagcaggcggttaacagtttcctgagcaaaatcgatggaggaacccggcaaacggatgcgtcatggacaaacactgttgcggccctcgggaatacctctctcggcggcaccgtgtcaggagccgcgaatgacatagtaggtctcatcggtaagctaagcggggagtttggcctatga

SEQ ID NO: 232631 - DNA, 276 bp, Klebsiella pneumoniae
atgacgacggatacctacacgtttaccggcaatgaaagagaaagcgtagcttttactccgacgctggatggaacggtttataactgccaggtgaagtggaatatcgctgcacaacgctggtacctcctgatcaccgacaattccggcaataccatgctgaacacccccgcggtgggctctaccaatggaaccggcataaacctgatagctggcgttttctccggaacaaccatgatctggcgggagcaaaatggcgtaattgaggtgaccagctga

SEQ ID NO: 232632 - DNA, 969 bp, Klebsiella pneumoniae
atgaggtattacgatttccagatttttgaccagaaagggaagttataccgccagtacaaaagccttgatgcctatggaaattataatcctggctgcctgatggtggagttcgacattcagcgatatggaatgtccactccggtagggtcaagcctcgtcagggtgtttggcgtcagcattaaagaaatgcagcaggcagagcaaaacatgttcggcatgaccattaagggatttgtcggtatgtcgaaaggtttgccactggccaaatcctcccagagcggaatgattcttgaaggtatcattcagcagccattcggtaactggcaaggaatcgatctgtctctggacatgattattacggctggagctggctcagtggataagccggcgaacattacaatgccgtggagcaagggacaaaaactgtctgtagcactattttttgcgcttcaacgcgctttcccggaatacaaaataaatatcaacatcagcgatttgctggttctgaactacgattccccgatttactgctcgaccatgcagcaacttgcgtcgaacctgaaaaacctgagccgtagcattatccgggatgaaaactatctcggcgtggaaatggccatgttcccgggaaaagagatcagagtatgggacagcgcagcgactgagaaaaagaaaacccccattcagcttgaatttaccgatctcgtcgggcagccggtatggattgaatacaaccgggtgatgatcacctgcgtaatgagggctgatattcaggtgggcgactacgtgaggatgcctgcaggcgcaatggcggtaacgcaggcctcatcatattctcagtatcgcagtaaaagcgccttttccggcgtgttcgctgtgcagacctgcagatgtgtaggaaacagcaggcagccagacgctgcaagttgggtaaccatctatgaggcgtatgtgacgcaggaggcctga

SEQ ID NO: 232633 - DNA, 717 bp, Klebsiella pneumoniae
gtgactataagtcagcggcttaacttcgccaagagcatgaacaatttcgctgaggtaaaaattgccgaagcgatggagctggtcggaaagatattgcctgcaactgtcgtcaggcagtcagggaaaatgatcactgtctcgttcagcctgacgaacatcccattcacgttgccccaggtaaccattccactctttggaccggagtatgtgcgctatccaatgcagccaggagatcggggaattgtgatccctgctgatacctatatcggcggaatgagcggcctgggtggcggcgttgccgatctaactcagccgacgaacctcagcgcactggtttatctgccgatcagcaataccgagtggcaggacgtcgatggacaagtagtgacggtatacgggccggagggtgtaacgctgcgcgacagcggcagcaatactacttttctcctgaagcctgacagtattgctatttccacacctgacagcttcactgtcaccgttggcgggacagttttctcactgacgggtagcaaatggagcctttcaggccaggctggtcatctgcaggattcagtggctagtaccagccctgcaatcatgcacgccgggtggcagtcgcttctgaactggcttaacagccatgaacattcaaacggcaacgatggaaatgataccggggggccgacttcaacgtttaacgggagtatcaccgagtga

SEQ ID NO: 232634 - DNA, 333 bp, Klebsiella pneumoniae
gtgagaacctatggccgaaactctgaggggaagtgggtcctggtggaaaccgacgaaaatgggtttaatgactctgtgtatttaaccaccctgatccagaatctgaaactggcaccgcaggagtcacccttttatgcgaacaacggaataccggccgccgggtcggtgatccagcaaatcctgccgacgtattacgtaaaccgtattcaaaaacagttcagccagtatttttcctcgctgcagattgcactgatcagcgacgacccgcctgtttataacatctcggcaatcacaaatgcaggttcaaaaataattacacaggtggccgtatga

SEQ ID NO: 232635 - DNA, 1419 bp, Klebsiella pneumoniae
atgagcgatttaccagtcagctatacgtcagcgggcccggttcctctgacggcggaagagctacgagcacagctcgtttcccaggccattgcgctatctccaggactcacaactgatttgcctggctctctgattgaagacgtggccagtaccgatgttggcgcgctcatcgtttgtgatcaggcaagggttgacctgattaactcagtgggtccgctaaaggctaacctcgccatgctggagcttctcgcacagcaggcaggtattccgggccagaaaactgctggcactaccacggtaccgattcagttttccggcccagctgggtttgtcatcccacaagggtttattgtttctgatggcacacatacatattccgttagtgatgcgacgataatctcctcgtccggtgtgtctgccagtgtgtcatgcgaaggaacggaggccggaacctgggcagtaccggtaaatacggttaaccagataatcactagccttccttctgacgtcaccataacctgcaccaacccgatcgccggcactcctggtgctgacccggaaacgaattatcagtttcgtgatcgagtatggcaggctcagatggccacagttcagggatatcctggatttatccggcaacatctcaccagccttgataacgtgcaggcgcgtctggtttctgtcattcaggacggggataagtggatagtcatgtgtgccggcggtgatatttacgatattgctggcgcgctctataagtctgcgggggatatcagccggctgaaagggtgttcactgaacgtaacggggatcacgaatgcaaatcctggtgtcgtcagcacagacctgactcatggttacactgacggccaggttatccggatcactggcgttaccgggatgacaggcatcaatgacgttcctctgaccgtgacggtactgtcccctcacactttttccatcgggattgacaccacttcatccggtacctggggaggcggcggcgaggtgacaccgaacgtcaggaacaataccgtgacggtgaatgactggcctgataactacgtgatcccgttcgtgacgccattgctgcagcgggtcactgtgacgtatcagtggggcactggaagcgttaactacctgactgatgccacggtcgcctctctggtctcggcgcctacgattcagtatgtgaatggcatattcgccgggaaaccgctgaacgttaacaacctgaaagacgcattcttgcaggcgattaactcgacaatcgacatggggctgatcagcactctaaacgtcgtggtcaccgtcaatggtgtgataacgccaccggatgccgggacgaatatcatcagcggagataagttcagttatttttatatcgcgtcggatggcgtgatcgtaacaggggcgtag

SEQ ID NO: 232636 - DNA, 705 bp, Klebsiella pneumoniae
atgctggacgatatcatccggtcgtatatgtatacgcaatacaacgacgatgacaatctgcgggcgttttttactgcgtataactcgatggcgcagggcatttatgactggatggttaatgccaacctgccgattttcatcggtgactacaacaccggagatcaactccgatggattgcccatggcatttatggcgtgttgccgccggtgatttccagcagcgaacagcaggagataggcccatataacaccttcgaatttaaccagctggcattcaatgagtaccgggtgattgaccagtcgaaccaggttgttgtctccgatgacctttttaagcggatcatgacctggaatttttacaaaggtgacggcttctatttctctattccatggataaagcggcgtgttctgcggttcctgttgggagtgaatggcaccgatatcctcaatgaccagcggtggagtatatcgatccagtttgtggatggcgggatcgtgatatccatctataaggggcgccgcaggttcacgcggagcgctatctacaacgcatcggcctataactcaaggaagtacaaccagaaggacacggcctttgtgatcaccgaggatttcgagttcgccattttcttcaagcaggccatggatagcggcctgctgcacatgcctttctatcagacagtaaccgttgagattattgattga

SEQ ID NO: 232637 - DNA, 633 bp, Klebsiella pneumoniae
atgaaaagaatgatacttgtattaacaatttcattttttcttgctggatgtggaacgaatgcttataaaaaatctagagatttctcttctgctgagactttgcaagaaaaaagagatgccttaattaaatggatgccatcatataatggtcaattgcaaaatttcccaaaaataaggaatgagttaattggtttgaatggcgagaatgaagcatttcttaatggtcttgttttaacctgcttcaactcaaaagatgaaagttgcacttatgattactattcaaaagaggttgataggctaaataatcagaagtgcgacaaagacgtttcatgtgttagaagcagggaagtaatgaatgcatcgaatgaactcaatagcgtttattacttggttatggccagaaataaatatgaccaagctgagtttgatttttatataaggaacctttgccgtgctgctggtatcggtcagaggcgagggatttctttggagcaaatgttaaatgacgttaaccaagagccaggtttatcacctgaagtaagaagtcaatttgctgatgttgcaagatcatgttggattctaagcaagaacggaattgatgatgcaacaacaacgatacgaaacgcatattaa

SEQ ID NO: 232638 - DNA, 363 bp, Klebsiella pneumoniae
atgaaagaattaactgtatttgaaatggaagagatctctggtggctattcttgggatttttcttcctttagctctgcgcttacttctattgcatcaaatggtgttgaggctgttgccagcgccttattcggtggagctgttctgggtatgtggggttccatcattggcggctgtaatggcggcaatggcggcggtctcttaggggttggtactctcggtatggctataggcggggcctggggcctggtagtgggtgcaattggtggtgcaattgcagccactgtagttggttgggatgcaactagctcaattctgtcagagctgattgaaggcgctgcgaacggtaccttcaaactttggtaa

SEQ ID NO: 232639 - DNA, 510 bp, Klebsiella pneumoniae
atgtatcccgttgacctgcacatgcataccgtcgccagcacccatgcctacagcaccctgcacgattatattgcggaagcaaagcgtaaagggatcaaactcttcgccatcaccgaccacggcccggacatggcggatgctccgcactactggcacttcgttaatatgcgcatctggccccgcctggtagacggggtggggatcctgcgcggtattgagtcgaatattaaaaatattgaaggcgagatcgactgttccggaccgatgttgacttccctcgatctgatcatcgccggatttcatgagccggtgtttccgccgcaggatcgtgacacccatacacaggcgatgatagccgcgatggccagcggtaaagtgcatatgattagccatccgggtaatccgaaattcccggtggatatcccggcgattgccgaagcggcggctcgctaccaggtggcgctggagattaataatctcctcgttcgtatcatcgcgcgtgggcagtga

SEQ ID NO: 232640 - DNA, 387 bp, Klebsiella pneumoniae
atgccaaaggattcgatgttctacgccacgcttgaagaagctattgatgcagcacgtgaagaatttctcgtcaacaaccctgacagcgatgaagagagcgccaacgttgagcagctcaacattcaaaagcatgtgctgcaggatggcgatatcgcctggcaggccgaattttttgctgacgaagaggaacaaggcgaatgcctcccgatgctcagcggcgaagccgcgcagagcgtcttcgacggggattatgatgagatagagctgcgtcaggagtggctggaggaaaatacgctccacgaatgggatgaaggcgaatttcagctcgagccctcgctggacaccgaagaggggcagacggcagccgacgagtgggacgagcgttaa

SEQ ID NO: 232641 - DNA, 369 bp, Klebsiella pneumoniae
atgaaagcaagagtgaagtcagggggactgaaaaaggaaatgtttggctatcgcagtaacgtgccgaaggtgcgtttgacgacggaccggctggtggtgcgcctggttcacgatcgtgacgcctggcgtctggccgattattacgccgaaaataaagcgttcttaaaaccctgggagccggttcgtgacgacagccactgctatccctccggatggcaggcgcgtctgtcgatgatcgctgagtttcataagcaggggtcagctttttatttcgcgctgctcgaccctgaggaaaaagagatcatcggtgtggcgaatttctccaacgtggtgcgcggatctttccatgccttgtatcttgaagactga

SEQ ID NO: 232642 - DNA, 552 bp, Klebsiella pneumoniae
atgaaacgcattctgacccttggcctggcgctgctgatgctgatgctcgccggctgcagtaccgaggtcaccgaataccggcagcagcagcccgccctcgacatctttcactattttcagggccgaaccgaggcgtgggggatggtgcaggatcgcaacggcaagcagctgcgccgcttccatgttgagatcgatggcgacgtcgtcggcgacaccctgaccctccatgagcgctttgtctatgacgacggcgagaggcagcagcgggtatggcgcattcgccgcaccggcgataaccgttatcagggcaccgccggggatatcgaaggggtggccagcggccaggcggcaggcaatgcctttcactggcgctacagcatgaacgtcgaggccagcggcagccggtggctgctgcactttgacgactggatgttcctgcaggatggcagccatttatttaacaaaaccgagatgaagaaattcggcattacggtcgccaccgtgacccttttctttacccgaaccacagcagaagagaggacagcgccatga

SEQ ID NO: 232643 - DNA, 252 bp, Klebsiella pneumoniae
atgccacatatcattctaagtgacacgactgccagcgtcagtgaattgaaaaaaaacccgatggccacagtcagcgccggtgacggattcccagtagcgattcttaaccggaaccagccagctttctattgcgtgcctgcggaactctacgaaaagatgcttgatgcgctggatgatcaggaactcattaaactggttgcagaacgcagtaatcaaccgctgtttgatgtggacctggataagtacctatga

SEQ ID NO: 232644 - DNA, 288 bp, Klebsiella pneumoniae
atgacatataccgtcaaattcagggaagatgcgctaaaagaatggaacaagctggataagactattcagcagcagtttgcaaagaaacttaaaaagtgctgtgaaaacccacacattccttcagcaaaactacgtggtataaaggattgctataaaataaaactgcgagcatctggttttcgcctcgtctatcaggtcattgataatcaacttataattgctattgtggctgtaggcaaacgggagcgaagtgacgtttatacactggcgagtgaacgtatgaaataa

SEQ ID NO: 232645 - DNA, 285 bp, Klebsiella pneumoniae
atgaggaaaaaattaacttggttgtttatgtttcttgaattatgtctcggtatttctctcattatttacgggttgattaaatattttgttaaaccctcggtatctgacaattgtgtagaggcaacactgtgtgctacagaaactataagctttttcacactttggatataccttacggtaggcgtcatgctgatgtgcctatggtatatgactacctggcgcgcttaccagcataaagagaagaaagtgaagtcgaaactcaaccccgaagactttgtcaaataa

SEQ ID NO: 232646 - DNA, 579 bp, Klebsiella pneumoniae
  misc_feature (165)..(189): n is a, c, g, or t
atgggaaacaggtcaactttgcagacgtccgggactatgggaaacaggtcaatttcgcggtcagcccggactgtgggaaacaggtcaactttgcagacgtccgggactatgggaaacaggtcaatttcgcggtcagcccggactgtgggaaacaggtcaactccnnnnnnnnnnnnnnnnnnnnnnnnnagcccggactgtgggaaacaggtcaactccgcggacggcccggactgtgggaaacacgtcaactccgcggtcagcccggactgtgggaaacaggtcaactccgcggacggcccggactgtgggaaacaggtcaactccgcggacggcccggactgtgggaaacaggtcaacttcgcggacggcccggactgtgggaaacaggtcaacttcgcggacggcccggactgtgggaaacaggtcaacttcgcggacggcccggactgtgggaaacaggtcaactttgcagacgtccgggactatgggaaacaggtcaactttgcagacgaacgggactgtgggaaacaggtcaactacccggacagccgggatgcgggaaaccggtcaagttag

SEQ ID NO: 232647 - DNA, 633 bp, Klebsiella pneumoniae
atgacagattcaacccggattgattttatctacctgtcggagcaggacatgatccgcgcaggcgtcaccgatatgcctgcttgcgtcgataccatggaggagatgtttggcctgctgtatcagggcgactaccgcatggctggcgccaataacgattcacatggcgcgatggtgaccttcccggagaactcgccgtttcccaccatgccaaaatctacggctgaccggcgtttaatggcgatgcccgcctatctcggcggcaacttcggtaccgctggggtgaaatggtatggctcgaatatcgccaaccgtgaaaaagggctgccgcgctcgattctgatgttcacccttaacgatgcggatacgggggcgccgctggcacatatgtcagcgaacctgttgtcggcgtatcgcactggcgcagtaccgggagtgggcgcgcgccatctggcacgcaaggactcccgcgtgattggcctgctggggccgggggtgatggggaaaaccgccgttgctgcctttatcgccgtgtgcccgctgattgacaccattaaagtgaaaggtcgtggacagcgcagcctcgataacttcctcacctgggtgcaggaaacgtatccgcaaatgttcgaataa

SEQ ID NO: 232648 - DNA, 132 bp, Klebsiella pneumoniae
atgtctgagaatcccctttatcgtcatggcggcaggtttcacccggaacagccgtggttcgtgctgaatgccgcgcaacattactcggtgatcgcctcagaaaacccggctttcacacttttacagctttga

SEQ ID NO: 232649 - DNA, 642 bp, Klebsiella pneumoniae
ttgctggacaacgccctcccggccgccgacccgacggacaccaccaccgacctgagccacctggcgttctgcgtactggtggccctggcgctcgaacgtcagtcctgcggcgtttcgcccccctacgccgaaaccctgttccttatccgctggctggccaccgcgcaaaggcaaaggcgcttccccaagagcgtggcgattgacattcgctggttgctggagcgcggtcgcaggcacggcgctgccgccaagctgcgccagcacctggagtacctgtggcactcctgcagcggcaatatcgccgagcagtccgacctgttccgcctcacttacgccactgagacgctcaagcagttggggtgggacaatgcggtgatgagcagccgcgaatggcacgagggggtgctgccagagaccggcgcaaccaacggcttttacgtggaaaaagcggcgctcaacgccgcctacgacaacaatggccggcacaacatgccggtcgaggtgcgcgtggtcggcgacagggcggcgtttatcaacgtcatgcagcgccatcagataacggcgcagcctaccgcgtcactgcccaacgggcatcagctcatgctgctaccgggtgcacactgcggttctgcaccgcgctga

SEQ ID NO: 232650 - DNA, 948 bp, Klebsiella pneumoniae
atgagcaaacccaccgcctccccacacgatgccgtgttcaaggccttcctcacccacccggagaccgcccgtgacttcctgcagctgcacctgccgtccagcctgctcagggtctgcaacctcgacaccctgaagctcgaatccggctcctttatcgaagatgacctgcgcgcctgctactcggacgtgctctactctctcgatacggcccgcggggacgggtacgtctattgcctgattgagcaccagagccggccggataaaaccatggccttccgcctgatgcgctatgccatcgccgccatgcagcgccacttggaagcgggccacgagcgtctgccgctggtgataccgctgatgttctatcatggccaaaccagtccctatccctattcgctcgactggctggcgctgttcgatgaaccgcagctggccagacagctctacggcagcgcctttccgctggttgacgtcaccgtcattcccgacgacgacatcatgcagcaccgccgcatggcggtcctcgaactcttgcaaaagcacgtgcgtcagcgcgaccttgccgagctgctcgaccggctggtcacgctgctgctgacggggtacactaccgatgaacaactgacctcgctgctcagctacatgctgcaggtcggcgagacccacagcccggctgcgctgctcaggcagcttgccgagcgcgtaccgcaccacgaggacaaaatcatgacgatcgctgaacgactgaaggaagaaggccgtgcgcaggggatcgccatcggcatcgagaaaggcatcgagaaaggcatcgagaaaggccgtcaagaaggcgaacacctggcggcgatcaaaatcgcccgcaccctgctggccagcggcctcgatcaggccacggtgatgaatgccactggcctcaccgccgatgagctggcgcagatccgccactga

SEQ ID NO: 232651 - DNA, 327 bp, Klebsiella pneumoniae
atgagcgatcagccagctgcgccagagattatcgaagacgagattatcgacaccggcaccgaagagtttgcccacgtggtggccatactggtgctgctcgagcccggcatgccctacacccattcggtggccctctctcccgactatggcgccggccaaatcgtccaggacgtcaacagcctcaaaaaacgcgcccgccgcctgctggtgccggccatgcacgaagccgccaaacgctcaggtcaggtctacaacatcgagagcagcctggtgctctacccgtcaggtcgcctgttcgcccaggccatcgtcacccgcagcaggtaa

SEQ ID NO: 232652 - DNA, 1401 bp, Klebsiella pneumoniae
atggcaggcgggctcaacaagaaacaacgtgagcggttaaatgcactgagtcacggcgagttattgacggtgatcgacgacctgatacaggataataagcaggccaaaaccaccctgattaacaagtaccttctgtccgacgacgatttactcaaggccgttcagaaagaatatgccaagctgagtaaaagtacgcgtttctatgactactatacggcagatgcgcgttttcatgaactgacgcgcattattgccgaaccgctgaagaaaacggccgccacgcttcccgagcaaacggaagggttgtgcgcaaaaatcatacatggatttgaacgacttatcgaaaatattgatagctctagtggcagctggatgacctgttattcctcgctgattgaggcgtggatcagcgcagtcgccgcgcaaaaaaatagtccgcccgccgtcattgccgagaaaatggtcaatttcttcgacggtgagttttattttggtgccggtatgcttaaacagtaccgtactcagctcggaaacgatgtcttacgcgccatgcgggatcggtattatcagaaacaagagttccaggaggccgtcgatctcagtcttctgattgccgacgttaatttccttgaacgtgcggtaaacaatgatgagttctgctcctctcaacattactttggctacgcccgactgctgattgacgaggttcaaccggaaaaagcgctcgcattactggaactgatggaagcacggagcgatgtcacccctgtcgatgatattatctggcttgaattattcattacggcgctcattgaggatggccggcgtcgcgaagcgatggacaaagccagggacgccttcagccacacctgtgatacgcgcttttaccggttgtacatgaaagccggtggagatccggataatgacaccgctgattttatccgcactgcaaaggcgaaaggattgcgcgcctaccttcattttgctgaggatttgacgcgatttgacctgatcagtgacgtactcattgccacccctgtcgcggagcttgaatcccactttgcctactgctcgagctcaagcctgcgaacgttgtcgggcaagctgtatcagcatgggtttgcccttgcggcagtcattctgcggcgtgttcttgtggagagctatatcgataaggcacaaagcaaatattatgcgtatgccgcctccgacatgaaaaaagccatcgactacagtgaaggactggaggaaagcgcacagttcgcaggcaccctgaattacctcagggcgctttatgcgcaacacaaacgtaaaagcgcattgtggcaggcaatggcgggtaaagttcagggattgtctgtcgacaataaccggtgtttttattgcgggagcccgttatga

SEQ ID NO: 232653 - DNA, 675 bp, Klebsiella pneumoniae
gtgctgcacgtatacgaaagcggccgcaaggcgtatgacgtggcgctgcatgcgctgtcggtgctcgagcagctggactacctcatcgtgtcgcgcgggcaggatactgacaccggtcagaacaagccactgcgcatctggctgacggagaaattcttcaccagtcgaggtatccatgttcacgaaattcgcctgtggctggatcagtaccgtctgtgggctatcaagaacgggctgacggaaagcctgcgcaagaaatacgaacgtcacctggtgcgcattacgcatctggggatcgacatcgaacgcaagcactcgctaaaaaaccgcctggagcaaatcaagcgttgggtggtgagtcccgatctgcagaatctcaagaaagatgccgaaaccgttatcgaggacgaactggccaagcgccagcagaacgaacatcgccttgacaccctgctggacgacaccgccgccggcatcaaaaagctggccgccgcccggcgccagaagcagaacggcttttatcaggcctgggtgcagtggacgatgggcagctcgccgctgaaggcgatgcagctggaggccacgctcaagcgcgagcagccgggaatgctgacggagaacccggaagcctactaccggttgctgctggagcgcgccggcgccctgccgacctga

SEQ ID NO: 232654 - DNA, 261 bp, Klebsiella pneumoniae
gtgacccgacgacctaaaaccgcgcaagatctcgatgagtaccagcgtactgtgctggcgggtctgtatgcccggcgcgagttcgaccagggctatcgcctgtcgaaactgcagaaacaggtgatactgaacgactacctggcacagctgagcgctgcccccaccacccggcgcctgcggacttcccgtccggcgctaccgccggttgccgattattactggcatccgccgacaccgatgcgacgcttccgcggccgctga

SEQ ID NO: 232655 - DNA, 330 bp, Klebsiella pneumoniae
atgagcgccggccaccaccgcggttaccggccgcaggacgacgcgctgccggcagatgcacaggccctgcatctggaaacgctgggtctgtggcgccgcgccgcgacgcgctggcagcaggtactgctgcgggaggccgacgaccgcgtggcagaagcggtgctgcagcgcctacgttattgtctggcgcaggtggcggcaagcgtgtcagtgacggcaccgcgccggcgggcgcgacgctcgtggcgagaaacagcgtgccgaacggcccggatctgtggcgaatggaataatcaaacaggaggaggacgccgtgacccgacgacctaa

SEQ ID NO: 232656 - DNA, 342 bp, Klebsiella pneumoniae
atgggtcaggatctgaacgtccagatgctcaagctctgcgctcaggttacgaagtacattttctatggattcagtgacagcaagaggagtatccgttgcctgacatttttccagcctgtttttttcgcgggtgctgtcggtgacaagtgcatcgcgtcggcggagaagtgcgctgagatggccgacaacgcccggcggcgcaacctgatcaaggcgcatcgtcaacgacgctctgacgacatcaggtcattgttggcctggaaaaacagggacgcgtcagttgacgggctgctggccagcgatgatgagttggacgcccgcgaacgggcgttcggcaaatga

SEQ ID NO: 232657 - DNA, 474 bp, Klebsiella pneumoniae
atgctggttatcctgcgggggcatcatttcgatacagcagaacaggttgctgcatttttgggcgtgatccctgttgaaaaatattccggtacatcgatcagagggaaaccgaaattatccaaaatcggcccaccggaaatccgcgcgaaactgtatctggcgtcgttatgtggcctgaggtttaacccggtgatgaaggcgatgtatgagcgactatgccagcgtggcaaggcaaaaatgtgtgccattggcgcactgatgcgaaaactcgtccactggtgctatggcgttctgaaaacacaaaagccattcgatgctgaatacctttcttcagatgcgcgtagcgcatgtaaggcggcattatgctgttttatatggctcagcagtaaaatcgctgaggcccggcgtaagccggtggagggctatcagagaaagatatccctttccgccctgaacagtcgtgtgggcttatag

SEQ ID NO: 232658 - DNA, 393 bp, Klebsiella pneumoniae
gtgcgtcagcgcgaccttgccgagctgctcgaccggctggtcacgctgctgctgacggggtacactaccgatgaacaactgatctcgctgctcagctacatgctgcaggtcggcgagacccactgcccggccgcgctgctaaaacagctggccgagcgcgtaccgcaccatgaggataaaatcatgacgatcgctgaacgactgaaagaagaaagccgtgcgcaggggatcgccatcggcatcgagaaaggccgtcaagaaggacgtcaagaaggcgaacacctggcggcgatcaagatcgcccgcaccctactggccagcggtctcgatcaggccacggtgatgaatgccaccggccttaccgccgacgagctggcgcagatccgccactga

SEQ ID NO: 232659 - DNA, 243 bp, Klebsiella pneumoniae
atgagtgggaaaaaagtgactttcggtgccaagccaaccaaacctgcacccagtgcggatgcctgggtggaaagtcgcgctgtcgaagaagcgccaccgtcgccggtcgagaaaatgaagcgactcacgatagatatcccggagagcctgcataaggccatcaagtctgcctgtgccctgaggggcaccaagattgccgatgaggtgcgcgagctgttatatgataaatacggaaaagagtaa

SEQ ID NO: 232660 - DNA, 624 bp, Klebsiella pneumoniae
atgattatctctgtactgaaccagaaagggggagttggcaaaaccactctcagcgtcaatattgctgcccgtctggcggcggatggcgcacgtgtattgctgcttgatgccgatcctcagggtagcgccctggattgggcggcagcacggcaagatgcgtccgctttcccggtgctggggttgccgcgcgccacgctgcacaaggatatcggcaagttcacccaggattatgaccacatcatcattgatggcccaccccgcgtcacggatctggcccgttccgccattatggcggcagacctggtggtgatccctgttcagcccagtccgtatgacgtgtgggcggcacaggaagtggtcacattgatccaggaagccaagatttataaagaaaaccttaaatctgtatttgcggttaatcgtaaaatcgtaaatactgcgattggccgtgatgtcggcgaggcgctgtcgacgtatgaaacaccggtgttgcaagccacggtgtcgcagcgggtgatcttcgctgaagcggcggctgtcggtaaagccgtgttcgagctggagccggattcggcggcgtcaaaagagatcggcgccctggttaacgagattttggagcaatga

SEQ ID NO: 232661 - DNA, 765 bp, Klebsiella pneumoniae
ttgagtatcatccccctcgagatgggacagatttcacgtagcgcgatcagtctgcctggcggcttcgcgcgcgccgttcggctgcgcgaaatggccctggccgcctcactggatgtgccccgctacctgctggcgccggaaattgcggtgctgctcgactacctgcccgatctgcgccagcgcatgctgatcgaaaccctgtggaacaccggcgcccgcatcaatgaagccctggcgctgacgccgggggatgtgttcttcaatggcgacctgccgtttgtccggttgcgcacgctgaagcaacgcgcgccccggccgcggcgccggccgaccaaggaagagcagcagcggcgggaggcgccgttccgggcggtgccgctgccggatgcgggatatgtccgccggctgcagggctattttgcgacattcaagttgctgacacgccgggcgacaccgatgtgggatgtggccagtcaggagacgccgcgtaactggctgcgggcggcggttcgccgggccgcccaggatggcgtgactttttcggtacgccccatcaccccgcacacgttccgccacagctatgcgatgcatctgctgatgaacgatgtgcacgtcaaacaggtccaggcgctgatgggccacaagcgcctggaaaataccgaaatctatacccggatcttcgccctggatgtcacgccggatctggctttctccctgcccgttgatgaagcgcgggggctgctggcgctcccttctctaagataa

SEQ ID NO: 232662 - DNA, 297 bp, Klebsiella pneumoniae
atgaaatttacccagcaggacattaaactgttcgatgaaatatttaaaagcgcctccggttatgtattggacttttcaaatagaacgatgcgggagttttttgaagaagaactttccattgatattgataacgaaatgtatctcgacgagggcgattcaaaagcaaaacgattacggtgctttatcaaaaagaccgacctcgatacagtgttaaaagtcatcgataagctgtgggtttatcgtaaagtaatgacaacagatcctgtcacggcgcgggatgaaatcttatatgcttaa

SEQ ID NO: 232663 - DNA, 933 bp, Klebsiella pneumoniae
atgaaaacgactccaactgcacatgatgcgctgttcaaacagtttctgacacacccggaaaccgcccgcgattttctggaggtgcatttgccagcggcattgcgccaggcatgcgatctgaatactctgcaactggaatccggctcgttcgttgaagatgatctacgcgcctattactctgacgtgctctattcgttgaaggccgggcagggtgacggctacatttacgcgctgatagaacaccagagctcccccgacaaacagatggccttccggttaatgcggtatgcgattgccgccatgcaacgccaccttgccgccggcaacgagcaactgccgctggttatcccaatcctgttctatcatgggcaagtcacaccatacccatatccgatgagctggctgcaggcattcagtgctccggagctggccggccagctgtatagtggtgaattcccgctggtcgacgtcacagttattcctgacgaccaaatcatgcagcaccgtcgcgtggccattctggaattgctgcaaaaacatgtccgtcaacgcgacctggccgagctgctggaacaactggtcacactgcttttagccggttacactaccaatgagcagctgacgtcactgatgaattacatgctgcaggttggtgaaacccgcaacccgggcgaactattatcaaccctggcatcacgggtgccggaacatgaggatactctgatgacgattgcagaaaaactccgccttgagggcgaacaacgcggcttgcagaaaggtatgctgttaggtgaagaaaaagggcgtcaggaagggatgcttgaaggtaaactcgaagttgcccggaccatgctggccaacggcctcgatcgcgattcggtgatgaaaatgaccgggctgaccgctgacgacctggcccaaattcgccactaa

SEQ ID NO: 232664 - DNA, 615 bp, Klebsiella pneumoniae
ttgactgataaaaccacatccgtttccccggaaaacaccacctcagcgctcagccacctggcgttctgcgctctggcggcgctggggctggcgcgccaggacggtaacgccggcacgccctatgccgaaaacctgttcctgatccgctggctggccacagcccagaagcaaaaacgcttccccaggagcgtcgcgattgacatccagtggttactcgaacgtggccgcaaatacggcccggccggcaaactgcgtcagcatcttgactacctctggcgctcctgcagcggcaatctggccgcacaatccgatctgttccggctcacctacgcctctgaaaccctgaaagaccagggctgggacaattatgtgctggacgcacacgagtggaaatccggcgtcgtgccgacaccgtcacagcataacgggttctatgtcgaaaaaacggcactgaacgtcgcttttgcccaggacggtcgccatctgcaccccgtcacgtttcgggtggtcggtgacgccgaccggtttatgcatgtgatggccgagtacggactgtgtacgcgccggcagggcagcacgtcagcctgccacaccatcgcgcttgaaccggcgtaa

SEQ ID NO: 232665 - DNA, 1221 bp, Klebsiella pneumoniae
atggatgagaaatctctctatgctcacatccttaacctgaccgcttcgtggcaggttaaagccctttcccttgatgaaaaggtcggttctgttaccgttactgttggtatcgctgaaaacgtgctgttatcctgcccgacctgcggtaaaacctgccctgtacatgatcaccggcatcgtaaatggcgccatctcgatacctgccagttcaccaccgtagttgaagccgatgtcccccgaatcatgtgcccggaccatggttgtcagaccttacctgttccatgggccggaccgggaagccgatacacactgctgttcgagtcgttcgtcatctcatggctgaagatcagcaccacagatgccgtcaggaaacagctgagactgagctggaatgcggtcgataacattatgcaacgggcactcagacgtgaactcgcccgccgtaaagcaccactgtccgcacgtcacctctgtgttgatgaggtcgccttcaaaaagggacatcagtacgtcaccgtcatctctgatacacagggccaggcgctggaactcagggatgatcgcggtgttgaaagtctggcgggttacctcagaaacctgggtgaccgccaggttgaatccatcaaaaccctgtcgatggatatgaacccggcctatatcagcgcagcccgggtccacctgcccaacgcggtagaaaaaatcgccttcgatcacttccatgtcgccaaaatgctctgcgccgtggtggataaaacccggcagtcagagatgaaaaccatcccgctgcaggcccgaaaaagcgcacatcgctcccgttacctgtggttgtatggccgtaataaacgtcatggtcggatagccgaaagactggaggcagcacagatggttctgcctgataccagtcgttgctgggcaatgaaagagctggcccgggagctctggagccgtcggtatgacgagcaaagcaggcgcctgtggcaggagtggatagcgatggcaaaagatgttggtgttccgctgctgagtagtgccgcacggacgttacgtaaacggctgtacgggatcctgaatgcgatgaaatatcgggtatcaaacggtaatgcagaatcgctgaacagcaagatacggctgctgcgtatcaaatcgagggggtacaggaacaaagaacggttcaaagtggcggtgatgttccattacggcagattaaacatggacttctga

SEQ ID NO: 232666 - DNA, 396 bp, Klebsiella pneumoniae
atgatggaaggtgttctgcgtcactgtaccgacatggaaattaaccaccagtatgtggacagccacggacaaagtgaggtggcctttgcgttcagtgatgtgctggggttcgatctattgccgcgcctgaaagcgatcgcccgacagaaactgtatgtgtgtgaaaaggaagatacatcgttgtacccgcatcttacgccgattttaacccgggggatcgactgggagcttattgcacaacagtatgacgagataatcaaatatacagcggcacttaaaaccggaacggcagaacccgaggccatattacgacgattcacccgcaataacattcagcatccaacctatacaaatgtattgtcagccagctggcttttgcagacggtgaagagatag

SEQ ID NO: 232667 - DNA, 516 bp, Klebsiella pneumoniae
gtgagtaatctcgcaaaagtaatacctttcagaccgtctgtatcggtcgcggagcgtcaggtggcagatatcgatgatgggtatacccgcatcgccaacgagcttctggaagcggttatggctgctgatttaacggctcgccagctgaaggtcgttctggcggtgatacgcaaaacctacgggttcgggaaaaagtttgaccgcattaccaatacacagatatcagggatgaccggtattcaccatacgcatgtctgcaaggccaagaacgagatgattgcgatgaacatcattgttaccaacggcctggagatcggggtgaataaggtgatttctgactggaattccagcattagccaaaatggcaaatcattagccgaaacagctaatgaaacattagccaagtcagctaatacccataagccaactcagctaaacacaaaagaaactattcaaaagaaagaaaagatccccctaaatcccccaagggggaaaactcactcgctcaggaagtga

SEQ ID NO: 232668 - DNA, 147 bp, Klebsiella pneumoniae
atgcctaagagcaacagattttaccaggcacaaacacacaaaaatgttacccgcgatcgcttcattcgctcggttaacccggtggttggcatgaaaatgcgcgccatcctggaagagctgaaacggaaggaggaaggccgtgagtaa

SEQ ID NO: 232669 - DNA, 222 bp, Klebsiella pneumoniae
atggagagttcaacgacacgcaacaaagtggaggctcgcaggatagaaagctggttacacagccagatggctgaactgggaaccacgaatatcgccaaagtggccggagtgaataagtcgacggtgagtcgctggcgggaaagtctgctgccgaacatgtcgctactgctggccatcctgatttctaacaggccgggagagaaaggtgactttgaagcataa

SEQ ID NO: 232670 - DNA, 162 bp, Klebsiella pneumoniae
atgtgggaaaggcttgatctcttcagccttaatttttccatcaggcagggtgttaacgaaaatcttccgtcctacccggatagctttactaattgcggtctggtgaacgccgatggcatcagcagctcttgcctgtccaacttcgtcaacgtattcagctaa

SEQ ID NO: 232671 - DNA, 711 bp, Klebsiella pneumoniae
atggaaaagaaaaagacactgacatcagctcagatcgctgacgcagaaaggctgaaagccctctatgaagccaagaaaaaagagcttgggataacacagcaatcaatagctgacatgctagacatatctcagggtggcgttgggcattacttgaatggcaggaatgcccttaatgctgccgtggctgctgtttttgccagagcactccaggtggatgtctctgattttagccccagccttgcgaaagaaatatctgcaatgagtgctgccgctacatcgaatgccaagtatgtaggccagtacaccccaggcattaaataccctgtattaagcaagattcaggctgggcattggtcggaagcgtgcgagccgtatgcacttaaagatatcgatctatggctcgaatcagacgctcacattcagggggatgcgttctggttgttggtcgagggggaatccatgactgccccggtcgggctcagcataccagagggtacatatgttctttttgataccggaagggagcctgtcaacggaagcctcgttattgcaaaactctcggaatcaaacgaggcgacattcaaaaaactgatcattgatggtgaccagaagtacctgaagggcttaaaccctcaatggccattggttcccatcaacggaaactgtcgaatcattggtgtggccgtagaaactaagttaaggcttgtgtga

SEQ ID NO: 232672 - DNA, 1056 bp, Klebsiella pneumoniae
atggctataacagcaaaacaagcagcacaaggcgttgatgacaccatgaaatcatatgcaatctggaacaacaaaggtggagtaggtaaaacctatctatcattcgcaatggcgacagagtatgctcgccagaatccagaaaaacgtgtgattttcgcggacatgtgtccccaggcaaacctttctgaaattttgcttggaggtaatgggactggcgcatccaggcttgcagcattaatccaacagcgtaaaactattggtggttatttcgatcgcagaacacgcagccctcacatgattactggggctgaaacaagttacctgattcatgccaatgaaactaatgcccatataccagccaacgttttcttgatcgctggcgacccaagtttagaggtacaggctcaggttattaaccagttgagcagcgttaaccttcctgttgattcttggaagagcatccatttatggctgcgtgacttacttgtggcatgcgcacaacagcagggaattgaagatactgtttgcttcattgactgtaaccccagcttttcggcatatacagagctttctcttatagcagccaacgcgatcattgttccatgctcgagcgatggttcatctgctcgtgctgttgataacctaagccagctggtctatggggtgggagttcagaacgattacagggcggttaacttctatgacagatgcttaaacttcggaatttccgtccccgtcattcactccctggttttcaaccgttctactgagtatgacaaaagagcaagcaaggcattctcagcaatgttcaatgagataatgctaagagctgaaaacttaagaaaaattaagcctaactcctttcaaggtggggaactcaaaacttttactgtgccagacaatcactctgttgcaattgtatcttcacacttggggcgacctctttttgatatcaccccgggcagataccaaattcacgacacagaacctcagatcaataatgagccacttgaaagatatggaacagctatcaagacactggttcaaagtctatag

SEQ ID NO: 232673 - DNA, 204 bp, Klebsiella pneumoniae
atgtcgaatgaggatgagtttttcgcagagatgcacccgcagatagcgcaggtcatcgggatagcggttatgcaactgctggttgagaagcaaagtatctcaaaaaacacgattagtgagatgattcaggtgttgtggcagggtggccaggtagatctggctgtggagctggcactggacgtgctgatgctgagggaagagtag

SEQ ID NO: 232674 - DNA, 492 bp, Klebsiella pneumoniae
atgatggaacaacgtacactaaaagacctgatggtctatagcccaaaatctggcgtttttacatggatcaatccaccgcaaggtcatgaggaattgcttggtgagcgggcaggcagcccagccaaaggaaacaagacctactggttgattcaaataaacggaaagaaatataagcgctcacatcttgcccacttatttatgacgggcaagatgccatccggtgtagttgaccatataaacggcaattctctggatgatagatggctcaatatcagggacaccacatacgccgtgaacgcccaaaacaggctcgttggaaagtccggcagaaaacttccaatgggcgttaagaaattaaaaagcggccgttatttagcaagaattggcgttgaaagaaaatccgtttctcttggaaccttcgataccgttgaagaggctcggtcggcatatctcataggtaaggagaagtaccatgcttcagcgttcgcctga

SEQ ID NO: 232675 - DNA, 336 bp, Klebsiella pneumoniae
atgccagaaatcatcgatcaggccaacgagctggcagatcgccggctggaaatgaccatccagaacatgcgcatcaaccatgctgcggtctcggctactcactgcctgcaaacttttcgatgccggatatcgcaaggaggaggtctgatgaattacagcaaactatcagatggcgaaattagcgtgctggttgggcggcgggtcaaatcaggatacgaggtgattcttcaccctaacaatccaaaaggggctcaacttttgtggggcgtacacggcaggcagtgtagctatggattttccctctcacccaccccgaggaccttttctcaaccatga

SEQ ID NO: 232676 - DNA, 168 bp, Klebsiella pneumoniae
atgaagaaataccggatagggatcgcgcctgccggtaaaacggtctggaaggcaacgcacgaatcagggcttcaggttaataacaaaaacccgctacgagcagcggccatagttttcctgatgctgcaggatgcgatggaggcaaagaccgatgaacagggaatttga

SEQ ID NO: 232677 - DNA, 147 bp, Klebsiella pneumoniae
atgaacagggaatttgagatatgggtacgactgcgctacggcggccgctatgacctgacgcgagacggtcacggctactactgccgggaagtggttaaacgtatgtatgaagtgtggtgccactgtcgtggcctgattgtagtgtga

SEQ ID NO: 232678 - DNA, 540 bp, Klebsiella pneumoniae
atgcttaaaattcggttcgattcagaaaaggctttagaggccattctgtatgtagcctctaaagcacccgtacctgacatttatcatgtcgggaaaatcctttactacgctgatcgcgctcaccttgagcgttatgggcgtctcattaccggcgatgagtataaggctatgaaagatggcccggtcgctgagaacacctatgacatcatcaaaattgcgcaaggtaagggacgcttcattccaaatggaatcaaagttgaagacatcatgtcagctcttcgggtttatgagaaagtacataactatcgcgtagaacctttgcgccctgttgatgatgaggttttcagtgattctgatcttaaatgtattgatgaggcaatcgatatgattggcaagctatcatttggtcagattcgtgaaatgagccacgatgaagtttggtcttcggcaaatgagaatggtgagattcctctggaagttatcgccagaagctgtaaagatgctgatttactgatttcccatcttttcagcggaagatag

SEQ ID NO: 232679 - DNA, 309 bp, Klebsiella pneumoniae
gtggattacaagctaggcagttggacgttcaacctgaacagcgatttccagtccagccagtttgcggataacgccaacactgttaaagagagcgccgatggcagtaccggccgcatcaccggattcatgctctggggcgcgagcgtggcgtatgactttggtccgcagatggcagacctgaaccttgcgttcggcgtgaaaaatatcttcgaccaggattatttcatccgctcttacgacgacaacaacaaaggcatctacgcaggtcagccgcgcacgctgtatatgcagggggcgttgaagttctaa

SEQ ID NO: 232680 - DNA, 180 bp, Klebsiella pneumoniae
atgagttatatgccatacgaaacctacgtaaatgaaaatacgatgaaggcttattgtgttgtgacgattactaatgatcgtgaatacgaggaagctattaggattcttaactctatttctttagaaaaggaaaggttgtgtaaaacagtacataaggactttatgtcagattttaaatga

SEQ ID NO: 232681 - DNA, 1023 bp, Klebsiella pneumoniae
gtgagtattattattcctggttctttcccggcgcgacgactgcgtcgctctcgtacccattctttcagtcgccgtctggtcgctgaaaatcagctgaccgtaaacgacctgattttacctgtattcattattgaggggcaaaacctgcggcaggaagtgccgtcgatgccgggtgtgtttcgcctgtcggttgatatgttgcttcatgatgccgcgcaatttgttcaggcaggtatacctgctattgctctgtttccgtgtatagaaagttctgctaaatcgctgatggcagacgcttcgtgggatccatccggtttagtaccgcgaactgtaagggcgctgaaaaaggcttttcctgaactcggggtgataactgacgttgcgcttgacgcctatacgtcacatggtcaggacggcatcattgacgaacatggatatgtgcttaatgagccgacaaaagaaattctcaccagacaggcgcttacgcacgctgaagcgggtgcagatattgtcgcgccaagcgacatgatggatggccgcatcggacatatcagacaggcatttgaaacgaatggcctgctgactattcagatcatggcatattcagcgaaatacgcgtcaaactattacggtccttttcgcgaagccactcaatctgccatggcgctgggcaaacgggacaaaaaaaactatcagatggacccggcaaatgcgatggaagcgttgcatgaaattgcccaggatttgcaggagggggcagacatggtgatggttaagccgggcatgccatatctggatattatcagggaagccaggaaaacttttgcagtacccgtttttgcctaccaggtttccggtgagtatgcgatgcatatggccgcgttccggcatggctggctcgacgaagagcaaacggtgcttgagtcacttatatgcttcaaacgcgccggggcagacggcatattgacttactttgccagctcggtagctcagtggcttaatcaacatcaacgggaatattga

SEQ ID NO: 232682 - DNA, 906 bp, Klebsiella pneumoniae
ttgattaatcaacatggaggcagttcgtccctgcgcgagaaccgttgtcatatctggccagtgaagaaggatgatacccaaagtaacgatattgctttttttgaaaaggcattcagggaacagtccagtcgatgggggctgtatgaaattgttctggggtgtcctggagagggcaacatatcgctgtatcagtccgtcaatcagggggctgacgttccgcatattctgattgcggcagggtttcatggagaagaacccgcgggatgctgggggatgctggattttctgcgcgaaggctcccctgaattgtttgataacgtagctgtgagttttttaccgcttgtgaacctgtctggcctgagtgctggctgtcggctcaacagtactggacagaacccaaatcgcggctttaccaatggggcagaggtcgaaccttcagttgaaggaaaagtactgcttaattatgaagcgcttctgaaaaacgcagccagacacggtgtgctctgttgtcacgaggatattcttcgccagcaggcgtatctctacacctttgaacatactgcccgtccaggccattttagcgtagcattacgtgatgagcttgaacgctttttccctgtcatggaaaaagagcgggttgatggctgtgaatgtgaggatggcatcatctttaaccattttgattcgtcatttgaatcctggttgttttcttcaggttccgacgtcgcagcgtgcactgaaacgccgggattgcaaccgtttgcaaagcgagcagaggcaaactatgacgctggtaaatggccacgttatctggaatgggcacaccatacagcagaagtacggcctgccactggaattctgtcgctagccacgtatttattttgctcaggcttaacttctccctga

SEQ ID NO: 232683 - DNA, 1443 bp, Klebsiella pneumoniae
atggaaataccggcagatgagccggtgtcattatgccatctcaaacagttcacggacggctttaatggcccactgattccggatcttcgttttctgaaaaatatgaagttgcttaacgtatctggtgcgtactggcagggggaagccagcaatgtacagctgcagcggatttatggcacggcatgggcaagcaaaaaacagcttgatggctggcttgagaaaacggctgaagcggagaaacgcgaccatcgcaagctgggtcgggagctggatttgtttcattttcaggacaatgcacctggcgcggttttctggcatcccaggggctggacaatctttcagtcgcttattgcctatatgcgcagccgccatgaggtagcgggttacgttgaggtcaatacgcctgatgtcatggaccgaagcctgtgggacatttccggtcactgggacaactatcgtgatcatatgtttacaacgcaaactgaggatggtcgacgttttgctctcaagccaatgaactgtccgggggcggtatcgctgtttaaatacgggagcaagagttaccgcgatttacctgttcgcctgtctgaatttggtaaagtccatcgttatgaaccctctggatcgctgcatggcttattacgggtccgccattttactcaggatgatgcgcatatcttctgcacgctggaacagcttgagggggagtgtaaaagtatccttcatctggtgcttgatatttataagcagtttggatttgaagaggtcgaaatcaagttatccacccgtcctgaaaaacgcatgggaagtgacaccgactgggatcggctggaaaacgcgctttcagcctctctggaagctcagggattacaatggtcggtaaatcccggtgaaggggctttctatggccctaaactggagtttgtgttgcgcgacgcgatcggtcgtgactggcagtgcgggacgctacaggtagatatgaatctgcctgatcgattcgatattggctacattgccgaggatggttcgacaaaacgcccggtgatgttacacagggcgctcttcggctctcttgagcgttttaccggtattcttcttgaacactacgctggtaaactgcccgcctggctgtcgccggttcaggccgtggtcatgacgattactgataaacaacatcgatacgcggagcaggttctgaagacacttcgccggaaaggacttcgctgtgagaccgatcttcgtaatgaaaaaattggatacaaaatccgggagcagacgctggcccgcattcctttcctcctgattattggcgatgcggaggaaaatgcggcgcgtgtcaccgtacgcgatcgtacggggaaatgtatgggaacactattactcaacgaagcagctgactgcattgagatgtgttgccgaccgccggaggtgcgccttgattaa

SEQ ID NO: 232684 - DNA, 531 bp, Klebsiella pneumoniae
gtgcaggtctgcgatccgaataccggagtggtactcccccacggggaaatcggccagctacaggttcgtgggccaatggtcatgttgggatatcatcgagatgcggaggaaaccgctcgctgcatcgatcctcaaggctggatgaatacgggcaatctcggtcggctaaacatcgatggtagggtcgaactggtaggaggacgcctgcgcgatatgatcattcgcggtggtgaaaatatctatcctgtagagatagaaaatctgctgcgtgagcatccgtcgatcactgaagttgcagtcttcgctctacccgataaattttacggcgaagtggttgccgccgctattgagtccaccaagccgttatccaaagatgaaataagaaaagcctgtgttggaaaaatagctggttttaaacatcctgctcgggtctttaccatcgtagaatggccgatgacgtcaagcgggaagatcctaaagcgcatgttgaaaaccgcagcccttgatgggcaactgaaggagcttttatga

SEQ ID NO: 232685 - DNA, 291 bp, Klebsiella pneumoniae
atgaaaatattgaatcccaaaaaagaccgtgaattatataatatcagcaatgaaatgctaatggtgttgaataaatttccaactaaaaatcaaaataattacaaaagatggtataaatatatctcagataaggatgaagttattgatgttaaaactaacacaccattaaaagttcacctaacgcctataaataaaatacaaaagcaatactataactacagtaaaatatgtaacgattttaaagtagtaaataattttttgcatcacatgttcaaaaaacatttaacgtga

SEQ ID NO: 232686 - DNA, 1104 bp, Klebsiella pneumoniae
atgcctgtcgactttctaacctctgatcaaaaacagaattacggttgttatgctgcagaacctaatgacgtgcaactggcgcgctattttcatcttgatgaacgggatctggccttcattaaccaacgacggggcaaacataataggctgggcattgcgcttcagctcaccacagcccgttttctgggaacatttctgacggatttaactcaggttctgcctagtgttcaacattttgtcgcggtacagcttaatatccgccgtccagaagttctctcccgctatgctgaacgggacactacccttagagaacatactgcattaattaaggaatattacggctatcatgaatttggtgattttccatggtctttccgcctgaagcgtctgctatatacccgggcgtggctcagtaatgagcgaccgggtctgatgtttgattttgccactgcatggttgcttcaaaataaggtattactgcccggagcaaccacactagtacgtctcatcagtgcaattcgtgaaagggcaaatcagcggctgtggaaaaagctggccgcactgccgaacaaatggcaggcagctcaagtgatggagcttctggtcattccggaaggtcagcgtgtatcaccactggaactgttgaaaaaaggccctgttacagtcagtggacctgcgtttactgaggcgctgggacgatatatccgattacgaagtcttgagttttcccaactgaacttttccggtctgcctgccattcaaatgcgtaatctggctcgttatgctggcatggcgtcggtaaaatatatcgctcgaatgccacagcagagaaagcttgctgtacttactgcattcgttaaagcgcaggaaataacggcattggacgatgccgttgatgtgcttgatatgctaattctggacattatccgtgaagcaaagaaaactgggcaaaaaaaaagactcaggacactgaaagatcttgatcaggccgcattgttactggcgcgggcatgtgcattgttgctggatgataatacagatgtcccagatctcaggcaggttatcttcaagtgcgtacccaaaaaccatgccgcacaaggctaa

SEQ ID NO: 232687 - DNA, 225 bp, Klebsiella pneumoniae
atgccgcacaaggctaatccgcgtaccagcaatatgattcagacgctggcgaggatgggctggatgtacgcctccggcgtgcctgcgatgctggatcagcaggatgcgcgtgcggcgtcgatgagagtattgaactggacgattctacccgaggcgtcgaacgccttatcggtcagtcttagccgggccaaaaagctgctttcccacccattctggcaagagtga

SEQ ID NO: 232688 - DNA, 447 bp, Klebsiella pneumoniae
atgactatcacactacaggcagtaaacgagctcatcgcttcactggcgtcggcaggcgagctgtcaatcaaagagacaaaggttatggcgctggcgaaagcttaccggcagctggctgcggagaatgtggtgatgattcgcttgctgaccgatatcagcgagaaccacgttgaatattactctgaaggcgaagacggaatgtttgccggtgttccactggattatgtgtccgaaatcaacatgtacgtttcccgcgatgttaatgccgaaaacccgtttactgccaccgatcgcatcgtagccgggattaaggctgatggtgtggaggagttcgcggcaaaacttcgaattcctggtgatgaccagttttttgacgctttagcaaaaggggttgcacttgctgctgacgacttcgccaagcagctgcgcgagggggaagacaaatga

SEQ ID NO: 232689 - DNA, 354 bp, Klebsiella pneumoniae
atgactgatatcaccgaactggcgcagagcctgaaagcggcagcagaacactaccaatctgtgcagggaattgcccgctactcgaagacagctgatgccaaagagagatttctggaactcgctaaccctgccaacatcctcgcgctggtagaggcgctggagaaggcgcagcagcgaattgatgaactggagaacgatgaagttcgtcagcgcttggctaacgctgagcatcaactatatatggctgaactggctaagcataacctcaaagcaagtcgcaaagcccagttccgcaagcgcaaggcggctgagcagcgcatcgccgagctggaaggagttaggcgccatgaatag

SEQ ID NO: 232690 - DNA, 318 bp, Klebsiella pneumoniae
atgaaacctgcaaattatgcccctgtgtactgcgcactttatccggcactggcggagatagcccgcaagcacggttacgcaatggctattcacggaacgatggcgcgtgactttgaccttatttgtatcccgtgggtagagactccatcaaaacctgaagaagtcgtggcagaaatcaccgcaacatatgcgactaccgatatcaccaatcctggctacaagcctcacggtcgtctggcctattccgtctgctttgggtttggtgagttctttgctgacctctcgtttatgcccgttatcgaggacgccaaccaatga

SEQ ID NO: 232691 - DNA, 384 bp, Klebsiella pneumoniae; identical to SEQ ID NO: 7741

SEQ ID NO: 232692 - DNA, 687 bp, Klebsiella pneumoniae
atgtgtgcgcaggatcgtagagaaaggccacttaacagtcaatctgtaaataaatacatccttaacgttcagaatatctacagaaattctcccgttccggtttgtgtccgtaacaaaaaccgggaaatcctttatgccaatggggcttttattgaactcttttccagagaagataaacccttatccggagagagttatatacgtctgcaggttgaaatttttctttcatcacttgaactggaatgccaggctcttggacatggctctgcattttgtcgtcgttttaattttcatggcgaaatctatcagataaggatggagaatgtttctttttataatgacgaatctgttgttttatggcaaattaatccgtttcctgattatccattttttgcgttaaatcagagtggaagtaatacaaatacttctgataaattaacgatatggaatgatctttctccagggacattggttgttttctctttttatatgctgggtgttggtcacgcaacaattgccagagagttgggtattacagacagagcatctgaggatcgaattaaaccagttaaacggaaaataaaagaattttttgaacactttgatttattcagagtgtcatgtatctataaaggagaaatagattcgctattaagtataattcgtgaattttatggtgttaagtaa

SEQ ID NO: 232693 - DNA, 321 bp, Klebsiella pneumoniae; identical to SEQ ID NO: 21358

SEQ ID NO: 232694 - DNA, 531 bp, Klebsiella pneumoniae
atggcgctgtacatggtatttattgaagatgcggaggaccgggacggcgagcgctgcatcatgccgaccagcgagcatcttgaagatatggtggtgctcgcctggcagaccggggcgtatgttttctgttttgtcgaccgggcccagcatctggcgatgatgaaatccatcgggatgtatgacgagcggctcaacagcgacgaaaaagccacgtactttttcaccggtgaaaatccgcaatgggaacgggacaaacccgcaggaatgaagctgtgtgattacctctatcgcaaggtggagcggttcgccatcgagaacggtgtgcaggtggttgatgccgggaagtgctcaccggagcagattagcgcgatgattgaggtggtcagcgagcggcacggggaaagcgcggtgaacgagaagctgaaagcggagctgatgcgggaatataacagccgctattttaacgtgccggtgcctgaactgccggaggacaaatccgcctgccggtggtggccgtccggcaaaaaataa

SEQ ID NO: 232695 - DNA, 180 bp, Klebsiella pneumoniae
atgacgaagcaggaaaaaaccgccctcaatatggctaaattcattaaggaccagtcgctgctgttgctcgagaaactgaacgagctggatatggataccccggccgacatgtgcgagcggctgcacgaggatgcggaaacactctggcaggtgatgcgggataagctcggggaggaataa

SEQ ID NO: 232696 - DNA, 429 bp, Klebsiella pneumoniae
gtggcgaaaacattgctcaacctttcacaggcagcacaagccgcgggcattaccagaagaacgctatacaatcatgtaaaacagggaaaggttaccgtgtcacgtgacgggaaaaacaaccctgtcgtggatgtgtcagaactgatccgtgtatacggaaatgtgaatatccctgagaaacaaattcccggcatttcacaccgtgaaaatacacaaaaaaatttcccacaggaacagcttctggcaatgcaaaaggaactggccgatctccggcaggctgtcaccctgatgctggaagataaaacatcccgggaagaagaacgccgccagcacgatgatgagcgccggaaactccaggccgaagtggacagattgacaacagaactgacacagaagaaaaaacgcttctggtccggctggtttagctga

SEQ ID NO: 232697 - DNA, 315 bp, Klebsiella pneumoniae
atgccacaggtaacgatttccgcgctggcacagcgagatttacaacgcctccaggactttctcaaaaccaaaaatcggctggcagccagaaaagccggtgaggtgatcgtccgggctatccagcaactgaaaacattgccagacattggccgcccggtgccatttctgccgctggaatatcaggaactggtgatcgggtttggcgacagcggctatgtgatgctctaccgccacgaccgggaaatggaccggattgtgatcgtcaccgtcaggcatcagaaagaatccgggtatccgggggcagacagcctctaa

SEQ ID NO: 232698 - DNA, 279 bp, Klebsiella pneumoniae; identical to SEQ ID NO: 82767

SEQ ID NO: 232699 - DNA, 219 bp, Klebsiella pneumoniae; identical to SEQ ID NO: 82766

SEQ ID NO: 232700 - DNA, 372 bp, Klebsiella pneumoniae; identical to SEQ ID NO: 82765

SEQ ID NO: 232701 - DNA, 129 bp, Klebsiella pneumoniae
atgggtcttaagccgggtccgaaacgaattgccgattcaacaggggaacctgataaacgccagcgtgacaataaaaaaacgccggggaatactgacaaattgaaacccagcaaatcctcaaaaaaataa

SEQ ID NO: 232702 - DNA, 258 bp, Klebsiella pneumoniae
atggggcttaaattacgtttgacatggtttgataagaaaactgaagagtttaaaggggaagagtattctaaagactttggtgacgatggttctgtcattgaaagcctgggaatgcctttaaaggataatattaataatggtgagtttgatttgaagaaagaatgggttcctttactacagccattttttaaaaatcaaataaaacctgatgtggataattgttatatagcttttgattatcgggacggtaactggtaa

SEQ ID NO: 232703 - DNA, 468 bp, Klebsiella pneumoniae
gtgaagcaacaattctgccttatcaacgacaacgttaagcgtaacgtcgtcagcttcatccagtctctgcccgtcgaccgccgatcaccgctgattatcgaggcgcgcgaagagagccgcaccgacaaacagaatcgccttatgtggccacttttgaaagacctgagtgatcaggtgatttggcacggcgaaaagctggagccggcggagtggaaagacctcatcaccgtactggtcagccagatgcaaaacccggagcgtgagcagaaatccgccccgggcatcaacggcggccgcgtctacttcggtgttcgcacctctcaatccagcaagcgctacatggtcgaggtaatcgaggcgatctactggttcggcaccgagcacaatgtgaagtttagcgagaagtccagcagtcggattgcatgggcccaggaatggagggcttcgcatgcacagtctgctcgctaa

SEQ ID NO: 232704 - DNA, 222 bp, Klebsiella pneumoniae
atggaaactctttctgaccgcgttaaaaaacgccgcagtgaacttaatttgacccaggccggtcttgctgagctttctggaaccaaacagcagactattcagcaagttgaatccggattaacaaaacgcccacgcaagctcattgagctggcgaccgctcttcagtgcgagccacgctggcttctttttggagagcaagggaataaaaccaatgccgcctaa

SEQ ID NO: 232705 - DNA, 696 bp, Klebsiella pneumoniae
atgaatattgcggacagagtaaaacttaggcgtgcggagctatcattgacgcaagcggagctggcttcactagctaaaacctctcagcaggccatacagcaactcgaagacggaaggactaagcgcccaagatacttgccggagctggcagcagctttaaagtgctcagttagctggctcttaacgggggagcatgaaatgaccagtgaaattcctcccgaaaaagaatggtcccaagtcgattcatgggacaaaaataccccactaagtgagggcgaagtagaagtgccttttttgaaagatatcgaatttgcctgcggggatggacgcattcaaagcgatgatcacaatggctttaagttgaggttctccaaagcaaccttacgaagagttggcgctaacagcgatggttctggagttatctgcttcccagccactggagacagtatggagcctgttattccagatggaacaacggttgcagtagacaccaataacaaacggatcattgatggaaaactatatgctatcgcgcaaccaggtgccggagatgaaaagctaaagcggataaagcagttataccgtaagccaggtggaattcttgtgatacgcagcttcaaccgagaggacgaagaggcaatggagcaagatgttgaaatcataggaagggttttctggtattcagttttactttaa

SEQ ID NO: 232706 - DNA, 615 bp, Klebsiella pneumoniae; identical to SEQ ID NO: 40342

SEQ ID NO: 232707 - DNA, 765 bp, Klebsiella pneumoniae
atgtttagcttgccagatcccgtgctgacagcacaggctatctcacttgaaatagctgggcaccgtattttgtcggattgtcacctcaagctttatccttccgaggttctcgctttagtcggcccctcaggtgctggaaaatcaagtcttctgaatatacttgctggacgacagctatctaacaactgtcaggctctttcccttttaggccaggatttactacgtaccagtctttatcaaactaaccttttacgtcgacgggcgtgtggctatgtggctcaggatgccagcacaaccctaaacctgagacaaagtgccgccactaatatcgtacgtcgtctttttgatttaggtgacaaccgtgcggttgatgcactcaaacaagcacaaaaatggggccagcgacttggtttatgtccagaacgattacatgagccagtgaagaacttttcgggagggatgcgccaacgcgtacaaatcgctgcggccatgatccatcagccgagcattttatttttagatgaacccactgctggtctcgactcagtcgctcaagcagattttttagatgtgctctctaatttgagaaaccaaacacagactgccatggtgtttgtgactcatgacttacgtctagctcgactcattgctgatcgggccatcgtgatggatcaaggccgcatcgtcagcgaatccattatggatcgtttgcttactgagcctgagcatctcatcgcccaagctcttgttaaggcaatgatttaa

SEQ ID NO: 232708 - DNA, 813 bp, Klebsiella pneumoniae
atgaattatgcctaccttgatctaccgtccaaacaagaaatacgtcgtaaaaccctaaaagcactctgtctacctggacgtcaaatacctttctcagctcctgagctacccattgcctatggttggggggtaggaggcatggctattaccgctgccttattagaaccgaatgacacgttaaaggtagtcgatcatggttcggatgataccgttaatgccctgaatatcgcggatttttttactaaaacggcaaacatatcaattacgacaacaagctcaaaggctactctcattcaaacgcgtcagcgagtccctgaaagcccgttgcgggaagagcaaattgtggtgtaccaagttcctcgacctgaccctctacgtggatttattaatgatgcggccgaagcactgacacggcacgcacatcatgattacggtgtcgtgttaagcgctctatttgaaacatggttgcaacaagatgatgcgtgcttaggatacgaccaccctgtgattgttaatgatggggtcttaatgtcaccgtcgcctattcctgctatggataacccccgcatggcgatgatgcctgctattcagatttttggcgccgcacgcgagcgacgaatttatgcattgcctgcctatacacccttagcaaacttagcttttgttgacctgcctgctagcctgaaaaaagtcgatacagcatgttgtatctgcggctcatctattcattatttggataatattggtacgtcaaacaccccccattgggtatgttccgactccgaagcatgcaaggagcgcgctcatgtttag

SEQ ID NO: 232709 - DNA, 1014 bp, Klebsiella pneumoniae; identical to SEQ ID NO: 40345

SEQ ID NO: 232710 - DNA, 558 bp, Klebsiella pneumoniae
atgaaaatacctttacgatctgagcacagacatgacgatgagttacatcggcagacgcgtacttatcggcgactactgcatgcctttggttacccaatgcgcatacagcaactagaagagcgtgctattcattgcatcgttgactgccttctagacagccaaacgacggtagctattgaggtggaaaataaggaattaacaagccgtattttgaatacaggcgcaaccttgagccaaactcccgaatgggtttttgcaggttctcaacggcatcacttacaacatattccagcaggaagccgtgaggcgcctgaaagtggggcaacccttgtcatggaaatagccgccatatcacctacaaacggggggcttgctatacgagccaccggtgcaggactcaacaaaccacacactttatatttttcagggttacatcaaaatgtagtcattgatcatattgcttttcgtgccgattacccgcgtggagtggacctactactatgcgctgacacgcagctggttgtattaccacgtcacttaactttggagatcatttaa

SEQ ID NO: 232711 - DNA, 516 bp, Klebsiella pneumoniae
atgagtaacgatacaatctcctatctggaaaatggacatgaatttacagtccactttgatgagttattaaaataccacggtgccggttatccgggtggtgtagcccacgggctaaaagttatgcagcgagcctggcccttgctagataatggtcgtttgcctgaacgacgtgaaattcgctgtgtcacagcctttggaggcccagggggtagagatgcgattgagtttgttacccgcggtcttactgagggtcgctacattgttgataactcagtagggctcgaagaagaagagtcccccggtggtcgttattacttccgtttcgagtaccgtggcaccgctgttgaaatcaccatccgtcccggacacgtacgccccgagttcattcagttagcacgcaagaaagaccgctcaccagaagaagagatcattttggctgaaatgaagctcgaaatgggagaacgcttgttagtccagcccgcagaagatatttacaacgctaccgtattatcgtaa

SEQ ID NO: 232712 - DNA, 825 bp, Klebsiella pneumoniae; identical to SEQ ID NO: 40349

SEQ ID NO: 232713 - DNA, 1059 bp, Klebsiella pneumoniae; identical to SEQ ID NO: 40350

SEQ ID NO: 232714 - DNA, 1095 bp, Klebsiella pneumoniae
atgacctcaataccccgttgctttgccgtgctagtagcgacaactttgttagcaggtaacttgtcagcgcaagaatttaactttactgatgtaaccggacaggaaattaagttagaagcccctcctagacgtatcattactctgcccaatccagctgcagctaccttcatcgcaatagatggttctaccgagctgttagtgggtattaatgagggctctaaacgagcctttgagagcggtatgatgagcgttatgtttcctgaagctgttgatatctccagtgacattttgtcggaaaacggtggttggatgcccaacgtagaggccatcgcagcacttaaaccggatttagtcatccagtggggtgagcgcggcgatgatatcgtagctccacttcgcaatgcaggtttgcccgttgctctaatggtaggcggtggcaatgcgggtacagaagagctggcccgagccaatatgaaaatggtggctgatatcacgggtaatactgaaaaactgtcaaagcttattgattggcgtgaccgtgtacaaagtgaaattactactggtttaaaacaagtaggctctcatgcaacaccaagcattttgcatttgcgctctgccaaatccaagttgactgctactggtgagaaaagttatcaacagaccttcatcgagctggttggcgctaaaaatgtagctcaaggagctggcgtacaaagcactgttagcgtggaacagattcttgaatggaacccagatattatcttactttccgcagcagagacggatgctggattagaagcgatatacgacgacccattactttctcgcttaaatgccgccgtacaaaaacgcgtttataagacacctcaaggtggatatatctgggatagtgcttcccatgaaagcccctacacatggatgtggctggccaatcttactcatcccgatattttctcttttgacctacgtcacgaattaaaagaaggcttcaaattactttataactttgacctatcggatgagcagatagatcgaattctgcgtattgctatgaacggcgacagtcacggttatcaagtgtttcgtaaacaatga

SEQ ID NO: 232715 - DNA, 828 bp, Klebsiella pneumoniae
atgaaacgtagttttcgttatgcggccatagacatgggtatttcgacctcgggcttgtcttatcaagtaaaaaaagtagaggaaattctcggacagcccatttttgaaagggggagtaaaataacacccactgcctttggaaaggaagttttagacttaatcgccgtaattttagaaggcgtgactcggcttgaggggttacgtgatgatggcttagctcttccctttgggcaaaccttacgtattggagtgatttcctcactggcaccggataacttgttacggattatccagatttgtgctcaccgttcaggtaaaactaaagtcgagttggttagtggcaagcatcaaggtctgttacggcgtttacagaaccgtgaaattgatttgctaattagtgcagcacagtcggttcctgaggggatggcatatacaagcttattcaaggaacactttgtcttactagtgcgagccgataaacttcagcctgaactccatcctcttatgctctgtgagcctggattactaccacttagcgaggatgattttgttccatcgctaattactgaaggcttaagtaaattattaagctccggcttgactcgtacatatggccttggtgttgagcatcgaatggctttagttgccgcaggttatggtcatgcattattgccgtatggctgggtaagagatgtacatttaccggatcatttagcagtgatggagcttcctcccgctttatcggcagagcgtgaattaggttgcttttggcgtcactcatacatgatggggagtcaaatttctcaggcttttagtgaagcatggtaa

SEQ ID NO: 232716 - DNA, 207 bp, Klebsiella pneumoniae
atgttttcaaatacaacccagcgacaaccatttcagacaaaggtaaaactccgtgcgataattctgaaagataataaaaagagtaaaaacgatttcctttatcagacaggcgttagggtaataacgatgaagcataaactgacaatgcctggcctaacgcccagcgtgtactgtcgcgacgtcaggcaagatgacggcctgaaataa

SEQ ID NO: 232717 - DNA, 537 bp, Klebsiella pneumoniae
atgaatacaacgacctcacccgatctggaaacccggctacgcatcattgaagacaagctggctatttatgaactgattgccgcccatcctcccagtgctgacagcggtcatgacgattacaccttgtctgtttaccaagaaaatggaatttttgatcgggggccgacgctggatggcgcacagggcgcacaagcaatcgccgcatttatcaaaagaccggaacacaatgaagcgattcgcggcggtctcgcgcattttaccggcttaccactggtagatctgcgcggggatagcgctgtggtcacctcctatctaatgattgttcatctggatcagcagggagagccgcgcgacctacctaaccatggtatctcaactggttatcgcattcaccgcaccgtggtcaatcgctgggaactagaacgacatcagggacgctggaaaattataaaacgcacactgttgccggtagatggttcagtgcaccatcaaaacttgctgcgttcggggctgaatgagctgttttttcctgactaa

SEQ ID NO: 232718 - DNA, 435 bp, Klebsiella pneumoniae
gtgactgaacaggaactgtatgatcatgccgtatcgttgctggcaaagaaaaattacgcctctggcgagatgcatcgccaactgagccgactgaccgaaagcacgggggatatcgagcgcgttttacgtcgactgaccgataaccacgcgcttaatgatgctcagttacttgcttatctttttgataaacatgttaaaaaaatgcacggccccacgcgaataaaacaagagatgcgccagaaaggattttcgccggcactgatagagcaaggtattgataacagtgacattgactggtatcagttagccaaagctgcccgtatcaagaaattcggtgaagcattaccctcagagccaaaggaaaaaaacaaacaaatcaggcatcttcagtataagggattcacgatggacatgatctttgaggcgttaggttaa

SEQ ID NO: 232719 - DNA, 1740 bp, Klebsiella pneumoniae
atgcaggccctgaaactgcatgtccgccggcagggcgaatggtttgccctgtccggcgaactggcgctggatgacggcaaggtgttgcagctgcgccaggtactgacactcctgcaggaaagccgcggccgtttcatccgcctcggcgagcaggactggctggccctggataaccagctgcgcctgcgcctgcagcaaatagccctgctggccggtgacagtgacgctctcacgctcaatacgctgacgctgccgctgttgaaaacgctcgccgatgaagccgggtatcttgacggtgacgccgactggcgccggcagctacgcgggcttaaggacagggaaaaacatcagcccgtggtaccgtccacgctgaaagccgaactgcgcgactaccagcaggccggcttctgctggctgtcccggttggcgcagtggggtgtcggcgcctgcctggccgatgacatggggctggggaaaaccctgcaggccctggcgttgctgctcgagcgcgccccgggcggcccacaactggtggtggtccccacgtcccttgccggcaactggctgagcgaaagcgaacggttcgcccccacacttcgtctgcgggactaccggcgccaacgtgagacagcagacgtgggcgcgtttgatgtggtggtggtcagctatggtctgctgctgcaggatgcgccggcgtttaccggccggcagtggcacagcgtggtgctggatgaagcgcaggccatcaagaacgcacagacccaacgggcgcgcgctgtgatggcgctgaaggcggatttccgcctggcactgagcggcacgccaatcgagaatcacctgggcgaactgtggagcctgttccggttcctcaacccgggtctgctgggggagctgaaaccgttcaatcaacgatttgcggcgccaattgagcagggtgaccggttggccggtaccacgctgaagcagctgcttaagccgtttatcttgcgcagaaccaaatcgcaggtactggacgaattgccgccgcgcaccgatatccttcacaccattcctctgagtgacgaggaacgacactggtacgaggccttgcgccagcaggcagtagcgcggctggacagtggcggtgacgatatcaaaccgttgcaggtgctgacggagatcacccggttgcgccgattctgctgccacccgtcactggtgctggataacctcccgctggcgggcagcaaactggcggcctgtctggatatcatcgccgagctgcaggaaaaccaccacaaggccctggtattcagccagttcgtcgaccatctgacgctgttgcgcacggcgctggatgaacggggcatcacctgtcaatatctggacggttcaacctcgccgaccgaacgggagaagcgggtgaccgcgttccagtccggcgagggcgacctgttcctgataaacctgaaggccggcggtaccggactcaacctgacggccgccgattacgtcattcatctcgatccctggtggaacccggccgttgaggaccaggcgagcaaccgcgcccatcgaataggacaggagcgccaggtcacggtataccgtctggtgatggaagacaccatcgaggaacagatggtcgccctgcacggccgaaagcgccagttggctgaggacttgctggccggtagcgacggtgtgagccggctggacacccaggccctgctggcggtactgcggggaaacccgacgtga

SEQ ID NO: 232720 - DNA, 2304 bp, Klebsiella pneumoniae
atgaccggacacaaaaacacaccttcacgcgctgacaacgcggagaccgggattgcgcatctgtccctccctctcaccgccatcctctgccagctcgccctgcatgacgatttggcaaaatccgccctgctggataacctgcatcagctggagataagccccgttgcccaccgccgcatgaatcccgcggaaatggcggaagcgctgaaagtactgttggcacagggatggctgcaggaaaggaacaaccgctaccaccttgccggtcatgataacgtggtttaccgctacatggccacttaccccaccgtctggggggcttccccgcatcaccctggccattcacgcctgttcagcggcctgcgtacacgcagggcccggatgtggcatgcgcttctcgccggagacgaggcggcactgccgcaatacctggacgaatggatgacaaatccggggtatgccccacaggcacatccggcttttcagctgttggctgacgaggccggcagacagaccttcgcgctgttgaacgagggtattcagatagcgctgctggccagctttctcgttgatgcctgttaccgcctcactgagtgttccgcactctatcagtatgcctgcaccttcagcgacgcgcggagcacgacatcgcccgcgttacgggagcccctggcgctgcaggccctgtggcgcggcgaccagggccgccttgaccaaatagcgggggagggggaactgtccccgaccgtcaccggctggatggcgctgtgccgcggacaaaaagacacggcgctcgaggcataccggctgctcgtcagtcagtaccgcaaggccacacgcaaacgcaagctgcacctgccccccttgccgtccatgatggccgcgttaacgctgctggccaatcatgagcctgcgtatacctcgacacttcgggaactggcccaccatgccatcgaggagggtttcggcagtggctgggttttgctgctgggtctgctgcatgaatgcgaaggtaagccgccgcagggcacctcacccgaacaggccacgacgccactcatcggcatggccggcgtctggctggcgctgctccgatactggcgaagcgataccgaagacggcgaacgcgggcagcaacgcctcgagatattcagaggacagttggccacccgcggctatcaccggctggagcaggacattgccgacctgctccatcagcaataccgtcagccggcgcccccattgcctcatccgctgagtgccctgtatcggcgccgggcgtcatgggaatatgccctggacgccctgagccagctgacggcggcggaaaacgccaatacgtcccgcatggcctggtttttgaccctgcatcgctacgagctgacgctggagccgcgggagcaaaaatacaaccgggacggctggaccaaagggcgcccgctgtccctcaaacgcctcaacgacgcggccgacacgctgccctggctgctggcgcaggaccggcaggcattgcggcatattcactacacctcggcgtattccttttacgggcacagcggcacctacacgctggatgccgaggccgccttgccggcgctggttggccacccggcggtgttctggcaggacgcccctgacatacgcatcgatatcgaacccgggcaggtgacgctggtgataacggaggcgggggaacatctcgccctcgcgctccgcccgccgggcatcagcgacagccgcggcctgctctgggaaaaagaaacaccgacccgcctggtggtgtatccggtcagtgacgagcatcgcaagatagccggtattctcggccgggaactgcgcattccggccggcgcccgcgaccaggtcctgcagtcggtgtcgtccatcgcgcccctactgccggtccaggccaatctgcccgagctgacggcccacattccgcatgtccccccggatgaaaagctgtatgcgcatctgctgccgcttggcgagggcctacgtctgcagctgcgggttcacccgttgccaggcggcaccgccttcccgccagggcggggcggcgacatcgtcaacggcgagcacgacggcctggcgatacaaacccgccgcgacctgccggcagaacaacagcggctgcagcaggtgctggcggcctgcccgatactcgaggctgcggcaacggacaccaccgaatggcaactgtccgatactggggatgccctggaggcgctgacgcaactgcgcgcggttgctccggcacaacttgaatgcgtctggccggacgtcgcgatatgcaggccctga

SEQ ID NO: 232721 - DNA, 615 bp, Klebsiella pneumoniae
ttgacagataaaaccgaatccgttaccacagagaacactatctcagcgctcagccatctggcgttctgcgccctggcggcgctggggctggcgcgccaggacggtatcgccggcacgccctatgccgaaaacctgttcctgatccgctggctggccaccgcccaaaagcaaaaacgcttccccaggagcgtcgcgattgacatccagtggttactcgaacgtggccgcaaatacggcccggccggcaaactgcgtcagcatcttgactacctctggcgctcctgcagcggcaatctggccgcacaatccgacctgttccgactcacctacgcctccgaacccctgaaagacctgggctgggacaattatgtgctggacgcgaaagagtggaagtccggcgtcgtgccgacaccgtcacagcataacgggttctacgtcgaaaaaacggcgctgaacgccgcctttgcccaggacggtcgccatctgcaccccgtcacctttcgggtggtcggtgacgccgaccggtttatgcacgtcatggcagaatacggtctgggcacccgacggctcggcagtacggcaaccgggcacaccatcgcgctggagcctgcgtaa

SEQ ID NO: 232722 - DNA, 693 bp, Klebsiella pneumoniae
atggcgtttcgcctcattcgctatgccgtcgccgccatgcagcgtcacctcgacgccggccacaaaaagctgccgctggtcatcccggtactgttctacaccggcaaacgcagcccgtacccttactcgaccaactggctgcaggagtttgatgatccggcgttggcggagaaactgtacaccggcgattttccgctggttgatgtgaccgtcattcccgacgaagagatcatgagccaccgcagcatggctgcactgactctgctgcagaaacatattcgccaacgcgacctcgccgagctgaccgacaggctgtccgccattctgctggccggctatctctcttcgccacaggtgatttcgctgatacactatattatccaggccggtgaatcggcgaatgcagaggcatttgtccgcgaactggccctgcgggttccgcaacacgaggaggaactgatgaccatcgcacaacagcttgaacaaaaaggtatcgagaagggtatccagaaaggtatccaattgggtgaacagcgcggtattgaaaaagggcgccatgaaggcaaacttgaaggcaaacttgaaggcaaacttgaagttgcccgcaccatgctggccaacggcctcgatcgcgacgcggtcatgaagatgaccgggctgaccgctgacgacctggcacaaattcgccactaa

SEQ ID NO: 232723 - DNA, 351 bp, Klebsiella pneumoniae
atgacagccactaaaaatgtaaagtcgcagaaaaatgattatccggcatccgttgatcacaatgctgccatgattgaagaattgcgcgcagatcctgattatgcaaacgcttatcttgctaatgccctggaagaaataaacgagcctggtggtttaggcggttttcttgttgcgctacgtcaggtaatcgaggcgcgaggggggatttccgaagccgccaggaaatcggggcttgcccgtcagagtatttaccgcgcattatccccgaacgggaacccgaccatcacaacacttgcacaacttacatctgtagccggattacagttcactctcagtaaatccagccactaa

SEQ ID NO: 232724 - DNA, 294 bp, Klebsiella pneumoniae
atgaaattcacttcaaccacgaatcatgttttcacattcgaacgagtaacgctttgcacgattgttcttattcataaggatacgggacaacagtatgttgtcatatttacggataacaataaaattcgtgactataagaccggaattgtttctcagtttggtgaacttaagcagagtgatattgatttaattcttttctatcgggacgaatatgaaaaatattttgactcgttaaataatggcgaggagtatttgagttttaaagaatatatcggatgtataaggggaaaataa

SEQ ID NO: 232725 - DNA, 138 bp, Klebsiella pneumoniae
atgtcaacacgacagatcgtacagcttgctgattctcttgtcaaaggctgggaaaccagaatcccggcaatgacgtttagtgagtgggatcaattccggtggtggttaaactacctgcaagggtatgaaatgttttaa

SEQ ID NO: 232726 - DNA, 234 bp, Klebsiella pneumoniae
atgagttcagaagtaattaagcaaattcagaaaattcaagatcgcggcattatcatctattcaaagtttagagcggcagaatttgatcaggatgacgtttacagagagtcatattttctggtcgtagagtttaacgagttaatagcagaaaacatcattcatgacgaaaaactggtagatcaaacggcttgtattcttcatgagcttagaagaatcgctatagaagggaaataa

SEQ ID NO: 232727 - DNA, 162 bp, Klebsiella pneumoniae; identical to SEQ ID NO: 32848

SEQ ID NO: 232728 - DNA, 519 bp, Klebsiella pneumoniae
atgcagaacgccagacacccgaaaacacacagggaactgtgtgaactggcctgccgttttctccgcaacaacggctttaaggtggtgttcagtgaccgttttcacgcatggacgtcctgcggtgaacatcctgatgccctgggcttccgtaacggagcgtcatgtctcattgaggtgaaatgctcacggtctgatttcctggctgaccggaaaaaggtgttccggtcagagccggaaaagggcatgggagactggcgtttttatctctgcgagccgggggtgattaccgtggccgatttaccggcgggctgggggttgctgtatgcgattaacgggcgggtcaggaaagtgcatggctggcccggaaatcatcagtgggtggttacggtcgcgaaaccgttcagggcaaacaaacaggctgaatgcgattatctgttcagtgctctgcgtcggctggaaatccggggcgtgacggagaacggtgcagatgctgacagggtgcagacatatgggctatga

SEQ ID NO: 232729 - DNA, 1959 bp, Klebsiella pneumoniae
atgtcagttacagagtctaaggcaaaaacggagcgtaaatccagccgtaaacctgcaaaaacgcaggaaacagtcctgtctgccctgctggcgcagacggaggaagtgagcgtgccgctggattcactgattaaatcaccgctgaatgtgcgcacggtgccgtattctgcggagtctgtcagcgaactggcggactccattaaaggtgtcggcctgttacagaatctggttgttcatgccctgccaggtgaccgttacggtgtcgccgcaggcggtcgccgactggcagcactcaacatgctggcagagcgcaacatccttccggctgactggcctgtacgcgtgaaggtcattccgcaggagctggcgactgccgcatcgatgaccgagaacggtcagcgtcgggatatgcaccctgccgaacagattgccggattccgcgcaatggcgcaggaaggcaaaacacctgcacaaatcggtgatttgctgggctattcaccccgccacgttcagcgaatgctgaaactggcagaccttgcaccagtcatactggatgcgctggcagaagaccgcatcaccaccgaacactgtcaggcgctggcactggagaacgacaccgcgcgtcaggtgcaggtgtttgaagccgcctgtcagtcgggatggggcggtaaaccggaagtacagaccattcgtcgtctggtgaccgaaagtgaagtggcggtggcaggcaacagtaaattccgcttcgtgggggctgatgctttctcacctgacgaactgcgcaccgatttgttcagcgacgacgagggtggctatgtggactgtgttgcgctcgatgctgccctgctggaaaaactccaggctgtcgcagagttccttcgggaagccgaaggctgggaatggtgcgcaggacgcatggagcctgtcggtgagtgccgtgaggatgccggaacataccgctgtctgccggagccggaagcggtgctgacggaggcggaagaagaacgcctgaacgaactgatggcacgttacgacgcgctggaaaaccactgtgaggaatccgacctgctggaagctgaaatgaagctgattgactgcatggcgaaggtcatggcgtggacgccggagatgcgtgccggaagcggtgtggtggtgtcctggcgttatggcaacgtatgtgtccagcgtggtgttcagttgcgcagcgaggatgacgcggctgccgacgctgactgcacggaacaggtgcaggagaaagcgtcagtggaggaaatcagtctgccactgctgacgaaaatgtcttcagagcgcacgctggcagtccaggcggcgctgatgcaacagccggacaaatccctggcactgctggcatggacgctctgcctgaatgtgtttggcagcggagcgtacagtaaaccagcacaaatcagcctggaatgtgaacattattcgctgaccagcgatgcgccatcggggaaggaaggtgccgcattcatggcgctgatggcagaaaaagcccgtcttgctgccctgttaccggagggatggtcacgggacatgacgacattcctgtcactcagtcaggaggtgctgttatccctgctcagtttctgcaccgcatgcagccttaacggtgtccagacccgtgagtgtggtcacacgtcacgcagtccgcttgactcgctggagagcgctatcggattccacatgcgcgactggtggcagccgacaaaagcaaactttttcggacacctgaaaaagccgcagattatcgcagccctgaatgatgccggactgtccggtgctgcgcgggacgcggagaaaatgaagaaaggcgatgcggctgaacatgcagagttccacatgaaagacaaccgctgggtgcctggctggatgtgtgcaccacatccacagacggataccactgaacgcaccaataacctggctgatgccgcctga

SEQ ID NO: 232730 - DNA, 4860 bp, Klebsiella pneumoniae
atgaatgcgttaaaaagcatactgaattcttaccgccagaatagtcgttcagaaagagagaaaggtacatactttgaggaactggtccgctcctatctgacaaacgaaccaatctacgcagacttgtacagtaatgtctggatgtattctgactgggcacaactgaataaccgtgatgctaaagatgtgggcatcgacttagtagccaaaacccgtgataccgacgagtatcatgcgatccagtgtaagtgttacgacgagtcctatcgccttcaaaaaagtgacattgatagcttttttaccgcatcaggccaggcaccatttggccaccgggttataatctcaaccacaaacaactggagtgataatgcagaagcggccttaattggccaaaaccctcctgtaacaaaaatagacctgcatgctcttgaagaaagtgtgattgactggtctaagtatcaacctaaagcagaagttcaatgtaaggttaaaaacaaacccagaccgcatcaacaaaacgctattaatgcggttaaagagggattggccaatgccgaacggggcaccttgctcatggcatgtggcactggtaagaccttcacttcactgaaaattgccgaagaattagctggggctggtaagcgggtgctttttcttgttccaagcctctcactattgtcacagacactgacggagtggactcagcactcggaagtgcctcttcacagctttgctgtctgctctgatagtgatgtaggaaaaaaacgtaaagcaaatgatgatgtagttcaaacatttacccatgagcttcgttatcccgctacaactaatgccaaacggttagctgaagaggtggcaaagcgttccgactcaacacatatgaatgttgtattcagtacctatcattccattgaagtgattggtgatgctcagaatgaacacagtatgcctgcctttgatctgatcatctgcgatgaggcccaccgtactacgggtgctacctttgcgggtgaggatgaaagtgccttcgttagagtccatgatggctgctttattcacgggcaaaagcgcctctatatgacagcaacgccacgtatctacggtgaatccgcaaaagccagcgcagacaaaggagatgttactctcgcgtctatggatgatgaatccctctttggcaagaatctacatatcttgacattctcagaagcagtgagccgtggcctgctgtgtgattacaaagtcatcgttctgacaatggatgagcatcacatcaaccgccgtctgcaaaatttattgaaagatgaaagtaatacactaaaggtagacgatgcggcaaaaatcattggctgctggaaagctcttagcaagcatcaaatgaaagaggggctagatatagaccctgatcccatgaagcgggcagtggcattttgccaagtaattgaagcgagtaccggaacaaaacataaagtaagttccaaacaaattgcagagatgttccaggcggtagttgaagcctaccaagaacatgaaagcgacgcagatgatttaatttgtgaagtagagcatgtcgatggtggaatgaacgcaacagaaaaagagtcgaaaatcaattggctgaaggctcaaccagaagagggtagctgtaagattttaagtaacgtgcgctgcctttctgaaggtgtggatgttccagcgcttgacgctgtgctttttctgactcctcggaattcccaagtggatgttgtgcagtctgttggccgtgttatgcgtaacgctcccggcaaagttcgtggttacgttattttgccagtagtcatacctacgggtatgtctcctgaagcagcacttgatgataaccaaacctaccgggttgtgtgggaggtacttcaagctctgcgttctcacgatgaccgcttcgacgccatgattaacaagctcgatctaactggccaagctccaaataaaatggagatagtcgccatcaatgataaaactgtggctgcttacaaggggaaacgaaccaaagagctcaagcgtgctgaactgctcgacaaggcccggaaaggtagcagcattggtcagaatatgaaccaagttcaacatcaacccgatctgaatctagagtatgaagtaggtgacattgagagagcgttgattgctaaagttgtcgacaaatgcggtaatcgccaccactgggaagagtgggcgaaagacattgccaaaattgcacagacacatatcagtcgtatcagaactatagtcaccgccccagaaaataaagtagaaaaagcagcatttaaagcatttgtaaccgaattgcgtgatgatctgaacaacgctattagtgaagaagaagtaatcgagatgctggctcaacaccttatcactgagccagtctttgaagcactatttgaggggtatagctttggccaacacaatcctgtatcccaagcaatggataagattataaaactgctgcacgagcataatcttgataatgaagccgatactcttgggagcttctatgccagcgtaaaaatgcgcgccgaaggcatcgataatgccgcaggcaaacagaaaataatcgtagaactttatgataaattcttccgtaacgcctttccccgcttaacagagcgactgggaattgtttacacccctgttgaggtagtggattttatcatccatagcatcaatcatctgttgcaaacccaatttgatgaagagttgggtagcgaaggagttcatattcttgacccctttaccggtacaggtacttttgttacccgcttactacaaagcggcctgattaccccagagaaattgcctcacaaatacacgcacgaaattcacgctaacgaaatggtgttattggcctactatattgcagccatcaatatcgaggcggtttaccacggaattgtcggtggaaactatcagccatttacaggcatttgtcttaccgatactttccagatgtacgagcaggaagatcaaatccaagaacgtttagcagagaatagtcgacgcagaaccctacaacgtaacctgaaagatattcgtgtcattatgggtaatccaccttattcaataggtcaaactagccagaacgacaacaatgctaatatcgattatcctattcttgattccagaatagaaaacacctatgccaagagctcgaatgcggccttatctaaaggactttatgattcatacatccgtgccatacgttgggcttctgatcgtattggggatcgaggtgtcattggctatgtgaccaatgcaggatttattgaagcgaacactgctgatggtatgcgaaagtgtttggcaaaagagttttccaacatttggatttttcatttacgtggcaatcaacgcacccaaggtgaactgtcccgtaaagaaggcggaaaaatctttggaagtggtagccgtgccccgattgccattactcttttagtcaaaaaccctgatgctaaagagtatggacaaatttactttcacgacattggtgattacctttctcgagatgaaaaattactaaaaattagtgaattgtccgatatttccggtattactgaggctaatggatgggttcatattgttcctaacatccatggcgactggttaaatcaacgtgatgatagctttaatgagttcatcgctatgggtgataaaaaaggtagcaataagaaattatttgataacttctctatgggcgtatcaaccaatagagatgcttggtgttggaatcccagcaagcacaaactggcagcaaatatgggtgcaatgataacattttacaatgaagaggtaattcgttttcaaagatcttatgcagaaaacacccccaaagaaaagggtgaactggtgcaggtttttttaaacacggatccaaagaaaattagctggacagtgaatctaaaaaaagatctatcacaagggaataattataattttcaatctcattgcttgacagcaagcttatatcgtcctttcacaaaacagtggctttatttcaatcgccgttttaatgaaagagttttgcaaatgccaaaaatatttcctaatcaagaggtaacgaaccttgtaatccagatcaacgcgaaatatatacatgggcaaattgctttgataagtaatgtgataccagacttacattgtaatggagatagtcagtgcttccctctttacctatatgatgaagacggcacaaataagcgcgaagccatcactgatgatggcttgacccacttccagagctactatccagcacgacaactcactaaggaagatattttctattacatatatggcctgcttcatagtgaagaataccgcagccgttatggtgacaatttgagcaaagagcttccgcgtattcctcgggtgaagagggctgaagacttttccgctttcgttaaggctggacgggcactggctgagttacatttaaactttgaaactgccccttgctataaagtgactttggagagtaccgccagcgaagatagccactatcgagtagttaagatgaagcatccaaagataaaagtggatggtaagaatattaacgacaaagcaactattatctataacggacgtataaccattaaaggtattccagaagatgcataccgttatgtggtcaatggtaagcctgccatcgactgggtaatggagcgtcagtgcgttaagacggataaagatagcggtcttgagaacgatgctaacctctgggcaacggaaaccatgaataatcctaaatatccatttgaactgatactacggatgatcaccgttagcttggaaaccatgaaaatcgtggattctctaccagcactggagcttgagtaa

SEQ ID NO: 232731 - DNA, 660 bp, Klebsiella pneumoniae
atgggtaaaatcattacagttgcaggccataaaggcggcattggcaaaagcaccgtgctttgctccttatgtgtgtgtgtcatcaaaaaagggaaaacagcctgtttcctggaaacagattcacagggaagtatcaaggatttcattgaggaacgtcaggctaacaccagtctgtcggaaataccgtattacgagtgctacacagatattccggcgatggtgaaaaaactggccgcccgttttgattatgtgttcgtcgatacgcctggtatgaaatccccggcattcgtaaaagcacttagttgtgctgatgtcgtcctcacattcgtagaaccaggctccggcatcgagatcaatacgctgggacggctggttttcgacattaaaacagcacaggccggaatcaatccgtcaatgaaagcatggatcgttctgaataagtgcgcaaccaatccttcagacagtgaagcatcagaactgcgcaatcaacttaatgatgatcctgactggcttcctgttccccgtcagcgtatctatatgcgcactgcgcataaaaaagcctataactgtggtatgggcgtacatgaatacaacgacaaacgaggaaacaaagcccgtggcgagattgaattactgttaaaagaaacgaatattatttag

SEQ ID NO: 232732 - DNA, 303 bp, Klebsiella pneumoniae
atggcaaagctccccagaaaaataaatcaggaaattaaggcgctggatttacgccagtttgtaagttctgccgcacaaaaaccggcatcagcatcaacagtaacgcgtataaatttgaccatgacagatactgatctggatacagcgcaggagttccagaacgagtacggtgcaagccgtgctgaagttatcagggcggcactggcagcgttacgtctggtatcagcagaagaatgccggatgctgtttgatgatataaggaaaaacagtcctaaggccggaagaccaaccgttaacaaatag

SEQ ID NO: 232733 - DNA, 285 bp, Klebsiella pneumoniae
atgcttatgacagccattaaatctgtattcaatttttacatgctctgtgtgcagcctttacttggattatttctcgtgggttacagtatatggagcttttcaggtgacggtatctgtacagcagacaaagttatagcctgtgatatatcaatatatctggaaccagcattttaccttctcattggcagtgttgttttgtttgtatggtatattgcatggcagacagaacgctcgaaagaagaagattttaaatcaagcattaagccggaagattttgtgaagtga

SEQ ID NO: 232734 - DNA, 282 bp, Klebsiella pneumoniae; identical to SEQ ID NO: 12403

SEQ ID NO: 232735 - DNA, 225 bp, Klebsiella pneumoniae
atgtttacatgtaactatagccatgctcgcgataacctggcctcgttgctcgagctggcggttgatgaaaatcagcctgttgagattcagcgccgtaaaggtggcgcggctgtactggttgataaagacgcttttgaacgataccgtaaagcggctcttgatgctgagtttgctgagatcatgcaaagtcatgggacggcctatacggagctttctaagcgatga

SEQ ID NO: 232736 - DNA, 387 bp, Klebsiella pneumoniae
atgaaattcgttagttcacaggaagtgattgagtttcatgaccgcttgatttctcgtgatggtggcgtagcgggtatgccagaacccggtcgcgctgacgcgatcattcatcgtgttttgaacatgtatcattatgaaggtgtgacagatattatggacctggctgccgtgtatttagttgctattgctcgtggtcacattttcaacgatgcaaataagcgaacagccttgtttgtggcacaggtttttttaaaacggaatggtgtacatattattagttcacgtatttcgtttgatgaaatgcaaattatcgctttgaatgctgcaacaggagaatataactggaagatggtttctgaccatcttaaagccattattctaaattag

SEQ ID NO: 232737 - DNA, 858 bp, Klebsiella pneumoniae
gtgactgatcttcaacaaacgtattaccgccaggtaaagaacccgaatccggtgtttacaccccgtaaaggtgccggaacgctgaagttctgcgaaaaactgatggaaaaggcggtgggcttcacttcccgttttgatttcgccattcatgtggcgcatgcccgttcgcgtggtctgcgtcgacgcatgccaccggtgctgcgtcgacgggctattgatgcgctcctgcaggggctgtgtttccactatgacccgctggccaaccgcgtccagtgctccatcaccacgctggccattgagtgcggactggcgacggagtctgctgccggaaaactctccatcacccgtgccacccgtgccctgacgttcctgtcagagctggggttgattacctaccagacggaatatgacccgcttatcgggtgctacattccgaccgacatcacgttcacactggctctgtttgctgcccttgatgtgtctgaggatgcagtggcagctgcgcgccgcagtcgtgttgaatgggaaaacaaacagcgcaaaaagcaggggctggataccctgggtatggatgagctgatagcgaaagcctggcgttttgtgcgtgagcgtttccgcagttaccagacagagcttaagtcccgtggaataaaacgtgcccgtgcgcatcgtgatgcgaacagggaacgtcaggatatcgtcaccctggtgaaacggcagctgacgcgtgaaatctcggaaggacgcttcactgctaatggtgaggcggtaaaacgcgaagtggagcgtcgtgtgaaggagcgcatgattctgtcacgtaaccgtaattacagccggctggccacagcttctccctga

SEQ ID NO: 232738 - DNA, 249 bp, Klebsiella pneumoniae; identical to SEQ ID NO: 18900

SEQ ID NO: 232739 - DNA, 1083 bp, Klebsiella pneumoniae
atgacacaccatcttgggtatgagaaaaatcagtccagaccaggagctaactcccgcaacggttattccacaaagaccgttatcacaggcgacggtccactggaactgcgtactccgcgcgatcgtgacggtaccttcgaaccacaactggtaaagaaaaatcagacccgtattaccgggatggataaccagatcctctcgttgtatgccaaagggatgaccacccgtgagatagccgctgcgttcaaagaactgtatgacgcagatgtttcaccggcactgatatcaaaggttaccgatgccgtgatggagcaggttgtagaatggcaaaaccgaccactggatgctgtttaccccattgtttatcttgactgtatcgtcctgaaagttcggcaggacagtcgcgtcatcaacaaatcggtgttcctggcactgggcatcaatatcgaaggtcagaaagaactgctgggtatgtggctggccgaaaatgaaggggcgaagttctggctcaatgtgctgactgaactgaaaaaccgcggtctgaacgatatcctcatcgcctgtgtggatggcctgaaaggcttcccggatgccatcaacacagtatatccgaaggcccgcatccagttatgcatcgtgcatatggtgcgcaacagcctgcgcttcgtgtcatggaaggactacaaagccgtcactcgcgacctgaaagcgatttatcaggctcccacagaagaagcaggccagcaggcgctggaagcgttcgccagcgcctgggacagtcgctacccgcagataagccgaagctggcaggctaactggccgaatcttgccacgttcttcgcttatccaacggacatccgcaaagtgatctatacgacgaatgccatcgagtcgctaaacagcgtgctccgccatgcgatcaaaaagcgtaaagtgttcccgacagacgactcggtgaaaaaagtggtgtggctggcaatccagtctgcgtcccggaaatggacgatgccgttgaaggactggcgaatggcaatgagccgctttattatcgagttcggtgaccgcctggacggtcacttctga

SEQ ID NO: 232740 - DNA, 543 bp, Klebsiella pneumoniae
atgttgaagaactatgcgtttgtgaaaacgtcgatacatacagtcggtatgaccctgaagtctccacctctggcatcgataccgggtatatccgacgcctctcaggcatgtgataaaatctctgccaggctgcgttatggcatcattccccgaccggagggggtcaaccgtctgaatgccatattgtggcttgcaagaatgcgagaggccgggattcatgggcagtcatcagcgacggcacatgagcttgggcggctgaatgttttgctcgggcaggtcagcggtgtgctcaaagcatgctggatttaccggggatgggaggcctcgcgtgcatcgactatagtgtccattctgctgattatccctgcattcctggtattttggctggcgctatatgtcggggggacgattctggtctgttctgtcagtatggcgttgtttcttggtgttggcgtcgtgattaacttatggatcaaagatcctgtgggacttttctggtcgctgtacagctatatacctttatatgccatcatttatatgtga

SEQ ID NO: 232741 - DNA, 675 bp, Klebsiella pneumoniae
atgactgggttgcttatctttttagttttgttaactgcagcccttcgctttcgcttcaaagataaccattctcttttcataaaattgagaagaccatttcctgccgaacttacgttattaatactgtctttagcgttgtgctttacagcacagaaaaccctctgtttattcacagagaatgtttatcttttttattctatgacatttgtgtcagttgtagccgtctggtttgtttcttattttttatcgtcatcaatattaaaaaccccgattaccgatatggtgctgactccctgtctgtcgaaccttcgggtagatatcaaccgtggatatacggaagctatgtctcaaccaggatcttatgaagacatcgccgagaaaaccgcagcagatatcagctaccttttgagtcactttccctgtaaggccatcacattcgagtcacacctcttaaggccgggactacgcaaagtcttatgtaacaacctgagagaaagaggaatatcattcaccgtaaaagaaagattaactcatcttcctgaagcaatggttctcaatctgagatacggtggtaaaacacgctatcgccttttcacctactgcaaacaccccaacggattcaaagtgcatcgcaatggcggcgcatttaaaatttataacgataaaaccctttga

SEQ ID NO: 232742 - DNA, 597 bp, Klebsiella pneumoniae
atgtatgattgtgatcctgtaaacgagttcacttatgttcgtgataggttaaacggcatttttcttcgcctctcggaagaaccttttatccgactgagtaaaaaaagaatcatacaacgccacctctcggacatacagtggatgttgaaccacaaccattaccctacaccgggacaggtggatttttttatcagtctgttgcgggatgataaattcagtgtggtcagagaggaaggacgacacacaaaaagtgcagcagatattcagctgatgatcgatgcactaaaggatatccgggattttttaaagctgattacccggtatgaaacagagggggatattatcaggcttacatcgtgttcagcctggagaaatacagcgttatatctctgtcttgctgctttctttgcattgtttatagctcaggttgttatattttcaggctattcccccctggctgtttactttagtggtttcgccttcttttttataacatcgctggttctagaaaatgaagtgctgatattttctttcatcggtctggttgtctttactctatgcatcctttttgcatggacaggtcattatcccggataa

SEQ ID NO: 232743 - DNA, 564 bp, Klebsiella pneumoniae
atggatataatagaaaaaagaatcacaaaacgacacctcagtgaaagtgaattatcaggtgtaaattattacaattgtatatttgaacgaatacagcttgacagctttaactttcgcgattgtgagttcgaaaaatgtcgcttcgtaaactgctcaataaagaatttaaaacttaatttttttaaacttattgactgtgaattcaaagattgtttattacaaggagtaaatgcagcagacattatgtttccctgtactttttctcttgtaaattgtgatttgagatttgttgattttattagtttacggttacagaaatctatttttttatcctgtcgcttccgtgattgtttatttgaggaaacagaccttcgtaaatctgattttactggttcggagtttaataatacagagttcagacattctgatttgtctcactgtgatttttcaatgacagaaggtctcgatataaatcctgagataaacaggatcttatctataaagataccacaggaagcaggtttaaaaatacttaaacgaatgggagtggttgtagggggatga

SEQ ID NO: 232744 - DNA, 732 bp, Klebsiella pneumoniae; identical to SEQ ID NO: 7647

SEQ ID NO: 232745 - DNA, 726 bp, Klebsiella pneumoniae; identical to SEQ ID NO: 7646

SEQ ID NO: 232746 - DNA, 1191 bp, Klebsiella pneumoniae; identical to SEQ ID NO: 7645

SEQ ID NO: 232747 - DNA, 819 bp, Klebsiella pneumoniae; identical to SEQ ID NO: 7644

SEQ ID NO: 232748 - DNA, 2391 bp, Klebsiella pneumoniae
atggttcaccaatctgacagcgatgaattatcggcactgcgggcagaaaatgcccgattgatttcgctacttgatgcccatggaattgagtggagacttaagcggcaggctccggtgcaaaaattatcaaccttatctactgacgacaaggttgcgctgtttcgccgactgttccgggggcgggatgatgtatgggctctgcgctgggaaagtaaaaacagcggaaagtcgggctattctcccgcctgcgccaacgaatggcagccaggtatatgtggtaaaccccgaataaaatgtagcgactgctctcaccgccagctcattcccgtatcggatcccgttatctaccgacatctggctggcgaacacaccatcggtgtatatcctttgcttgaagatgacttctgttattttctggccgttgattttgacgaagcagaatggcaggccgatgcgtcagcgttcatgcaatcctgtgatgaactcgatgtgccagctacactggaagtatcaagatcgcgtcagggggctcatatctgggtgttttttgcgtcccgagttctggccagggatgcccgccgtctggggacagctattatcagtcatacctgtaaccggacccgacagctccagttgggttcatatgaccggttgtttcctaatcaggatattatgccaaaaggtggattcggtaacctgattgcgctgcctctgcaaaaagggccgcgagagtcgggtgggagtatttttgttgatgcaaccctccggccttatcctgaccagtgggctttcctggcgtcggtgataccgatgaacgctcatgatattgagccgacgatattacgggctaccggaaatactcatcctctggatgtgacctttatcaacgaagaggatttggccacaccatggaagcccgaaaaaccatcagataccaggcttaacattccgctaccggattcactgaaggtcacgcttgctaacctgatctacttcgagaaagcacaattaccccaagcgctggccaaccgactgattcggctggcagcatttcagaaccctgagttttataaagctcaggccatgcgcatgtcagtatgggataagccccgtgtaataggctgtgctgagaattatccccagcatattgctttgccccgtgggtgtctggatacggcgttatctttactgcacgacaacagcattgcctgtgaaataacagatgaacggttcgcaggaacagcatgtgatgtgactttcctgggaaaactgaggccagaccaggacgctgcggtttctgagttactgcgccatgactgcggtgtgctttgcgccccaaccgcttttggtaaaacggtcactgcggcggcagctatcgcccgtcgaaaagtcaatacgcttgtgctggtacatcgaactgaattgttgaaacaatggcaggagcgcctccgtctgtttcttcaaaccagtaacgatattggtgttatagggggcggcaaaaacaaacccggcggtgatattgatattgcggtgatgcagtcaatatccaggcatggagaggtggctccactggttaagaattatgggcaaatcatcgttgatgagtgccatcatattggcgcggcttctttcgatgcgatactgaaagaggcaaatgccaaatatgtgctgggactgactgcaacgccggttcgacgggatggcttacatcccatcatatttatgcactgtggacctattcgccatacagcagcccgtcaaaaagaaagtccccataatctggaggtcgttccccgtacacgtttcatacacgggaatctgccatctgatgccagaatacaggatgttttcagagaaatagcgctggatcaggaaagaacgtcagctattgctgatgaggccagaattgctttcggacaggggcgtaaagttctggtgctgaccgaacgtaccgatcacctggatgccatagcgtccgaactggtactgctgaaattatcaccatttgttcttcacggacggttatcgaaaaaaaagcgtacgacgcttatttccgagctgaacaccctgccaccggaggcgccccgtattctgctggcaacaggtaaactggttggcgagggttttgatcatcctccactggatacgctggttctcgccatgcccgtgtcgtggaaagggacgctacagcagtatgctggccgcctccacagggagcaatcgggcaaaactgatgtcagaataatcgactttgtggatacgggttatcctgcgctgctcaggatgtgggataaacgtcagcggggttataaggcgatggggtaccggatcgtggctgaaaatgatgcagagcctgattcaggaatccccgtcaaattaacgttatggtaa

SEQ ID NO: 232749 - DNA, 276 bp, Klebsiella pneumoniae
atggtctttaagccagtcaagagcatccagtaccggatggtggcgactgttaccagagcaaaaggtcagcgcatccagtatcttgggcagcatacggcggtagtggttgctgtaggaggacctgaggatcttatgaacctgctgctggtaagccgggcccgacgatttaaattctttcaacaggcttttcagcgtgtcctctcccgcaaccgggtacacaacctctttaaccagcccctcaggattattcaaaaccgcttccgctatccggaataa

SEQ ID NO: 232750 - DNA, 4092 bp, Klebsiella pneumoniae
atgaacaaaatatatgctctcaagtattgccatatcactcagacaattaaagtcgtttcagaacttgccagaagagtgagcagaaaatcagtctccggtaaaaagaaactgtgtcttccggtatcttttacaatcataatgatatcgccgttcgccattgcctccgttgtcaaggggaatatcccttatcagacataccgtgattttgcggaaaataaaggggtatttcaggcaggaaagtcggatatcataataaaagataagaacggaaatattcccggaacgctgaattccgctccgatgccagacttcagtgcaacagacacgagtggtgttgccacacttgtcagccctcagtatctgtccggtgtccggcataatggcggatacacaggcgtcagatttggtgatggagagaatctttatcatctggtcagcagaaacaatgcttcagatatggatattcatactccacgactggataaacttgttacggaagttgtgccggtgggggctgccagcactgatgcgtcatttaaccacagcagccagtattccgctttctatcgactcggttccggctctcagttgataaaaaatgatgacggaaaaaacatcagtattactggtgcttatcaatatctgacaggaggaacggtcgccggcctcagctattacaactggtttggcggtacactgatggcatccaccgcagatctgacctctgctcagggcgtgcttccttctcatactcagggaggagacagtggctcacctttgtatgcttatgataaagctcagggtaaatgggtattggtcgctaatctgtcttccggctcaggaaataacgccttatggtctgtggtttcagctggcaggatccagaatatcatggatgcatattctgatggtctggtgaattatgacaacacttctcctgagaatattatctggtcgtttgatgccagcgaaggggtgggcagtctgtctcagggaaatgaagcccatacaatgcatggtaaaaaagggaacgacctgaacgccggtaaagacctttctttcagcggacataatggtgttatcgatatccgggataatgtgtcgcagggcgcaggttccctgacattccatgatgattatacggtgacaaccactaatggcagcacctggaccggggccgggattattgtggatcagaatacgtccgtgaactggcaggttaatggtgtgaaaggtgacaatctgcataaaattggccagggaacgctgattgttcagggaaccggtgtgaatgagggagggctgaaagtcggggacggtactgtcatcctgaatcagcaggcggacagttcagggcaggttcaggctttcagtagtgtgaatatcgccagtggtcgcccgactgtcgtgctggcagataaccggcaggttaatccggataatattagctggggataccgtggcgggatcctggatgtaaacgggaatgatctttccttccacaatatcagtgctgcagattatggcgcgcagttgcacaacagcagtgataaagaggcgactgtttccctgacgataccggatgccattgaatggaacggaaaggatacacaaagaatttcaggtcaggtgtataagtactttaacacggagtcacaaacgacagaattctttgtattaaagacaacgagtgccgggtggagtccctctccggcagaaaaacacctaccggaaatattccggggcgcggattatttcagctcacaggaagaagcaaaccgggaagcctcggctgacagacaattaatttaccatggtaaattaaccggtaatatccgttttgatgccggcagggtgggtaaatttgttatggatggctctgctgacatcggggggacgttcagcaaagaggacgggcgtctgaccatgcaggggcatcccgttattcatgcatttaacagccagagcattgcagacaaggttgctgctaccggtgatggttccgtactgacgcaacccacgtcatttacccaggatgactgggaaagcaggacattcagtttggggatgctagagttaaaaaataccgactttgggctgggacgcaatgccgcgctaaacacacacattcaggcggataactcacgtgtcacactgggcgacagcagagtgtttattgacaggaatgacggcaacggaacagcctttaagctggaagaaggtacctctgtggctgttaaagatgcagataaaagcgcgttcaacggaactgtcagtctgagtaatcattctgtgctgaatatcaatgagttttttaatggtggaatacaggctgataacagtacggtaaatatctcctcctctgatgctgtactggactcttccacactgacggggacagcacttaatctgtctgaaggtgctgatgtgcttgtcagacagaacatcatttcagacggagtagtgaatattgctgatgcggcgctgagtctgaacagtcgctcaggtgagttttcccgtacgcttttaccgctgtacagttatgcaggggcatggaacctgacgggagacaatgccagtctttatgctggtccgttcactctgttatcgggggatatgaccgttcagggaaaaggacgcgtcaccattggtggtgagggtgaactggatccggacctgcttctgcaggacagggtgttctacagtgtgtttaacggataccggaatgtctgggggggacgtcttgatgcgcctgacggcaatatcagtatgacagactctcagtggtcagtgaaaggtaactccacggcagggcatcttaaactgaagcggacaatggtcggttttggcggtgatacatcatcattcaccaccctgacgacaggcagtctggatgcggttcagacatcgtttgccatgaggacggatctgaaaaatgcagatcgtctcgttatcacggactccgcgacaggtcatgacaacagcatactggttaactttcagaaaaaaccgtctgacaaggactcgctcagtattccgctggtcagcgccccgaaaacggcagcagatgatctgttcagagcttcaacacaggttgtgggattcagtaatgtgacacccactatcagcatcagagaagatgacgataaaaaagaatgggtccttgatggttaccaggttgctcctgatgaaggacagagcagggctgtcgccacattcatgcatatcaactatagcaacttcattactgaagtcaataatctgaataaacgcatgggagatttacgggacatcaataccgaagccggtagctgggtgcgcttaatgaacggctccggctctggggaggctggtttcagcgaccgctatattctgctgcagatgggggcggaccgtaagcatgagcttgataagctggatctgtttacggggattatgggtacctataccgatactgatgtgtcagccggaatgttcagtggtaaaacgaagtcatggggggctggaatctatgccagtggcctgttaccgtcaggcgcctacttcgatctgattgccaaatatatacacaatgaaaaccggtatgagctgagctttgccggggccggtaagcagaacttccggacacattcgctgtatgcaggtgcggaggctggttatcgctatcgtctgacagagacaacgtttgtggagccccaggctgaactggtctggggaaaactgcaggggcaaacatttaactggcataatggtggagtggatgtctctatgcgccgtgacagcgccagtccactggtcggaagaacgggggttgtttcaggtaaaaccttcagtggtaaggactggagtctgacggcacgtgccgggctgcattatgagttcgacctgacggacagtgctgacattcatctgcaggatacggcaggtgaacatcatattaacggtggaaaagactgtcgtatgttgtatggcgtggggttaaatgcccggctaggcgacaatatacgctttggtctggaagcggaacgttctgcatttggcaaatataatgtggataatatgataaatgccggtatcagatattcgttctga

SEQ ID NO: 232751 - DNA, 483 bp, Klebsiella pneumoniae
atggaaataaatgtcaccgcgccggcattgctgacagatgagcatatacttcagccatttgactgtgggaatgaggtgttaagtaactggttgcgtggtcgggctatgaaaaaccagatactcaatgcttctcgcacgttcgtcatttgtctggaggatactttacgtgttgtggggtattactcattagctactggttctgtcacacatgccgagcttgggcgcagtttgcgccataatatgcccaatcctgtacctgttgttcttttagggcgtctggctgtcgatgtttgtactcagggacatggtttcggtaaatggctgctgagtgatgccattcatcggattgccaatctggctgaacaggttggcattaaggctgttatggttcatgcaattgatgatgacgccagagttttttatgagcattttggttttgttcagtcagttgtggcacctgataccttgttttataaaatttga

SEQ ID NO: 232752 - DNA, 291 bp, Klebsiella pneumoniae
atgtccactgcagcaagcgtccgtaaaataccgcgagaaaatcagattaacatccgggcaactgatgaggaaagagccgttattgattatgctgcgagcctggtcaataagaatcgtaccgatttcatcattgaactggcttaccaggaagctaaaaacatcattctggatcaacgtttatttgtattggataacgaaggttatgattcgtttattacgcaactggaagctcctgtacagaatgcagaagggcgtgaacgtctgatggcggtaaagcctgaatggaaataa

SEQ ID NO: 232753 - DNA, 678 bp, Klebsiella pneumoniae
atggaagaaaataatacgagtacagataaaaacaccctgacagcccttattgattatgaaaactgtggcagcctgaaaaatatttcccttgagcagtatggggaactgattatttttgtcgggccacagcagaacgtcgttgttcttcctgcagactcttttcctgaaggtgcgagaatcactatcaggcaggtgagtggtgtgtccaggaataatgtcgattttcatcttgttctggagctggggcggataagctgttgtgcagcagggaaagataaaacataccacatcatttcatcggataagggatatgactgtgttatcaggacgctgaaagaagccggtattacctgcatccgtcgtgatgtaccggaaagtattgctgctgccggtgagtctggtgcagacaaaagtaactgcctgaaacaaccttctgttcctgaaagtgatatcgtcagccgttgggcaggaaagctgcagcagatagccggcagcggagccggtaatatgcctgtgtccgtcgaaacatttaataattatttaaagtcacacatgcgtgacgaatggaacaaaacccgggcagtggcgataaggaatgaactggttcgtcggggagtcacagaagtcagggagaaaaagataatctggaaaaaggcgaaaaaggagaataaagcatga

SEQ ID NO: 232754 - DNA, 246 bp, Klebsiella pneumoniae
atggaatggttttctgatataaaaaattcgaagattgatctatcaattattataccgatgtataatgttgaggattatattattgaaactttgaattccatgagaggtgtcaggggtttcaaagttgagttaatactcgttgacgatggaagcactgataatacgcttaacctcgctaaagaatgggctaatagtagtgattttgatactttcattttaagtaaagaaaatgggggccatcaatag

SEQ ID NO: 232755 - DNA, 1398 bp, Klebsiella pneumoniae
atgaacaacgataccggtttacgcaaaaatacgttgggcttgttttctctggtcttttttgtagtggcggccgcgtcgccgctgaccggtgtggtcggaggcctgccggtggcgattatttccggcaacggcggcggcattccggtgttttacatcctgtcgtgcgtcattttaatgctattcgcggtaggctttatcgtcatgagccgccatgtgaataacgccggggcgttctacacctacatcgccaaaggtctgggagacaactggggggcttccgcgtcggtgctggcgttgatggcctacttctctatccagatcgccatcgtcgccatgctcggcttctttacccaattgttcctcgaagaacatctcagcacccatattccctggtgggcgctaagtatgctgtttgcggtgattgcctgggtgctgggcatcaagcgggtcgaggtggggggtaagttactgggcgtgctgatgttggccgaggtcgcaattgtgctgctgaccgatgtgatgctgctggtgaaaaaaaccggtccctacaccttccagtcgtttgaaccttccgtatttatgcaaggcaacctcggtatcgcctttatctttaccatcgcttcctttatcggttttgaatcgacggcaatctatgcggaagagtgccgcgatccgcagaaaaccgtgccgcgcgccacgatttgcgctctgctgctgatcaccgcctttttctgctttaccagttggtcgctggtgcaagcgtatggttttgatgaaattgtcgcgattgccagcaaagatcccggcaattttgtcttcaatatcacccgtcagtatgtcggccagtgggcggtggataccatgtcggtgctgttgatcaccagcctgttcgccgccaccctggcgtttcacaataatatctcccgctacctgtttagcatcagccgtgatggtctgatatggaaagagctgtgcaaaacccatcccaccaacggtacgccgcataatgccagccatctgcacagcgtgatcctgctgctgttactggcggggatggggagcgccgagctggacccgatggtgcatatctttgccatcgggtcggccgtcgcgaccctgtgtatcctgattctgcaattgggcgtttccgcggcggtggtactgtttttccgccgcgtcgcaacggatgacagccggtttcaggtgttctgggcaccgctgctgtcgatgatttgtatgaccctcaccatcattctggtggtgaacaatctgcaatccctgagcggcagcgattcccgcgtagtgaagatgattccgtggtttatcgccgcctgtgcgttggcgggttacggcatgtcattgaagcgtgggatgaaagtggcagtgataaaaaaataa

SEQ ID NO: 232756 - DNA, 942 bp, Klebsiella pneumoniae
atgaagaagaaaagcagcacacccacaccccacgatgccacgttcaggcagttcctgacgcaaccggatattgcacgggatttcatggaaatccacctgcccgcagagttgcgagcagtctgcgatctcagcacgctgaaactggaatcaggctcgtttgttgaggatgacctccgccagtatttcagcgacgtcctctacagtctgaaaaccacagccggcgacggatatattcatgttctggtcgagcaccagtcaacgcccgacaaacatatggcttttcgcctgatacgctatgcggtggccgccatgcagcgccacctggaggcagggcataaaaagttgccactggtgataccggtgctgttctatacgggtaagcgcagcccgtatccgtactctacccgctggctggatgaatttgacgatccggcgctggcaggcaaactctacagcagcgctttcccgctggtagacgttacggtcattccggatgatgaaatcgccaggcatcgcagtatggctgccctgaccttactacagaaacatattcatcagcgggacctggcagaactggttgatcggctggcacccattttgctggccggatatctgtcttcatcgcaggtcatatcgctggtacactatatcgtgcaggcaggcgaaacatccgacgccgaagcctttgtacgcgaactggcacagcgtgtgccgcaacacggagacgcactcatgaccatcgcacaacagctcgaacaaaaaggtattgagaagggtatccagcagggcatccagctgggtgaacaacgtggtattgaaaaaggccgcaatgaaggcaagctggaagttgcccgtaccatgctggaaaacggcatcgatcgcaataccgtcatgaaaatgacaggtctgtctgaagacgacctggcgcagatccgccactaa

SEQ ID NO: 232757 - DNA, 609 bp, Klebsiella pneumoniae
gtgacgctgacagaaaaatcgggccatctggcatggtgcgccctggtggcgcttgcgctggccagacagaacggcgatgcgctgtcaccggcacaggaaaatctctttcttacccgctggctggcgaccgcgctgaagcaacggcgtttttcgcgtgatgtggcgcccgatatcgagtggcttctgaaacagggacgccagctgggcgtcagcgcgaagctggccagcaaactgaattacctctggcgctcctgcaccggcgaattgtctgagcaaaacgacctgttccggctgacgtatgccctggaaaccgcgaaagacatgagctggaattaccgtctgttgagcgacagggaatggtccggccggtatgctgtagcactcagtgcgggcgtgaacggcatttatctctcgcggactaacctcgacgcggcgtttgacgacgatgggcgacagataaatccactgctgacgcgcctgaccggtaatgttgggggcgtggtaaagctgtttaatcgctgtggctggcatgcagagtctgaaggggatgcctccctgccctaccagtttacgctgatggccagacagggagtctcaggaaaggattag

SEQ ID NO: 232758 - DNA, 837 bp, Klebsiella pneumoniae
atgacggccagggtgagggacttgggccagctaagctggctttccgaacaggcgggcagtgaacgtcgggtgctggcgctggacgaggagcaggatctggtggtggatcaaactaccgagcaggtgcgcctccttatgcgcgtcaagcaagtgctcaaagatcgcgcgctgatgctctatgcgcaaccgattcagaatccggagggggagggttatcatgagatcctcacgcgcatgcgctgtggcgatagcgtcattatgcccgaccgattcattccgctgattgtgcagtttaacctcagccaacgttttgacatgctggtgctggagaccttgttcagtatgctccataagcatcccggccagcgattctcggtcaacctgctgcctgcaactctgatgcaaaagaacagcgcagggcagattatcgcgctgtttcaacgctatagcgtctcgccagaacttataactattgaggtgaccgaagagcaggccttctctaatgcggacaccagtcggcaaaatcttgaagcgttgcgcgcgtttggctgcgccatcgctattgatgactttggcaccggctatgcgaactatgaacgtctgaaacatctacaggccgatatcattaagattgacggctgcttcgtccgcgacatcctcacggacccgctggacgccatcatggtgaaatcgattgtcgagatggcgcgggcgaaacagatgagcgtggtggcggaatatgtcgaaagcgaaccgcaaaaagcgcgcttgctggagctgggcgtgaattatctgcagggttatctgatcggtaaaccacagccgctgggtgaatga

SEQ ID NO: 232759 - DNA, 2934 bp, Klebsiella pneumoniae
atgttgttacaggagaaggcttttgatgacatggacgagtggcatttgcttgctgacgagctttccctgctaccggggatgaccgatacggggcgtctgggatttgcccttcaactaaaattccgacaggttcagggccattatcccgactctgtacacgatttcccttccggcattgtgcacaccatcgctgagcaggtcggatgcgcttccgtatcccctgaaaactatccgtttcagggacggcaggctcagcgacaccgacaacatattcgtcgctatctgggtgtcagactccccagtaaagctgatatcgcacgactcagcgcttggttaaccgaatttatcctcccgttaaatccgcaggccgtacatggcagtgaacttgttactgactggtgtcaggaacagctgattgaacggccagtcaccgagcacctggagcggattatacgttcagctgtacaccagttcgaaacaaagcaacaaaacaccatatttacccgactttcactcgacagtaaggttgccatcaatcatctactgtctgccgaagaaccgggcgctgcccaggtaaacgaagtcacattcagcggcctcaaagctgacccgggaaggcccagtctggagaatgtcctttccgtcatcgcccaactaaaatgccttgatggtgttgcgctactgccgaatatttttcaggacatatctcctaaattcatcgtccagtttcaacaacggtgtgccagtgaatcgatcagggagcttcgtcgccacccttcagcgatccgttacagcatggtagctatgttttgctggcgtcgccgccagcaactgaccgatgcgttgattgagatgttgatggtgctgatccataacctcggtacccgtgctgaaaaaaaggtcgataaaaagcagtttgcggcgtttaaaaaggtcaggggcaaggcgcgtctgctattccgcatggccgaggctaccgttgaccagccagacggtgtcataaaggaagttgtctatcctgttgtctcacagaaaatgctgcaaaatctggtcgatgaattcaaaactctgggggtgaatactgagcaggaagtacatgaatccatgcgttcttcttacggtaaccactatcgcaggatgttgatgccggtactggaccggcttgagtttcagtccggcaatgccctctatcggcccgtgattgatgctatccagattattaaggaaaacaggaccagcaatcagcatttctatgcggtgggtgatgtgcctgttgacggtattattcagaaaaaatggcgggatgttgtcatcgtacagagccagtccggtgaagagcgtattaatcgtatcaactatgaaatttgtgtattacgggctttacgcaaaagtctgcgcaacaaagaaatctgggtcaccggcgcggatcgctatcgtgatccggcagaagatctccctgccgattttgccactaaccgcgcatattattattccctgttgcaggcacccactgatgcgacaacctttattaatcaaatcaaagacaggatgcgccagtggctcggtacgctggataatggcctgccggataatcccagacttcgcatcagggaacaggggaaaaatcgtatccacctgacgccgctggataaacaaacggagccgcccaacaccgcagcgctgaagcaggagattggccagcgctgggccgatctggagttgatagacatactcaaggaggtggatttacgggaacatttctcgtcgttatttcgcacatcggccagtcgggaagtgctggagcctgaggtattacaacgccgcctgttgttatgtctgtttggcctcggaacgaatgtagggctgaaacgtatcgccagccagcaaccccgcgtcagttatgatgaattgcgttacgttaaacggcggtttattcagaaagatgctttgcgctcagcgatttcacatattgtgaatggtattttccgaattcgtcagcccgctatctgggggaatgcgacgacatcctgtgcggcggactcccgaaagtttggtgcttatgatcagaatctgatgacagaatggcatgctcgctatggcgggcgcggcgtgatgatttactggcatgtggatacgcattccacctgtatttattcacaattgcgccgctgttcctcatcggaggtggccgccatgatggaaggtgttctgcgtcactgtaccgacatggaaattaaccaccagtatgtggacagccacggacaaagtgaggtggcctttgcgttcagtgatgtgctggggttcgatctattgccgcgcctgaaagcgatcgcccgacagaaactgtatgtgtgtgaaaaggaagatacatcgttgtacccgcatcttacgccgattttaacccgggggatcgactgggagcttattgcacaacagtatgacgagataatcaaatatacagcggcacttaaaaccggaacggcagaacccgaggccatattacgacgattcacccgcaataacattcagcatccaacctataaggcactcgcggagctgggcaaagcgattaagaccatcttcctctgccgttatttacacgatgagtcactgcgttgcgaaattaatgcgggtctcaacgtcgtggaaaactggaacagcgccaataattttattttttatggcgaacacggagaatttaccagcaaccggcctgcggatcaggaactgtcgatgctctctttgcacctgttgcaaatcagcctggtctatatcaatatcctgttgattcaaaatgtgctgacagagccggcctggcagcagagaatgacagaagaagactggcgtggtctgaccccattgatataccaccatgttaatccgtatggacgtatcgagctgaacatggatcaacggctggcgctggcagcctga

SEQ ID NO: 232760 - DNA, 1011 bp, Klebsiella pneumoniae
atgaaagccgttggtttctggcaacccggggaaagtacatccgttattgaagatttgtcgcttccccacccatccatgcccaagggacgtgatcttttgatcagagtcagggcggtcgcggttaacccacgggacctgaaaagccggcgaaacatcagtccctctgcaggcaatccggtagttatgggatacgacgcttccggtgttgttgaagcaaccggaccagatgtgacgctgttcaggccaggtgaccacgttttctatgccggtgtgctcgatcgccagggagccaacgcagagtttcagctggttgacgaacgcattacggggataaagccggcagcactaagttttgaagctgcagcgtcggttcctctgaccggtctgacagcctgggaaatgttatttgatcgtctgcagttgtcagtgaacggagatgctgatcagaccctgttgatgcttggcggtgcgggcggagtcccttgtatggctatacagcttgcccgcactctgagtcgggtgaacatcatcgggactgcctcccggcaggagagtgtcagagcggttcgcgggtttggtgcgcattatgtcctggatcattcatgtgcgcttgcgccacaggttgccagccttgctggactccctcccattacccggattttctcaacgtacaccacgccatctgcctgggaaaatatggccgaaattattgccccacaaggccgtatcggactcatcgacgaccctgaaccactggatctgcgtttgatcaaatttaagagcgtttctgttcactgggaggcaatgtttacccgccccatgcatgctactgcggacatgtctaaacagcatgatattcttaacaaactctcatgcatgctggattccggtaagctcaaacctccgttgctggcagagtatggcaggctgaatgctaaagcacttcgccgggctcatgaggacatggaaaataaaaatgtgaacgggaaaattgttttttcagggttctga

SEQ ID NO: 232761 - DNA, 219 bp, Klebsiella pneumoniae
atgttagtgatgtttgcgccgttctttatttttatcttcgggccactgttacaatacaacattttagtaggatcgattgttggtggtatttatctaggcttttgttttaacgccggtgcgccagcagtagaggcatttatcgagaaagtcagccgtcgcagtaatttcgaatttggtcgcgcgcggatagtacgtattattggctcatcgttcgggtaa

SEQ ID NO: 232762 - DNA, 1353 bp, Klebsiella pneumoniae
atggactttacggaatatcaagaagaaataatcgaagatgtaaaatcttgccttgaaagcttacaagtccaacccatcttattcatgggtgcaggaatttcgcaacgatatataaaagcgcctgactgggaaggtctactgaagcaacttgcggaaatctgccctttgatcaaacgcccttatggttactacagccaaacaaagggtgataacaagccattgattgctagtgatttttgcgactattatgccgagtgggcttgggatgaaggcaagaatcgctatccagaaaaatactttgaaggaacgacttcaaaagatatttatcttaagcatgaaattgcatccctcctgaataaattatcaaactctgttgatttctcgaatatggaatatacagaggagattcagaagttaaggaaggtaaaaccacatgcaattatcacaacaaattacgacgacacaatagaaaaaatatttgataactatcaggcaatagtaggccataacgttgttaaagtaaattattcgtcttatggcgaaattatgaaaattcatggtagtagtcatgaagttgaaagtattgttattacaaatgaagattatattgatttttataagcgtaagaaatacatcagtgctaagttgctaacttattttgctgaacaccctttatttttctttgggtacagcatcaatgatgaaaatataaaggcgattctctctgatatagatgaaatcatagcgcctaataatgcattgattccaaatatttatcttgtgtcctttagtaagaattgcgaggccactggttctcatcagaaggaattgttaatcggtgttggtgacaataaaagcattcgaatcaaggtgatatacgcgaatgattttggctgggtttttgatgcgttgtcatctaatacaccagaaattagcgttaatccaaagcttgtgcgtgcattcttagccagaacttacacttttgcatcagaatctcttgtaaaacaggagcttccatacgattttgagatgttccgtgatattgcagaacatgatgatgcattagcaaaaatgtatggtattgctgaactcaataatgggcaggctctaaatgctagtttcccatatacaatgtctgatctggctaggattctcgacatggggtcatggcactatgttaatcaagaatttgaaaaattaagaaaactaactggcttcaatattaaagcatcagacaacaattatcatgttttcataaaatcggggaagagtggtgtcggtaaatattcatctgaggcacttgatttattgcggaagttgataagcggggatacttttgagttaaatccataa

SEQ ID NO: 232763 - DNA, 1131 bp, Klebsiella pneumoniae
atgaaccaaccacgcgaagtcgttattgtcggtgcgggtccggccggggtgggtatggcggcgcttcttcgtcgtagtgccatacaggatatcctggtcgttgacagtcacgaagtaggtgcctcctttatgcgctggccggaagaaacccgttttattactccttcttttttttccaatccgtttggacaaccagacctgaactctgtgacccctgacagttcattggcgcttttctgcggtgaagaacatcctggggggaaaacttatgccagttaccttaaggtcgtactggatgagtatcagatacccgtcatggctcccgccaggattgcaaaggttgcgttgctcagttccggtaattttatactgacaacagaagcaggagagaagctggaaacacgctctttaatatgggctacaggcgaattccagttcccggaccggctgatttttcctggggcagatatttgttgccattacggtgatgtgaccagctggaaggatttcaggaaaggtgaatacattgttataggcggctatgaaagcgcggtggatgccgctgtaaacctgctggaaaatggctcatcggtaaaaatgttaacccgctcagccccctggtcagctaaccacatcagcgatcccagtctgtcgctttccccttatacccgtgagcgtttgaacagagtgatgaatcaccgtcttttcgaaatttatgaagatgcggatgtctgtgaagtaatcagaatgcccggcccgggaagttcgtacaaagtccataccacaaacggacgcgcctgggctactgacgaggtgcctgtgcttgctaccggcttccagtgtggcgggggagcaaggcaactggctgctttttttgaatggaatgatgatggctatccggtcttaacggacgaagactgttcaaccttgtttcccggtttgtaccttgtcggccctcatgtgcggcatgccggtaatatttattgctttatctataagttccgtcagcgctttcccgtcgtggcagaaagtatcacgcgtcatctgggcctgtcctctgaaggagtacgggactggtgggttctgccttcagagcctgactgctgtgccgatgaggactgtgcgtgctga

SEQ ID NO: 232764 - DNA, 408 bp, Klebsiella pneumoniae
gtgaagttgaaccaactggccgagctgcgcattaccaaggctctggcagaggtcgatgtgaccaacttttacgacttcctcgacctgctgaatgcagagacgcgcatgaacggcggcaaccacacccgcgccaacacggaagacgtactgatcgccacccgcggagccgggctggagcgcaagcacgccggcattaagcaggtggtctacagcccactcggcgcgcacagcgagaagccgtgggaagttcgccaccgcctggaactgctctacggcgacgttccgcggattgagctgttcagtcgcagcgcagcgccaggctggagccactgggggaaccaatgcgccacttcagttgagctgatacctggctgcgccattgacgttgtgaagacggaggcagcatga

SEQ ID NO: 232765 - DNA, 864 bp, Klebsiella pneumoniae
gtgactgaatcccgtgagcagctctcttattatcggcaggttaaaaacccgaacccgattttcacgccgcgtgaaggcaaaaagactctgccgttttgccgtaagctgatggcgaaagccgaaggcttcacgtcccgttttgatttttccattcatgtggcgtttttgcgttcgctgggtaagcggcaccggatgccacctctgttgcgccggcgtgcaattgacgcgctactgcaggcaatgtgttttcactacgatccgctggccaatcgcgtgcagcgctcgattaccaatatggccatcgaatgtggactggccaccgagtccagaagtggcaacctgtcagttagtcgtgccacccgggcgctgaagtttctggcggagctggggctcatcacctatcagactgaatatgatccgcagatcggctgtaacatcccgaccgatatcacgttcaccccggccctgttttccgcgctcgacgtttctgaagtggctgtgttggccgcacgccgcagccgtgtggagtgggaaaacctgcagcgcaaaaaacagcaactgaaaccgctggagatggacgaactgatcgcaaaagcgtggcggtttgtgcgtgagcgttttcgtagctaccaggctgaacgcaaatctcacgggcggaagcgggcgaccgccaggcgggatgcttcacggcagcgtcatgacatcgagacgcgtgtgcgtcagcaactgacccgcgaatatgccaccggccgtttcaggggcgataaagaagcgctgaagcgtgaggttgagcgccgtgtgcaggagcgcatgctgctgtcgcgcgggaacaactacacgcgactggccactgtccccatataa

SEQ ID NO: 232766 - DNA, 159 bp, Klebsiella pneumoniae
atgtggagcaattattatatcagccacagctcccgcattagccagttcacgactattgcgaccagccacatcgacaattacgtgatcaaacttttcatcgagctgacgcaacgtttggctgatgtttccatatttctgaataagggttatgcgaggtaa

SEQ ID NO: 232767 - DNA, 942 bp, Klebsiella pneumoniae
atgaagaagaaaaacagcacacccactcctcacgatgccacgttcaggcagttcctgacgcaaccggatattgcccgggatttcatggaaatccacctgcccgcagagctgcgggcagtctgcgatctcagcacgctgaaactggaatcaggctcgtttgttgaggatgacctccgccagtatttcagcgacgtcctctacagcctgaaaactacagccggcgacggatatattcatgttctggtcgaacaccagtcaacgccggacaaacatatggctttccgcctcatacgctatgcggtggctgccatgcagcgtcacctggaggcaggaaataaaaagttgccactggtgataccggtgctgttctatacgagtaagcgcagcccgtatccgtactccacccggtggctggatgagtttgacgagccggggctggcaggcaaactctacagcggcgctttcccgctggtagacgttacggtcattccggatgatgaaatcgccgggcatcgcagtatggctgccctgaccttactgcagaaacatattcatcagcgggacctggcagaactggttgatcggctggcacccattttgctggccggatatctgtcttcatcgcaggtgatatcgctggtacactatatagtgcaggcaggcgaaacgtccgacgccgaagcctttgtacgcgaactggcacagcgtgtgccgcaacacggagacgcacttatgaccatcgcacagcagcttgaacagaagggcatcgagaaggggattcagctcggtgaacaacgtggtattgaaaaaggccgttcagaaggggagcgcgaagcgactctgaaaatagcccgtaccatgctgcagaacggcattgaccgcaataccgtcatgaaaatgaccggtctgacggaagacgacctggcgcagatccgccactaa

SEQ ID NO: 232768 - DNA, 159 bp, Klebsiella pneumoniae
atgaatggcctgctgtgccggcgtgtgcagcccggctttctgcagactgatagcggtttccagcgatgtctcaccggcccgcgcctttatctgctcagaaaccaccgtaaaggagggatggcgggcaagtttttccgcagtacgggtttcatccagtga

SEQ ID NO: 232769 - DNA, 519 bp, Klebsiella pneumoniae
atgaatcatgctgttcagtacgcgccggtcctcattcaggtgcgtgacaatcagcgtctgctcccgtgcttccggtgtcctgccggtatagtcgcggacaatggcttcatacagtgtcatggggacatccgggaaagcctcgcctttcagcatcgccttctgctgcgcttctgccagtttcgcttcctggctgtgactgaactccgtcacggagtgctccggtgcccatgcaccctccagacgtggcacctgagacggtttcacactctcaagcccggacagtgccctttccacatcccggttaatcaggctgtataccgcctcccgcagttccggcgtctgacgcacaatctccttcatgatggccacatcggcagcactgcgcgtctgctggagccggaaaggctgaccgggcgcgatggcctgcagctggtccgtgtcaccgctggccacggcacgaccgccaccggccgcaatcagggcgtatgcccgtgccatgtcggtattgcccaccattga

SEQ ID NO: 232770 - DNA, 681 bp, Klebsiella pneumoniae; identical to SEQ ID NO: 143702

SEQ ID NO: 232771 - DNA, 273 bp, Klebsiella pneumoniae
atgcactaccagatggcgtattatcagaagcgacttaagggcagcggcctgaaacagagcatgtcaagaaagagaaaatgtcacgacaatgcagtaatggaaagcttcttcggtacgctaaagattgaatgtttttacctgaaggaacataagaatatcagctatttgcgcatggctatagatgagtacatccactattacaaccatgaaagaataaaacaaaaaggcctgagtccggtagaggaccgaacccaggccctgttagccgcttaa

SEQ ID NO: 232772 - DNA, 288 bp, Klebsiella pneumoniae
atgaggtatcaggtaaaattcagggaagatgcgctgaaagagtggcaagaactggacaagactattcagcaacagtttgcgaaaaagctaaaaaagtgctgtgacaatccgcatattccttccgcaaaactgcgcgggataaaggactgctacaaaataaaattacgtgcgtcaggttttcgcctggtctatctggtgattgacgaacaattaattatcgctgttgtagctgtgggtaaacgtgagcgcagtgacgtttataatcttgccagtgaaagaatgagataa

SEQ ID NO: 232773 - DNA, 252 bp, Klebsiella pneumoniae
atgcctaacattattctcagtgatacaagcgccagtgtcagcgagctgaagaaaaatccgatggcgacagtcaacgccggtgatggtttcccggtcgctatcctgaaccgtaatcagcctgctttctactgtgtacccgcagagctgtacgaaaagatactcgatgccctggacgatcaggagctggttaaactggtagccgaacgcagcaaccaaccgctgcatgatgtagacctggataaatacctatga

SEQ ID NO: 232774 - DNA, 360 bp, Klebsiella pneumoniae
atgaaacgagattacggtagtgtcggtaccatagcgctcagagcaagtgctctacttcaggccatgagtcgggatattgaggagcaaagaaaagaattcaatctgacagagtatcataaaacatatactcgtaatgcggtcgcaaaattgccgaagctgagccgacgcatcgtagaactggccgttaaagaaatggaagaaagtggttatgaatttaataaaaagcgggtaggcaacgtcgagcaatatgcattaacaattcagaacgttattgatatttacgctcaccgacagataccaaaatatcgcgatgttcataaagaaccttacgtaatttgtactagctcagacctgatctga

SEQ ID NO: 232775 - DNA, 141 bp, Klebsiella pneumoniae
atgaaccacgacgttatcgaacgcatccgcgaccgctggcaaaagctccgcctcttgcgtagccgcggaaccgtgctggtcgactacaaaatattacgcaatttcgtccgtatctataagcgcctgggagagacagcatga

SEQ ID NO: 232776 - DNA, 525 bp, Klebsiella pneumoniae
gtgttctgcgatattcaggattacctgaaatacaggtgccatttatcagatatggagaataacatgagaaaatatattccactggtattatttatcttttcatggccggtattgtgtgcagatattcatggacgggttgttcgtgtactggacggtgataccatcgaggtcatggactcacggaaggcagtgcggatcaggctgataaatattgatgcaccggaaaagaaacaggattatggccggtggtcaacggacatgatgaaatcactggttgcaggaaaaacggttaccgtcacatattttcagcgagatcgttatggtcgtattctcgggcaggtttatgcaccagacggaatgaatgttaatcagtttatggtccgggccggggctgcctgggtatatgagcagtacaacacagatcccgtgctacctgtctttcagaacgaagccagacaacaaaaacgtgggctctggtcagatgctgatccggttcccccctggatatggagacaccgtaaataa

SEQ ID NO: 232777 - DNA, 561 bp, Klebsiella pneumoniae
atgacagagcagaaacgaccggtactgacactgaaacggaaaacggaaggggaaacaccgacccggagccggaaaaccatcatcaatgtcaccacgccaccaaaatggaaggtgaaaaagcagaaactgacggagaaggctgcccgggaagcagagctggcagcgaagaaagcacaggccagacaggcgctgtccatttatctgacgctgccctcgctggatgaggcggtgaacactctgaaaccctggtggccgggattatttgacggagacaccccccggcttctggcctgcggtatccgggacgtgttactggaagacgtggcgcagcggaatatcccgctctcgcataaaaaactgcgcagggcgctgaaggccatcacccgttcagaaagctatctgtgtgccatgaaagccggtgcctgccggtatgacacggaagggtatgtgacggagcatatttctcaggaggaggaagcgtatgcggcagagcgtctggataaaatctgccgccagaaccggataaaggcagaacttcaggccgtgcttgatgaacaataa

SEQ ID NO: 232778 - DNA, 927 bp, Klebsiella pneumoniae
atgcgcagagtgacaatattgatattattcctgctggttgcaatgacctggggaaccacatggctggctatgcggatagccgctgaaacgatccctccggtgtttgcaaccggaatgagatttatgttcgcggcaccattattaatgggcattgcatggttaagaaaaacaccacttttatttccacctggacaacgattatttcagtttggaatctgtattttttatttcgccattcctttttcattaatgatttatggtgaaacctatgtcagttccggacttgcctccattatatttgcgaatatgcctgtggctgttttgatagcttctgtgatatttttgaatgaaaaaacgaactcaatgcagattgcgggattaactgttgcaatagttgcactggcgggtattcttctcgaagaaacgaaaacaagtacagagagccactggcaggggatccttgcgcttgtttcagccgtaatcatccatgccataatatacacccaatgcaagaaaagaagctgtactgtccctgttataacgtttaacgcgctaccgtgttttctggcaggattgatactttctgcggcaggatggctcttcgaaagaccacaggtgtcagccttctcagcgcactcaatactggccaccctgtatctcggtgcttttgccggagtttttggaatattatgctactttgcacttcagcaaaaggccagtgcctttcaggcttcacttgttttccttatttttcctctgattgcggtaagcctggagagctatatatatggatatgcactttcaactcaatcaatgctgtttattataccgttagttaccgggatatttcttactcttttctcacggcgagtgcctgtaaccaacagacatcgggatagtattcctgagcatactgagacttcctga

SEQ ID NO: 232779 - DNA, 204 bp, Klebsiella pneumoniae
atgtatttcaggcgctcgataaccgtctgtccccatctgatttggctgaaatttagttttaacctcagcccgcaaagtatctctatctttaacaagcccaaaatcagttatcttgtatttaccatcgatataatagagtatatttccaggcttgaggtcgcgatgtatataattgttatcatgtatagtgataattccttttag

SEQ ID NO: 232780 - DNA, 372 bp, Klebsiella pneumoniae
atgaaaatacctgcaatttttccggtcttagtgatggggctgtcctcattctttgtatcccagcaggcgatggcgcatgctcatcttaagactgctgtccccgccgataaagctgaactaacagagtcccctaaacagctggcattgagctttacagaatctcttgagccctctttttccaaagcggaattaaaaaatgcagacggccatattattccggccggtaaaccagcccttgatccaaaagacaaagcgacgttaatagtgcctgtgagcacaacgctcgataaaggacaatatgaagtcgactggacagctctttcagtagatggtcataaaacacagggaaaatatacctttactgttaagtaa

SEQ ID NO: 232781 - DNA, 237 bp, Klebsiella pneumoniae
atggcaacaacacaacgagcaacacaaagcgttactatgaccgtagaacgtgccttactcagccgtgcgcgtgaggctggtattaatctcagtgccactctgaccgcagcccttgatgctgaactacgccagtatgaagcgaaaaaatggcaggaggaaaacaacgaagcgctggaagctcttaatcgttttcacgatgaacatggttgtttcagcgatgagtacaggacattttaa

SEQ ID NO: 232782 - DNA, 381 bp, Klebsiella pneumoniae
atgcgcaggtcacatcttgtgccattgtcgactcaagcgttaaatttactacatgaactcaaagtcatgacagggaactatcgttatgtttttccagggcggaatgatccgaacaaaccgatgagtgaggcgagtattaaccaggttatcaagcgtatcggatatggcggtaaggtcaccgatcacggatttaggcatatcttatcaacgatattgcatgaactaggatatgagagttcatggattgaaatgcaactcgcccatgttgacaagaataatattcgtagtacttacgatcatgctcaatatttagaaagaagaaggtatacgcttgaaaattatagtaacttattattaggtaaggtttcaaaatctagttga

SEQ ID NO: 232783 - DNA, 423 bp, Klebsiella pneumoniae
atgactaaacctacccgcgctgaacgagaaaaaatcctggcgatgctgccagaagattacatgaatcctgtgcaacaggactacttccggcggcttatccgccacgaaaggcaggaggtgcttgatcatatagaccagatgaagcaacaactgcaggataatccagaaacgggtgacgaaggtgacatcgccattcgtgaagagcagttacgtctgctgttcagacagatagacagagaaagccgcctgttgccgaaatatgatgcagcgcttatgcggcttgaaaaaggagaatatggcttctgccgggatacaggcgaacctatcggtctgcaacgcctgctactcaggtccaccgcagaattaagtattgaagccaaaataaaggaggaaaaagttgagattcagtaccgaaagaaataa

SEQ ID NO: 232784 - DNA, 441 bp, Klebsiella pneumoniae
atggccagcctcttcgaaccggatgtgccggaagttgtttccggagaagacgtgactcaggctgaacagccgcaacagccgcaacagccgcaacagccgcaacagccgcaacagccgcaacagccgcaacagccgcaacagccgcaacagccgcaacagccggtgtctcctgccatcaacgataagaagtcagattcaggtgtgaatgttccggcaggggggatcgagcaggagctgaaaatgaaaccggaagaagagatggaacagcaactgccacccgggatcagtgaatccggtgaagtggtggatatggccgcttatgaggcatggcaacaggaaaatcatccggacatccagcagcagatgcagcgtcgtgaagaggtgaacattaatgtgcaccgggagcgtggggaggatgttgagccgggagatgatttctga

SEQ ID NO: 232785 - DNA, 201 bp, Klebsiella pneumoniae; identical to SEQ ID NO: 19525

SEQ ID NO: 232786 - DNA, 792 bp, Klebsiella pneumoniae
atgatcaatattctgccatttgagataatttccagaaatacaaagaccctgcttattacctacatttcttcagtagacattacacatgagggaatgaaaaaagtactcgaaagcctacgatccaaacagggtattatttctgaatacctccttgataaactactggacgaatcgcttattgataaagacaagggcaaagagtttcttattaccacaggcgtgataaataaaacgaaaacatcacctctctgggtaaactcagtcataataagcgatgttccacatcttttcagtaatgcccgggaacaatggaaatctgatggtgtttttgtttctcatatcattgatataaaagataataatattaatgtgagcgattcaacactaatctggttacatctcgaaaactatcattcagacattgtaaaaagaatctattcaaaatttgaaagtaaccctggtgttgccttcatccaaagctactacctaaaggagtcattcaggatagatggagtatattcacctgatcttggtactccctgccatttttgtcatatagagagatggctgagcagggaagaaaaaagcttcagacgtaacgaaatgtcttgggcaaacttacttcagttactgaaaaaataccaaatgacactaccagcattggctttaggcgaatcagaaagaggattcagctatcatttaataaaacggcgacttcaggagttgacaggtacttcactggttaaaagtcatgtcgataactttatgtcggtaatgactccaacttactga

SEQ ID NO: 232787 - DNA, 597 bp, Klebsiella pneumoniae
atgatgcgggaaaaagcccgacgtccgtcgccgctgcagcggcgggtgctgattgtgctggctgcccttgatgaaaaacggccaggacccgtgctgacgcgggacatagaacgggggctggagcgaagcggggaagccccggtctacgggccaaacctgcgcgcctcctgccgtcgtctggaggatgccggctggctgcgtaccctgcgcgctccgaacctgcagctggcagtggagctgacggacgctggccgggccgtggcacagcctctgctgctggcagaacaggaccgcctccgggcagaacagcgtgcggcagaagtcgtcgtactgccgctggtcccggcagcaggtctgcccgcagacggcacttctgccactgatctggcggtgcagctgaacggcataacgtatcaggcctgccgtggggattttgtggtgcgtctcgacggcagcacctgtctgcagttatggaataaagaaggcagggtggtacgcctggagggcgatccgctggaagtggcgcagtggctgcaggcctgtcacgatgccggaatggaggttcgtgtacaggttaatgaaagcgtcaccccgtaa

SEQ ID NO: 232788 - DNA, 621 bp, Klebsiella pneumoniae
atgcgccagaatgcgctgttgcttgagcgaaaacccgctgtaccgccatcgaaacgggcacatactggcaaagtggccgtgaaagcaagcaatcaacgatggtgctctgacgggttcgagttccgctgtgataacggagaaaaactgcgagtcacgttcccgctggactgcagtgaccgtgaggcactgcactgggcagtcactacgggcggcttcgacagtgaaacagtacaggacgtaatgctgggagcggtggaacgccgcttcggcaacgagcttccggcgtctccagtagagtggctgacggataatggttcatgctaccgggctaatgaaacacggcagtttgcccggatgttggggcttgaaccgaagaacacggcggtgcggtgtccggagagtaacggcatagcagagagcttcgtgaaaacgataaagcgtgactacatcagtatcatgcctaaaccagacgggttaacggcagcaaagaaccttgcagaggcgttcgagcattataacgaatggcatccgcatagtgcactgggttatcgcttgccacgggaatatctacggcagcaggccagtaatgggttaagtgataacaggtgtctggaaatatag

SEQ ID NO: 232789 - DNA, 324 bp, Klebsiella pneumoniae
atgggaccagacgccgataccggcgaaaaagtggcactgggtaaatcctctgaggtcgtcaggtgtgacatcttcaatactccgttcgtcaacttcgcccggggcgatatgcccggcggctatgaggttacgcagccactgcgccgcgaatgggtcgatctcgttgtagtaagctgccgcgctcatgctgcctccgtcttcacaacgtcaatggcgcagccaggtatcagctcaacggaagcgacggcgcactggttcccccagtggctccagcctggcgctgcgctgcggctgaaaagctcaatccgtggcacgtcgccgtag

SEQ ID NO: 232790 - DNA, 141 bp, Klebsiella pneumoniae
atgagccgtcacgttatcgaacgcatccgcgaccgctggcaaaagctgcgtctatgccggcaccgtggcaccgtactggttgactaccgaattttgaagaatttcgtccgcatctatcaggcttcaggggagaaagcatga

SEQ ID NO: 232791 - DNA, 243 bp, Klebsiella pneumoniae
atgaaaaagatgatcatcgcagcaactgtactttcaaccctctttatggcaaatgtgctggcagcagactctatgagcaaagataatatagctaaagacacaatgtccaaaccacacgacaaaatgtgtaaagacgaaatgtgtaaagaagcaatgggcagggataacatgaagaaaaacaagatggataagatggataagatggataagatggataagatggataagatgggcactaattaa

SEQ ID NO: 232792 - DNA, 510 bp, Klebsiella pneumoniae
atgcaaccattatcttcagaatcggtacatccgctgtggctgcgcagctgtcattgggttaatgccctggctattacgggcatgctgcttagtggctggcgtatctataatgcttctcccttgttttcttatacctttccggtgcaattcacactgggtggttggcttggtggcgcattgcagtggcactttgctctgatgtgggtattgatgattaatggcgcggtctatatctcgttgggagtagtgactgggcgatttcggcacaatttttttccactgtcgtggcgccagttgaaagagtccctgcccagagtattgagaggaaaacttcagcacacggatctgcgccagtacaacatggtgcaaaaaattgcctatctgctgattatcttagacggtgtcggactggtgttgtcaggcatggtcttgtggaaatccgtacagtttccgtttctgtacggctaccgcgctgcatccgcagacactgctggttcttacgtgggataa

SEQ ID NO: 232793 - DNA, 519 bp, Klebsiella pneumoniae
ttgataaatactcataaaattgagttgagtattaatattaatacaagcaatctattttcaccattattccatgaggtgctgacaaaagcaaccaatttatataaagttagccctaagttcgttactcttgaactaacagagaggcgttctgatagtatatccttaataaatgagagtttggctaaattaagagtgctgggctgcaaaatagcccttgatgattttggtactggatattctaatttaaactggttatccaaactagaagttgataaaatcaaaatcgacaaattcataacaaacttaatctgtacagactcaattaatgctaatgttctgaacaaaattgtttcaatacttagccaaacgcataatgaaatcatatttgaaggtattgaaacagaggggcaactctcatacctagtggctaactttcctgatgcgtatgttcaggggtatttttatgccaagcctatgaacattgaggagttaaaaaaatacttagataagaaagcttaa

SEQ ID NO: 232794 - DNA, 906 bp, Klebsiella pneumoniae
gtggatagcgcacgcgcccttattgcccggggatggggagtaagcttcgtcagccgttgtctccgggtgtcgcgtgcgcagttgcacgtcattctcagacgaaccgatgactggaaggacggccgccgcagccgtcacacggatgatacggatgtgcttcgccgtatacaccatgttatcggagagctgcccacatatggttatcgtcgggtatgggcgctgcttcgcagacaaacagaacctgatggtatgcctgcgatcaatgccaaacgtgtttaccggatcatgcgccagaatgcgctgttgcttgagcgaaaacccgctgtaccgccatcgaaacgggcacataccggcagagtggctgtgaaagaaagtaatcagcgatggtgctctgacgggtttgagttccgctgtgataacggagaaaaactgcgggtcacgttcgcgctggactgctgtgaccgtgaggcactgcactgggcggtcacaacgggtggcttcgacagtgaaacagtacaggacgtcatgccaggagcagtggaacgccgctttggcagcgagcttccggcgtctccagtggagtggctgacggataatggttcatgctaccgggcgaatgaaacacgtcagttcgccaggatgttgggacttgaaccgaagaacacggcagtgcggagtccggagagtaacggaatagcagagagcttcgtgaaaacgataaagcgtgactacataagtatcatgcccaaaccagacgggttaacggcagcaaagaaccttgcagaggcgttcgagcattataacgaatggcatccgcatagtgcgctgggttatcgctcgccacgggaatatctgcggcagcgggccagtaatgggttaagtgataacaggtgtctggaaatatag

SEQ ID NO: 232795 - DNA, 384 bp, Klebsiella pneumoniae
atgtgccgtctcgatttcaccgctggcctcgtcatcgtgcgctttcttctccagagccgcgatttgggcatcgctcagtacgatgccttctctggcgactttctcctcaagggccttcagacgcttacggaagttctccaggtcgtgccgttgccagatggaacgaacgccgctgccggagataaatacgccttttttacgcagctcattactggtccggtgctgaccatgagcggggaactcaacggcatattcaacaaccgcgcgttcagtggcctcatcggcacggttcttgaggttgggaacccggcggttttggttaatcaacgcatcaatgccaccttctgcagccagttcctgatagcgataaaaggtatcgcgtga

SEQ ID NO: 232796 - DNA, 330 bp, Klebsiella pneumoniae
atggaagcgctcacagatcccgttcgtttgcggagacatcgctttcgttttcgtatggtcgatatcgttgatggccaggtacagctgatagtcatgctgttccactttcccgcagtactcagtacccctgtcggtcagtattctcagcatcggcagtccctgagcctcgtagaacggcagtacacgagcattgagcaggtcggcggcagtgatcggcgttttactcgtatacagcttgcagtgtgccactttcgagtacgtatccacgaacgtctgctggtagatacggcccacgcctttcagattacccacgtagaaggtgtcctgtga

SEQ ID NO: 232797 - DNA, 426 bp, Klebsiella pneumoniae
atgcaatatgcgaaacctgtcactctgaacgttgaagagtgcgaccgtctctcctttctgccttacctgtttggcctggattttctgtatgccgaggcatctgtgtacgcgctggcgaaaaaaatgatgccggaatatgaaggcggattctggcacttcatccgcctgccggacggtggcggttacatgatgccggatggcgaccgttttcatctggtcaacggtgaaaactggtttgaccgtaccgtgagtgctgatgccgcaggcatcatccttacctcccttgtgattaaccgccagttgtggctgtaccacgacagcggggatgcagggttgacacacctgtacaggatgcgtgatgcgcagttgtggagccacatcgaatttcaccccgaatgcaacgcgatttacgcggcgctggactga

SEQ ID NO: 232798 - DNA, 267 bp, Klebsiella pneumoniae
atggcgacgctggggcgtcttatgagcctgctatcaccctttgacgtggtgatatggatgacggatggctggccgctgtatgaatcccgcctgaagggaaagctgcacgtaatcagcaagcgatatacgcagcgaattgagcggcataacctgaatctgaggcagcacctggcacggctgggacggaagtcactgtcgttctcaaaatcggtggagctgcatgacaaggtcatcgggcattatctgaacataaaacactatcagtaa

SEQ ID NO: 232799 - DNA, 312 bp, Klebsiella pneumoniae
gtggttattctgaaaacgctgcatatgtttgaagtaccgttcctgctggtgggctgctttaaatatattaccagccagtttgaagtgcgtttttcagcgacgatttatctggtctgtttctgcttctttaagcaactggcgatgatttttatgtctattctggcgggcaatatgtatgaaagcatcggtttccagggcgcttacctggtgctgggtctggtggcgctgggcttcaccttaatttccgtgttcacgcttagcggccccggcccactttccctgctgcgtcgcaaggtgaatgaagtcgcttaa

SEQ ID NO: 232800 - DNA, 228 bp, Klebsiella pneumoniae
atggtcacagaatataaagggaatataggtgatactcagaacagtatccgtggcgaggaaaatattgtaagagggcagtattctgaactacaaaatcatcataaaacagaagcattaactcagaataataaatataatgaagaaaagctggctcaggaaagaatacctggtgctgatagtccgaaagagcttttagagaaagcaaagagttaccagcataaagaataa

SEQ ID NO: 232801 - DNA, 522 bp, Klebsiella pneumoniae
atgattacacaacaaattatcagtagtgagttggaagttttaaagaaacatattgactcaggagatattagaattccgtcactatggcagggattaaaacccggatttataatcatgggatggatgattttttgtcccttactaatgtcatttctaataacacaaaagacaagtgaaacactcactgctgtgttagccggaggatggcttggacttattattctgtttattgtggcaaggattagaatgttatatttctctctgccggaagaattcctaaagacatcatccgtaatgaggattatatcatcaaaactgaaagtgtatttcattgtgtatatggggattatatttttatggtcttttttaggtggagggattatatacggttttggtgcaattttagtgacggttattatggcgttcttgattcaattagatatcggtagatatcaatttgttggtgttattgatgcaatcaatagttacgtcaaaaacaagaagttatcaagagtaaaataa

SEQ ID NO: 232802 - DNA, 249 bp, Klebsiella pneumoniae; identical to SEQ ID NO: 97270

SEQ ID NO: 232803 - DNA, 798 bp, Klebsiella pneumoniae
atggaaaataagagtttaattgactactcagctagagttttggcatcaaagagcgcacaaaggaaagctgcggaaaaatcgttccttgaggatggtgtcaaagaaataaacatttctggaaagaaaggcattaaatttaaaactattgaagataaactcatatcaaggttattggttcggaatttaaaaaaaagctataaaatctcgcgggtcaataggcatgatattataaaaaatctaattataaatctcaaagatggcagtccttataatatagcaaggctggatataaaatcattttacgatagtatatatttcaaagtcctccttgataagatcgtatctgatggaaaggtatcaaggtacgatataaatctattgtataaatttaaagactctttagatcagaaaatgatttctggacttcctcgaggcataagtttaagtgctactcttgccgaactatgtcttcaggaaattgattcattctttttaaaagagaaagatgttttttattactctcgatttgtggatgatatattaattattcatcatggaggggaaataacaaaacagttcattactgattatttctcgagtcacctgcctggaaatctaactttacatgaaaaagaaaaattggcttttttgaatatcgccggggctagggggaatatcaacgatgacaagacacaagttgacaaagtagatgaaatggattttttaggatataatttcaaaatatacaatatatataatgaaaatgatcatgtgtttttaagtccaaataggaggtaa

SEQ ID NO: 232804 - DNA, 648 bp, Klebsiella pneumoniae
atggcgctcgtcggttatgctcgtgtatccacgacagatcaagatctgacacatcagatagcggtgctgacttcagccggctgccgtaaaatcttctcggagaaaatgaccggcgccaggaaagagggccgtcaggcactcgatgactgccttgattacttgcgagaaggggatacgttggtgatcacacgtatcgatcgcctgtcacgcagtctgcgcgacttacagaatctggttcatgaacttgaagggcaaaacatcaagctcagggcgaccgagcaggccatcgatacctcttctgcgtccggcaaggctttcctggatatgttgggcatattcgccgagttcgagacacgactgcgtcaggaacggcagcgggaaggcattgcccgcgcgaaagccagaggggcatataaaggaagaaaacccaccgctcaggcgaaagcgcagcaggtgattgaattgacgctggccggactcacccgcgaagcggttgccgaccaactgggcattggcagggccagcgtctaccgaatattaaaaacctggcggcagcaacatcccgacgctattctgcccggagaacgggtgaagccttcgctcagccatagtgggccatcgaccgaacatgttacgatagcgccatga

SEQ ID NO: 232805 - DNA, 216 bp, Klebsiella pneumoniae
atgcttgataaaattaacattaatatcaaaaaaactctattggcctttatcatttgtttagtcgctattccgctggctcgttttatttcaccgcaaacgataattgacggcaaccttatttatattgcctggctgccaatcagcgtgatgttttctgttatttttatctttggccgctatgcgattgtgggtaatgctaccaacttactgatttag

SEQ ID NO: 232806 - DNA, 576 bp, Klebsiella pneumoniae
atgcttatcggttatgcccgggtttcgacacaggaacaggatactcaggctcagatatcagcactaaagtcagccgggtgtgaactgattttccaggaaaaagcttcgggagggcgatgggatcgacccgaactacaacgtcttttacagcaactgcgcaaagatgatcaggttattgtatggaaactggatcgcctttcccgttcgctgaaggatttattgctgacgctggagaagattgaaaacacgggagctgattttcgcagcattaccgaaaatattgacacatccactccggcgggcaggatgatgatgcagatcgttggctcctttgctgaatttgaacgcgccatgcttcgtgagcggacaaagagcgggcttgcggcggcacgccaggatggccgggttggtgggcgacgccctaagttaaccccccaacagcaaaaagagattgtctcgctcgtcacatcggggcaaaaaacgggcgctgatgctgcacgtctgttccgtgttcatccttccaccgtggtgcggcttcttgccagacaccggatgactgagatcggacagacataa

SEQ ID NO: 232807 - DNA, 426 bp, Klebsiella pneumoniae
gtggcgattgacatccagtggttactcgaacgtggtcgcaaacacggcccggccggccacctgcgccagcatcttgagtacctctttcgctcctgcagcggcaatctggccgctcagtccgacctgttccgtctcacctacgcctctgaaaccctgaaagaccagggctgggacaattatgtgctggacgcacacgagtggaaatccggcgtcgtgccgacaccgtcacagcataacgggttctatgtcgaaaaaacggcgctgaatgccgcttttgcccaggacggtcgccatctgcactccgtcacgtttcgggtggtcggtgacgccgaccggtttatgcatgtgttggccgagtacggtctgtgtacgcgccggcagggcagcacgtcagcctgccactccatcgcgcttgaaccggcgtaa

SEQ ID NO: 232808 - DNA, 462 bp, Klebsiella pneumoniae
atgctccacacactcactgaccagatacatttccaccgacgaaaaacgagcgccccggttcaggatggcatcgagcaccacgggcaggttttcgtcgtcttcatcgagccagcaggggtgatcgctttccttcaccaccaggcgaaagcggcgcgtctggcgggtcagcaacgtctgaccggtggtggtcagcgccgcacggatacgccgcgcatcttctgccacctggtaactgacactgcatactgcatcgcgtaccgcatcaagaacggccctgatttcgtcttcggtcagccattctccggcatacgggaaagacacctgcgttccgtctgccggaagtaccggcagcgactgccactgactgccggacagaacaagttccgccccggttccggtcagtttctgaatggcagaggccaggagcggcggcagtacgccgccgtgacggttgataagtaa

SEQ ID NO: 232809 - DNA, 204 bp, Klebsiella pneumoniae
atgctcaaccctgatatcaaatgcttcacaaaagggtgcacaacgaaaaacattattgagccgacgggcagcatcttcgcaaaacatcagattctgaccgttagccaacgcaaaagcctgttcgtcgctccgcttgacgaccgtttgcacggctgtcccgagagcaacttcagcataatcaatcagctcaagcacaggcagtga

SEQ ID NO: 232810 - DNA, 216 bp, Klebsiella pneumoniae
atgttgctcgtcactgttaagatgaatttctttcatcgcctccatattatcagtgaccttatcaaagacaccgagcacttcatacgctccctcgataacctgcccgacaatatcacctttatgtggaacacggatttcgccaaaattattcccgcacaccaggccatttgtgcagacaaaacgaaaaattccggggatcatctgataactggatga

SEQ ID NO: 232811 - DNA, 216 bp, Klebsiella pneumoniae; identical to SEQ ID NO: 22428

SEQ ID NO: 232812 - DNA, 297 bp, Klebsiella pneumoniae
gtggaaaactggaatagtgcaaatgcgttcattttttatggtaaaggcggagaggtggcgacaaaccgtctggaagagcaggagttgtctgttctggcgctgcatctgttgcagatttgcctggtctacgtgaacacgctgatgatccagcaggtactccatgagcccgtatggctgtcacgaatgaaggcagaagacttcagagcactgacaccgctgatttacgctcatgtaaacccctatgggatatttgagcttgatatggaaacaaggttaccgatcgacgtggttgcctga

SEQ ID NO: 232813 - DNA, 216 bp, Klebsiella pneumoniae
atggagattatcaaatacgtgagcgaaaaccgccaggtgtccgtccctgctgaactgctggcgtccctgattcagaccgctgaacaggcattgtggaaacgtgaatgggccgcccgggatcatggcctcgccgtcccggaatgcgtcacccgccgtcaggcggtggttaatcaggcccgcaccctgctgaaaaacaacacacacgaaaacgactga

SEQ ID NO: 232814 - DNA, 249 bp, Klebsiella pneumoniae
atgaccaatgaagcagttctcccccagtgttacgttctcacaaataaacgtgtgcgactgtatccgacttccactaccaatgacacagcctttctgtatctcaacgaaggggccgacaaacacattgtccctgagttcacattcataaatgttgaccggtttgacaagacggacattggtcccataaatcacatcccggacagcacattccataaatttcatactcacacgtcctttaaatacagatga

SEQ ID NO: 232815 - DNA, 261 bp, Klebsiella pneumoniae; identical to SEQ ID NO: 75706

SEQ ID NO: 232816 - DNA, 180 bp, Klebsiella pneumoniae
atgcctggcagatttggtgaccggcgctgccgcctgactgttattggcgagagcggcgaaattgacgattttgtcctcacgttgcgccagtgtttactcactgaagaggaaattcgctggtggcagcagggggggattttccacgatccctggcccacgaaagtggcccggctggcttaa

SEQ ID NO: 232817 - DNA, 240 bp, Klebsiella pneumoniae
atgatgccggatggcgaccgttttcatctggttaacggtgaaaactggtttgaccgcacggtcagtgccgatgccgcaggcatcattttgacttcccttgtgattaaccgccagttgtggctgtaccacgacagcggtagcgcagggctgactcacctgtacaggatgcgcgatgcgcagttgtggagccacatcgaatttcaccccgaatgtaacgcgatttacgcggcgctggactga

SEQ ID NO: 232818 - DNA, 162 bp, Klebsiella pneumoniae
atgatgaggccgagtccgaaatacgtaagaaaggtacaaacaaagccaatcattccgattctggcgatccattccgccactttgaatgaccagtatttcaacggcatctcccgtttaatgtcacaaataaccattgtgtctatcttatgggtcagtgactga

SEQ ID NO: 232819 - DNA, 246 bp, Klebsiella pneumoniae
atgaccatcgcacaacagcttgaacaaaaaggtatcgagaagggtatccagaaaggtatcgaggagggtatccagaaaggtatccagttgggtgaacagcgcggtatggaaaaaggacgccaagaaggtgaacgcgaagctgcactgaaaatcgcccgcaccatgctggcaaatggccttgatcgcgattcggtcatgaagatgaccggtctgaccgctgacgacctggcccaaattcgccactaa

SEQ ID NO: 232820 - DNA, 210 bp, Klebsiella pneumoniae
atgacggatggctggccgctgtatgaatcacgcctgaagggaaagctgcacgttaacagcaagcgttacactcagcgcattgagcggcataacctgaatctgaggcagcacctggcacggctgggacggaagtcgctgtcgctctcaaaatcggtggatctgcatgacaaagtcatcgggcattatctgaacataaaacactatcaataa

SEQ ID NO: 232821 - DNA, 123 bp, Klebsiella pneumoniae
atgtcagtttccgctcgtaatcagctgcacggcaaagtttctgcgatacaccccggttccgtgaatgatgaaattgaactctccctcacagaggggggaaaccagtcacctttgagcccctga

SEQ ID NO: 232822 - DNA, 1935 bp, Klebsiella pneumoniae
atgagcaataaacctgagcctatccgtgaacttgaatgtaagtttgatgataatggaagtccgtcctgggactcctttccttctcataaaaactgccaggtcagaggtgggtgtgacttaccacctcatttacctggtattattatacttgtacacggtgttaactcgacaggagagtggttttcagttgcggagaaaaaactttgtgaaggcctgaataaaaggcttgggttaaccggaacatcatatgaactggaaaccaataaatatctttttgacgataaaatagatgctgtgcctctaatgtccagggatttacctgatgttaatataaataaatctcccgtaattcgtttttactgggggtatgcttcgtctaaaggtaatgaagatagatacatcatacctttagctaataagaaaggtgttgattatcatcaactaaaaagggaaaatatgccctatgccaatattatggcgcagggtccatttttctggggcggcggaccattccagaacggtacaaacaatttgcattctttatggagtgaaaaagggttcaaagagagagtcggtggagtcaaagttcagtggtttaatgaggataaggatcgcctgttaaccaatgcgccaccgcgaaaatactatgcccatgcagccaaacgccttgcagacatggttgacagtatccgtaataaatatcctaaagatacagtcactattatttctcacagccagggtacaatgattgcaatggcagcggtagcgatagctaagaacgcacctgatgcattatttttacttaactcaccctacgcattggatcacaacgaccttaatggcgcgtcacttccggcagatgagtgtatttcgccagaaggacggcagaatacgctatctgccatcattgacaaggtggcctgcagaaaaaatcatttgttatctcttggctatgaagggctttgtgtcggacagacggcagataaaaagaactggcgacctgatgttgcacttgttggggaaaatggagatggtcttgctgagcgagataatcacgggcgcacttacatctacttctgccctcatgatcgtgttatggggtcacgcccgctacgctcaattggctggcagggattacctaatgattcacaggggcagccccatccactgctgaaaaagcatcagggatatttatttcagcgtatgctggcgcgcagtactccatgtggcgaaactcctaatcccgtgacaccgtttgcaaaattgccggatggaaaaccattctgggacgacaaaggcgataaatatcaaagcagtagtttcacctatcccgaccctccggaatggcaaacagtttttattaatgcggaaatggtgcctgaacctatagaggctgcaaaattagctgattttgacgaatcacgcgttggagcggagcatgacgacagagagatagatggctggggtgaaattaacccggacaaaaaaagtaaaaacgacaatacctatgacaactatatcaatctttaccccgatcaggatattgtgactggttttaaaaatacaggtacggaatccgaaccaagaatggttcccgtaacacgtaaggagacatttgaagaaaaggatcttcgcctgaggacctatgtttctcagcccacggatcacagcacactgccaatgcgtgctgatttcatgtctaaggtggtcgcatatgacttacccattggatactgtgatgcaacctgggataaagaatttatggctgatttacggcgaaaagctgactggactcagggggaggatccgtatctcttcactggaatacctgacaatgtgcctgagccggatataattagtcgtgaaactgttactgataaatttaataaggagaaatataaattacccatgtacaggtctgtcaataaggcataa

SEQ ID NO: 232823 - DNA, 1050 bp, Klebsiella pneumoniae
atgagatggagtcaatcagaccggaaagtacttacaattatagctattgtcggtttgctactgtatgtcatttataaaggcttacagttcctggcaggggtcagtatgggggccagttttggcgtagggctgggaggtatgagcggttctcagaaggtggaggaatcacgaaaagttgaaactgatgctccgcctcaggttctttatcgcatagataaatatcgatacctgacactggagaactacatatcttgtgataagggggggcaggtttattacaatgatgctcagagggaaataaaaactcacttgggatgggagcacgaattttatgatttctcgtatcgccgtggtaattattttgcggcttataaaggaactattattaatggcgcgaataatggttatctggcgttccctggtgcatcaactagacagtattgcggtagcggaagatcagcgcaagggtgtccagtttttttctttttttcagcggattatggtagaacctttatatataaaattgtagcggaggaatacagcacacctgagcgctttagtaagctcaaagtggtagtggctaatgatggggtttatttaagagatgagtctcaaaaagagagtgtgtattctcaccctataggtcttcgcgatctttattcagtcaataaattaagattttctgatggggctttaataagtgtttatgatgactggcaaaatgaaattgccgggttagtgaaggatgagttgataagaaaaaaaataccttacgcaaatgagtatgggccagattttcgcatatttgattatattagaaccttaacgccaccgaaaacacgtcatgaaagtaatttaatggtagatgaattatcagaaattcgaatggaaattgaagataaaatctatggtagtagagttaaattccctgaaatttcaatacaaagtattgattctaaatatacatgtaatagaaatgttgaggctaaaaccatcacgtatacgtttgtcacaagtggaaaaaaggaagtggtaaaaaatgagcaataa

SEQ ID NO: 232824 - DNA, 438 bp, Klebsiella pneumoniae
atggcatacaaaggaaaactctctggttactttcgcgacggtgacaatgacacaccattctgcactgactggaagtttttaaccaaagaagaaagaactgaaatcattaatttcataaaagaaattgcagagaaagattttattatcggaaaaaacaaagagtcttgggtttatgataaccatgaagacatccctggcgctgatggctataaggaagagaattattggcactaccattgtgggccaacctggagtcgtggtcggataaaaaacatgacaaagtgcctttactttaatcctgacggcagaacttcacagcaatgtatacattattacccctccgaaaatgaagagaacgagattgtaatagttggttattctagaaaccatatcccttttttattgccagatgatcccaataataagtttttttcctaa

SEQ ID NO: 232825 - DNA, 1776 bp, Klebsiella pneumoniae
atgaaaaaaatcagcttaccgaagatcggtattcgtccggtaatcgatggtcgtcgcatgggggtccgcgagtcgctggaagcgcaaaccatgaacatggcgaaagccaccgccgcgcttatcagcgagaaactgcgccacgcctgcggcgcccgggtggagtgcgtgattgccgatacctgcatcgccggtatggccgagtcggccgcctgtgaagagaaattcagcagccagaacgttggcgtcaccatcaccgtcaccccctgctggtgctacggcagcgaaaccatcgacatggatccgctgcgcccgaaggccatctggggctttaacggcaccgagcgtccgggggcggtctatctggccgcggcgctggcggcccatagccagaaagggatcccggcgttctccatctacggacatgacgtgcaggatgccgatgacacctcgatcccagcggatgtcgaagaaaagctgttgcgcttcgctcgcgccggcctggctgtcgccagtatgaaagggaaaagctatctgtcgctgggcggcgtctcaatgggcatcgccggatctatcgtcgaccacaacttttttgagtcctggctcggcatgaaggtgcaggctgtcgacatgacggagctgcgccggcgaatcgatcaaaaaatctatgatgaaaccgagctggagatggcgctggcgtgggcggataaacacttccgctacggcgaagatcagaacgctgagcagtataagcgcaatgaaacgcagagccgcgcggtgctgaaagagagcctgctgatggcgatgtgcatccgcgacatgatgcagggcaacccgaagctcgcagaaaaagggctggtggaggagtcgctgggttacaacgccatcgccgccggtttccagggtcagcgccactggaccgatcaataccccaatggcgataccgccgaagcgctgctcaacagctcttttgactggaacggggtgcgcgaaccgtttgtcgtcgctaccgaaaacgacagcctcaacggcgtggccatgctgatgggccatcagctcaccggcaccgcccaggtgtttgccgacgtacgcacctactggtcgccggatgccgttgaacgggtcaccgggcagccgctcaccgggcgggcggagcacggcatcattcacctgattaactccggctctgcggcgctggacggctcctgccagcagcgcgacgcgcagggcaatccgacgatgaaaccccactgggagattgagcagagcgaggcggatgcctgcctcgcggcgaccgaatggtgcccggcgatccacgaatacttccgcggcggcggcttctcttcccgcttcctgaccgaaggcggcgtgccgttcaccatgacccgggtgaacatcatcaaaggtctggggccggtgctgcaaattgccgaaggctggagcgtagcgctgcccaaagcgatgcacgaccagctcgacgcccgcaccaactccacctggcccaccacctggtttgccccacgcctgaccggcaagggcccgttcagcgatgtgtactcggtgatggccaactggggcgccaaccacggcgtgctgaccatcggccacgttggcgcagatttcattaccctcgccgccatgctgcgcattccggtctgcatgcacaacgtggaagaggcgaaaatctaccgcccttccgcctgggccgcgcacggcatggatatcgagggccaggactaccgcgcctgccagaactacgggccgctgtataagcgttaa

SEQ ID NO: 232826 - DNA, 675 bp, Klebsiella pneumoniae
gtggcgtgggagccgccggcgccgcgcagcgtggcgatggtcgtcccgcaggagagcgacattcgccagctcagcgatctgcgcggtaaacgcatcgccctcaataaagggtcgaatgtccactggctgctgctgcagatcctcgaggacgccggcctgggtctgaacgatgtgcgggtggtctataccccgccgaaatatccgctgaccgccagcgactatctggcggttgacgcctggatgatgtgggatccgctgctcagcgacgccgaacacaccggcgagctgcgggtggtcgccagcggcgaaggccgggtcaacaaccatcagttttatctttcgcgacgggactacctcgctcagcatggcgatatcatgcgccgcctgctgacggagctgacccacaccgggcagtttatcgactcgcatcgcggcgaagcggcccgcttactctcggcagagctggggatcgacgcccggtcgctgagcatggccctcgcccgccgcagccatcgcccgcggccgatggatctgtcggtgatccgcgcccagcagaccatcgccgatcgcttttacgccctcgggcttatcgccaaaccggtcccggtgcgcgaagcggtgtggtacggcgaacccgcgccggacgtcatcagaccgctgatggcggtcagttag

SEQ ID NO: 232827 - DNA, 1173 bp, Klebsiella pneumoniae
atgacgcagcaagctcccgacaagatcaatgtcttctggttcttacctacccatggcgatggccgttatctgggtaccaccgagggtggacgcccggtcgatttaccttatctgcagcaggtggcgctggcagccgacagcctgggctactacggcgtgctgatccccaccggtaaaagctgtgaagattcgtggctggtggcctcggcgctggcgccgttgactcgccgtctgcgctatctggtggcggtcaggccgggcctgcagccgccaaccctggcggcgcggatggcggccaccctcgaccgtttatcggaaggtcggctgctgatcaacgtcgttaccggcggcgacccggtggaaaacaaaggcgacggtatcttcctcagccacagcgagcgctatcaggtgacccgcgaatttcttgatatttacacccgcctgctgcgcggggaaaaagtggattatcacggcgagcatattcacgtggaaggcgctgaggtgttgttcccgccggtgcaggagaatggcccgccgctctatttcggcggctcttctgatgcggccattgatgtggcggccgagcagatcgacagctatctaacgtggggcgaaccgccggaactggtggcggagaagctggcggtggtgcgcgagcgcgccgcggcccgcgggcgcactctgcaatatggcatccgtctgcacgtcatcgtgcgcgaaacggaagaggaggcgtgggccgctgccgaccggctgatcgcccatcttgacgacgataccattgcccaggcgcaaaagatcttcgcccgtatggactcggctggccaggcgcggatgagcgccctgcatcagggatcgcgcgacaatctgcgcattgcgcccaatctgtgggccggcgtcgggctggtgcgcggcggcgcgggaaccgcgctggtgggtaatccgcagcaggtggcggaacgcatccgcgaatatcaggcgctcggcatcagcaattttatcttttccggctacccgcatctggaagaggcacaccgctttgctgagctggtgatgcctctgctgccgctggaaaacgcggcctcgtcgaaggcgcgcagcgtgaacaccggtccgtttggcgaaaccatcggcggcgataagcgcccggtgcgccaggccagcgccagctga

SEQ ID NO: 232828 - DNA, 1398 bp, Klebsiella pneumoniae
atgagtgcagaaccgcatatcgtgattatcggcggcggctttagcggcgcggcggtggcgattgagctgctgcgcctggcgccgaatgaggtgcgcgtgacgctgctggagccgcgccagtcccccggggccggggtggcctactccactgcggagccgacgcaccggattaacgttccggccgctcgcatgcagctggccggcgacgaagagggcgccttcgatcattggtaccgccatcagcctgcctttaccgtcgatgtgcaggcgctgcgcccggacggttccgtctaccctcagcgcggccagtttggtcgctatgtggcgcagcgttttgccgacgccgcggcgtccagcggcggacggcttcgccacctgcgcgatcgggcgctcgcttttcatcaggggatggtgaccaccgacggcggcctgcagcttaaggccgatctgctggtgctggcgatcagtcatccaccgccttcgctgccggcacaggccgaagcctggcgtcatcatccggcgctgattgccaacccgtggcagccgggcgcgctcgatgccatcgccccgcacgcccgggtggcggtgatgggcaccggattaaccatggccgatacggtcgcgacgctggaccggctgggccaccgcggcagtatcgtcgccttttcgcgccatggcctgctgtcgcgcggcaaccttagcggcgcaggggcaacctggcctggtgactatcagcagggcagcctgcgccagcgcctgcgtcagatccgcctcgacgtcgcgtatgcggcgcagcagggcctgagctggcaggtggtgctggatgcggttcgtcagcaggggcaacggatctggcaggcgctcagcgtcgccgatcgccagcgttttctgcgccatctgcgccattactgggatgtccaccgctaccgcgtggcgccgcaggtcgccgaggtgctggaggcgcgccagcgcacgggcagtctgcaggtgcaggcggccaggctactgtcgataagcggtgaaggcgaaacgctgcgtctgacgctggcgcggcgcggcggcggcgtgcagacgctgagcgtcgatcacctgatcctgaccaccggacccgcacaccgcgccctgaccgacagccagccatttttacaggacctcgcccgccgcggcctgattcgcgccgatgccctcggcatgggcctggaggtggacagccgttcccgggcagtggctgagccgcacgttgaggcgctgccggtgctggtggccggtccggccgcccgcgggcgttttggcgaactgatgggcctgccgcaggtagccgaccatgccgctgacgtggcggcgcaagcgttactcacgctcgggatcccgcaggactcccgatgtcctgcgtactga

SEQ ID NO: 232829 - DNA, 726 bp, Klebsiella pneumoniae
atgcagaagaataaaaaagaaatactttctataaacaaatatctactttccattgttttctcattactcacacttgcaacctttttatttctttatattattataaaatcgttatctttagcacctagtttcaccggaactgcaagtgatataataattgcattaagcaatatagttatagccacatgtgccattttagctctcaaaaacatacgtaaattttttaaggaaaaaatgtatgagaatgcactcggtaaaatagacaaatctttaataaatcttgaagaatgttttgagcatctttcttctatatcattaaattttaagctaatcagtatttacatggaagatggcaataatctaatagatgattttttcaaaaaacaagtctctgactctaacgactatgtattgaaagcattaaattctatccatcaagccaaatcaggagttcagtctttaaaaaggtgggatataacctttgagtctcctcaaggattaagactggagaaacttttatgcaatacatttgaattatgtatttactcatctaaaatccctctttcaattgcaaataaattaaaaaggaatcaggaaaccataataaaagagaactttagtgaactttacgaaaaattcataaatgattaccatgaattagataaagaaaatgattctctaaaagagtactccattcttgaactctttaaaataaaaaataaataa

SEQ ID NO: 232830 - DNA, 1194 bp, Klebsiella pneumoniae
atgaatacagaaagtttagccgaagaacttgatgaactttttacaaaaataaatagcaccccacaacttaaactaccattcaaagtcaaatcagacatcatcaatgattataaagaaaaatgtgaaatttactttaacatacttcatgattacatagatgaacatgaggataggttatcaattagattaaaaaacagaatgaacagaattactacaatttattatggaattgtcgctgcattatctgactttttgtcaggcgatataaaatcggcttatgacaactttgattctactttttcagaaagaaacattgtaaagtacatacaagcaatctccaccccgctaaataatctatgtaacgcagacaaaccactttttcgggtgcgaaaatcacatagtgcgattagcgaaagaaaggatatatttcacatcccattttccatgcgccaccttgtaaacgctcagaggtactctgtagctggactaccttgtttatatttgggttcatctctttatgtatgctggttagaaatggataagcctgatttcgacaagctttatatatcatctttctcttcaaatgactctgagtctaaaatcttgaacttcacagccgatataatatattcaaaatacaacaacatccaacgaaaaaatattttatctgtctatgaaaaactagcttacatttgtcttatgccattgatatatgcatgtaattatgtaaagaaaaataatagcgtatcatttacccaagagtacatcatcccaaacttattaatgcaatggattagccgcagaagtaaatcaaacatcgtaggaattgcttatcgctctacaaaaatggttaaaacttcacacagtgataaatcaataaatgttgtactccctcccaaagtcagttatgcacaaactattcaaatggatttttgccctaacttattgaaaatgtttgaccttaccccacctgtatcttggcaggttttgaaaaccctagattatacggttgatatggacggatattctgaagtactttcagccactcgatatttaaagcgaaaggaacgcctttcgggaatacaaaactttgacgatgatatagtcaatctctatccattgacagatttttataaactggaaaaatgtatagataacctccttgaatatgactcaataattgataaaaaataa

SEQ ID NO: 232831 - DNA, 516 bp, Klebsiella pneumoniae
atgcctgggttagaaaatgcacagcaaaatcaagttgatgaaatcgttccagcaatgcaaatcgaattcgtcgaagaagagatagaacagcccgtcgctgctgaatacctatatagccagcatataagtgcgcttgtgccacaatgccctcctgccgaagcgacagagtgtgacaaagaatgttggcgttttacgctgaatcctataactaacaactgcttttggcctccgaaaagacgatcaccgcaaagaattgcttccgatgatgctcaggagtgctctatgtgggcattgtctatgtatgaatcagaggtccaggctacaagagcttataccttgttagcgaaaaacatgaaaaatatcagaaaagctattggtgatcatcttgcaatgggttcagtaacctgtagtgatggtaaatgtatgcctgctaacagaaaaggtcactttgattttcatccttatgtggatgcgaatttcgctaacgggttccaagtaatacgagcattaccatga

SEQ ID NO: 232832 - DNA, 1092 bp, Klebsiella pneumoniae
atgatcagattagatgctaaaagaataaatgcgtcaactgtcggggattattcttggtactctgacctcgtatacttcgatggtcccctcatttgcttgtttagaggaagcggatacaaagatgctctttatgtttggcttgataattcggagcgtgccaatcgttggtgcttaattccagtatcaagatctactttggactcttatcttaatcaaaggatgagtttaagggagattatacagtcaagcgaatatacgtatatttgtaatcattatgctgaaactggaaggaagaactacaaccttttgcacgttgatagttttcctgaggaatacatgcctgatgaagattcatatttgtatgaagaaatatgtactgatgatgcattgctgttgaagcaggaacgcacttccagttatatgcttggattggataaccaattgtttataaatgatttatcggtaataccaaaaattttcgagcagctttattctttccattacggattggctcacttaggacggttgtcgattagaaataccatgttgcgcttgatgggtaattggacggggggaatatcagcagtaaatatattctcagggttgaaaaatgttattcctgttttgcatcgaccagagattagctctctccaatataattcaccggggcatattgagttaaatttgcttcctgatttggctcagagtgttcaagatgcatcagttcgtgtggaaaatgagataatttatggccgcttggagaaaatgtataaaaatacatatgcatacttcaaagagaatgggctatcaggttttgatgaagacggtggtattgaaattagaaatatcgataatgacaccactgaaaacctacgtaaacgcgtgaagatattttttagatgtttgggatggtcaagttatcaagctcagtttgatctgattggtgcccatcctctacaacaattacgtgctgtgatggcctactacaggcggcttaaaatcttgcgtgaatacattgtctccgagaagctttttgttggtcagtctcgggtagtgcggcagccagaaattgcccttcctcctgaggcatag

SEQ ID NO: 232833 - DNA, 1665 bp, Klebsiella pneumoniae
atgtcactaagtgtggtaagagaacaaattcttaactttgtttctaaatcagccccttcggttatggcaattaaaggagagtggggggttggcaagacatttagttggaataaatttctcctggaagcgaagagtgaaaatatgatttcagcttcacgttattcttatgtttctcttttcggcatatcttcgttagatagattgaaatattctatttttgaaaatgcagtttcaaaagattccataggacatgatccaagtttagatagtttaagaaaaaatactttaggtatgcttgaaatattggggagaggttcttggagtaaattgaaagagctgccgtatataaagtctgccgctcctgccatagaagcatggtcatttatgtctgtgtcagattcgttaatttgcatagatgatttagaacgtaaaggctcatcattagaactcaaagatgtattaggtcttatttctttgttaaaagaacaaaagaaatgtaaggttatacttttactcaatgatggtactaaagaagttgctgattatgaaaaattcaaagagaaagtaattgatattgaattgcatttttcaccaacaccaaatgaatctgcacagatagcatatgataatagtaaagacttccataagccgttagcacaatatactatttcgttaggtatcaagaatattagaattttaaagaaaatagaacgaaatgtagaaaatgcatggcgtgcttttgaaggttgcgaaagtgaagttaaaatgcaatttttacatacggttgtattaatgaattgggcctatttttgctctaaatcagataacgatattcccactttagatttcctggagtctatggaaagtatttactcaataggtaaaaaggatgctacagaagaagagaagaaatggaagggtattctactgagctataattttaccagagttgatgaattagatagaaaaattgccaagctagtcaggaatggatatatagatatgacagagcttagtgagtcgataaagattgtaaataaacaggttttagataataaaaaagcaaactcatttagaagtgcatgggatttgtttcataatagttttgatgaaaatgtagaagaggttgtttctcatttttataaatgcttcacagatagtgtaactcaagtatcgcctaatgatcttgatagccttgtcggcgtcttccgtgaactaggcgaggatacaaaagcatctgagatgattacgtattatattcaagaaagacgaagtgaaactgagttgtttgatgtagatgatttttatcttattagaccaatcaaagataaagaaattattgagaaatttaaaggtgtatatctaactgattcaccaaagcgcactttaggagaggttttggatgtactcagtgggcaaaatggctggaatgatgatgatgtagaagtattaagcagtgccactgaagacgattattatcattattttaaaagtttacatggaaatcatttaacatcccatgttgctacttgtctgaaatttggccgtattagtaatgctgacgagaaaacaaggtcggtttctgtaaaagctaaggaagctttaatgagaatttctgaagagagtaaactgaatgagctaagaatgcataaattcaacttgtag

SEQ ID NO: 232834 - DNA, 2574 bp, Klebsiella pneumoniae
atgcgtctggatcgtcttaccaataaattccagcttgctcttgccgatgcccagtcgctcgcactcgggcacgacaaccaattcatcgaacctcttcatttaatgagcgccttgctgaatcaggaagggggatcggtacgtcctttattaacctcggcgggcgtgaatgccgggaaactgcgcactgacatcgaacaggccttgagccgtttaccgcaggtggaaggcaccggcggcgatgtgcaaccttctcaggatttagtgcggatcctcaacctttgcgacaagctggcgcaaaagaaaaaggacaactttatttcgtcggaactgttcgttctggcggcgcttgaatcacgcggtacgctgaccgaccttttaaaatccgccggagcaacaaccgccaacgtgactcaggcgattgaacaaatgcgcggaggggaaagcgtgaacgatcagggtgccgaagaccaacgtcaggcattgaagaaatttaccgtcgatctcaccgagcgtgccgagcagggcaagctggatccggtgatcggccgtgatgaagagattcgccgtaccattcaggtactgcagcgtcgtaccaaaaacaacccggtgctgatcggtgaacccggggtgggtaaaacggcaatcgtcgaaggcctggcgcagcgtatcgtcaacggcgaagtaccagaagggctgaaaggccgtcgggtattggcgctggatatgggggcgctggtggccggggcgaaataccgcggtgagtttgaagagcgtctgaaaggcgtgctgaccgacctgtccaaacaggaaggcaacgtcattctgtttatcgacgaactgcataccatggttggcgctggtaaagccgacggcgcgatggatgcgggtaacatgctgaagccggcgctggcgcgtggtgaactgcactgcgtcggggcgacgacgcttgatgaataccgtcagtacatcgaaaaagacgccgcgctggaacgtcgcttccagaaagtgttcgtcgccgagccttcggtagaagataccatcgcgattctgcgcggtctgaaagaacgttatgagctgcaccaccacgtgcagatcactgacccggctatcgtggcggcggcgaccttatcgcatcgctatattgccgaccgtcagctgccggataaagccatcgacctcatcgatgaggcggcatccagcatccgtatgcagattgactccaaaccggaagagctggaccgtctcgatcggcgtattatccagctgaaactggaacagcaggcgctgaagaaagagtctgatgaggcgagcctgaagcgtctcgatatgctcaacgaggagctggcggataaagaacggcagtactcggtgctggaagaagagtggaaagcggaaaaagcgtcgctctccggcacccagaccatcaaagctgagctggagcaggcgaaaatcgccatcgaacaggcgcgccgcgtcggcgatctggcgcggatgtccgagctgcagtacggcaaaattccggaactggagaaacagctggcggctgccactcagtccgaagggaaaaccatgcgtctgctgcgtaataaagtgacggatgctgaaatcgccgaagtgctggctcgctggaccggtatcccggtctcccgcatgatggaaagcgagcgtgacaaactgctgcgtatggagcaggagctgcatcatcgggtgattggccaggatgaggcggttgaagcggtatccaacgccattcgccgcagccgcgccgggctgtccgatccgaaccggccgattggttcgttcctgttcctcggtccaaccggggtcggtaaaaccgagctgtgtaaaacgctggctaactttatgttcgatagcgacgacgcgatggtgcgtatcgatatgtccgagtttatggagaaacattccgtctcgcgtctggtcggtgcgcctccgggatacgtcggctatgaagagggcggttacctgaccgaggcggtgcgtcgtcgtccttattccgtcatcctgctggatgaagtggaaaaagcgcacccggatgtgttcaacattctgctgcaggtactcgacgacgggcgtctcaccgacgggcaggggagaacggtcgacttccgtaatacggtagtcatcatgacctcgaacctcggttccgatctgattcaggaacggttcggcgagctggactacggacatatgaaggacctggtgctgggggtagtcagccagaacttccgtccggagttcatcaaccgtatcgacgaagtggtggtcttccatccgctgggcgagaaacatattgcctctattgcccagatccagctgcagcgtctgtataaacgcctggaagagcgcggatatgaagtgcagatgtccgatgaggcgctgaagctgctgagcgccaacggttacgatccggtatacggcgcgcggccattgaaacgtgctattcagcagcagattgagaacccgttagcccagcagatcctttccggtgagctggttccgggtaaaaccatcgagctggtagtaaaagacgaccgcattgtggcagtgcagtaa

SEQ ID NO: 232835 - DNA, 501 bp, Klebsiella pneumoniae; identical to SEQ ID NO: 206489

SEQ ID NO: 232836 - DNA, 1488 bp, Klebsiella pneumoniae
gtgacagacgccgctttatccccggaagaacagctgatcgaagatatcgccagcttcacccatgacccgctgggctatgcgctttatgcgttcccgtggagcgaggagggtacagagctggcgcacgccaccggtccgcgtaaatggcaggagaggacattcaggaggatagggaagcacctgcaaaaccctaaaacacggcaccagccgctgatgattgccagggcctctgggcacggcatcggcaaatctgcgttcatctcgatgctcatcaattggggtatggcgacctgtgaagattgcaaggtggtggtgaccgccaacacggagaaccaactgcgtacaaagacctggccggaaattacaaagtggtctcgcctggccatccatagcgactggttcaagcctaccgccaccgcgatatacagcaccgaccctggccacgataagagttggcgcgctgatgctatcccatggtctgagaacaacaccgaggcattcgccggtctgcacaacgagcgcaagcgcatcatcctcatattcgacgaagcctcaaacattgccgatctggtttgggaggtggcagagggggcgctgactgacgaaaacacagagattatctggatagcgttcgggaacccgacacgtaacagcgggcgcttccgtgaatgcttccgcaagttccgccaccgctgggactgcgagcagattgacagccgaaccgtcgaaggcacgaacaaagagcagctccagaaatgggtggatgactacggcgaagacagcgacttcgtcaaggtccgcgtgcgggggatcttccctgatgcgtcagaaaaccagttcattccgtctggactgacacaaccagccgtgggcagggtgatcactcctgcgcaggttcagcatgccgcggtggttcttggtgtcgacccgtcacaccagggtaaagacccggcagttatttacctcaggcagggtttgcattgtaaaaagcttggagagtggcaacgaaccactgatgacgtgtggtttgctaaggtgatcgcagactttgaagaccagtaccaggcggatgccgtgtttattgactatggctatggtaccggccttaaatcagttggtgataactgggggcgttcctggacgctaattcagtttggtggcggaacatctgatccagagatggggaataagcgcggagagatgtacaaatctgcccgcgacgcgctgaagctcggggcgcaactcgacagccaggatttagccgacgaactgagcgcgccggagtacaaagtgcgtctgaaagacagccggaagattttgcaggaaaaggacgaagttaaggagttgctggggcgctcgccgaacaatgccgatgcctatgttctcacctatgcattcccggtgactaaaaaacaattcaattatgggcaggaaggggccggcggcaagcagtccaacgtgatcagcgagtacgacccgtgggaataa

SEQ ID NO: 232837 - DNA, 450 bp, Klebsiella pneumoniae
atgactgatatcaccgaactggcgcagagagagaaattcgaagcgtgggcagaagaggctggcgcgcttccatggggaatacttggaaagcaccgtaagcaagacggaaattatccagggccccattacacctacatgtggaaagcatggcaggccgcaagtgctgagctggtagaggcgctggagaaggcgcagcgtgccaacggacaccttcgcgagcagtctgctgagtgggaacgaaaggctatcagcaactttgaggagtgcgcgaagttgagtcagcgagttgaagaactggagttccgcgccgtcactgtagaaaacctgcaggagagcgcctacagagctggcttaactgctggctggaatcttgggctggctaataacaacgacgggttcaataaatgcctggcggctcatacggctggcatcaaggtggaggctgagtga

SEQ ID NO: 232838 - DNA, 753 bp, Klebsiella pneumoniae
atgatccacttccacggagggccaatcacgccagatacctgtgcgttgaaagcgtggaaggggcgccatgcgttcattagctttgcaaacgctggtcagttagcgctggctagtgaggttacgcagtcatttgccctggacaatggcgcattcagtttctggacgaaaaaacgcgttgtggactggaacgagtattaccggttcgtcgagcgttgggctaatcacccgcggttctcattcgccattatcccggacgttatcggcggcagtagcgaggaaaacgatgcgttgatagcagagtggccgcacggaaagttcattggggcgccagtgtggcacatgaacgaaccagacgagcggtttattcaactctgcaatgagttcccccgcgtggcaatcggcagcatgggcgaatacgacgcaaagcgcccgcgccgctgcgtggctcgcctgcgtgacttaatccggcatgttgtggatgagaacggcaacccgatttgcaaactgcacggcctgcggatgctcaatgccgatattttccgccatataccgctgtcatcagctgatagcacaaacgtggcccgcaatatcggtatcgataaatcatggcagaaatcagcctatgcaccggccagcaaagaaacgagagccgctgtactcgttgagcgtatcgagtcaatgaacagcgccagtgcgctcaactataacgccgaacgcgaccgctttatgccgcaattggcctttgagatttag

SEQ ID NO: 232839 - DNA, 960 bp, Klebsiella pneumoniae
atgacgccttcagcttactacaacgagatcgacccattcgcggcgcagtggctgcgtaacctcatagccgccgggcatatcgccccgggcgaagttgaggaacggagtattgaagatgtcacacctgacgacctcagaggatttacccagtgccactttttcgccggtatcggcgtctggtcccattccctccgcctcgccggatggcctgacgatcgcccggtctggactggctcctgcccgtgccagcctttcagcccggcaggcaaaggagatggatttgctgacgagcggcacctttggccccagttcttccacctcatcagcgagcgcagacctcagcatgtctttggcgaacaggttgcagcaggtaacgcaaacgtatggttcgaccttgtacaagctgacctggaaggaatgggatacgccttcgggcttgtgccgtttacgtcagcgggcatcggcgcaccgcacatcagagagcgggcctactgggtggcccacgccggtagtgggagatatgacaggcggaccgcggccgccggacaagaaacgcgggccggcgccgggattgcaatcggcgtcggcattggcgggttgggtaacgccaacgtcgcgcgactggaaggactcagcgggaatgactgcccagcgggacgggaaggagcgactggaccagctgccgcgtcaggcttacacctgcgggcccttgaggttaacggtttttggcgagatgcggactggctcttttgtcgagatggaaaatggcgtccagttgaacccggcacattcccgctggttgatggggctgccgcacgcatgggacgagtcgagcccggggtggcaagagtggcaagcagcaaccgcgtcggccgcctgaaagggtacggtaacgctataaacgcccaggccgcagcggctttcattcgcgcttatatgggggtgcaggatggccagtag

SEQ ID NO: 232840 - DNA, 1857 bp, Klebsiella pneumoniae
gtgtccgaatcggagtcgctgtcggaatccgagtcgctgtcggagtcggaatcgctgtcagagtccgaatcactgtcagaatccgaatcactgtcgctgtcggagtcagagtcgctgtccgagtcggagtcactgtcagaatccgagtcgctgtcagcatccgagtcgctgtcagaatccgagtcactgtcagaatccgagtcgctgtcagagtcggaatcactgtcagagtcagagtcgctgtcagaatccgaatcactgtcagagtccgaatcgctgtcggagtcggagtcgctgtcagagtccgaatcactgtcggaatcggaatcgctgtcggagtccgaatcactgtcggaatcagagtcggagtcactgtcggaatcggaatcgctgtccgagtcggagtcactgtcagagtccgagtcgctgtcggagtctgagtcgctgtcggagtcggaatcgctgtcagaatccgaatcgctgtccgagtcggagtcgctgtcagaatccgaatcactgtcgctgtcggagtcggagtcggagtcgctgtccgagtccgaatcactgtcagaatccgagtcgctgtcggaatcggagtcggagtccgagtcactgtcggaatccgaatcgctgtcagcatccgagtcgctgtcagaatccgagtcgctgtcagaatccgagtcgctgtcagaatccgagtcgctgtcggagtccgaatcgctgtcagagtcggagtcactgtcggagtcggaatcgctgtcagaatccgagtcactgtcggagtcggaatcgctgtccgaatccgaatcactgtcggagtccgaatcgctgtcagagtcggaatcactgtccgaatcggagtcgctgtcagagtcggagtcactgtccgaatcggagtcgctgtcggaatccgaatcgctgtcggaatcggaatcactgtcagaatccgaatcgctgtcggaatcggaatcgctgtcggagtcggaatcgctgtcagaatccgagtcgctgtcagaatccgaatcactgtcgctgtcggagtcagagtcgctgtccgagtcagagtcgctgtcagaatccgaatcgctgtcagaatccgagtcactgtcagagtccgaatcgctgtcagaatccgaatcgctgtccgagtcagagtcgctgtcagaatcggagtcgctgtcggagtcggaatcactgtcagagtcagagtcgctgtcagaatccgaatcactgtcagagtctgagtcgctgtcggaatccgagtcactgtcggaatcggagtcgctgtcagagtcagagtcgctgtccgaatcggagtcactgtcagagtccgaatcgctgtccgagtcagaatcgctgtcagaatcggaatcgctgtccgaatccgagtcgctgtcagaatccgagtcactgtcagagtctgagtcgctgtccgaatcggagtcgctgtcagagtcggagtcactgtccgagtcagagtcgctgtccgagtccgaatcactgtcgctgtcggagtccgagtcgctgtcggagtcggaatcgctgtcagaatcggagtcagagtccgagtcgctgtcagagtcagagtcgctgtcagaatccgaatcactgtcgctgtcggagtccgaatcactgtccgaatccgagtcgctgtcagagtcagagtcgctgtcggagtctgcatccgcatcggagtcgtcgatcagttcaatagtgacaacaaagggaggagatgaatcacttgtattaccagcttcatcagtgacaactgttgtgaaggaatgctcgcctttaggcaacgctgaggttgtaaaactccaattcccattttcagcaactaacgctgtacctatttga

SEQ ID NO: 232841 - DNA, 2118 bp, Klebsiella pneumoniae
atgacagttcaggctataaatatcaccaacttgttatcattcgatgagctgagtgtagataacttaaacgacataaactgcattgtcggtcgaaataacgttggaaagtctaacttacttaaagttcttaaattcttctacaataaactagaaggtaaagaagagttgcctccaaagttaaattctaattattcgtataaaggttctatatcaataacttatgatatgaccagaatttataggatagccaggaaacaacctaaaaacaaatattttgattttatcatccgaaaattggtgcctctacataaacgcagcatatttgcattaacacgctacgacaatgattacactacatatactttgacgctgaacatatacagcgatggtaaagttaaatggtcaacgaaagataaacaaactttaaaccttatactttatctatttccatttttccatatcgaacctagacacatggatttacatgaatgggatagcttatgggatcttatatcaagagtaaaatccttcaatttgtctaaaattgatgaccaatctgtaattgacttttttgatagttcaattaattcgagtggtggtaattcgtataaaaattatatttcagatttaaacaaaacaatatctacgaagccaagttcccagaaagaaaaggtgctgagctatattaaagctggattaaaaggttatcggtttgaaatagacgaaaatgatttaaagtttcactcagatggaacaaactcatttcatttcataaaaacctttcttaggatactaattacaatatcaagaagagaatacataacgccatttgtttttattgatgagccagagctaggtctgcaccctaaaatgaacgaggtcctagttcaagatatatttactagttacaattataatgaaaaaaaagatgatcgagttactaggcctaaagtattcctaacaactcattcgcctaatatagtaaaagagataattaaaaaattcagacaaaaacaacgtgtttattgttttcagaagaaagttgatgctaaaactacgattaacacattaaattcaacttatgacaacgagagctttataaatatttttagcgacaatgaggcaagattgttttttagcgactttatcctatttgtagagggtgaaagtgagctggaagcttttggaaacatgaagatgactgaacattttcctcatttaaaaaatatagatatttataaatgcagtagcaatgttattggtgaacgagttaatccttcatactcaaattcaacaattccatacctatttttattcgatgctgacaaagcaatatcaattaaaggtgagcctcatagtttatctataaagctggaaaagaatggtaactattttaactttaagccagatactttaaaatctgaacttaataaatataagttgggttttagtaagaagtacaagacaaaaagagaaaatattgagacgttattatccgttataaatcaaaaggtaaaagtaaataatacaactcaaagttttctggatgagtctgactttgagtcgatatttactgctgttaaaagcaggttgcttgatgagaatatttatctaaatagaacaacattagaaggctgtttaattcagaaaaatagttcaataattgtatatggatggttagacaaagaacataattctaattttgattctatattacagcgtataaaacgaagcaagtatgttacagaggatatgctcattgattacattagagttatttttaatggaaagtcaatggcattaactgactatagccatttcaatgttgaggcatacaagcaagctttagaaaataagagaaaggtaagcggcaaattacgatacacctctaggcatgcaaaaatgctaatgaagctattagaagagaacactgtacacaacaaataccttgataaaaccgatgggtggactacaagctttctaaatcatgccatcgaattcgttgagaaagaatctttagctaaaaatcaaccatttggcacagtatttaaagttttctttcccgaattttatgatatcattcgtatgcttcaacccgatagtagaggggagatatga

SEQ ID NO: 232842 - DNA, 1101 bp, Klebsiella pneumoniae
atgatgaaaaataatattagcgatgacttctttaagaaagcaatacttaaaggcaatgaagatcttctaaatgatttctctcctgccgtcagagagtttaaagttggttgcgataacttttttgaaatttctaaagactctgaacacaagcgtataaatgataggataactaagtttgttctagctaaaatccccattaactcatctgcatgcggatttgttcaaggtaaatcttattacgattttctaaggcctcatatccaaggatattattttctacgattggatattaaaaatttcttccattcaatttctgcgcataaagtaaaaaatctacttgctcagcacttcaataatgaaaagggcggaaataaatattcagctctagacattgcatatatggctgttactcacaaggttagtgatacttatcttgacaaagatttccgtggcaaagaagtgttgcccattggattttcatcttcgcctgtaatatcaaacataatattcagaaaagtagatattcttattcaaaagttgtgtgaagacaaagggattatttactctcgttatgcagatgatatgtttttttcttctggtaacagtaagtacctgcattctgagcaatttgaaaaagacatctctatcttcgtctctacactttcgcttaagttgaaaaaaagcaaaaggaaagcgactgagaacactatatccctcaatggttacgtagtacagaacaggaaaaggaagaaagactttttccatgtatacaaagaaaagcctgttgggaatatcaggctgtctgataaaaaacttaaacctttgaaaaaaatttccgcattgctcaaaaaacaaaaatctccaatatatataatggagagcgtcttccatttaaacccaagaaagtttgccctaagatacgggaataaattttatttttattccaagtatgcggatgatcaattacagaataaattgaaaggttaccgttcatatttagtttcacttataaagtacaatgataaatatagatgtgtcaatatcgattgcatgaaaaaaattaaagagctcgttgaagttttcgagtccaacatcaaataa

SEQ ID NO: 232843 - DNA, 1170 bp, Klebsiella pneumoniae
atgagcgagataagttatctggaaaagctgttggatggggctgatgttgagtggctgtcgctagggaaaatacttgtacgaacgaaagggactaaaataacagctggacagatgaaggtgcttcacaaagacaacgctccgctcaaaattttcgcaggaggcaaaactgttgcgtttgttgattataaagacataccggaaaaagatataaatagaaagccatctatcattgttaaatctcgtggtgtgattgaatttgagttttacgacaagccattctcacataaaaatgagatgtggtcataccactccaaaaatgaaaccattaacatcaaatatatctattattttttgaaaatgaatgaagcgtactttcaaaaagttgggggcaagatgcagatgccacaaatttcaactccagatactgataaatttagagtgccaatcccctgcccagccaacccggaaaagtccctcgccatccagtctgaaatcgtccggattctggatacatttactgaacttaccgctgaacttaccgctgaacttagcatgcgtaaaaagcagtacaactactatcgtgaccagttgctgagttttgacgatgttgaggttgagtggaagacgctaggagagttggcagagaatcttgactccaaaagaaagccaatcactagtggtttgagggaagcagggaaaataccttattacggagcatcagggattgtcgattatgtaaaagattatattttcgatggcgactttctattagtatctgaagatggcgcaaacctgttggctcgcaatactccgatagcgttcagtatcagcggtaagacttgggtgaacaatcatgctcatgtgcttaaattcgatacctatgcagaaagaagatacgttgagtactatctgaatagtattgacttaacaacctatatttcaggtgctgcacaacctaagctgaataagaaaaacttagagagcatccgtatcccaaatccgtcgccagaagaaaaagagaggatcgtttcaatcctcgataagtttgatgcattaacaaactctatcactgaaggccttcctcgcgaaatcgagctacgccagaagcagtacgcatattatcgggacatgttatttagcttcccgaaacaggaagtggcagaggcgtga

SEQ ID NO: 232844 - DNA, 630 bp, Klebsiella pneumoniae
atgaaattacttaccactacattgctggctaccagcatttgtctgagtgcagtttttccggctgacgctggcaatatcgtcggctctgttaaagcctgggagtacatgcaggctgacggctggaaatcagctgacggcatggatgacaatacgctgcacaatatgctctaccaggccaatgttattgataactacccgtggacgaagcagtttttgctacgtacccgtggtggtggtgcaattttccttgccgataagaaaacccacactattcgtcaactaaaactgaatcctgtcggtgaaacctacaacgatattgaaacggtttaccagggagaagataaaggagatgggtgttatttcgccattgtagacaatcaatcctcggcacggcaaaaggccattgatgaccttcttagttacccccttgtagataatgttgacgctaaagctaaacaaatcaggcagcagatgaccccgaaagtcgtcatggtcataccggatcgttgtgtgaataaacaacagcaagctgcattggcggctaaacgctcggaagaggatcgaaaattgcagcaatgggtagcacagcaaagcctggcggaattgtgccatcgcacaggcaactgctga

SEQ ID NO: 232845 - DNA, 396 bp, Klebsiella pneumoniae
atgaccataaaagctcgtattcagtcacggctgaagcgctcaaagcgttatgttttcactcgtgacgatttcaaagatcttgctggctacgatcaaataggcagagcactgcgtgagctgatgaaggaaggacagctactgaaagtaggctatggcgtctataccaaagcgcggcaaaatgcgattaccggtaagctgatgcctgctgctcccggaggttctgctgcggtaatgattgaggcgttggaacgtctgaaagtggattaccgtctggcaggagcaacaagtgcctacaacagtggtaaatctacccagatccccgcgtcacttgaaatcaaaacctccccccgtttcaagagaacattgtcagtagggagcagcaaactaaatggatga

SEQ ID NO: 232846 - DNA, 951 bp, Klebsiella pneumoniae
atggatgatttgacaaagctattcccggacgttgctgatgctctgggcattgaatcagttgcaattgtagagaaagatcattacatcgttgagttattgcgattgctccagcctctgtcctttgatacacatcagctggtttttgccggtggaacagcattgtctaaagcgggtatatctttgaacaggatgtcggaggacgtggacattaagcttgttcctgtcaccggcttttccctgcaatattccagaaatcaacgtaaaaatatccgtaaagatattattaagaccatcaccgaaacgattgtagcttcaggtatgtttagcatggatgaggagtacccaaaggttactcgtgatgaaaaccgctataatgaaattccggtgcgctacccgcaggaatatgtacaaattccctgtttaaggccatttatcaaactggaactgatggaaacggatttgcttgaggctgcggaaaatcgtgctattagctcactggtaatggacctaacaaagaagggcgaagtagtgagggcttttccctgcgcaactatcggcagcacgcaggctgaaaaactgatctcgatgatgcgcagaacggctgcaagtatgcgtgatgtggagcgtgcagtggatgagtcactggtgcgtcatatctacgacaacttttgtattgtcagagaaaaaggtgctgaggttcctgttttgaagcgctttgtgcaggaatgtattgagcaggatatccaacgttacggtgctcagtatcctgaattctgcgagtcgcctgttgaagaactaaaaatggggttggaagaactggcgagcaaccctgtttataaggaacgctatctgcagtttgttacaccaatggtgttcggtgaaagccacgtttcctgggaagaggcctatgcctgttttcgcataacggcattggatgtgattgatgcatag

SEQ ID NO: 232847 - DNA, 690 bp, Klebsiella pneumoniae
atgaatttagtcgggatttcgtataattttaacttcttcactaaaaataactcaataaaggcagatagtgagtcaatatataaactcatgccttttatcaatgatggctttatgccgacgactggcgatgaaataagtgaggagggtgatagatataaagtaattcgcgtacaaaaagaaaataaagatttaaacatatccattacattctctaaaagagcaattttagtacagataacaaaagataaagagatagacaacgtaaatataatggacatagttagttccacattttcaaagctgagagagacgctcggagacattaaaggcgatcgtactgcctgcattgcgaatgcaatacttgaaaacgataaagaaacagaagaaaaaatatataaaaaattcttttctgatgagccatcttattttgaatgggcgctaagaaaagcgagtagattcattgttgaaggtgaggaatccaacagcgttttagctgtaaataaaggactaggaactaaacaaaacaatgggacgggtaatattactcaaatagaagtcattgtagtatcttgtgacaataataccattgccgaaaacaacacacctagatttgaattgaataatattagcattttcaatgagttactaaagaaaacgaaaatggatttagataaagtcattggagattaa

SEQ ID NO: 232848 - DNA, 600 bp, Klebsiella pneumoniae
atgctttcctttatagattatataaaaaaaagcgctacacctaacattgaagacattcaatttaaaggaagcgccgatcttgaagtacccgagacaaaggttaagtctgatttttttaatcagattttaaaatcatcaaaaataaatagtagttcatctaatttctcatacttagatgacacaaagctttctaattatatatacaatacttttttgtatgacgatataagctatgaatctacaccaaaaacaaagtatgtgatagagaatatatctagggagttaggagtgcaaaaagtagattatgctcttcttgatatactaagcaaaaagatattcaaatcttctgacgaggatatcgtgaagtttttggctttattatcctcttttgatgttaaaactataccattaacttcattgctttccgtgactagcttgtactcgcacaagagtgatgttgtgaaagaaagtgtattatccactgtggaatactgggagtggccagacatagtacagtatctagaaagaatggaagattttaaaagaccttacttgcagaaatacaaagaagaggtcattgagaatttaaggagtttataa

SEQ ID NO: 232849 - DNA, 522 bp, Klebsiella pneumoniae
atgaccctgtattacattaggcgcataaaccctttgcggtggaatggtgatctaccaaaagacggaaattatctatctctaggtacagatgggattacgaactgctgtaaaaccactgacaatgaactatctatctggttaactgacagtaaaaacccagaaagcgaaaacaacaaaaaagtcttagctgtgattgctgcaggatctgaaaaaccatcaaaaattgattttattttcataagcgaagatgaatttaatgaacggaatctaaccctaaaagaaacacccggtaaaactgctgtttcatcaatgcgttaccttcacagggacattgagaacttagatgtgaaaaagctagctattctaggaatgcttatccatgaaaaagctaacgatgataatgaaattcacagagttagcacatctaaaataaaacaatatgttaggcatgcttttaaagatggcacaccacaggctgaagagataaaaagcattgatggttggtcaaaattatatgactga

SEQ ID NO: 232850 - DNA, 297 bp, Klebsiella pneumoniae
atggcaaaccttcgtaaagcggcccgaggccgcgaatgcacagtacggatccccgggtattgcaatggcaatccggaaaccagtgttctggcgcattaccgcctggcgggtacctgcggaactggatgcaagccggacgatactcagggagcaattgcctgcagtgcttgccacgatctcattgatggcagaaagaaaaccaccgattacacccgcgacgaactgcgcctgatgcatgcggaaggtgtgctaagaacattggctatatggaaaaaagaggggttactgaaagcatga

SEQ ID NO: 232851 - DNA, 2076 bp, Klebsiella pneumoniae
gtgaacggtccggccggaacggttaacgaccgcggcggtgaaccgctggatacgtggcgccagatgatggcgaaaaacgacgagatcaggcagaacctgatcccgctcagtaagcagtacgcgacgctggcggcggcgcaggcggatatcgcgaatatccccgaggggagcaccacgtattaccgcagcccggacgacagcgccctcgcgattgaggtcatgaacgttggcgggacgctgcagcctaccgggcggaaaatgccttctcaagcggccatccaggcagttcttgactatatctcatctgtcattgctactgatgatgctgattctcctttactgacacttaatgatgaggcggggtttcgtctggcggcattcggcctgaatgcaattcagagcaatgcgatgacggctgagtatgatgagtttattgatggttttgtattccgggatagcgtcggattcgttattcagcaaatagggactcctctgctcagctctgttgacagtgttcagcctgtcgttgagcagcagcgattggtgactgaggcattcagtgctgaatctgacgcggatatttctggttttgtatttcgcgacagtgtgggatttgtcctgatgaatctcaatggtgagcaaagcgatcagaataacgatggggtagatgacatttcacgcagaaatgcagcaaatcttgccgctgctgctgccgcacgggacgaaattaatacgcgtattgctcgcccggtttacgattacaatattctgatcacagacggccagtcgctgagtaacgggactgagggatgggcagcactgagcaaggacattcgcgctactctgaacattaatatgctcggtgactccgtccggccaaaaaatgagaatggttcaacatttacgccgttgaacggagctgaaatcagatcagcccgtgcggtggtgcaggatttaatcgcccctcctgacggcggaaaccttatgaccgatgaggctgtggccgcactgcctcgtggggctaacaatttcggtgaaaccgtcgatattggcgcgatgtggatgtggcgggaaatgcagttacagttccggggagtggtaacggatgagcgcaaaattgtggctgtgaactgcggtgtgggcgggcagattattgaacatctctctaaaggccattcctggggattctacaaccggatcatttcagccgttacccagattaaagccattgctgatgccgaaggtaaaacctgcggcgtggtgggttttttatatcttggcaatgaatataactatgacagcacaaaaggaggggcgacagaccgcgcagaatacagagcactcctgagaaagctcattgatgatgtcattaccgatactaccgctatcaccgggcagacagagccccccctgactgtgctgtatcagaccagcggcagctggacgcgcgacagcacgaatatgagcattggcgaggctcagctcgatatctgtgcagcagatgcaaacgtaatgatggcatcaccggcgtatgctgtcaccgacaagggtggccatcttgacgcgaacggctaccgctggctgggaatgcagttcggaaaagtgctccatcgtgcaattgatcgtcgccagaactggcgtccactgcaacccctgtcagtcacgcttagcggaacattcctgcgtgcggatttcctggtgtggagcccgccgcttcagtttcgagcgtgctacgtgggttcatctccgacgacgtatgccgcaaaaggattcagagtcactgacgacgccggggacgttccggtgacgcgggtcgacattgtagccgataccgtagttgatattacgctggggcgtgaaacgaccggcgatgtttatctatggtacgccagccagaccggaagtaacggtaacggaaatctgtttgacagcgacacaacggtcgctgttgcgaattacgaatttcatgaagggacagggcaatatccggaatcaaatattccagagctggtaaaccgtccatacccactgaataacccctgcgtggcattccgccgccaggcaatcattatctaa

SEQ ID NO: 232852 - DNA, 735 bp, Klebsiella pneumoniae
atgggttcacgcattactgttccgggttattttggtgataaaggcctgggttttgacccgctcattcgccgtggcctgaaatatttgaatttttatggagaggcagataaaaccggtcggaacctcgcacccggtggcgcagctgcaacggtactgggttcgcctgttgtgcaggaaaatggcgtccagtttactcctgccggaacattgctggatacaggcattctgcaatctgctgatttcacatttttcacaatcttcaactgtccgaccctttcacagattctgttgctcagcaattttaacggcccgaggcagtcaggctcaggcacaacgctgggcgtagtgctcagaacgcagcctggctcgacaaatatgacgttaaatttttctgttaacactataaatgggggcgtatcgacgcagcgcacagtcgggatcggcgggctgctgacaaacacaaactatttgctgtgcgtgcgctttaaatcgggacaaaaaatggactttcaaatcctgaacaaagctctgtcagcagagaaaacaacagatatgggcgacccggcggatttgggagcaaaactgcgtatcggcggtagttaccaggctgatctaacgaacgcagggattcaccgattttctgctttacacactgttgcgttgacagatgatgaaattacaaaagccgccactcagtggactgcctgggcaaacgccgtaggcgttgtactgtag

SEQ ID NO: 232853 - DNA, 738 bp, Klebsiella pneumoniae
atgcgcgaaaaaaaaataaatcccttatcgttgctaatagcgaaaacaactactaaattagtcaaagaggatagcattaaaaatggttcatacacttttttgaatttttattcttattttatttaccgaaagcaaccatcaaactacactttttttaagcatatctattgtgatggtattctactgcaaaaatgcctaaatttgttgggcgtcagttgtcaacgccagagctttgacatgacctctgttgcacctaaagtatttgaatattgtttattaaaaaaagcaaaggtttatatcattggtagcaaagaggaatatataaatacttttattcacaaaattaatcaaaaatatcctattgattgcgtaggctaccgcaatggttattttaaagatgaacaagacaaagaaacagctttgaaagaaatttgtatactcaaaccagatgtgcttatcgtgggtatgggaacacctgctcaagatattttcctaaaagagttgaatgaattaggttgggacggtattgcttttacatgtggtggttttattcatcaggtggcctctggtaagttaaattattatccagaaataataaataaattaaatcttagatggttatatcggatatatgatgaaccaaaactttttaaaagatacttctgttattatccattgtcaatgttgttaattttatatgattatttgaacatgagattaccacatgagaaatattga

SEQ ID NO: 232854 - DNA, 1125 bp, Klebsiella pneumoniae
atgagaaatattgattttaaaaagcgcacattattaaaatatgcaatttatgggttcccgattttaccagtattgttcaaagcaaaagtggctgttggtagcgagagttttccttcaaatgatggctttataagtatcagacctttcttagatcctaaagattggcttgattgtaattcaaaaaaaccattaaaggatcactcgtatgcattaattaatgccctcaaagaaagtaataaaatttatttgcctcctgttaaagggtattatctttttcaaaatgtagttctcccaaaagggactattcttaaaggtgaatcagagctaccctatgtagcaaatgatattaaagatataattggtaatgggtctgctgtttcaaattttgattctaaatgtcctatatttaaatttaacaatcatgtgtcgcttaagggacttgctctttatggtaataaaaatattgatggtctgatttctgcgacaggttctaaagtttcaaatattcgactttctaaatgtggtttttataatttcagaatcggtataggaagtttatcaaattatataaaagttgatgtagaagattgcaatgtttcttcaaataacattgggattgcaaacgttgttgattcaaagcttaccttatccacgataaacgcaaatgtaatgtatggtattaagttaagtgatggtgcaaatgacaatatcttttcagctctcaagattgagtggaatggcgaaaacaatctttatgtaaaaaatgctgtcaataatgttatttccacatctatacttgatcgatccggtaaggctggtatctatctcgaaaactccgaaattattttaaatgaaatcataataaggcgaagcggtggaagttcaaatataccgaaagaatcaacccatatttatatcaaaggtggtaatgcaattattaacaatattataaccaagtctgggcgtaatgatgacggtaaaggaaaattatctccagattttagtatttatgctgaaaatgacgctagtttaataatctctgattctgatctaactggtcgtagtgtagattcagtatatgaaatgagtgggaacgatatgaaaattcgcaattcaaaaaaataa

SEQ ID NO: 232855 - DNA, 507 bp, Klebsiella pneumoniae
atgaaatatctgcagcagcgggtgacgttccagaccactaccgagctggacgcgctgtgctacaacactggcgatcgcattgtgctgacggatgatattccgggtaacaacacgatttcctgtctggtggaggcgatgacaacggctggtggcgtgacaacgttcaccgtcacggagccgctggactggtcttacgaaaatccccgcgcgctgatccgctatcaggatggctctgcatccgggctgatggtggcaagcagggtggatgattttcagctgtcagtcccgcacctgagcgagtttgatgatccgatgaaggttgacctgtcgtcggcaaccattgagccgatccgcctggtgttctgcggctcaacgcgccatgtctacgacgccattgtagaggagatcgctccgcagtcagacggaacctgtcaggtcaccgctaaagaatacctcgaatcgttctatgcctacgacgacgctacataccccggcgacgtcgcgtaa

SEQ ID NO: 232856 - DNA, 981 bp, Klebsiella pneumoniae
atgtcgcagaaaagaaaattattgcctgccgcgctgggactgctttcccttgcctcgctgagcgtcgctgccgcagacgccctctccttacagggaaaaaccattggcgttgccgtggtcggcactcagcatttctgggatcgcgaggcctttaaaggcgcgacagaggaggtggagaagctggggggcaaagtcattggcgtcgatggcggccgcgataatcaggtgcatgccaataaccacgatattttactgtcacgcaaggtggacgcggtaattagtattctcggcgatagcgccgtcgaaccaaaatttaaagcattgcgtgatgccggtatcccggtatttaccgtagatcatgtttctcaatattcggtcaacaataccacctccgataactacaccttaggctcaaccatcggccgctacatggcggatgaattaggcggcaaaggcaacgtcgccgtatttaacgcgttctccagcgcgctgcgtatttgcggaattcgctacgatcagtggaaatatgtccttaaggattatccggatattcatattatccagcccgagctcgcggaacagttcgccaactcgccggaagacgcgcgcaagaaaaccctcgaattactcagccagtatccgaaaggcaaactggacgccatccatgtcgcctgctgggatcaaccggccatcggcatcgtccaggcgctggaagagacaggtcgcgataaagacgtgaaagtgacggccatcgacgccggtccggagaccctggagatcatggcggagcccggcagcccgttcgtggctaacgtcgcgcagcagccgcatctgatcggccagacctcggctgacaacgtggcccgctactttgccggccagaaactaccggtgcaaacctttattccggtggttccggtgaaaggtccgcaggaagcgaaagctgtgtataaacagttgggatacggcgagctgcagtga

SEQ ID NO: 232857 - DNA, 357 bp, Klebsiella pneumoniae
atgcctgaaattacgattacttccaagcgcgacggtttccgtcgctgcggtgtggcacaccgtgacgtgccggtaacctggcctgatggccgttttacggacgagcagatcgccattctgcgtgctgaaccggcactggttgtccatctcggcgcggtcagcggcgatgacgacaagctgaaaaacgcactggctcgtattcaggagcttgaggtccagcttaaggatgtgacctcagatcgcgatcttctgctggttacgctggagctacagaaagcgagtcagtcgccagaggtgaaggataacgccgctgacgatactgcctcggctgatactacggctaaagagaaaaagtaa

SEQ ID NO: 232858 - DNA, 528 bp, Klebsiella pneumoniae
atgcggttccaaaagatatctctggggatttctctgcttttattgtctcaccaagctttggccgtggatggttacaagggcgtaaagttcggttctgacattaaatccgtcatggcggcaaaatggtgtagctttcagcaatacaaagatagtggaattaaaggggtgcaatcatactactgccgtgattttaagttttcaggtactgacacattggcgatggctatttttattgaaggtaaatttgaaaggttagccatcaatttgaatacagggatcgaccccttaacttctgcacttgagaagaagtatggtaaaccatcatctacctctacccccgaagaaggtgagaaagtcatgacgcaaggggggtcaatttatattcgttatgataacgatacagtccttttagttggcacaagagacataacaaaaggaaaagatacgagtcaattaatctattcttctgcagattataatgaaaaattaacgaccttacagagccgtaatttagatggtgatttataa

SEQ ID NO: 232859 - DNA, 165 bp, Klebsiella pneumoniae
atgggattttataaaacgacccaaaaggcagcgcttgatgcgtgggacaatgaaattaaccagcgtattgcgctgagagagagaaagcggacgtattcgctaaaaaattcggcggtaagccagtattgtgcgctggccctacagactatcgattttacggcttga

SEQ ID NO: 232860 - DNA, 168 bp, Klebsiella pneumoniae
atgaaaatatcagctgaaagatttattgaccgtctgatgatgaccacacatctgcgggcgatcgtctggttgttttgcgttttcttttgcatcgctgtgtggggcttaggtattcactacagcctgaaaatgattgaactgttattaaccgtatttaagggggcttaa

SEQ ID NO: 232861 - DNA, 726 bp, Klebsiella pneumoniae
atgtcagatgaacctgaaaacaacctgaagagtgaaattggtaagcgcataagagctcggagagaaggtttgaaactgtctaggcagttcgtagccgagcagctaggagtagcgttatcaaccttacaagcatgggaaaacgaggatagagaaccaagcgcaacacatatcttgaagctatctgaatgcttaaaggtatctgttgaatggctgattactggcgatgaaaagaccgagtccttacagcttcctgcgtcaataagcagctcaacagctgttgatgtgcaagggaatcacgtagatctggaagaatttgtttttgttccccgctataacgtgtcggcctcagctggttatggagcatggaacgatgatgaaagtccaatgtttacagtaagttttcgccgctattgggtcataaaccacctgaaagctgatccacgaaagctttctgtcattagcgtagtcggtgattccatgatgggtgtcctgaacgacaaagatattattctcgttaaccatgatgatagagacccaagagaaggtatttatgttattcgcctggatagccagttactggtgaaacgcgtccagcgcttgcctggctctcagttgcgcataagcagcactaacccagcgtttgagccgttcataatcgatctggataacatacctagcgattttgatgttgtaggaaaggttgtgtggtatggaagggtgatttaa

SEQ ID NO: 232862 - DNA, 1092 bp, Klebsiella pneumoniae; identical to SEQ ID NO: 231794

SEQ ID NO: 232863 - DNA, 1035 bp, Klebsiella pneumoniae; identical to SEQ ID NO: 231818

SEQ ID NO: 232864 - DNA, 987 bp, Klebsiella pneumoniae
atgaactatacgcatcttggccgcaccggcctgaaagtcagccgcctttgtctcggaaccatgaattttggtgacgtcaccgacgagaagaccagcgcccgcattctggatgaagcgcttgaggcgggtatcaatttcattgatacagcagacgtgtatggcactgaacaatctcccgatatccagcaaggctcggggctgtccgaggaaattattggtcgctggcttcagcagggtggccgccgtgaacgcatcgttctggcgacaaaagtctatcagcctatgggaccgggcccgaacgatcgccggctttctgcttaccatattcgcaaagcctgcgaggacagtttgcgacggcttaagaccgaccatattgacgtctatcagatgcatcacatcgatcgtcatacgccgtgggaagagatctggcaggccatggaactgcttgttcagcagggaaaggttctttatatcggtagcagcaatttcgcgggctgggacattgcgactgcgcagtcagtcgccacggcccgtcatttcctgggcctggtcgccgagcaaagtctttataatctgacagcccgcaccattgagctggaggtcattcccgcatgccgccattttggcctggggttgatcccctggagcccgcttgccggagggctgcttggcggcgtactgaaaaagatggcaagcgggcgccgtgccaggcccgcgattgcccgtctaatcgaacagtatcgtccgcagctggaagcctacgagggattatgtgaggacctcggcgaaaccccctccgatgtggccctggcgtggctcttgcagaatcctgtcgttaccgctccactgattgggcctcgtacggtcgaacaactccagcaggcgcttcacgcaacgacagtcacgctatcagacgacaccatgagctgtctcgacgaaatctggcccggccccgggggagaagcgccccaggcttatgcctggtaa

SEQ ID NO: 232865 - DNA, 2313 bp, Klebsiella pneumoniae
atgagttttaatgccaaagacatgacgcagggcggtcagattgccaatatgcgtttccgcatgtttggtcagattgccaatattatattttatgtgctgtttattttattctgggtgctgtgcgggctgatgctgatgtaccgactcagctggcagacctttgtgaacggctgcgtgtactggtggtgtacgacgctcggtcccatgcgcgatattattcgctcccagcccgtctacaccattcagtattacggccagtcgctggaatatacctcagaacaaatcctggccgataaatacaccatctggtgcggtgagcagttgtggaccagttttattttcgccgccgtggtttctctcgtcatctgtatcgtgacgttctttgttgccagctgggtactgggccggcaggggaaacagcagagcgaggatgagaataccggcggacgccagctgtccgacaagcccaaagaagtggcccgccagatgaagcgtgatggtatggcttcggatattaaaattggcgacctgccgatactgctgaactctgaaatccagaacttctgtctccacgggactgtgggctccggtaaatctgaagtgatacggcgtctgctgaactacgtccgcgcccggggcgatatggccatcatctacgaccggtcctgtgagttcgtcaaaagctattacgacccgtcgctcgataaaatcctcaacccgctagactcgcgctgtgccgcctgggatttgtggaaagagtgtctgtcgctgccggatttcgacaacatatcgaatacccttatcccgatggggaccaaagaagacccgttctggcagggatcagggcgcaccatctttgctgaaggcgcgtacctgatgcgtgaagacaaggatcgcagctacgagaagctggtcgacaccatgctgtccatcaaaattgacaaactgcgcgcctatctgcaaaacaccccggccgcaaacctggtggaagagaagattgagaaaaccgccatcagtatccgtgcggtgctgaccaactacgtcaaggccatccgctacctgcagggcattgagaagaacggcgagccgttcactatccgcgactggatgcgcggtgtgcgtgaagaccagcccaacggctggctgttcatctcctccaacgcagacacccatgcttccctgaagccggttatctcgatgtggctgtcgattgccatccgcggcctgctggcgatgggggagaaccgcaaccggcgcgtgtggattttcgctgacgagcttcccacgctgcacaaactgccggacctggtcgaaatcctcccggaagcccgtaagttcgggggctgttatgtctttggtattcagtcgtatgcccagctggaagatatctacggcgtgaaacccgccgccacgctctttgatgtcatgaacacccgggcattcttccgctccccgagtaaagagattgcggagtttgccgccggcgaaatcggtgagaaagaaatcctcaaggccagcgagcagtactcctacggtgcagacccggtgcgtgacggggtgtcgaccgggaaggagaaagagcgggaaacgctggtcagctactcggatattcagacgctcccggacctgtcctgctatgtcacgctgcccgggccgtatccggccgtgaagctggccatgaaatacaagccgcgtccgaaaattgctgaggggtttattcagcgtactcccgatacgcgggcggatgcacgactcagtgcgctgctggaagcccgggaagccgaaggcagtctggcaagggcgcttttcacgccggatgcgccagagctggcaggcaaagacagtacacccggtgaacagcctgagccggtcagtcaacctgcgccagcagaagtggcagtatctccggcaccggtaaacgcgccgccgacaacaaagagtccggcagcggaaccctccgccggggcacctgcatcaccgccacctgaggcgactgtcctgcggaacacgaccgtaccgttgattaaaccgaaagcggccgggactgccgcaacagcatcctctgccggtacccctgttgcacctgctggcgggacagaacaggaactggtgcagcactcaacagaacagggacgggatatgctgcctgccggcatgaacgaggacggtgtaatcgaagacatgcaggcgtatgacgcctggctggcagatgagcagacgctgcgcgatatgcagcggcgtgaagaggtcaacatcaaccacagccaccgccacgatgagcaggatgatgtcgagattggggggaacttctga

SEQ ID NO: 232866 - DNA, 2571 bp, Klebsiella pneumoniae
atgattacaaaattcaaattatctccatgctgtttagctcttataagtatcggtgtgttaaccatatcttccgagctatatgcaagagaattttttaacccagcatttcttaccgatctaaacggttcagacgtgagtccggacctttcggcttttgaggtagcaaattctcaggcccctgggaaatatcgggttgacatcatcatcaatggtaccgttgtcgataccaaagacgtcgattttttttctacggcagaacaaaaagcaagctatcttaacgaggcgggagaagagcttaaactatacccatgcttatcaacagaggaattaagtggttatggtattaaggtaaaagcaatctcttcattaaaaacaaacgctaatggttgcgtcattatcagttccattccagaagcctctgttgattttaactttaacttacagaaacttgagttgagtgttccgcaggccgcagtatcctcgacggttcgtgggtatgtttcacctgatgaatttgacaatggtattaacgcgttctatttaaattatagatataatggaaccagtagctacgcacgagataacggattatcagatcaagagaaccatagtgtcaatttactaccaggcttaaatatcgggccatggcgtattaaaaactacactacgtggaataaagatagttatgataatgatagcaatggtaaatgggatactatctatacctatgctgaacgaaatattatttcactgaaaagcatgttgacattgggtgaaagcacttcggatgctgatatttttgatagtgtgccatatcgtggtgcgcaattaaactcagacgattacatggatgcggaaagtatccagggatatgcacctgtagttcgaggaattgcgaaaagtaacgcaaaagttattattaaacaaagtggatatgttatttatcaatctttcgttcctccaggggcctttgagatcactgatctgtattcgacaggtggcaatggggacctcaatgtcacgatcgaagaagctgacggcactcaacaaaattttgttgtagcttatgcttcacttccagtattacgtcgtgaaggtagcctaaaatacagcattacatccggccaataccgctcctccgacggtagcgttgattatactccgttttcacaagcaacggccagctatggtttaccatacaacaccaccctatacgggggattccaggctgcttcgaaatatcaatcagtggccattggcgtcggtaacaacctgggcgtacttggcgctgtttctttagacgtaacacaggcctggtcgacgaagcaagatcaagataagatatcgggtcaatccgtgcgtatacgctacagcaaaaacctgaacgatataggcacaaatatagctattgcaggctatcgttactcaacgagcggctttaataccctttcagatgttcttgaaacatatcgtgatgactataaatactactacaacgatcgcgttaaaaatagaactgaaattaccgtaagtcaaagcctcggtgataagttaggctattttaacatcggcggtgtaatggaggattactggaatcagcgtcgcaggaataactcacttaacgtaggttacagcaatagctggagcggtattacatataattttaactattcccactcccgctcctcaactgactatgagggttacggtagaaactattctactgataatatcttttcgttcaatatcaatgtgccattgaatttctggatgcctaacacctgggctacttatggtttaaataccagcgatcctggttcgacaagcaacagtgttgggctttcaggtcttgcattggccgataataatttgagctggaaccttcagcaacaatacgataatcgcgattatagtagcggaaccgctggtgttgattataaaggcacctatggagagatttttggtagttataattatgatcataactggcagcgccttaattatggtataaacggtggaattgtcgctcatcgtgatggtatcaccgcagggcaatcattcagcgataccagtgctctcgttaaagcccctggtgttaatggtactcgagtagtgggtaacaccggcgtaaaaactgactatcgtggctacgctatcgtacctaatattacaatgtatcgtagaaatgatgtggtattagatactgaaacgatgcctaatgatgttgaccttgacactacggtagccaccgttgtcccaacccgaggtgcgatcgtacgagcagaatattcagggaaaaaagggatacgcgcgctgctgcagctagtggatacacataataagtttataccttttggtgcaatggtaaatcttgcttccgaaaattcgacgaataataacagcgggatcgttagcgacaatggtcaagtttatctggctgggttaccgacaacgggagtactgcttgtcaaatggggaaatagtatatctaaacagtgtacggtaaattatcagttccctgggtctgaaaaggtcaatggtatcaaacagggccagtttatctgccgctaa

SEQ ID NO: 232867 - DNA, 387 bp, Klebsiella pneumoniae
gtggtaccagtaagtcccgttctgcttaaccttaaaggtgtaaacgtaggtatcatcaggctctatgcccataaaactcagccccggaacaccatccatattggccggaagaataatgccgtgccagtgaatggacgtctgttcattaagacggtttttgaccttcagggtaatggtgtcaccttctttccagcgaagaacgggccccggcaggcctccattgattgttttggcctgacgctcactgcccgtgatattgacggccgtttcaccaatggtcaggtcaaactgagtaccctgcagggatgcggcaactggcaggctcagactggaacgcgcattgaaactccatacgccaagacttccggctacgccagagagggttaa

SEQ ID NO: 232868 - DNA, 501 bp, Klebsiella pneumoniae
atgaaagaaaataaacatgttgaaaaatttaagttaagccatctgaattcaggtgagtctgtcattgcgtgggcggaaggatatatcggtaaaatgatgggtagtggaaaaaatacccagcataatggcgcgttaattgttacggaaaccagagttgctttttatcgtaagggatttattggtgaggtaattgaaactatacctttaaaatctatcacctctattgagcgaaagtcgacgcttggtcatagggttataagggtgcacacatcccatgatgaccttgaatttaaaacattcagcaaagagtcagagcttgccctcgttgaagcaattgaaagcgggcgagggttgagaagtgaaacagtagcctccgaaaaaaataaggccagtagcgaccctttcgaacaactcaaaaaattatcagagcttaaagaggctggggtgatttctgatgaggagtttcaggctaaaaaaagcaagttgatggatctgatttaa

SEQ ID NO: 232869 - DNA, 858 bp, Klebsiella pneumoniae
atggataaagaagagcaatccgtcagagatgtcattgatagaatccttgtttcttatggagttagaacaagacaggcttactctgacctcgcaaaaattccattgcccacgattagtaattgggtcaagcggggtaaggttcctggagactacatagtccaatgtgctctcgatactggcgcagaccttaaatggcttatggaaggtggtgaacttacaaatgtaagatttgagcccggtcattaccctatgcagggaatacgactgctggaggcaatgcaaagctcaggtgggaaagagattttgcagcgcatcatgcaggcttatggctttaccatgcaaaaagagctgggcgaccatctcgatataccatccggcacgatgagcgcttgggttcgccgtgagcacttcccgggggatgttgttatcgtttgtgctttagatacgggagcatctttatactggcttgccacaggtaacggtggactttatgaaagtaatgtgaccttacccacagagcaaacggcattagccacaattagaaaataccgccttgaaaacggtgaattaaaaaaaacaggtaactggttggctgacccttcaatgattccagataatcatgatggtctgatgtttgttgagggtatgggtaaatcttggctggttgatatttctgcgaagaatattgctaacggccgctggctcatcagtattgatggtgcaatggatgtgttcaatgtgattcggctacccggaaataaagttcggttgtccaatggttctgctgagtttgaatgcaatttatctgatattacaccgtcaggtacggttatttttacaattgagaaacatatataa

SEQ ID NO: 232870 - DNA, 228 bp, Klebsiella pneumoniae
atgaatcttcaaattgcaatccccaatggcccggacttcctctcatatgaggagtttgcaaagcagtacggatgcagcctgaacaccgttaaagagatggtaaagcgcggcgagctgctactggtgccccgtactcgagagggtggcctcggccgtattaacatgattgccttccgtacgcgattactcgctcaggcgattaattcgcgctatgccgtattccagtaa

SEQ ID NO: 232871 - DNA, 201 bp, Klebsiella pneumoniae
atgttgaatactgaaccgtcatttgcatccctgcttaaaaagcaaagccccggcatgcactacggccacggctggatctccggtaaggacggaaagcgctggcacccttgcaactctcagtccgaattgttgaacggcttaacagcaaaaaaagtctctgcggttaagcggcttttaaatgcattaatgggggcaaaatga

SEQ ID NO: 232872 - DNA, 2124 bp, Klebsiella pneumoniae
atgttcgcggctttgctgcatgcgagaaagatgctttctctccagcctgagtgcgtgcgttttgacgtttatcgcaccgctacggtgctggagcaaaatcagggaagtcaacgagccaatgcttttttaatcagtttctgcaaaaaggcattgccacgtcttgaactggtcgcaaaaaaatacgagagcgcgggaatcaacagcaatgtatcaaccgccgttttcggtggtcattttgacacccgactaatgcaatatctggcttcacgtatggttaatctggtcgccagatataaccgcctccctgacatgtcacgcgcagatgttgacttgctggccggtgacattgctaatttcattcgttctgagctggcaaatattgatgattcaggttttggtgagctcaaaacgctatacacctggtacatgcacgctggttttatttctctgcaattcaatgtcacccctccacattgggagcgcgtggcaaataaatacttcaacaaagatgatatcgcccccgcagtaatccgtatgtttactgagtcatggtggcgtaatcgtctgcgtcgtgtcgcgtcggcatggcgcgaacacctacaaattgcagtcggcaacgtcagcaagaaaaagcacgcctacgcgagtaaaaactgcgtaacagactggcgcgagcagaagcgccgaacacgtgagtttctcaagggactggatctcgaagacgaagacggcaaccgcatcagcctgattgaaaaatacgacggttcggtcgctaatcctgcgatacgccgctgcgaactgatgacccgcatccgtgggtttgaaaatatctgcaatgaactcggttatgtcggggagttttacaccctgactgcaccgtctaaatatcacgccacgactaaagcgggataccgtaacagcaaatggaatggtgccagcccatcggacacgcagagctatctaactggcctttgggcgcgcatacgcgccaagctgcaccgggaagaaatacgcattttcggcatccgtgttgccgagcctcatcacgacggaacgccgcactggcacatgctgatgttcatgttgcctgaggacgtcgagcgcgtgcgccttatcatccgtgattatgcgtgggaggaagaccaccacgaactgagaagcgataaagccaaaaaagcgcgctttcatgccgaggccattgacccggaaaagggcagcgctaccggctatgttgctaaatacatttcgaaaaatatcgacggttatgctctcgatggtgaaaccgatgacgaaagcggtgagctgctcaaagagaccgcccctgccgtatctgcatgggcggctcgctggcacatccgtcaatttcagtttatcggtggcgcaccggtgacggtatatcgtgagttacgtcgtctcgctgataccgagaccgcgcacggtttaagcgttgagtttgccgccgttcatgatgccgctgacgccggtgactgggctggttacgttaatgcgcagggtggtccgtttgttcgtcgcgatgatttgcaggtgcgcacgctgtatgaatcgcgcgccgagtttaaccagtacggtgaggaaaccgtctgcatccgtggtgtgtacgattctgctgtcggtgctggcaccccgattttaacccggctaacgcagtggaaaattgtgccgaagcgtgccgttgatttggccgttgacgttaagggcgctcctgcgccctctcggagttctgtcaataactgtacgggaagcgaaagcgatccgccggagctggatttatccaaaccgttgagtcgaagtgaaaggcggaagctaacggccagactcagggacaaaaaacgggtcaccaggcgtgattatgtccacggaacggataaacaacgcgcagccattgacagaacaatagacgagattcagctcacgaccggtgaaaccatcagccggggtgaggccctgcacatgatggccggtggcaaaagttgcataaacggcaaatggtgccgtggttcatcaaccggtgaaattttcccggcagcaccgtcacaccgggagaaggccagacaaattctaaatcgagtcgcggggttagcagcaaagcagcaccagagatga

SEQ ID NO: 232873 - DNA, 243 bp, Klebsiella pneumoniae
gtggttgaaggtacattcacttttcttggtgaaaatggatacctccagtatgaaaccgaccatcaaacgtattttatggatgtgcgcctgaccgagaaagcactggctgtgctcaataaaaagcccgattcgcttgggagcagcgaaacgatgggggataaaattatcagcgcggtgaaagagggaactccgggggttattgccggggcggtgacgaatctgcttactctggggttaatctag

SEQ ID NO: 232874 - DNA, 252 bp, Klebsiella pneumoniae; identical to SEQ ID NO: 196471

SEQ ID NO: 232875 - DNA, 348 bp, Klebsiella pneumoniae; identical to SEQ ID NO: 219449

SEQ ID NO: 232876 - DNA, 183 bp, Klebsiella pneumoniae; identical to SEQ ID NO: 20349

SEQ ID NO: 232877 - DNA, 1356 bp, Klebsiella pneumoniae; identical to SEQ ID NO: 218031

SEQ ID NO: 232878 - DNA, 231 bp, Klebsiella pneumoniae
atgtcaccaggattcagaaatgttctccgtctcgcccgcattcccgtcgacagcagtgaaccggtgcgaagaaaatttggcagccggctgattggcattgtgacggtatgtctgcttccgcttctggttttcgacgttccgcagtgggttttcattttgtcgcaggtcatctggggggctggcgtctatattggcctgtccctggccggggataaatccctgaaccgctga

SEQ ID NO: 232879 - DNA, 672 bp, Klebsiella pneumoniae
gtgccggacggccagtattctttctatctgcacagcgacgatcgcaccgacatcgcagcaatggcaaccatcagcaccatctcacagcccctgcgcggtgagttcatccgtaccgccgccaccgccggggcggtggtataccaggtggatgcccgtttaccggcgctgatcccggtgttctttgccgggcagctaagtgctgtccgcctttgcgccgtgatggccctggtctccggaacctggtcctcactcaccggccttccggatgagcccgaaaatggtggggctgctctgcccgtgtcaccggagacagaataccagcgccggcgttacaccctgacgcttcagaatggccggagtggggaacgggtggaaagtgtgctgacggaagcgtcatcccgtctgcgtggggatctgctgagaaacctgattatcaccggtcttgccctccacacgacggcaccggagctgccgcgcctgctggccagtatgccggtaccgcccacctcggtcagtgagctgcaggcactggttcagcagatggccggcaccgctgacgtgaacagggctgcagctgcagtaccggatacgccgacagcatctgccgcgccggtgtccgggtcggatacccgggaaataaagaaaaatatgcggcgtgcattcggtgactaa

SEQ ID NO: 232880 - DNA, 972 bp, Klebsiella pneumoniae
atgaatatttactgcgatgatggttcaactaatgttaagctggcatggtttgaaggagatgaacttcagacacgtgtctctgcgaactccttccggcatggctggaaagtggcggaattcagtgcggcaacgttcaactatcaggtgggtacgctgaaatacacctgggacagcgtcagccgggatgccatcccgacaacaaacgtggaatatcagtacggtgatctcaacctgctggccgtgcatcatgcgctgctgaacagcggactggagccgcagccggtgagcctgaccgtgacgctgcccctgagtgagtattacgacggggactgccagcggaacgaggagaacatacgacgcaaacgggaaaacctgatgcgtgagctggttctgaataagggcagggcgtttaccgtaacggacgtgaaggtgatgccggaatcactaccggcggcgttctcccgtctcgcggagctgaagcccggccccgctgagaccaccctgattatcgatctcggtggcaccacgctcgatgccggtgtgattgtcggccagtttgatgatatcagtgcggtgcacggtaatccgtctgtcggcgtgtcacaggtcacccgcgcagctgcaggcgcgctgcgggcggcagacagcgaaaccagcgccctcatcgctgacactatcatccgcaaccgcaatgatcgtcagtatctgcagcgtgtgatcaacgatgccggtaaaatcgacgaggttcggaacaaaataacagaggcgatcacttccctgggggcgcgtgtcaccagtgagctgacggccttcaggaacgttaaccgggtattcctggtcgggggaggggcttccctcatagaagaagctatccgtcaggcctggcctctggctcctgaccgtatcgaggttataggcgatccgcagatggcgctggccagggagattgccctttacaataaagaggactaa

SEQ ID NO: 232881 - DNA, 924 bp, Klebsiella pneumoniae
gtggcaaagcaaaagttcagaatcaccaactggtccacctacaacaaagctctcatcaaccgtggctccctcactttctggctggatgatgaggcgattcaggcctggtatgagtcggcaacgccttcatcacgaggaaggccccagcgctattctgatctcgccatcaccaccgttctggtgattaaacgcgtattccggctgaccctgcgggctgcgcagggttttattgattccatttttgccctgatgaacgttccgttgcgctgcccggattacaccagtgtcagtaagcgggcaaagtcggttaatgtcagtttcaaaacgtccacccggggtgaaatcgcacacctggtgattgattccaccgggctgaaggtctttggtgaaggcgaatggaaagtcagaaagcacggcaaagagcgccgtcgtatctggcgaaagttgcatcttgctgttgacagcaacacacatgaagttgtctgtgcagacctgtcgctgaataacgtcacggactcagaagccttcccgggccttatccggcagactcacagaaaaatcagggcagccgcggcagacggggcttacgatacacggctttgtcacgatgaactgcgccgcaaaaaaatcagcgcgcttattcctccccgaaaaggagcaggttactggcccggtgagtacgcagaccgcaaccgtgccgttgctattcagcggctgagcggaagcaatgcacggtggaaatggacaacggaatataaccgtcgctcgatagcggaaacggcaatgtacagaatgaagcagttgttgggagattcactgacgctgcgtgactacgatggtcaggtagcggaagctatggccatggtgcgtgcgttgaacaggatgacaaaggccgggatgccagaaagcgtgcgtattgcctga

SEQ ID NO: 232882 - DNA, 231 bp, Klebsiella pneumoniae
atgcgcacagtttcgatatttaaaaacggcaataaccgcgccatccgtctgccccgggacctggattttgacggcgtcagcgagctggagatcgtccgggaaggggacagcatcattctgcgtcccgtccggccgacctggggctcgttcgcgcagctggacagggccgatccggactttatggcggagcgtaaggatgtggtcagcgatgaaggacgctttgagccatga

SEQ ID NO: 232883 - DNA, 150 bp, Klebsiella pneumoniae
gtgcgtctgcgcgcgcaggccgagaaggagctgggcgacaagttcgacatcaagggcttccatgacaccctgctcaagcagggctcggtgccgctgccggtgctggaacagcagatccaggcctacatcgccgaacgcaagaaggcctga

SEQ ID NO: 232884 - DNA, 1200 bp, Klebsiella pneumoniae
atggcgttacttactgataccaaagcccgacacatcaaaccagatgataaaccactgcctcatggtggcatcacaggtttaactcttcatccttcacctacaaaaggtcaagggaagtgggtcttcagatacactagcccaacaacagggaagcgtcgtaatgcgggcctcggctcttatcctgaaatcggcattgctctggcaggtaaactcgccttccccatgcgagaacaagtagcaaatggtgttgatccattagatgctaaaaaaaccgaattagagaaagaggccactcccacatttgaagaagcagcacggaaagtccattcggagctattgcctggctggaaaaatgaaaagcatggcaagcagtggatttctacacttgagcaatatgttttccctttatttggttcaatgccactcaatgtaatcacaccagcacatgttgcagaggcccttcgccctatctggcttgaagtgcctgaaacagctagtcgagtaaagcaacgtactcatgcggtaatgcagtggggatgggcccatgaacattgcacaggaaaccccgttgatgtagtagaccacctattacctaaacagcctagtgccagtgtgcgtgttgaacatcatcctgcaatgccgtggaggctaatcccgtcatatgttgccgcccgggtatatagcgaagaacgatatagcatcagccgagcacttctgctgtttgtcatactgacagcttgtcgttctggagaagcaagagctatgtgctggtccgaaattgatttcaaaaacaaaatctgggccgtaccagaaaagaggatgaaggcaggcgtcgtccatcgggttccattatctgaacaggcaatcgctgttcttgagcgaataagggggttgcacgatgagttggtcttcccatcgcctaaaaagcagacaattctttctgacacagttttaacaatgtttctacgtaagacggaagcaattagtgatactgccgatagagttgccgtcgcacacggattccgctcaagttttcgtgactggtgcagcgaaaacggttactcccgcgatcttgctgaacgcgcacttgctcatacagtacagaataaggtagaagcggcttaccatcgtaccgacctgcttgatcaacgtaggccaatgatgcaggcgtgggctgattacgtcatgagcaaaacatga

SEQ ID NO: 232885 - DNA, 801 bp, Klebsiella pneumoniae
atgagtgttatgacagatgagaaacatctttttaaaatagcatcagattgttttataaagaaaattgaacttatggataagcacggcgcttttgatggcgtcgagatacctgatgaatcaccaggctcggacggcaaagttcttaaggggctggcagtcctggaatactatgttcagcaaacactggatgacgcccggcagcagcggacttcatccgggtttcattcgtcgtttgagaattatttgaaatctaaaatatctcaatttcagaagctatggcgatttgaagggcgtattgagtttggggctgagtgtgctttgttgcattaccacctgagcctgtatctctatcagcaaaaagacaaggaagagggcatctatcaccttatggaggccatgcattatcttggctcttatgaaggtgattttctcctgcaaaactaccttggtgtgcagcaacggaataaagaaaaggcttcggtggcaggtggtaaagccagggctgaaaagaataagatagtgaaagagaaagcagccgaattactcaaagaaaaaagttccgagttcgtcggcatggataaggttgagatagcagaggccgttgctcaaacattgtgggaatttatcgttgcctacaatgaagaaacaaaggtgataaaccaaaaactcaaagtgaatgagcaaacccgtcgacgtattgctctcaagaaagatgcacttcctgagaccttattgagatggtggaatgaaaatccagagcataaagacattttgaccggcattgtagcaaaaaaagattaa

SEQ ID NO: 232886 - DNA, 1863 bp, Klebsiella pneumoniae
atgactgattccaccgcagaaaaaatgattgccattatgttccgttccggaaaattacaggttgaagttcgtaaaactcgtcatttcgaaaaaagagcggtacctgacgagttaagaatgaaatcagacagctcagttgaggttccgcccctgaacacttcctcttgcgccagtgaggagaataaaccatcggtcggagtttccgacaatccaggtgctcagacccagggggccggtattgcgtatccgaaagataccaccgctgaattacctgcggctgccgacacggtcaatgcgattcatgaagatatcattcagcaaactgccggaagccataccggggaaaccaatattccgcccctttcggataaaggtactaatggcgtccccacgggtgaagagcagtctccagccccccaggttgccgctaatacggctggcgaatcgctggttgatgctccggcgtccgaacatcagccagaatcaggtttggcacatgctgaagaaggcagcacaaacaatgaccaacagcagtcggagttatcccctcagaaagcttctgaacaattgcctgcacaaaatgccagttcggccgttgtggggagtaatgttaacacttgttctgcctcggaaaccgagcaaggtttgccgccggaagttttagtatcagatattcagtccatgactgggagttctgataccaatagtatcaacgagcaccaggaaattaacgccttgtcaacggttattcctgaaccagtggaactgatgtcagatttgcccgaagatgccagtaaaagtggcaataatgtcactgtttcggctgatatgcgcaaaaaataccttaacagccataaaaatcgcgagttcaatctcttgcctgttgctgtcgtattcaacgcagaagcaccactacgactgaacgaagagccacaatttcgcacttttgaactggatcaaaatcactacctcaatcgcgctgaagtggcactaatcagcagacatcccgttatggaaaggctcaaaaaaatcatccgtaacagtggtaattttaactgtttccacagtgcatatgaggatctggggggaatggtagcattactctggacgatggcgctgcttagccgtccatttcgctattgcaacggcaagcccgttgaacagcagggctttcttttgctcgatatttgcgcgatccaaccactaaaagccgggggacgctgctgcaatttgaatatgatgatcgtaccaaaaagtattgctaagcgtaataatacgattatccccgactcacaagccgaacctgcattctgtggggagtccacacatattgcccgacatgagccttacagtggcagcaattttttccgtaagattgcccagtgtcgatcgctgtgggaactggatcagtttcttacctgctcagccaaaattcttaaccagccgctgatgactgctgccgaacccgacaagacaccactgccgtacttctctctgctggaacacgagttttctgcgttaccagcctggcaaattttttgtcgtggtctggaggatctgaaagccctgttaagggacagcaccggtatgcttgaagccgctgcgttggtgatatttgatgccgccacaatggggaatcccggcaacatcattaaccagctactgacagccgccaccaacgcacttcgtgcccgccaggagaacgagccggatgcacttcagcatcaacagaatgttattaaccttattaatggtctgatgaaacaatgcttcaaacataacgtggttgattttcccgctaagttcgaagaatcgctctatcgctcgttgttcagccagacacctctgccgctgatctggtga

SEQ ID NO: 232887 - DNA, 618 bp, Klebsiella pneumoniae
atgagccatagaaaacgttcccccaaagtaccgcagaaaaagaaacgccagcgtgttaataaacataatgcgaaaaagccctcatttccccgtaaaaatgatctggccgctgccattgctcctgttgaattaagacactgtgcccattgtggctgcattattcagaatccacgaaataaagattactgtagcaatgcatgtcgtttaaaagccaggcgtatcattgataatgacaaagttgcagaaaatgtgactcacggattctggcttaaggttcaaaagatgattaagggttcccgtgatggactggactctatcactggccttcacagcatcagagatattgttaacctttactctcgcctggcatggttccagcgcagctataatgccgttaatgatgtgcttttgatcaacagtagaatcgggtttcctgtcgataaactgcaggctgacctggaattgcagttaggacacctttatcccaaaaatttgggaggccgcaatgatagctgttgtttcattttatccattaaggttatcaacaaagccattgggggctgtgtttttgaacccggttcagaatgggcacgaaaagttttttctctgaaaaactga

SEQ ID NO: 232888 - DNA, 696 bp, Klebsiella pneumoniae
atgagcggcgatctcctgaaagcgctggtactcaaatttggtaaaaatgaagtggaagaaatgatcgtcagtctctcattacccgtgttcgataagtccacggtcagaaactatcgacagatcgagaagcctctgctggacatgatgctgaatgaattcactggcctgaatatgggctatcttgcccgtgcattgcaacactttctggtttttcatgctggtaaatttggtcattatgacgaagttattgccctcgcctgcaatattgctatgcagacacaagatacacacggactgctgaatgcaatccgttgctatcgctcagatcttggttcacgctcaggaaaaaatatccttgaaagaacatcaggatatattgatgacgagggaaatatgcgggatatctacgagggttcacagctttacgacattctggaacgcacgcgtcaggcgatcaaaaccatcctgaaagttgatgccttgctccgtccaaaagatatggagcgtctgtacaaatcgctgttcagtgttactccggataaatttacgttaccccagcttcccatggttgctaaaggttcagcattccaccctgaacatccacagtaccagacagcgcaagccagcgtaagaaactaccgacactgcccccctccggcgaaactgttacgcaaggctcctggtagcattaactga

SEQ ID NO: 232889 - DNA, 870 bp, Klebsiella pneumoniae
atggcgctgataaatcatattccttttggtttgcggactgaagagcagcagttcgttgatgttgccgatgtgccaaagggtaaacaatgcggttgtatctgcccctcctgccgtatccctttaatcgcccgacaagggaaggccaatcgctggcactttgcccatgccagccgaaatgtcgatgaagtggataaggagtgtgagttttcgttttttgtttcggtgcgcacgatggcgaagcagcttctggaagcaggcatgtcaatgatactacctgagtggcggcacggaatagttgaaaagcgatacggcgaagtgtttacagaagaatactggattgcccggaaaacggaagtcattctgaaccgtgtacagaaagaatgtttcttcgatggggtgctggtggatatttatggatacgtaggtgattaccctctggtgatttatttcactcaccctgaacgtcccgtaccatttgaactacaggtaccacaacagcaacagtgtggtgttatagaaatcaaactcaatgaaacgataagactatttgccaggaaaaatataacaggtgtcaaatttattgatgaactgaaggggtttatagagagcaatcaggatgctaagcaatgggtgtatcatcctcggaaaaataaagctgaggaggaggctcaggcgcgactggatgcggtaatagaaaactaccggccacatcagccagaaagggaatcagttcaccgcagtcatgtaaaatattatcgctggcagtactatcaatgctcaatttgtctttgtcagtggagagcgccagaacatgaaagcccggtatgtcctggctgtaagcgggggcatttgtatgcgaggaaaatgtga

SEQ ID NO: 232890 - DNA, 1356 bp, Klebsiella pneumoniae
atggcagttttacagcgagttcattattttacgattcaggaatgtaaacgggttttctggcatcaggattatggcgttgtacgctttaatgagatgatagcgaatgcacaggagtatggtttaggtacggtttgtgtcgccgggatttctgttgaaaatttgccaatccattatcgccagtttttctttccggtcactccgttttctgcaagcgaatttctttgcactttctggggccgttcttattcgaataaatatgtcagcaggattaccggaaagcctgacgtagtggttatcgacaggagacttgaagcttgtctggggaaggcatttttcacatggcttgagaatgaaggtgtcagctaccgttatccggctacaggtgagaagagattttatgctactgtcagacagcaccagagttaccctgacacgttcagattcagggacgtagcccctgagcccgtttcggacaggcaggagcgatggccgcttagtctggatgtcctgaatgaaaaagaagtttcggatactcacctgacggaaaatttagaacctgcacaaagacagtcgctgggcatactttatccggagtattttaaacctgaattacctgcgcattcagcggtgaaaaatgatttctgttttaaagaccgaaggctcagcgttgcttcatctaatgatgttgaattaaatagcgtggtatggagtcctgccacagaaaatccttttcactacggttatgcgataaataactacgaggttttgactgaacgggttgtcacatcgagctggcagaaagaaatattgattgcgctgcaatgcctggagccacagtttgaaagactggcgcaggaacttactcattactttgacgataatgattatgtagatactttaaataaaatcaaaaagaataaatacaaaactctgttgcctttggaaacatctgaacaggacgcattatttcatctggcagggttaaatactgatgatcctgaggggcatacgatttatgatatatcgaagctgactgtctctgatatggtcactttatggaatcatatttccagtggtggcaatcagtatcaatcgtttgaaatcaggacgcaaaaaggcatggatgatcccgcctatcgtttatttgcggtgattggtcgtggctcacgttattatcttattgctcaccggggaagtcggtcctgtaacgctctggatagtgagcgttgtattaattatgaatcagaccaacctcgtatggtgcggcagcaggattacagaaagatgttgatcgctgcgattaaggggaattccggcgcgtttggccgaaccctggacccttatgtgtttaattaa

SEQ ID NO: 232891 - DNA, 477 bp, Klebsiella pneumoniae
atggatacagaaaatataaaacagttgctgtttgtgcagcagagattccagatacttcatttgggaaaacattttgatgagttcagtgggagttacctgtatgcctgggaacgtggtgtttatccgtactttgacgataccgatgggagtgttaacagaaaacctcatgagttatatccagagtttttcagtgtgtctaaagaggaagttaaattcctgaccgaccgtttcaacactgcatgggataacggcgagaaattaactttttataagctggaggatgaattacatgttaccagtcattctgattctggctggacaagaagtaaactgctacgtataagccggtatctgtttcttgaagagtgttatgattcttcattctgggataaattgatagagaatggtgcgtgccccagtgaagctcatgggatacgaagaaaattcaacagagagtcagatatttatttttattag

SEQ ID NO: 232892 - DNA, 129 bp, Klebsiella pneumoniae
atgatgaaggattctttgtgctctgatgtcgggatggcaatgaacaaaggggctatggataaatggctgccagatatcggtaaaaataatgtgtgggcaatgttttatatattacccactttcaggtaa

SEQ ID NO: 232893 - DNA, 741 bp, Klebsiella pneumoniae
atggggatgcaggatttcattattcagagtggaaaatacggtgcaacgaaccattaccagttgctgcttaaaaagctgaaccaggaccggccggatattcagatctcggtactcagatttgccggggatgaagcaataagccagataccccgttatgaaattgaatttaccagcgccacacccgatattcctgcaaacctgctgattaactacagcgcacaattactgatgtaccccgatggcaaaccttacgaaagcctcaaaccccgcattatccctggtattatcacgcagtttcgccagtgcaatacgtctgctgacgagacgcgttatatcgccatgctggagcaccggatggcgcgcatggcgcaggggcgcagcagtgcggtatttctcaacgacagtatcatcagcctgaccgagaatacctttgagcagtacctgatagacaagctgagctttgcctttaagctgaccgaccgctatccacagcgtgatttcatgctgcagtacgaagaatctgattacgcccatgtcgcccgccgtctggctgatggcggcgtctcgttctaccgccagtacgacgaagaaaacaatgaagacgtgattgtccttactgaccattcacggggctggatgagggcccggtcgctgatgacctgccgaagacggtcagaatacgggtcgggcgattgcgggaccaggcgtttgagcgcaagcagcagcaacagcctctggtga

SEQ ID NO: 232894 - DNA, 174 bp, Klebsiella pneumoniae
atggaggcagcacagctaagtacgccggaggtgctatccggggcccggctgaaacatggttacagcagggtacgttatggccgttgcaggcacttcccggtgagctttaccgcacgttccagacctggcggcagtgtcaccgtcgttacattgcgccacagttcccaaagctga

SEQ ID NO: 232895 - DNA, 363 bp, Klebsiella pneumoniae
atggataacaacatgagcattgccgaactggatatccggacttacggcatcaaagacatcagcaaagaacagatgaaaatgctgattgagaaaaagatatcttttcgcctgagcggcattcgcgatatgtccggcacagtcaaaaaagtggaaaaaatgattgaagaccaggaactgaagtgccgggtctataccgagtaccgtgcagccggtatggcagcggctgtctggggcccggcgattgccatcggggccattaccgccgccggtatcgcgttgcacaacgtcgtcacctggggacctgattacgaactcggtaaaaactacgtctctgataccctgtcggtcatttaccagcactga

SEQ ID NO: 232896 - DNA, 984 bp, Klebsiella pneumoniae
atgaaatacacctcattaagtttactgttgctgacagtcagcacaggctctgcgtttgccacacaaactgctgtaccggaaatgtgccaactgctgagcgaattcgattgccagatggtcaacgatgccgctaccccacagcagcatcatgattttgatgcaatgattgccactgaagcaagcaacacggctcttgcaaaagcgctggatgagaaaagcaccagcattaaagaagaagccgaacagttcactaaaactcagtatcagaaggcctgtaatcttgtactgaacaagtaccccgtgctgcatgattgtccagtccgcatgagcgatattaccgacacacttcccttgcgggcgtggcagtttgacagcatcacggtaaccgatccgaagacacatacgccaatcaatgttgaccttcccgctctggttccggaaatagaaaacctccgactggaaaatctgcaacacccgaagcaggctgtcgaagcaaatgagcgggagcgctttgaactgaacaaacgcatcagtgaagagcaaaagcagaaatatgaactggtccgccaaatcaggcttaacgtgcagacccgccagagagacggattacgtcaactggctcacctgaatgaagacgattacatcatcccctggttcccgtgcagtgcgcataccccgcacgggcaggcaacccgctgtttcagttcgtcacaccacctctacggcatcacggcgtttgtttccgtcagtgaacagagcaaccagatggctgccgtgtattttccggtgggagacggtgaggtggaagacgcttacaacaacagccagtccgaccactctacacgctggatggcggattcggcggacatgcacggtgacccggtacaggcacagcgcatgcgtgagcatatcggtgtgatgagcttcaccctcgcaggcgtcggtaataatccccatattttcatgaaccaggataaacgctga

SEQ ID NO: 232897 - DNA, 297 bp, Klebsiella pneumoniae
atgatgaaaaaatcccttctgtctctggccctgatgaccacgttgcctctgctgaacggctgcgacgactcactcagccagtccgatacgccctactacaccaccgtttttcagtgcagccttaaagattcggataccggatggtgcttctccaccccgtcacgcatttacagcaccgactacagctatgttggtaaaggtcgtatccaggattaccttgtgccgggtggtcacttatgcgtcgccaataccagtggttgtgcatcagtaaacgtcaacgtggatgaaagaaaatga

SEQ ID NO: 232898 - DNA, 462 bp, Klebsiella pneumoniae
atgacgctaaaacccttttctctgggcgtcacactggcgtccatcttcaccctttcagttgctcaggcgcaggtttacacctgcacatttaaaaacggaacgtcggtgaagattaacgaccactttgacggtgacccgacactccagaatcacaatgcggtcacgtactttcactataaccaggccgggaaagccgacctcgcgttaactgccgtagctatcggctgggtgaaccaggcgcacgcggtcacggagtactaccgcttccagaacggcgactacaactatgtgactatccacgatggtctgactccgttcgacggtctgagcatctataaaggcacacagcttatcgcgaagcagccctgcaccggagacggctggtcaccggctctcgacccgtccagcgcagcacttcccaacgatgacgacggacaactcgccgacaccttcatgcaataa

SEQ ID NO: 232899 - DNA, 171 bp, Klebsiella pneumoniae
atgtctgtctgcgcccgctgcgggaaaaagagaaatatcctcgaacggctgtttgcgctcgatgacgaatactgcgacgaatgcctgtttgacactgaccaggagcaccgcgagaaacgggtattacccgttcgtctacgggacaagcccgcaaaggagcacaagcaatga

SEQ ID NO: 232900 - DNA, 936 bp, Klebsiella pneumoniae
atgacaccggatgtcagcatcattatcccggcatacaacgctgaggtcaccattggcgggctgctcgactgtatcctgcgtgagacccgcgtggcgctggaggtgattgtcgtgaacgacggctcgacggacgccaccagccgtattgtccagggctaccgccacgacagccgcctcactctgctggagcagcccaaccgtggcgtttatgctgccaggaacgccgcgctggccgtgcatcgaggtgaatgggtgatatttctggatgctgatgacactctggctgacgggtttgtctacaaccgctggcgcactgccgtagaagcccaagctgacgttgtgctgttcaacgcctggcgtggtgctgatggcgggccacgcaggccggtacatcacaaacagtcctgcggacgacagctctccgggcacgcctggattcgccactgcgtcagccaccgcgaatggccgcattacctgtggctgcagataacccgctcggcgtatctgcgcgagcacgggctgacgttccatgcagggaaaagtcacaaggatatcctctggaccgtgcagctggcggtgaacaacgggcggttttacgtctcagacgagaaagactacacctggcgaactaaccccgcgtcgattacccaccgggtcgactactatgattaccgggcgcgggactatattgacgtgattactgagctgcaccggttagcgtcgctaccggaaaaccacccgatacgcgttcacctgttgcgtcatgccctcgtggaagctcgccattttctggggttgtaccgtcggcgcatacaggatcggacaggcgtaaaagacgagttccgggctcgtattgcgctgcaactgctaagaaagggcatccacagcgccagcgacgtatgcttctttatcaagctggctgcaaaactgcggtaa

SEQ ID NO: 232901 - DNA, 687 bp, Klebsiella pneumoniae
atggctggacaactggatgaagcagcaaagcagattttaggtacacttttagctgattttagcgatcgaggcttaactgcccaggatttgaagaatggctatgaaggtccaaagattgagtctttggctgctgcggtatgcagtgccgtagatattactaccgttgattttgaagtagcgttttcagatcttgaagaagctaaaatgattcagaccggtccaatggctatgtatgataatgacagagatagctctttcattgttatcgcttcgtacagcaagcgcgaatacgtctgtttaaccgagaatggttataaagagtcgagaaaagcacctaaccggcctcagaaggttcagcggatcgtcaataacttaactattactggcggacagtttagtaatatgcagctagggcaaggcgggagtattactcagtcgatgagcgttgccactggtgcagattcggaaattgtggcgaaactggtttctatccttgaagaacaagggcaaatagtcaatgacgggcagcgtgatgatatcgttgcggctgttgctgccgctaatgagggaaatgggaaggacgctaaatctttgttgtccagggtctgtgggccgttatgggcgtctttacagccagtgatgtggccgatcgtaggtgcgcttataaaaagaagcttagggctctaa

SEQ ID NO: 232902 - DNA, 489 bp, Klebsiella pneumoniae
atgaccgcaaccccgccccctgttttaaaacatccttctgcatgttcacctgacgagctggacgcattcagggcgctggtcagggctaacgggcaggccaggactggtcgggtgccagagtctgagctgctggcatttttgcacaacagcgacgggcagctcattgcggtcggggccatcaaaaatccggcccctgattaccagcgacgtgtatttaccacttatgcggggctgaccacgacggctgacagctggccggtttacgaagtggggttcttctccatcgctcgtgactggcagaggcagggattaggtcgccgtatcctgcaggcactggtgaatgaaatgccgcacacgccgctatttgccacgacccggacgccgggaatggtgcatttactggaagagcagggttttgctgctgtggggaaacgttgggtgactgcatcagagcaggctccgctggcgctgtatattcgtgggggctaa

SEQ ID NO: 232903 - DNA, 150 bp, Klebsiella pneumoniae
atgatagccagcgtttttcatatcattgtttggtcacgattcttgtgggtttctgagttttcattcctgatgtttttcgtagcatcaaagtcgttaattgaaaatgactgtatgaatcaggcggtgaaaataagcatccgcattatgtaa

SEQ ID NO: 232904 - DNA, 834 bp, Klebsiella pneumoniae
ttgagccaggaaattccgaatgcagtaatcggcgctgtagcatcagtcatcgcagagcattattacagccactcaaagctggatacgttgtttatggagtgcggagcgccaggcagcgcaccagatggcaattgcgaaaagaaatgcagtctgtggttaaaacgctgcaatgaagacccatccattgatgcattaaatgtattaggttcaattatccaggaatatatggataaagagccgccgtcttcactgtttggtgagcaaatggattcaaagctcgtcgatggtcaaacaaggatcatgaaagcattagcgaaaaaccagctggtataccggactaacggttatattactaaagcaggctcaacacccattactaaaacactggaggattatctaagttccggtgatttttcatctattgaagccgagtttgtacgggctgttgaacacattcaaagtgatcctcatacatccattaccgctgcctgcgctattattgaagcgacattaaagttctatgccgaaagatttagcttagtattaccacaaaagttaaatgtcaccccactgtggaataccgttcagccacatctggctctcaacgcagatacgctacttgcagaagaccagcacaaaatcctgaaggggatctccgcaattattgatggcataggtgcattcagatcccatataggctcagcgcatgggcgaggttcaaacccaccgggtatcacgggtgcggaagcacgactcgccgttaacacatcgcataccgtcgttgtgttccttatggaattacttcatgccaaaactccgactaagcacgtatag

SEQ ID NO: 232905 - DNA, 891 bp, Klebsiella pneumoniae
atgtccctattgcgtgaaatccagcaggcagcgatagatcccagcattgatctcccctccctgttacgtaagtgcaaagtattggcaagtcggcttggtaaccaagagtttaaacaatgggtcaattttgagctaaacggctatcctgacctgggtaatttgccagactatcgaatattcgatgtcgaagttcgtggttatttcactggatcatttcaccgagtgcttaacaacgcgaacgtacctccttcatgtatcccgaaagagctcagagaagcattatttacctgtcgaatgaatacgccagtagcagcattggtatccctgacaaaaaattctgatggcattgctcaggaaccttggaatgctgatgttaccgcttatgtcggtcgccagataattcaggacatgaattgtttgcgagcctggaaggttatccctgtgaacttactcgcaagcattcttgacgtcataaggacaaaaattttggatttcgcactcgaaattgaagcagaaaaccctgaggctggcgaagctcagccgaacacacagccaatccctcaggaaaaagtgcagcaagtgttcaatacgtacatcgttggcaacggtaacaacatagcaaccgccagtcagcacgtatcccaggaagccaacaacacagatacccacgccgaagtgttcagccagttactggatgctttgcgctcggttagcgatgaatcagttacggagacaattacagccacagttgaagaaatgcgggcggctaaagacaaaccgggcttcctggcacactatacccagtttacttcactgttggctgaccacgtccagatccttggacctgtggttgcgccgttcctgcccatgttagcgaaaatgttatcttaa

SEQ ID NO: 232906 - DNA, 546 bp, Klebsiella pneumoniae
atgaacaccaataatactcacgccgaacaaaccgttgccgacctcgctcaccttgcctggtgcgctctggtcgctttgcggttggcacagcgcgacgaccaagcgttatcaccactaatggcccacaccttcttactccgctggctggcgacctctcagaagcaacgccgttttccgcgctccgtagctgctgacattgaaagtttactccggcttggacgccagaaaggccccgcagttggcttacagaagcggctggagtacctgtacgagtcgtgttcatcaccggtatcccgccagtctgatttgttccggctgacttatgccattgaagctcttaaagctcagggctggatcaacgcaacggtagacgaccacgaatgggacctgccagcactggccgccgaatacaccgacgtgtccgcgctgctggtaaagaagtcagaactggtgcgatgtttcgcggatgacgggcgactaactgccccactggcgtttgccgtcaaaggtaatacggaggttgtgcaggccgcgtttgctgaataa

SEQ ID NO: 232907 - DNA, 774 bp, Klebsiella pneumoniae
atgaaattaaatgaacgagcattatttattaaaaacgctatgattgataatgaaaaatatgccaacttgattagctcaagtgaaacaaatcatactcaaaacaaaggcggagaaattcaaaaatattatgcttttgatgaaaaaggtcatattctttttgcttctacatcagatggtgaagctggggaggatgtaaaaaaattatttactaaagttgtctgctttttcgcagcaatgacagctgctcttgctcgaaagcaaaaaacacttttcgattatgaggccgtcaatagtattattgctggttcaggatggtatatcgcgctgggaaaagaaaaacgatcatttaactctgagtctacatcagcaagcctaaatacaactattattcagaatgtgttaggtagcaatatcagcggaggggggatgaagattgctcagaacattctggcttcattaggtgggcaaataactgccagttatgaaaagagtgatacaaaaaaagaaattgctcatgtactttttatttgtgagtcttttatggggattccaatggttagtgtatctttgtatcacaccaacttggaacagcattcatgggtcactaaaacgaattgttcatctgttagcagaagcactattagctttaaatatgattcagatgattatatgtttgttgaccctgaatttataaataagtttactcctgaatttcagcgtagtgaagcttatgataagctaattgatgagatggctaactcaattaaagagtaa

SEQ ID NO: 232908 - DNA, 453 bp, Klebsiella pneumoniae
atggatgttagtgatatattaaaagtaatggataatgaaaaaagtaatactctatgcctgagtaaaggagggtttgaaggttggttacaatctgaattatggtattacctgaacatatacaagaaagaatctactgagcgagaagtaagatatccgggtaaagatacgtactgcgatttggtttgcaatagttcggtaacccatcctggtcaatgggtggaaattaaagcctatggtattttcagagatggtgatgagtctcgttttctggatagtgttgctaacgatgtgatgaaaatcgacagtaagcctgttggtgctattggttcagtatatttaatagtaccaaaagcagtttcagaaaaaatagagaggcttataggtgaaagacgttggtcattcttcaaaaaaactgaaggaccttatagctctatttatcatggcgatatttaa

SEQ ID NO: 232909 - DNA, 720 bp, Klebsiella pneumoniae
atggaaccgctttatccccacgacgacgacgctgaacacgaagagtttgacgaaggcacagacaacagttcaatcagtggcgaacccgaagaagccaatgaagaccgaccgcgtaacctgcacgctatcgcgggctggctctacgataaagccgtcagcggtatcgccggtatcgagtcagcggagacactggcgaagcgttatctcgacgacgcgaagggtgatgtaacgctcgccgcccgtaacttaatccactgggagagcatcaaagcgggcagcagcggctttctttccgggattggtggggtcgtcgcgctgcctgtcacgctgccgctcaacatcaccagcgtgctgtttatccagacccgtctggtggcagcgctcgcctgcctcggtcagcaccggctgtctgacgaacgcatccgcgccctggccgggttatgcctgtgcggtaacgccgccaaagcgctgttgcaggacctggggctacaggccgcgaacacctggagcgctgccgtggcgcagcaggtcaccgaaaaaacactggccctggtggcaacccgcgccgggctggtcagcgcagagaaccttgtgcggcttatcccactcgcgggcggcatcgtcagcggtgcagtggatatcgcctccacccggaccatcgggcgtatcgcttccaccacctttcttaaaccacagcctgaggtctctcccgatgagtaa

SEQ ID NO: 232910 - DNA, 564 bp, Klebsiella pneumoniae
atgtcatccattaccacgttaaaagacaagctcgccacacccaccctgcactttgcgctgctgagcgttgccactggcggtatttacccactgctgtggctctggaagcaccaggacaccgtcatgcaggagaccggacgcgagttctcctcgccattactggttatctggatggcggtctgcttcggtctcgctgcggtcttgcggccgtataccacgccgcaaatcgacccgctgaactacacgctgcatacgcccatggcagtcatcgccatcaccttcattctgacgatggccctgatggtgctgtatatcgtctgggccttcaaagcccgcacagcgctccagcactacgcgctgacgcagttccacttcgagctgaaaatgaacgtgttctacaccctggctttcagcgtgtattacatcaactactgtatcaacgccctgccggagtcgctggcgaagcaccagctgttacgcggtcagacccagcccgtgatgcaggccgcgccagcagcatcgaccaccacagcagacacgcagcctcctgcatccgctgaataa

SEQ ID NO: 232911 - DNA, 240 bp, Klebsiella pneumoniae
atgaccgataaacaaccgccgctgttaccacccggaccgtttacccgcgccgaggctcaggccgttgctgcctgttatcagaacgtggcaatcgaagacgaccagcagacccactttcgcctggtcattcgcgacagcgacggctgtctggtctggcgagactggaactttgccgctgaggccggacaggggctgaaccgctttattgcggactacggcgtgcgtaaggagcctgtatga

SEQ ID NO: 232912 - DNA, 231 bp, Klebsiella pneumoniae
atgaacaacgaacgccgcaaacgcctggccgcactgtcgcagcaactcgtggagctgaaagacgacatccagtccgtactcgacgaggaagaggaagcctttaacaacctgccggaaggcttacagagcggtgagcgtggtgacaccatgcagacagacattgcctcactggatgccgccatctgcgccctggaagaagccggtgatcagctgacggaagcgcaaatgtaa

SEQ ID NO: 232913 - DNA, 822 bp, Klebsiella pneumoniae
atgacccgtttatccagcctgtatggcaatgccaccactatccgccgcgaccgtctgctgacgcatgacgagctgatgcgcgtcgtgcccggtgtattccgtgacgacaagcacacctcacgcagcgccagctacacgtatatccccaccatcaccgtactggagagcctgaagcgcgagggctttgagccgttcttcgcctgtcaggcccgtgttcgcgaccccgaccgccgtgaatactcaaagcatctgttgcgcctgcgccgtgccgggcaaatcacgcagaaagaagtccaggaaatcgtactgctcaacaaccatgacggctccagttcgtaccgcatgctgccgggtatgtacagacaggtttgcagtaatggactcgtctgcagtcagtcgtttggcgacattagaatcccgcacaagggcgacatcgtgaaccaggtaattgaaggcgcatacgaggttctcggcgtattcgaccgtattgggcaggggaaggaagcaatgcaggcggtcaccctttccccgctggagcagaaagcctacgccagtgcggcgctgaactaccgcttcggcgacggccataaacccattaccgaagcgcaggccctgagcgcccgccgctgggaagatgagaagaacgacctgtggacaacctttcagcgggtgcaggaaaacctcgtgcgtggtggcttgtccggtcgttccgcacagggtaaacgcagccgcacccgcgccgttcagggcatcgacggcgacctgaagctcaaccgggcgttgtgggtgatggctgaagagctgcagcaggccctgaactga

SEQ ID NO: 232914 - DNA, 465 bp, Klebsiella pneumoniae
atgaacgataaaaccatcgctgtcgcagacgaaaccaccgtcaccacgcagtccgatgctttagccatcactgcaaccttagtcccggatgaagaacgcgttgccttctggggccgtcatttcggtcaggtccgccagtgggtcttcctcgaaccacaggtgttctcctggcttgacctgtggaacaccgattaccagggcggcatctgggagttttacaccctatcgaacggcggtgcctttctgacgcccccggagcaggagagctacacgctgtttaacgagcacaacggcaacggcgcagaactcagcaccgaagccaccggcattgccgtgtgtctgatggcatacagccatcacgcctgccgtactaactgtgaggtgattaacgagcactactaccgcctgcgcgactacgccctgacgcacccagaatgcagtggcattatgcggctgactgactga

SEQ ID NO: 232915 - DNA, 525 bp, Klebsiella pneumoniae
atgaacaccgctttaatcctggttccggcccggccggacctgtttcctgagccggtagcgcccactgccacaaccggactgtcccccgaagagcagagcaccgtgcagcaggcactcgcgatactggagcgccacctgctccagcccggtgtatcgtttctctcgtccgatgaaacccgtgactggctgcggctgaaaatggccgggctggagcgggaaaccttcgtcgtactgtacctcaataaccagcaccgtctgctaacacacgaaacgctgtttgccgggacgctcagtcacgttgaggtccagccgcgtgaagtcgtcaggtcggcgcttcgttacaacgccgccgccgtcatcgtggcgcacaatcacgtatccggtctcccggagcccagcaaggcggaccggttaatcaccagtaacctgcaaagcacactgttgctggttgacgttcgtgtgctcgaccattttgtggtggggcaccgggaaattatttcattttccgagcggggctggttatga

SEQ ID NO: 232916 - DNA, 345 bp, Klebsiella pneumoniae
atgggattaactcaacctgaatccacaacccccgtatggggcttaccgaacaacacgcgcccgtcatttggcgcgcgtctggtccaggagggccgacacctgcattttctggccgaccgcgccggactgtatggcgagtttacgcccgggcaattacgcacccttgatgccacctttccgcagtttgtgaaacagatggaagctgcgctggtctccggtgaactcaatccgcgtaaagccagacggttcacctccacgctgaatggcctgaagctggaggccgataccaacggctcatttggctatgtctatctcacgatttatccggcagtcgctgcacagtaa

SEQ ID NO: 232917 - DNA, 351 bp, Klebsiella pneumoniae
atgcaaaactactctgcgctgccctcaccggcagcggccccgtcacgcctgtcgccgctggcagcatggcaaaaactgctgtcgtatcttctgcaacgccattacggcctcgaactcagtgacaccgtgttctgcgacgatgccgtgattcagtcccacatcgaccgggcgctgtctccccaggacgcgattaactatctcgttgaacgctatgccctggagcgtactgatcgccctgctttcagcttccgggagccgtcaccgtatttaaccccgaccgatattctgctggcacgccatgccaccgggctcagtcgtatgcgctttccggcttcggtaacagcggcctga

SEQ ID NO: 232918 - DNA, 792 bp, Klebsiella pneumoniae
atgtttgatttactgatgaaacgtcagggtcagcgcctgctccgcgcagccaactggcccggccatctggagtggcaatggcgtctatcccactgccagggcgatggctgcgccctgtatggctggctggcccgcgaccacctgctcaccctgcttccggcgcttgctcagcgccagcacttatccgtagatgaggtgcaacacctgaccacgctgctgacgctgtacgacatcaccgtggtgctacaacgtaatgcgctgagtagtcgctacagccatgcggggtgtatcacgccagtggtggaaggctttccgcatgacgagtttccggcgtacacgtcattttgcctggcgctgcaacaggatatccgcgacctctgtctggaggcggaggaaaccggctaccggctgctcgacgccaccacgccacactcggctaacgaggttctgttcagccgccagacccagcactttgaactccgcgcggtcgccgatatgcccgacgccgcgtattccgctgactccaccaccgccgctgatgccgcactggatatctgtctggagcgtctgttactgcacggtgcgcgcctgctgactgtccggctggagattatctgccacaccaccggcgatattatcgcgcagcagtggctctctgacgtgcaactggaaaccggcgacaagccccgccactggctggaccgcgagagtatccgcgcgctggtccttgaagcccgcgacaacatccatcagcagatgaccgcctggcagagcttctaccgcgctgcctga

SEQ ID NO: 232919 - DNA, 459 bp, Klebsiella pneumoniae
atgaaaatttcactcaatgtcgaagcggacgccatctccgtcaccgcgctcaacggtggacggattgccgttgatatggacggagtagcgttcacagaactgatcgctgttgttaatcagtatgacgatgccgaacagtctgtgaccaaaaacccggtgtccccctgggccagaataaccggcatatgttgcagcatcgcccacatcacgtccgacgataacgcctgtctggggttaattcaggggagtggtcacgatgactggatacacgatacgggatatggttacctgctgcgccttaatgcccgttctttccctgttctgcagctaaagcgcctcgggttgtcaaaagcctgtcgccggttagtgacccggctcatgctaagtcaccatatcgatattctccatctggatacagacggcgatctcctgccacattttgaaaccttcgactggtga

SEQ ID NO: 232920 - DNA, 663 bp, Klebsiella pneumoniae
atgaccacacaataccagcgtatcgacagcaccaactggcgcaatatctgggttgtcggagacctgcacggctgccataccctgctgcggcaaaagcttgacgagatcggcttcgacaccgctcaggatctgctgctgtcagtcggcgatcttatcgatcgtggtaaggaaaacgtggaatgccttgcattactcacgcagccctggttccgggccgtatgcggcaaccacgagcagttcttactggatcacctgctatcgggtgataacggtgatgaatggcagtgcaatggtggttactggttcttcgaactcagtgatgcagaacagaaatcggtactcgcactgctgccgcttatcagcgtattgccgttagtgatcgaaatacagagcaacggcaggacggtagtcatctgccacgccgattatccggccagtcactacgccttcggcaagcccgtggaagcggacggcgtgatctggagccgggagcgtattgaggcatcacagcaggggttctgccaggagataaccggcgcagaaatgtttatcttcggccatacgcccgttccggcaccgttgcacgttgctaaccagcactatatcgatactggcgcggtggtcaccggcaatctgactttgctgcaaatccaggagggttga

SEQ ID NO: 232921 - DNA, 225 bp, Klebsiella pneumoniae
atgaagaaagttttaacgggtgtcatgctggccgctgttgcgctggtgtcgttttccacaatggcgcaaccggatcgtacgcagatgcgtcagcgttttgatgagaaaatggtacaaccctgccagggtaaaaaggcaggcgacagcgtgacgatcacaacccgccgtggcgataaggtgcaggcgatctgcacgctgactgccgtaccaaatcagccttcctga

SEQ ID NO: 232922 - DNA, 408 bp, Klebsiella pneumoniae
atgagtatctttaaagaatttcgtgagtttgctatgcgtggcaatgtcatcgatttggccgtcggtgtcattattggcgcggcttttggcaagatcgtgtcatcactggtcgccgatattattatgcctcctttaggactgttgattggtgggattgattttaagcagtttgctttgacgctacgtcatgcggaagggacaactccagcagtaattatgcattacggtattttcctgcaaaacgtattcgattttcttattgtggcgtttgctattttcatggcaattaaagtgatgaataagctgaaccgtaataaaaaggaatcggacgtaaaagcacctgtgtcgagagatattcttctgctggaagaaatccgtgatttattgaaagacagtgtgaaagaataa

SEQ ID NO: 232923 - DNA, 852 bp, Klebsiella pneumoniae
atgctaacttccccatctgtcgtcgagccggaggttctttcagaccagcacgacgtgatttgttccaccagcattgaacgcatcgtctccggacgcaacgccgcactacagcaaatagaggacgtgataaaccagatcgcagaaatctcacgactgacccaaagtatcgatggtggtcaggctaccgactggcgttgtgagtcagggcggcgctatgactgctggctgctgcagccgctggctaaagctatgccggtcatcacctgcaatatagaccgccgggtctggcgtaatctgatgcaacaatccgggatgctggcgctgatggatgaccaggcccgcagcgaatggcatcagaatctggaggacaataaattcccggaaatcagtgaggcgaatatcctcgccacgtttcaacaactgcacgataccaaagccgaagtctttgagcggggcgtgattaatgtcttcaagggattaagctggaattacaaaagcaactcgccctgcaaattcggtaagaaaatcatcatcgacgggctggtacgctatgaccgatggggatttcatatgtcttcaggctatcggcgcaaccagctggttgacctggagcgtatgctgcatctgctggacggcaagcccgtaccggataaccgaaccgatatcgctcgtcagtttgatgctcatatcagtaagcataaaaccgcagaggattttaccgacgactatttgaagatacgctactttcaaaaaggctctgcgcatatctcatttttgcgaccgaacctggtggaaaaaatgaatgacattgtggcaaagtactacccgcagtcactggcaacgcatttataa

SEQ ID NO: 232924 - DNA, 1881 bp, Klebsiella pneumoniae
atgagatcaaaattattaagtatatatgtcaagaatataggatgtatcgggcctgagggtgttcaggttaagcttgatgatatcctttgtcttgttggccccaataactccggaaaaacaacgatactcagggcttacgaactcgcatttaacccaatttctttcaatattagtaatgaccgatgtaattgggctactgctgaacaaccgtctgaggttatccttgatgttcatattccagaaggaatgggaaatgtagatgaaaaatggaagattgttgatggcgaaaagaggatagtcagaagttcatgggtctgggatgaaaccggaaaggctataaggaaaacatgggatcctcaattagataattgggcacctgatgggaaggctggtggagccgataatgttttcaaatctcggcttccaagaccaatgcgtataaaatcattagatgatgccataacgacagaagaagtattgcttacccttgccttaagccctttagtaaaggaaattaagacactggaaagtgataataactctcagatatcgaaagataaagcggctctggcagctactgttaatgcactggcaggacctcatcaggaaagaatttccagcatttctcagcaaatacaatctggatttcaaagtatctttccagggcttggcgtactactccatgtagaaatgattccacctgaactaaaaattgagaatttgctcaagcaaggatccggattattggttgaagaagctgctggccaatcccgaataggacaacaaggtacaggagcaaggagagctttattctgggcgatgttacaagttcataatgagatcagtcgacaaactgaaaaacgagatgcacttcttaagtctttaaatgaacaattaaagaaagagtgtaaaaaggatgcagaaagtgaggccgtaaaattacttaaccaccaaattgacgctataaaaaatggaggtgtaattccggaggatgccgaagatcctgcattgccgggctacgtccttctgatgggtgagccagaaaatgctttgcatccaatggcagcaagagctgcacaatcacacctttatgctctgggaaaacatcctgactggcaagtattattgactacgcactcaccttactttattaacccacttgaagaccatacgacaattgcacgtatgcaacgttcacctgatgggaaatcattatctccaaaattatatgtcgcagatgaagccaacttttctgcagaagagaaagataatttacaggcattgcaactaaccgatataggttttgcagaaatattctttggcagttatccaattattgtagagggtgatactgaacatgcggcatttatttctgcaatagtaaaaactcagcatgaaatggcaggaaagataagcattatccgggcgcggggtaaagccgttcttgtacctttaataaaaatgctacgccatttcaaaagcaactttgggatcgtgcatgatattgattggccatatcgcaaggatggttccggaaatggaatgtggactatcaatgagacaattcgcaacgaaataataagatgcagacaaaatggccatgttgtttatgatcgctggagcatccctgactttgaacgctttctgggaggaactgaacttggcaaagataaaccatattctgcttttcatcgcatatcatctgatgacgaacttaaggttaaagtacaaaatcttatatcaagcttattcaacggagatgattatgacccgataggtcatgatccgaacggagagtttatttctcagattttagcagagttaaatgtctgggccataaaaaataatcaacaacatagtatacgtataattggtgtctaa

SEQ ID NO: 232925 - DNA, 141 bp, Klebsiella pneumoniae; identical to SEQ ID NO: 194413

SEQ ID NO: 232926 - DNA, 1326 bp, Klebsiella pneumoniae
atgagtggcattaaaaaacaagcaatttggttattaggatccaatacaatttctgccattcttcagattctacaaattagtttgctagctcaccatcttaaactaagtgagttaggagtactagctatagtcaatatggtattgatggttgcgatgatcttgcaggatatgggaatgagcagttatatagttcatatgcaagaaatgacaagaagagatcagagtactatttattggatcaacctgttacttagtttcctgacagggtgccttgttttcgttgcgtcttggcctatagcatctttttacaatatgcctgacttaacttttttagtaatgttggcaagctttaattttctttttctaggatctctatcgcaatatcaatcgcactacataaaagcaaaaaaagttatacttttggctaaaatagaaatcatttctaaaattatttcttttttattcgttttgttctcaattttaaagatggatctgagaactgaggctgtgatttatggtctgattattaattcttttgctcgtctttttttaatgtcattattaggtgataaatcttggcgacctacttttgagtttaattctgccatatgtaagccggtttttaaatatgggatctttcaattaggctcacagattctaaatcaatttcgcacacaattagatgttattgtaattggtaaaatgctaggtgcggattcacttgggttatattctttagctaaagatctcatcatgcaacctctaaagctgattagtcccgtaataaatagattggctttgcccagatttgcagaggttcaaaatcaatctgataaacttggtggtgcatatctgcgtggaacatctgtaattctgttgtttagcatgataacttttttctctatttatttgttggggccagttataatcaaaattttatatggttcaagtcgcatgggggtttttaatattctaccatatatgcttttgtttggtgttttaagacctatgggtgggttaacaggcgctgtggctcaagcaaatggcaagactaacattgagttcagatggaatgttatagcaacttcgattgttttgggtgttactactactgttttttttattcctcagttatggtatgtttcgttaagtctttcactttctcagttattgattagtttttttgtttttccttgttttataaaacctattgtagatgtgagttttaaatcatatttatataaatggtttccacaagctttatgctttatatgcttgatttatattgtcaagttttttgatctcgtgctttaccccttttggtga

SEQ ID NO: 232927 - DNA, 1230 bp, Klebsiella pneumoniae
atgaaaatactttttttttgtattcgattcccactcgcttctgaaacttttgttttaaatcaagttatttcctttattaaaaagggttatgatgtaaaagtattgtctttatatccgggagatactgaaaaagtacatggcgattttgaaaaatacaacataggtgctcttatagaaaatatttttgacgctgatgaaataccgggtaataaattatcccttatcttctcgagagcaaaaattgttttaaaatcaagttcatttagtattattaaagcattcaactttgagagatttaaatttttatcctactcattattattacctgcgatttttgcaaagttaaggaataataaaatttcagcggatgttataattgctcactttggtcattgtggtgtgcttgctaacgcaatcaggaatatcgggttaattaatggtaagcttttgactgtattccatgggtatgatatttctacaattagccttcttaaaaaatataagattttatataaaaatttattttctcagggtgaatacttcttacctataagtaacttatggcgagataagttaatcagtatggggtgtgataaagataaaatatcggttataagaatgggaattaaaatagacgaatttaaatatgaatttcatgcacgtgatcaatcaactttaaacattatttccgtctgcagattaactgaaaaaaaagggctggtatatgctattgatgcttgtaatgcgcttaagaataaaggatgcaaatttaaatataaaataattggttatggagaattagagaatgtgctagccgaaaaaattaaagcactaggacttcaggattatgtctatcttttaggatttcagccacaatcagtagtaaaaacagctcttgctgagagcaatgtctttttgcttccatccgtaactgctagtaatggtgatatggaaggaatacctgttgcacttatggaagcaatggcgtcaggcttaccagttatttccacttatcatagtggtataccggagttaattgatgatcataagaatggttatctttgcccagagcgtaattctgaagctatagcaaaaattttatatgaaatatatgaaggaaaagataatctatcattaattgcttctgaagcgcgtgataagatttattctcagtttaacgaggaggttgagttcaacaaaatcgtcactttgctggagagcattaaatga

SEQ ID NO: 232928 - DNA, 1263 bp, Klebsiella pneumoniae
atgaaaatattactagttggaaatcatacttgcggtaatcgaggtgatggtgcaattctcagaggattagtggattctataaaacagatcaatccagatgtagaagttgatattttgagtcgttatgcaaggagttcagcctttttactaggaactgctattaagcaagatgtcctatattcatcaagaatgaataaaaatggtgggcttgttaaaaaagttatttggaagatcaagaatagtattcttcctgatatattagtttcgcatgcaaaaggcaaaggttttttaaagtattttcctttgccaaataatgttgttgaatttattaaagatcttgaaaaatatgatgctgtcattcaggtcggtggttctttctttgtcgatttatatggcactggacagttcgaacatatcttatgttcaaatatagcgggtaaaccaatatatttagttgggcacagtgttggtccttttgagaatcctaaattccagcatatcgcaaaatattgttttactaaagcagagaagataatactacgtgaagatgttagtttatctttgatggaaaaggataacttcaacttaaacaatgtaacattgggtgttgatacggcttttttggtggatacagaaaaagatgttaatgattatgctgtttctcattggaaaaagataattaaagaacagaaaacggtagctttaacagttaggaaactagcacctttcgataaacgtttaggtgtttctcaagatgagtatgaggcttcaatcgcccgtattgttgattatttgaaccaattaggttatcaggttataatattttcaacatgcactggcattgaaagttatcatagtgatgaccgaatggtagccctttctgttaaaaataaagttcatgatagtcaatgttgccatgtcgtaatggatgaattcaatgattatcaattagggattttattatctaattgcgtctttacaataggtacaagattgcattctgctatcatttctatcaattttggaacacctgcaatagcaattaattatgagcataaatcgttgggtgttatgcgtggattaaaaatggatgtgctatcagctgatgttagcgatgtcattgatgggacattgattaataaaatagaagatttaattgctaatatggctgatattgaaaattccttaaaaaataacttacaagatgcaaaaataattggccgcacaatgattgaaaacattctttctgagattgatagataa

SEQ ID NO: 232929 - DNA, 555 bp, Klebsiella pneumoniae
atggctagggtgcattcgattagaaaatcaggtaagcatcttgatattaattatgtttgccataaaaaatcaagtgtagatcaatcgattaatctcttttattcgaccaaaaaccctgattacaatgcagattttgttgggatgagtatagatgaaattgaagaaataaaagaggatatgcttaaagagaatgatataacgcattccttacttcttttaaccacaattgaggcgctaataaggcttgatgcagataaaaaatattgtgataaaaaaaagaacacattctcaagactgataaagtgcatttatgatagaactaaaggtgagaggataaggcttgaagaagatttgattaatacaagaatgaatgaggatgatgtaagtcttcgtggtaagtatattgatttaaaaaaatgctttaaatataggcattggctcgctcatggaaggtattgggatccaaagagaattactgaggttgattttgactcaataagggtcttgatttcatcaattcttgtgtcaacttcaattgagtttgaaatagattga

SEQ ID NO: 232930 - DNA, 573 bp, Klebsiella pneumoniae
atgagcattaaaaatttaaaagatataataaataaacaaaaacaagaagaagttgatgaggagtttcagtttgagcctactgaacagataaaggaatatcaagagctcgtggaacaactttatacgctaactctttcctctatagatgagttaattagagaaggcttaatacaagttgatagagaaaaaataaatattcatgaagaggctcttggggattatgaaattgacatgttattattatcgattaatcataaaaaaataaaatttgttcctgcagggacgatgttaattggttcgaaaggtcgcgtggatgtttttggtccgttcggatcagaaaaatttatgcttattagaaaaggcttaaaaaaaccaggggaccttatcaaagtaactgtacaaataaatgatcctaagaattcacctagcagtgagcgagaagaaccccgtaaaaaactcacagttgatgattgggagtggaaaacattacctagtgataatcgctggatgaaatttgatgatgttacatcggatacaataacagatctaataatgagattgataaatggctag

SEQ ID NO: 232931 - DNA, 1062 bp, Klebsiella pneumoniae
atggtaactttgaaaaagaaatacggtaaaaagccgatagccagcaccgctggccctgacattgtggagtcactgaaggccgatcccgcgttgacagcgttcagctttgacggcccttatcccgtgcgggatatggccgatttgctggacaatctctattgcatggacaacgggcgatactatgagacgccagtagacttttacggactggctaaagctccgcgtcagagcgcctggcatgagtcggcgttgtatttcaaacgtaatgtgctcaccggctgttttatcccgcacaaactgctcaatcgccagaccttttccgcgtttgcgctggactggttcacgtttggcaatgcctatctcgaattgccgcgtaatcgcctgggcggcccgcttcccttcaaacactctcttgcgaagtacacccggcgtgggagcacagatctcgatcaatactggtttatccggcgctggaaagaagagcacacgttcaaatcaggaacggtatgtcacgttctgaatcctgatatcaatcaggaggtctacggtatgccggaatatatggcagcactgctggccgccagcctggcccactccgctgacatgttccgtaagctttactacgacaacggatcgcatgctggatgcattgtgtatattggcgctggacaagttgacgataaaagcatgaaggcagtcaaagagacattgaccggtgcgcgcggtaaaggcgcatttaaaaacctgcttctgcatgcgccaggcggcggcaaagacggcgtgcaaatcctccccttccagcagatcacggcgaaagatgagtttatcaacattaagaacgccacccgggacgacatactcgcagcgcaccgtatcccgccgcagctgatgggcgccatgccagagggaaacggatcatttggggatatcgagaaagccgcccgggtctacgctatcaacgagctgacgcccgtaatggaggcgctgaaggtggtgaacgagtggatcggagaagaagtgatccgctttaacccttacgcgttgcttacccctgagaattaa

SEQ ID NO: 232932 - DNA, 2232 bp, Klebsiella pneumoniae
atgaactggtcagacttggaaaatagagtaaaacaattctcaagattaatttacaacagggactcaagctcaataagtataagtgggatgcaattcgattgttttactaagattgaggaagatcactatgtttgcattgaagtaactaaaaatcacacgctcgaaaaggtaaggatggatataaacaaactcatcactttaagaatgagaaaagcctctgaaggtgcatttgtcaaatgcattttgattttagaaagagaacctacagatttaatgaaaggaactgctttcgattccaaaatagagctattgactttggatgaatttgaacgaaaatttttagattacaaaaattatatttttactcgcaaacagaaaaatattggcagcgcaattgacccatggacaggtgaattagataacaacccctacgtccctgttaaatatgtagaaacaaaaacagacaaagagtttaaaataagtgacattaaatcgcttttagataaaggagcaaaggtaatattgacaggtagttttggttcagggaaaagcaggtgtttaagcgaactttttgacaattattcagagcaacctgatccatcatactgttttgttataaatttaagagaaaactggagcctcaagagagctaatgaaattgttagaaggcattttgaagatttatcgttccctcctgaaatagtaaataactctgtaaaactattaaccttcaaaaaatcagtatttatgcttgatggttttgacgaaattggttctcaaaactggagtaacgaaccaagcaaactaagtaaagctaaacaagatgctttaactggggtgagagatctaataactaatgttcaaggaggattactgataacaggaagagaaaactatttcaatagcgattcagagatgttctcatttctgggcttaaatgagaaagagacgatatatataaaatgtaaagatgcatttagcgaagatgaaatgaaagaatacatgttaaacattggatgcccagatttaattatacccccatgggctccgtggaaacctctcatatttcaaatgatcgcaagtatatcagagagattagcattattatccgaagataatgaatacgagttttgggatagattattagactttatttgccatagagaagcaaatatcaataaagcaattctagattcaaccataattaagcaggtattaatagagctagcaaatcttaccaggacaaagaataatgattttggaccaataagcaataatgagcttagtgttatttttaataatataacaggaagaacggttactgatgagtcagcaattatgctatcccggttaccatcttttggacgcgtaggtaatgatagctctgattatcaatttatagatatgtacatgctcgatggtttgagagcagagtatatggtcgcacattatgactccgattcaataataaaaaaatcaaactggataaatccgcttagagaatttggtcaaagattgtttttttataagattgatattaatgaagcaactaaaatagtgagcaaaatatcttattggtcaaactctaactcccaagcagcagctgatttactttgtgcattcctctcagaagaagagagcgacaaattagtcgactttcgcaatattcaaattaaagattgcttcatcgaaaaaatagatttaagtagtattcctttgggtaacttgagtattaattcttgcattatcgaatccatagatattagtgactgttttatcgagcctaaaaatagtttactcattgatgactgcgatataaacattgtatcaggggtatcagatgcttcggcacttcctaattacttcactaactgcaaggttagccaatttagctcagttaacaccacttcaaaaataaaatcgctaggttttggcactcatcaaatggcacttctttcatgcattaggcgagtttatcttcagcatggccgggggagaaaggagcgttccttcattaaaggattcaaaaatcagcaagaaaagaaagcaattacattgatagttgatctgatgctcaaaagtaatgttatcgaaaggattaacggggatgagggatatatttataaacctgtgaattcagaaagacatcggatgaccctaattatgaaagaaatgaacacatctaaagacaaattatggcaggaagtcagcaggttagattctctatattga

SEQ ID NO: 232933 - DNA, 1248 bp, Klebsiella pneumoniae
gtgagtaaatataataaagttgacttggcatatgattttttagtttcgagagagaaaaatcaagagtcgtttacgatagaggagttagcagctgctactggatggaaagtccaaacatgcaaaacatacccaaccaagacgtggaataaattcatttctagagatggtcagcaatacactactcttggaataaaatatattagcaaggaagactttcgacacataaattctcagaaacatatggactctattcctcagtcagagcgaagtattaatttaaaaaaagcaagggaatttgcattgcttgcagtttcaatatataataatccttttactgaattcaaaacttttggtttcatagttaatatcattattgcatatacatcactttttcatgcgatcttttctaagaatggtacacaatattgttatctcgaaactgatggaaaaccaaagttggtcgatgggcaagagaaggcttgggagttaaaaaaatgctgccaagaatattggtcaggcattgaatcagcagaaaaagcaaacttgcttttcctcatcggattaaggaatataattgagcatcgagggcttcctgctattgatttattagcatttggggaatgtcagtcagcaattaataattttgagaacattcttataaaggagttcggggaagaaaatgcactgatgattaatttggcgcttgcaatgcagttaaccaggacaagtcagcaagcacaaattgatgctataaagcaatttcaaacagaaaattttaatgtagtaaaaaaattcatggatgattatagaaatgagctttctgatgatatagttcaaagtcagcaatatagattaagagcgttactggtaccattagtcgggaaaaacgccaaacaatcagacttggcaattgaattcataaatgtcaataatctaagtgaggatgaattagaaaagtatgagtctggcatagccttcataaaaaacgttgaaaatcagttcaaattaaagccaacaaaagttgtttcattaattcaaaagaaagaaaaaagcttcaatgttacaactcatactaaattttggaaacattatgaagctaggccaattggaattgacaaaacatttaaagggaaatactgtgggtatattgaaggatttgatggatatctatattgccaggaatgggttcactttattctggatgtctacaaggataaaacagagttaaaaaaagtactcgcgttataa

SEQ ID NO: 232934 - DNA, 921 bp, Klebsiella pneumoniae
atgacaacgaaattaattaacctgccgcacctggcagatatggtctttggtgtgccgcattacgtgacgcggcaaacaatggactccgtgaaagcggtgctcatcccccgtattcaggggatcaccgaagatgccgtcattcagatggcgctgaatccgggtaaatcccctgcagctgagcaggtccagcccaccggcggggtggcggtgatccccgttcacggcattcttgttccacgccgggggcagattacggcgatgtgctccgagctgaccagctacgagcggatccgcgggcagctgcaggcggcgttaaacgacccctcaatcagcgaaatcgttctggatattaactccggcggcggcgcagcggtggggtgcaaggaactggccgattacatttatcagtctcgcgacacgaaacccatcacggcgattgttaactacagcgcgtattccgccgcgtatttcatcgcatcggcctgcagcaaaatcatcgtcagccagaccagtggcgtggggtcgattggtgtgatcatggagcacctcgatacgtcgaagatggaagaaaaaatggggctgacgttcaccaccatttaccggggagataacaaaaataacggcacccaacatgaaccactgagtgaagagtcgctgggtatgttccagggcatgatcgacgaaatgtacgagacgtttacggggtcggtggccgaatatcgcggcctgaatcagcaggccgtcattgatacgcaggcggggttgtattttggccctggcgctgtgtccgccggcctggcggatgaagtctctgacccccaggcggcgatcaatgctatcgcggcaaagtatcagcaaccccgtcaaaaaacctccattcagatgcaggcagccgcgatggatctgcaaaccaaaatgtaa

SEQ ID NO: 232935 - DNA, 927 bp, Klebsiella pneumoniae
atgaaaataaaatctcaaggatttgcaatcgtcaaccctaacaacaacatcaaaaccactgatatcattgattatttcataaaacaatctacgcatgaaatcaaaagagccgattatgataggcagatccttctttccgatgatggtcagttttataccggcttggtcttgacatataaaaatcagaaaaaaaattgtctttcaacagttaaagatggacaattcgagataaaggttgaagacatacaaggagataataaacttgttaactttaatttcttctgtataaataaagtcagtttaaaaggattatacctttattatcgcggatcatgctcactaaacagtttgtttagctcatggcaatcttacagtaactttgcaataagaaagaaaattaaaaatgaggtaatcgccttaggcaaaaaaccagataaaattaaagttgaaaatattcacaaaaaatatgaaaagagattggaatttagggtaattattgataagtcaagtttgattgccatgctttctacgtttagtgaaattaaatcagcaacattccggtatgattctgttgatttcaaagaaagcgaaatgatcggcgttgagcaattcactagaaatacagaggttacatttaacatcagtgataataatagatctaaagtaaatcaaattgcgaatagtcttgaccaaatggtaaataaaatctcaggaataacaaaaggtgttgtatctgttgttgatcactctaaaaatgagcgactgattgatctaattaattccccatgttattttagtgagtatgattttgatacaatcgcacagcatgtaaatggtttaaaaaatgataattacatcagcaatgctataatacaaataattaaagatgaaatcaccaatggcagaaaaaaacatgaatttaattga

SEQ ID NO: 232936 - DNA, 552 bp, Klebsiella pneumoniae
atggcagaaaaaaacatgaatttaattgataattttgtaagatctaagttctaccatcaagtaggatggttaatagcgttatctttattcattgttgctgttatgacatgtgtttaccttaaccttactcaccatcagggaaaagcattctattcattttatcaaacatcaatacgtggctatcttttttctggtttcatctctgtgggttcactattattatcattacatacatttgtcatagtaaacttgaaggataagttgttctccactgagaggtacatatccaattttaaattaagtagaaatttacccgagaatgaaaaagtagatgaatgtgagctttttaaaccacttgatacattatcatcctttataaatatctcagtttggttgtctatactttcagctgtgtctcagtttactattggtttgatagacgctggagtagcatctgtcttttgcatatggttagcaatgctaaccatatgctttcttcttaattcattaattctgattcgagtgcacatcaaaaaaatgttacatcaatag

SEQ ID NO: 232937 - DNA, 345 bp, Klebsiella pneumoniae
atgaaagatatgtacgaaatcatggaccgttggggggcttgggcggcatccgacaatagtggtgttgactggcaatcaattgctgctggttttaaaggtttgctacctcatggaaagaaaacacgccagcaatgcgatgatgatgaagggatcatgattgatgggtgtgtggcgcgattgcgtaagtataaacctgaagaacatgaattaattattgctcattttgttataggaatatcgttgcgttccattgctaagacacggaagtgttccgatggtaccatcaggaaggagttgcagaccgcgatgggatttgttgagggatgcctggcgatgttaaattaa

SEQ ID NO: 232938 - DNA, 3408 bp, Klebsiella pneumoniae; identical to SEQ ID NO: 181778

SEQ ID NO: 232939 - DNA, 357 bp, Klebsiella pneumoniae; identical to SEQ ID NO: 181776

SEQ ID NO: 232940 - DNA, 339 bp, Klebsiella pneumoniae
atgagagcgggaggactgagaaaccgcgtcacgatccgcaccttcacttcatcgagaacaccttccgggcaggttattcagaaatgggaagacggggaaaccatctgggctgaagtaaaggggatcagcggtcgtgaactggtggccgctggcgctgagattgccgaagccactgttcgtgtatgggttcgctttcgccgggatattaccgccgcaaaccgcctgaaagtgctgaccggcccgctggctggcgcaacgctcaacatcatcgggccgcctatccccgattctggcatgacccgccttgaaattctctgcaaacaggggactgagaaatga

SEQ ID NO: 232941 - DNA, 261 bp, Klebsiella pneumoniae
atgccgatcaccattcaggaaatcaaagaacaccatgatcagttcgggcttcacgacatgagcgcaatgcctactgatgagtatcggcaggccctcaaagatggcgctctattctggattgaccatcatgattttgttcgcagcacgctatcagaagagatatttgccactaatcgtgagcagttggatgccttgattgagcacttacaggaatatagaaaccagatgccaacaccgccgggttggatgagcgagaaataa

SEQ ID NO: 232942 - DNA, 369 bp, Klebsiella pneumoniae; identical to SEQ ID NO: 181766

SEQ ID NO: 232943 - DNA, 312 bp, Klebsiella pneumoniae; identical to SEQ ID NO: 181765

SEQ ID NO: 232944 - DNA, 189 bp, Klebsiella pneumoniae
atgcctaagtcaaaatggtcagaaatagacattgaagacgaactgcgccgccttgaggtaatgctgtgtacgactctatatatgaatctcgatgatgaagagggttacagcattgcgattggtttgatctctatgtcgttgtctcgcgttcgtgaactgaaagcagtcagtgaggtgagccatgcgtga

SEQ ID NO: 232945 - DNA, 1308 bp, Klebsiella pneumoniae
atggcacataaaacaaaggcggccccacatggccgccagagtcatcacactaaacgccatcagattaccaggcctgccgctggtggtcaaaacctgagagagttgcataatcgcaactcggtactgatgaacttttccaaagcactttctagtgcttcggtagaaggtaatggtacatacgggaaaaactcgtatgttaaagggcagatttctaccctttatagccagcgcaattttatacaggattttgcgctcgccagaattggcgggctcaaactaaaccatgagttatccgttacccaaaacttgggtaacgctccggtaaaggtgggttttccccacctttggggtaaaccgcttaaaggctgtgctccccggaacgggggatctcgaacatcgaaggttgtcgccagaaaaggcgtaaaccccagagtgcaaaattgcactctgcttgtaaatcaatatcttaaacacactactaaaagcggggaggctcgttacccagatattgggtatcaacaccgatgtgaagaaaatcgcatctcattactaatgaacttttccaaagcactaaaaagtgctttggaacaaaatcaacaagttaaccttttgataataaagcaaagctcaaaagtgagctccggccaaacgccttttctggcgtctggttactcctgttccttggccttcttgcgttggcggcgtttgatttcgcctttggctgcagttacgagaaaaccagcggtgctttctccttcttgcttcaaactttcaatatcttccatcacatcatgggggattcgaactgtagtcatttgtgactttgcgttctttgcacctgttgccattactaaaactccttgtgttaggtgtatttcagtatacgcaaaaaaaataaaaggaaaaggcttgaagtgtatttcactttgggctagcttgaatatcgaaggtgaaatacaccttgtaaatgcgaagcccggcagtgctaggaacactaaccgggcctctaaccacaaaccgttagttggagtaacagttatggctggatcacagcatacccaaactcgcccggaattcacatggttattcctggcagtcccgaaacatctcccacatggaaaacctgtagtgctgcgtactacagccgcaactgaagaagaagcccgcgcagagttctgcggttggaatatggtcttcgccgcaaaaattcggtctcaaatgcggtgccatataaccttttatgatgatgttaaccgcactggtctgacacttgaggttgaggctgtcgagggggtgttcaatgcctaa

SEQ ID NO: 232946 - DNA, 201 bp, Klebsiella pneumoniae; identical to SEQ ID NO: 181762

SEQ ID NO: 232947 - DNA, 711 bp, Klebsiella pneumoniae; identical to SEQ ID NO: 181761

SEQ ID NO: 232948 - DNA, 1224 bp, Klebsiella pneumoniae; identical to SEQ ID NO: 181760

SEQ ID NO: 232949 - DNA, 1257 bp, Klebsiella pneumoniae
atgccagacttaaccttcaaaatttcctcgctaatcgacattaaaaaaatcgaatccgccgcctccccggggtcaaaaatgaagcagataatttctcctgtccaccgcttgaccctaagtaaaaaaaccaggccaagggtgcgttttgcagcgtggctgaaaggggcgatgcttctggcaatattacctcaatcggtatcagcaattgtactcgggccgggttatacaaagcttggtagctggaatccttctgtgaccactactcagaatggtcgcgacttcagaggatcagacggtggtgagggactctattcaagggattatccaaattttatgataatagaggcttacgacaacacgacaagaggaatatcagaaaactgtaatggttgggggggagggttatcttgggtaacgactggtgatggctggagcggatatctcattgctcaaggcgtgtacctgattatttctggttcagcttcagggactcaacaatggtggtggacgcaatatggggtaaaacgaaccacaaccggtagtgcggcctggagttccaaggggacgccatccggtaaccacagaagtgcttatgtcgctaactgcgctggtattccgcccgatcctggttcggggacatttacgctattagcaggtacaaccagcagggcatcacttgagtatggagtttacgttttaccaggcactgcgccagcaacctataccaattattccctgctgtttggcctgtcaatgggaggctcgttacctaatccttatgagcggcttgttcttcccccgctggagattaataaggcaacatgcaccgtagtaactcccggactcatcgcctttggtgacgtcacggcaggccaggcttcagccgggaaaggtattgcagttccggcgacgctgggagtttcgtgtactaattactcaggctctactattcaggtaagttattccgtcaaacccaaaagtcaggcgggaggtaaatatacgctccccctgatttccacaggcggcggaattgcgggtgatgtccggggatttgtgggcccctccgctgagaacgacgcagggtgtgtggataaagcatcatcggtccccatggataatactctggttcccctgcgcactgtcgccaataccagcaccaactcctggacggatcccctgacctgggtgttatgcccgcgagtgaatgctaaacctggccccgctacggctaccgcgacaatcgaagtaaactggtaa

SEQ ID NO: 232950 - DNA, 1227 bp, Klebsiella pneumoniae
atgctggatcaaacattctcgccaagaaaccttttgagacttttgtataaagaagatcctaaaaaattcctcagaaatattgatagggaagattatgaaagtgaaatgataaaattatcacaaatcataaatgacgataagtttagttttggcaagttttcctttgcaagcataaataataaaaaggttattatccccaatgaattcaaagacatactagctttaaggaaagcaaatgataatctcaagagaatctatggtgtcaaacaatcagatagaaatgatattgtaagacatgtcatctgcatgcttgaagaacctgtccccttttttgtatataagttagatattaaagatttttacgaaagtattaataaaaataaaattttggacaaaatagcaaaatcctcaattgtttcctataaaacgaaaaggttgataaagcgtttttttgagttatctcacctatctactgagtcaggtgttccaagaggaatcggtttaagtgccaccatggctgagctttatcttgaagattttgatgataaggttaaacgtactaaaagtgttttctactatgcacgctatgtagatgatattattatttttacgtgtgagaaaataaatgattttcaaaatttctttaagggatttttgccagaaaatctagactttaacatttcaaaatgcagagaaatagatatccataataatgaaaaagggatggtggccaatgagttcaattatttagggtattgtttttgtgttagaagcgggaaaataaaagcttctgataagcgagatgttaaagttacaatttcaaaaaagaaaatacttaaattaaaaagaaaaattgttctttctttaaaagattattgcaatacgaataatttcgctcttttggagaaaagaataaagtttcttacttctaatgttatacttgaaaaggctaaaaaagtttctgatgaagaaagctcgccactatatagtggtgtgtattataactacttgcatatcagatcgtatgatcaacttaaaattttagatttatttaaaaataaaatgttattttcatgccgtggtagcttaggaagtcaattaataaacaagggagatagagacttattaagatcattaaggaagtattcttttttgagtggttttaataatagaagaaaagtaagttttacttttaaagagataaatgacataaggagatgttggtaa

SEQ ID NO: 232951 - DNA, 327 bp, Klebsiella pneumoniae
atgcgcaggtcacatcttgtgccattgtcgactcaggcgttagatttactcaatgaactgaagatcatgtcagggaactatcgttatgtttttccgggacatatcaatccgaacaagcctatgagtgaggctagcatcaaccagttgatcaagcgtattggatatggaggaaaagtgactgggcacggatttagaaacacgatgtcaacgattttacatgaatatggatgtgagtctacatggattgatatgcaacttgctcacagcgacaagaataaaatccgagacgtttataaccatgctgtttactattcaaaacgcaaataa

SEQ ID NO: 232952 - DNA, 198 bp, Klebsiella pneumoniae
atgaacgagcaacaggtaaacgcgctgatagcagcgctgagcgaacaaacagcagcacagagagagcagacggaagcgataaaccgcctggctgaatcaaacatggctctgtgtgatgtgatcattcagtctctggccggtgaagaggatgtgcaggcagagccgcaaacctatctcagcgggaaacccagggggtga

SEQ ID NO: 232953 - DNA, 345 bp, Klebsiella pneumoniae
atgagcaaatcacttaaatctcgctgcattcggcgctggaaagttgaatttaaacgccgctgcgactcgaaatttagcatggtctggcgcaagcgcgacctgcgcggttatatccgcagctgcgctctcacaacagcagactgcatggttgagcaaatggcatcacgaaacgccaaagttgaatttgacggcgtcgcgcacggctggtcgccagaattcgcatcctggtacagcgaacgtcgcaaccaataccataaagaggcgcttgattacctaaaccaccacgcaactactgaagaaatcgacgaagagatcgagaacgaattggagtgttggaatgactga

SEQ ID NO: 232954 - DNA, 735 bp, Klebsiella pneumoniae
atgatacctgaactatcaacacacaaaacgtactccgatctttggaagaaggagtcagattcgttagacaaatctggtgtttataaaagcctagccgcgtatacccctgatggcaatgtgttggaattcggctgtggcgcgggtcaaagcacggcccatctgctaaagtcgcacgctgttctgtcactcgaaaacaatgcgtatttgattcagatggcaaccgattacctgctcggtttgggattcagccctaacattcggaaatgcgatttttatgaactgggaaacgatgacaagcaggctatacgcgacttcggaccaaaagtaataactggctggtttattggtggtagtggtgaagatcaaattctgcgtattcccaaccaaccatacccaactgaacttatgaagtcttatcgtgaagggatagaagacatcattgtgtctccggatgtttgcattgagtcagttgagtacattcagttaggcatgcgcggtgttggtctcatcaactcagataagaaaagtgaattcactgaaacaaaagcggacttcgatcaatatgtattcagccaggctggttttgaagttatcgctattgactcgttcgtttgggaaattgataaaagtgttttcccctatgcaaacgcaaaaaacccaaactttaatgggggaagaccggctcaaaccattccattaatcacctctatcctggctaagcgtatcagcaagtaa

SEQ ID NO: 232955 - DNA, 2163 bp, Klebsiella pneumoniae
atgtcatcacttaaaaataagccagaaaacaaagatgcagatgaaatagatttgagtcgtttatatggtgaacttatcgatcatcgtaaactaattatatcagtaactgctttttttactttgattgctttagtctattcattattttcaactccgatctatcaagctgattctctaatccaagttgaacaaaagcaggcgaatgccatattgagcaatttgagccaaatgcttccggatagtcagccacaatctgcacctgagatcactcttctccaatcaagaatgattttagggaaaacggttgacgatttgaatctgcaagccaaaattaaacaaaattattttccgattttggggagaggattttcacgtctctcaggagataaaccaggtattataaatgtatcaagattatatttacctaaaaccgatgatgacataccagaattaacgctaacagttattgacgcaaataaattcactattcagaccgattcatttgaagctgaagtaaaagttggagagttatttgagaaaaataacatttcgataaaggtagatgaaattcaagcaaagccaggtacttcatttacggttgaatatctaagcaagctaaaagctattaatgatttaagggatgtgttgacagtaagcgatcaaggtaaagatactggaatgcttacattgtcattgacaggagatgatcctgtacagattaggaaaatattagatagcatcagtaataattatttgatgcaaaatattgacagacaagcagctcaagatgctaaaagcctagagtttttaaataggcagttaccacaagtacgtcatgatttagatatttcagaagataaattaaataaatacaggcaacagaaagattctgtagatttatcgcttgaagcaaaagcagttttggatcaaatagtcaatgttgataatcagcttaatgaactaaccatacgtgaatcagaggtatcacaacatttcacgaaagagcatcctacttataaggctcttatggagaaaagagtgacgcttcttgaagagaaagccaagctcaataaaagagtatcggccatgccagaaacacaacaagaggtgttacgactaagtcgtgatgttgattctggtcgcgctgtgtatatgcagttattaaatcgtcaacaagaattgaatattgctaagtcaagtgctattggaaatgtaagagttattgatgaagctgtaacacaaccaagaccagtagcacctaaaaaaatattaatagttataggtggtattatatttggcctgattgtttcagttgcaattattgctttgagagttttcttgcgccgtggaattgaatcgccagagcaattggaggtactaggcattaatgtatatgctagtattccagtttctgagacatttgcaaagaatatcacaaagggtttaaaatctaataagaaaaagagtctggagtatgacgagtttctggccatccaaaatccagctgacctcgcaattgaagccatcaggggattaagaacaagtttacattttgctatgatggaagcgaggaataatatacttatgatttcaggggctagcccaaatgcaggcaagactttcgtaagttcaaatttagcagcaattatttctcaaacaggtaaaaaagttctcttccttgatgctgacttaagaaaaggttatacgcataagttattcaatgtatctaacgaaaacggtctttcggattatttagcaggaaaagtagatataaaaaattgcgtgaaacaaattaaaacagctggctttgatttcttatccagagggatggtgccgcccaacccagcagaattattaatgcattcaagattccagaatcttctttcatgggcgagtgacaattatgatttagtaattgtagatactccgccgattttggcagtaacagatgcagctattattggcaattatgcaggtactactcttttagtcgcaagatttgaacaaaatacagtaaaagaaatagaagtcagtgcaaagcgctttgaacagagcggagtaatgattaaaggctgtatattaaatggagtggtaaagaaagcaagcagttattatgggtatggttatagccattatggctattcttactccaataaagagtaa

SEQ ID NO: 232956 - DNA, 132 bp, Klebsiella pneumoniae
atgctgtttggccattgggcagaatataaggatatacctgacccgtatcgcaaaagtgaagaggtatttactttgatttttgaattaattaaacagtccggtgatatctgggccaaaaaactgagcgtataa

SEQ ID NO: 232957 - DNA, 759 bp, Klebsiella pneumoniae
atgacaacaacagtttatgaccgcataaacaaactaattgcgagtgattctcggtggtcatgtgatttgactactcgtggctatccaggacacgtcttatacattgatgatactggatttggcaaaattgctgaccgcaatgattttgtaatgacactcgccggcgatggactgctcattgagcagtggaaaagatggtgggcaggtgatttatcagatcaagagccacctgtcgttttgccaaccggacaatcagtagttttacacattgttaagaaatctactaacgaagtgatttttgacaaaggcaacatgcttgcagctgcatgctctcaaactaaagaattgcaggcagtgttttctggttctggcggcggacatgcagctcaagactggatgacaaaccactgtgcccgaacagcaattgatgcagccaagcatgtcgatccatttactggaggttcagtacgattcgtagacttcgcgagtggtatggcggatctcgaagcttcagtacacacaattttagaagttaaccaggctctattgatgagggggcttattatggatactaaaaatccgcacgttcagcacgtttcaattagtgcacaggaagttgcagatgtacggcagatgctgattaatggcaacattaccccttgtgcacctgttggtaagaaaacccaagattgggatgacgcttccaagaaacgcctatccgctgctatcaagcgtattcgtgaagaagaagctatttaa

SEQ ID NO: 232958 - DNA, 744 bp, Klebsiella pneumoniae
atggcgctgttgccggttgatgaagtatggggcgttgggcgccgtatcagtaaaaaactggagtctatggggatagacacagtgttaaaacttgccgacacggatatccgtttcatcaggaagcactttaatgttgtgctggaaagaacggtgcgggagctgcgcggcgagccatgccttggtcttgaggaattcgcgccggtaaagcaggaaatcgtgtgcagccgttcgttcggcggccgtatcactgaatactatgagatgaggcaggcgatatgcagctacgcatcacgtgcagcggaaaaactccgtggtgagcaccagtattgcagatttatctccgcatttgtcaaaaccagcccctttgcgctgaacgagccgtactatgggaacagcgcaacggtaaagctgctaacgccgacccaggacagccgggacataatcaccgctgcgacgaaatgtcttgatgcaatctggcgagatgggcatcgttaccagaaagcaggggtgatgctgggcgatttctacagccagggagtggcccagctaaacctgttcgatgataacgctccccggcagaacagcgagaaattgatggaagttctcgatcatctcaatgcgaaagacggacggggaactctgtattttgcagggcaggggatccagacagcctggcagatgaagagggaaatgctatcaccacgttatacaacccggttttcagatctaccagtcgtcaggtga

SEQ ID NO: 232959 - DNA, 171 bp, Klebsiella pneumoniae
atgctggtcgtttatttatgtataatattaattatcataaatcatatgtcacgtaaatgtgtatgtgacgccgcgcggatgcaaattcattctctaatatatctgcataaaacaattgacggactgattgtcgtttataatggatatgggaataaatatgaagatgagtaa

SEQ ID NO: 232960 - DNA, 555 bp, Klebsiella pneumoniae
atgcagtggacaggtttccatggaacgagtgttttcaacgcttcatctataatttcttcaactttccggattagttcaagagagaaagattggcttggctctggtgcatatttcttcatttctgccaaaggtttgttggatccgactgaaaaagcagcacagtgggcaagttctagagccccttcaagcaagcctagatattcttttttatcagtacttgaagctattattgaaaccaacactttccttgattttgatgatgaaacacacattgttgcactgaatctcatcagagatgaatacgttaagatcattaaggcacaaggcaagcggccaacaggtaagatgttggttgacaaatgtgccttttgtaactatgtaatgcatgagcatgatgtcgacgccatcgtccggaaagagtatattaaaacaacggctgacgaattggattttggagttgatgctggggtaccgaactgtcgagttatgtgtgttaaagatcccgctgcaagcatcaaaagcataagctatgctgtagaaaggaggagagtataa

SEQ ID NO: 232961 - DNA, 432 bp, Klebsiella pneumoniae; identical to SEQ ID NO: 179190

SEQ ID NO: 232962 - DNA, 522 bp, Klebsiella pneumoniae
atgctctgtgaaatcttcaaagcattagaaattaaagattcttttaatccagatttaatttataaagccatacagtcggaccagtattgggctctggactgggaatacccagacttagactccggtgaagatacaccggaagaagtcacgttttttgtcgatacattcgatatgtatgaaatcctcaattatacatacgataacttcaatgaggctgacaaggcggaggttgctgcttcgatcaggaattttaatggtaaaaactctctacttttcccaggatttgatgggaacaatgaaaccaaatatatcactatcggccgtattttgaagaccatggggcgttttaatggtagtgatgatttaataaaaaactctcacatgccttcagctggaatctacaaacgaatgctggatgtattcctggatgctcgggccaacaattgggagcacggtgcaggaatttcaatgcaatctttcattgatacacttaatgctagagttcatccggacaatcgctaa

SEQ ID NO: 232963 - DNA, 246 bp, Klebsiella pneumoniae
atggcagagatcacaccagcagaacagattcgactgaatctgctttccaccctgaactatgacaccgcggctgctgctaaggcgattgagttcgtccaggatagccagctcaaatatcagctgttcatccagcagtacaatcgcgtaacaactgaatccgaagtggtggcgcggaccatcaaagcggttcaggagtcgaccgaagcgctggcgctgtttgataccggcgctgaacaggccagctaa

SEQ ID NO: 232964 - DNA, 555 bp, Klebsiella pneumoniae
atggctaatataaaagtacattacgcaaactttccttatcaagaaataacaacgggttttggtgttatctcaatcaaaacatccgcccttcaagtaaaaggagaagttattactggtgataaacttctctctttggaagtatgtactgaacataatgttaaaaagataggtggtgcattgggatggggtgttattggaggaatgcttgctgggcctgctggaattattgcaggggcatttcttggtggaaataaaaaagaggtaactttcgttgctgaaatgaaagatggtcgtaaatttatggggaccacagatagtaaagcatatactgacctgactgcatcaaaactcaaatttgacgatattttaaacgtatcacaagatgaggatgaaagcgaatatatccaaacttatgatgaggaaatgatgataaaggccaagagaatgtacagtgagcctgattatatggcatggaaagaacgtacaggagaggcggatataattcgcgcttggatggcgaagactggatattacccgccggattatcacgaataa

SEQ ID NO: 232965 - DNA, 2973 bp, Klebsiella pneumoniae
atgcgggaatatggttacagctccagccaggtgctggatattactgaggctatttctactgggttaaaactttctggcgcgaatgctcaggagtccagttcggtcatcactcagtttagccaggctttggcgcagggcgtgctgagaggcgaagaattcaatgccgtcaacgagagcggcgacagggttatacgggcgcttgcggcagggatgggggttgcgcgtaaagaccttaaatctatggcggatcaggggcagttaaccatagataaagtagttccggccctcatcagccagcttggtaagctccggaatgaatatggtgagttgccgcagaccgtttcatcgtcggcaacaaaagttgaaaacgcttttatgcaatgggtcggtggagctaatgaagctagtggcgcgacaaataccctgaccggattacttgatggcgtagccaacaatattgatcaggtcgccactgctgccggagcgcttgttgccgttggtgctgcccgatatttgggaaatatggctcttggtgccagctctgcaacggctgggattattaacgccgcaaaaagtgaagtagctttagctgaagcccaggtcagagggacgcaggtttcgacagctcgtgcgcgtgctgcagtttatcgtgcccagcaggcactggcagcggcgcggggtacagacgcgcaggccgccgcagaaaaacggctctcactggcgcaggagtcacttaaccgtaatattcaggccagagtatccgctcagactgcactgaactcggttactgctgtaggttcccggctcatggggggagcattaggactcgttggcggtattcctgggctggttttgcttggtgccggcgcctggtacacgatgtaccagaatcaggagcaggccagattatccgctcaggaatatgcaaacaccattgatgcagtccgtgaaaagacaaaatcaatgtccctgcccgaagtttctgataatgagaccaaaacccgtcaggcgctggaggagcaaaaccgtcttgttgatgcccaagcatctaaagtaaaaagcctgaaggaagagatcgctggctatcagtatgtcctgtctaaccccggcccgacaaccagtggtggtttcatgataaaccacctgacttcggtcgaaacggtcacccgtggtctggaagaagcgacttccgctctggccgttgaacaggagaggttagctcagatgcaggctaagtctgagtcgatccagtcggtactggaagggatagagaacaggcgaatagcattaatccggcagcaggctgcagaacagaattcagcatatcaatcgttattaatgatgaacggtgagcatactgaatttaaccgtttgctgggtctcggaaataatcttctcatggcccgacaggggctggtaaacgcaccagtacgcttaccacaggtagacctgacaacccagcaaacggctgcacttgaaaaaagccgtcgtgatctggcgctttcaaaactcaaaggtgaggacaaggagcgcgcacgactgggttatgctgcggatgacttggggttaactaacgacccacagtttcagaccggacggcaggagttgattaataacggcctgaatgaatggagaaacaaccaggaaaataaacccaagccaaaaggaaggcatgggaaaaccgaggcggagaaaaccgaagatacctatacccggctgattaaacagcaacgggagcaaattgctctttccagccaaaacactgagctggcaaagatgaaatatcaggttactcagggggaattatcttcgcttgaaaaatccaaaaaggaaacgttgctgcacaatgcggcgcttattgaccaaaaaaatatcgctgaacagttaaaaacattccgcgaaggtctggccgacagtaatgctgccgcccgggaaagggggaatatcgatttcctcggcgcgggactgggggataaagcccgtgaccgaatgaaggaaatggcggatattcgcgctgattttctcaggcagcagcgtgacttacaacgtgatttcagtcgtgggcagatttccgaagacctgtataaaaagcaaacggaagcgcttaaagcagcgcttgccgaacgcctggatattcaggaggagtattacaaaaaaaccgatgaacagcagtcagactggcgggaagggatcagcgattccctgatgaactatgccgatcaggcttctgatctgagttcaatggctgctactgcaaccagcgaaattctggatgccaccactaactctatctccaacaacctgacaaacgtcctgacaggcgcggcttcttttaaagaagggatgtcgaatattttctcctccctgggcgaaacggtgattaagacgctgatccagatggcaacacaggcgttgatcaccaaagcgattatggcgtcatttggcggtggggctggtggattgttcggtagtctttttggcggtaccagcggtgcggcaagtgttgggagtgcttttcaaagtgcgggagctaatttttcgtttaatgccctgggcggtgtctacgattctccgtcactttctgcctacagcaacggcgtgtacagcaccccgcaatattttgcgtttgcgaaaggggcgggtgtgttcggcgaggccggtccggaagccatcatgccgcttacccgtggcgctgatggttcgctgggggttaaagctgtagggcgggaatcgccggcggtacagaacgctgcgaggcagcagcaggaaaggcaacttctttcaactggtgacatcaacgtcaattaccacctcactggtaaaccggatgatgtgatgatgcagacattgaatgcccacggccgccgcctggctaaacagataaaatctgaactgacgagcgacgtaaacaatcctcaaaatgccttcggtagagcactttactcaaaccttcagcccaaaaaaccacgataa

SEQ ID NO: 232966 - DNA, 522 bp, Klebsiella pneumoniae
gtggacgaagaaacatccccaaaggtttttagctgggcgcgattaactttatctttccttattttttgctatatcatgacttattcactgttttctctaaaatacctgtttatgtcatgggcggacgactttagttatcttactgttcttttatcgttatctaatgaattcattgccgtaacggaaattaagcttgctctttttaccatttcaggagctctgcttggtggggctatcttaggaatcacgtcactgcataaatatgcagccgtagagaaaacacttgatattgaccacctctgggggtatctcatggctcctgttctttcgattatcatcggtgtactaattttttgtttgctttacagtgggataatggtgctaagtggtggtgctagcccaactgctgggcaaaccagcgttaaaattggatacatgtcactaggtgctatatgtgcatttaactgggaggtgtttgttattaagctccagaaactttcccgacatgtatcagatgcatag

SEQ ID NO: 232967 - DNA, 1731 bp, Klebsiella pneumoniae
atgactacccccctcgacaaattaaactcatgcaattccaaacctgattttgcgagacttttaggtatagaccctgtatttctgactcgggtagtttatattagaaatacagataatctttattctcaatttactattaaaaagaaaaatggcagtgatagatttatctctgctccagacgatgaattgaaggagatccagagaaaattatccaatttattacaggattgcttaagcaacatacgagaatcattaaaagttgaaaataattattctcatggctttgaacgaaacaaaaatataatcacaaatgctgaaaaacataaaaataaaaaatgggttctaaaccttgacttgagtaacttttttgatgattttaattttggtagagtaagaggttattttcttaaaaataacaatttttctttaaatgcggaaatatcaaccttaatcgccaagattgcttgccataataataagctcccacaaggaagtccttgctcgcctgtaattacaaatcttattcttttttcattagatcgacgtttaagcagaatatgtcaacaagttggttgtacatacactcgatatgcggatgatattacaatttctacaaataaatcaaccttcccaaggaatatcatcaaatcacttgaaaatgaaaaaataaatttaaacagaaaattcctgaaggagattacttcatctggtttctctttaaatccagaaaaaataagattacatgatagaaaatgtcgacaagaagttaccggattaacagttaatcagtttgtaaatgttgataataaatatgccaagaaagtcagatcaatggttcatcatttatttacacaaggagaataccagctcgttgacaaaaaaactggtgaaaaaagaaatgggaaaataaatgaattagctggtatgcttggattcatagattccttagataaatacaataactcgttatctcatgaaagaaatgccaccctaaacaaacgcgagcgattatatggcgaattcaaatattatacaacattttgggctaatacaattcccgttatattaactgaaggcaaaactgatattacttacttgaaggttgcactaagttccttagctgccaagtatccaaatttaatcggagagaagaaattaagcaacaaggttgttcatgattataaaataaaattttttagaaacacagcaaaaaataaatattttcttgacctggatggaggtacatctcaccttaaaaacttcatgatgaagtataataaaaaaacagatgctttcaaattggttgcaactcaacagcctgttattatagttttagataatgattcgggaagcactggctcagatggaatatttaatgcattagttggtaaatccttcccaaatattacagattctatggtcactttgcgaaataaaaaatgggtttgggttactaaaaatttatatattatttttacgcctctcaacggtaagagcgacagcgcaatggaagacctttttgaagactcggtactccaaaggcagcttggaggaaaggtctttaacagaaccaataaaaggtgtgaggctaacgaatatggtaaggaagcctttgctactgggatagtattaaaacaacgagacaatataaacttttctaaattttcttcaatttttgattcagttatggagataatccaacatcatgcacatcaaaaatcttcaagttaa

SEQ ID NO: 232968 - DNA, 1068 bp, Klebsiella pneumoniae
atgaaactaaaaaaaatgcttgaaatggattttatcagagagtttcaagagcacctggaaactgactttgagaatgaactcttacatgccagtctccgcaactattgttctcatggcaaccctctgcgttttaacaactttgcatttgtaatacgtgagctgataaatcatgtgctgaaacgactggcaccagatgaaagagttatggcgtctccatggttcactaaaaacaaaaataatgctactattacccgtaaacagcaagctaaatacattgcccaaaaacatatacccgatcagcttcttgatgatgcagccatcgaaatcctagatgctggtataggatggtttaataaaaactatgctttattaaacgattacacccatattagcgaacattcattcgatagtaacccaaaacatttttttgatagtgcaaaactgataatacagctgtgtaacaaaatattcgataccttcgatgaacttgagcgtgtcattactgaatcaataatcgaagaagtccagaatgaaattactgatattacaatgaataatattcctgacgaactggatatattatcttcacagacaactgtcaattggtgctatgttgattccattgagttactgagtcttgatgaaaatcatatatatcttttggtacgaggaacagtggaaattacaaggcaatatggacacggggaggattacttagcacaggaagattcgtatccattcaaattcgcagtctcggttcgcactgataatttcaatgtaatagcaccattacttaacacaatagtagtagatacgggctcatggtatgatgatggagaagggtctactcactatgacacaatttatataacaagcatttttttgcagaaaatatcacatataaaccttaaaccaaaaacaaagagaaaattgtttcctgagcttagtacagtagctgctatagaacctcatgaaaatgaaggaatatcagaacctgtcgtgcccaaaatacttcctctacatcaagaagatttagatttaaatgaatctaaggattatttgtggtag

SEQ ID NO: 232969 - DNA, 1077 bp, Klebsiella pneumoniae
atgaactggaatcccgaagccccctacaacgctctgccaaagctgccgcctgatctgcagcagatagaaacacgtaatgtactaaaagcgtgtataaatgcgcgcgcggcaattgcagagctgaaaatggcgggtgagttgatccccgatcaggggttgttgattaacattctcccgatgctggaagcgaaagattcctcacgcattgagaacatcgtaacgaccagcgatcagctctttcagtatgctgatcgtgcagacggagcagatccagcaaccaaagaagcattgctctatcgtacggcactttatgatggttatacccatcttgagacctatccactttgcacaaacaccgcaatcgctatctgtaccaaattacgcgcagttcagaccgatataagaaaaacaccgggcacggtactgcgcgatcagaataacagcgtggtatatacgcccccgttgggtgaagataccatccgtaacttattggcgaactgggagcagttcatacatggcgatgatgatttagatccattggtgaaaatggctattgcgcactatcagtttgagtgcatccacccttttccagacgggaatgggcgaacaggtcgtatcctgaatattctttacctgattcaaaatgaattgctttcactgcctatcctgtacctgtcccgctttattctggagagacgtaatgattactacacgctcttgcgtagggtaacagaggaaggagactgggaatcatggatattatttatgctggaggccgtagaaaacacgtcccgatggacgactgacaagattgcggttgttcgggcattgatggcagaaacgaccgagtatgtacgtgagaagctaccaaaaatttatacctatgaactcatccaggtgctctatgcgcaaccgtattgccggatcgataaccttgttgaacgaggtatcgctaaacgccagacggcatcagcgtacctcaaacagttggtagatataggcgtgctggaagaaatgagcgttggtcgtgaaaagctgtatatcaataccaggttggtgcaggaattgaatcagtaa

SEQ ID NO: 232970 - DNA, 654 bp, Klebsiella pneumoniae
atgaagaagaaactgccagaccagctttccagggaatgcattattgcggctatgcgcgcctatgatgaaggtgtaccccaccagttcagcgagtcccggctgtatgatgtggtctttgcagggcgcagttatccaccgaaagcgatagtcggtattgctgctttaaatatgacaggcgttgagttttcccctgaagattttagtggtggtatcaagtcgaaatgcgtcaagttgcttaccgatcaagggtttcagatcgttgagaaaaatttgggtaatgagcaacctgccatcagtatttttcctgatgaactgccgccgcagagcgtatttaatgaaggtgcagctacgcaggtaacggttaaccgctatgaacgcgaccgtaaggcccgacaggccgcattagcctggcatggttgtctgtgcagagtatgtggtattgatatgatgaaggtgtatggtgagatagcaaaaggttttatccatatacatcacctgattccgctatcagacatcaaagagaattactctctggatcccaaaaaagatcttattcccgtctgccctaattgccacgccatgttgcatcggcgtaatccgcctttttcgcctgaagaattgaaatcaattattgaatatcatgcggctctttag

SEQ ID NO: 232971 - DNA, 381 bp, Klebsiella pneumoniae
atggcacgattagtcagaaaaaattatccgcaactgggggaagttaacgctccttatgttcatgcagttgcacaccaggggacgctatatatatcgggtctgacagcttttggttctgaggcgcagagtggtgatgttgttgcgcaggcaagtgaaatattcaggcaacttaaggtgatagcaacagcggaggggattacgcttgataatctgattaaagtgacgatttttgttacttcaattggttcgctgaaagcattgcgtcaggtattgtatgcaaactatggcgagagcctgcccgccagttctcttgtcgaagttagtgcactgttcttcccggatcttcatattgaaattgaagctgtgcttgcactgcaatga

SEQ ID NO: 232972 - DNA, 201 bp, Klebsiella pneumoniae
atgaaccaacaagatataaacgcattaaagaattttgattttctggcacgcagttttgcccgtatgcacgccttgggccagccagtggatatcgatgccgtgaccggcaatatgagtgatgaacagcaagcatggttccgggagcgatacgaccactaccgaaagcaggctgagcgggcgagagtgatagaactgcggtga

SEQ ID NO: 232973 - DNA, 513 bp, Klebsiella pneumoniae
atgaaaaaaacgatgttaagcgcgtgttttatgctggcggcggctaatgccatggccgccgacggcaccatccatttcaccggtagcattaccgaccagacctgcaagatcgacactggctcccagaatctaccggtgaacctcggcaatgttgcccaaaccgcccttaacggggcgaaggggatgagagcggcgccaacgcaatttaccatcaacgtgagcgagtgcccggaaacggtcactggtgcaaatgtgaaatttgacgggacatccgataacaacgaccagagcctgctggcgctggacagtggcacgggcatcgccaccggggtcgggatccagatcgcagataaaaacggcacggccatcccgctgcactccgcttcatccgactacaccctcgcagaaggcgcaaacgcgctcgactttgtcgcccgctatgtctccacaggcccggcggtcaccaccggtacagcaaacggtacctctgagttcaccatcatttacaaataa

SEQ ID NO: 232974 - DNA, 681 bp, Klebsiella pneumoniae
atgaacaggtatgcagacattttgctggcgctattgctggccgtatttaccgtgcaggcacaggccgggattgtcattggcgggacacggatcatttataacggtgacaaaaaagaggcctccgcttctatacgtaaccccgacagatccggcgtctggctggtgcagagctgggtagacagcgggatgaagggaagtaaaacgccgtttatcgtcacgccgccgttgtttcgtattaatccaggcgaagagaacatcctgcgcattgtgcgcactggagggagcctgcctgaagaccgggaatcggtgttctggctgaacgtgaagtccattcctgccaccgacgacagcgtgccgcataacaacgttctgcaggtggtggtgaaatcccgcctgaaactcttttaccgcccggcggggctggaaggacagccggagacggcttaccaccatctgtcggtctcccgtagcggcaatcgtcttacggtcagcaatcccacgtcttactacgtcactttgttcaccttaaaggtggacgggcaggagatcaaagaggctgatatggtgccgccgaaaggcagcgtcagcttcacgctgccatcggccacggcgtccatggtgagctggcagtcgatcagtgattacggcggcgtcagtcagaccgaaagccgtaagctctga

SEQ ID NO: 232975 - DNA, 954 bp, Klebsiella pneumoniae
atgaaatttattcgctacattgtggcccttacgagtgtcatcatgttttctctgccagtgatggtctgggcgtcatgcgcctttacgggcggtgcaacctcagaaattagcggctatgtcacatttggcaatgtgtctgttcaacgcgatgcgccgataggcagcgtgcttgctacggcgacaaccgggacttataacggtgggcaggcgattgccggatgttctgaatcctggacttatcgctgggaactgagcaaatggagctcgttgagttcccagggcaacaaagtctataacaccaatattgcaggagtggggctccggctaacaaacactgcatctggaaagttgcttccctatgaccagagtatgggaacgggcagcgtcattattaatgctgatggtattaaagctgaattaatcaaaacgggcgacattacgggcggaaccctggataccggtatgctggcgcgggcctcggttgcaaaccagttttattttgccaatgtcacgttgaatggcacaaataccattacctctgaatcctgctccgttaccactaacccggttaatgtcccgctgggggatcatgacaaaagtgagttcagcggtccgggtaccggaacggcctggcagacattcaatatcaatctgagttgtgttcagggcgcgcggattaatgtgcgtattgacgccacagcagacagcgacgcaggcgtacccggtgtcattaaactcgacagcgatcccgttaatgccagcggtgtcggcgttcagctctggtatcgctatgaagatagcccggtacagttcggccaggagcggtattactatacctcgccatcaggtggtaacgaaaatgttcagcttcaggcgcgctattaccagacaacgcagagcatcacggccggaaaagcgaacgccacagcgacattcacgctgagctacaagtaa

SEQ ID NO: 232976 - DNA, 960 bp, Klebsiella pneumoniae
atgagaaaagttatatgtttcatgctgttgatgctggtggtttcaccgatcgcccgagccagttgttcattttacagcggcgtgtccggagaagtgccgggttatctgaacttcggcaatgtggttgttcagcgtgatgcaccgataggcagtgtactcgccaccgcagtaacaggcgcttataacaatggcaatgccattgcaggatgcaccagggaggcctggaccgctcgctgggagttgacgcagtgggggacgctcagtggctatggcaacggcgtctacaataccaacctcgctggtgtcggtttacgtctgagtgcagcacaaacgggcaaagtactgccctatgaaggcagttacccctacaacgccggaggctcatgggcatctattcctggcgatggcatcaaaggggagcttatcaaaacgggagatatcaccagcggcacgttaaccgacggtatgctggcgcgcgcctcggtagtgaaccagttttattttgctaacgtcacgcttaacggtaccaacactgtcactgcagcctcctgctcggtgacctcggtggatgagccggtccagcttggtgatcacaacaagcgggagttcagcggcgtcggctacaccacggactggaagggatttaatatcgtgctggactgcaataaaagcgcgcatatttatgtgcagattgatgccacccgtgatgcgtcgaatgcgccaggcgtgatggccattgattccgaaagcggcagtaccgcggcgacgggcgttggggttcagctttacttcgcgccggacaacagcgcggcgcagttcgggcaggtaaaggattattatacttcgcctaatggcgggatggagaccgttcagcttaaggcgcgttattaccagacggcttcagcggtgacggcagggcccgccaatgccacggcgacgtttacgctgacgtataaatag

SEQ ID NO: 232977 - DNA, 984 bp, Klebsiella pneumoniae
atgaaaagaaaattaaaaaagaacacaagatttatagatgcaaccgaactgacgcttgaagaatggcttgatatgatttcggttgatcgaagggagcgagattatgatataatggattttcaattcccaaccaccaaacatttagaagaatacattatcaacattgataaatattcagaaaacgatgtaaaagatctaatttacaaatttataattcccactgcatttttaggcggtgatgatatcatcagaaactgggtttttgatagtggaaagtttaacatcagagaaatattcaaccatgaatcatttcttaaaagattaatttcagtaaatgaaaagaatccaccatggcaatctatctcttggattctcgatttactacccgaaaacccttatcaagcagtcagtgtcgttaatgcttatgtgacagcgcacattatgtttctgtctgacaatggattttatcgatgtgaggatattatttcattaataaatgcaaaatttatcaatcatccactgccaactaaagatctgataaggaaaatatcctcacgtgattttgaacttctttgtggttatttatattataaaaaaggatatgatgttaacatcactaaaaaaactagagatggtggttatgatattattgcagaaaaaggcagcggaagggaacacgaggtgctatatattgaatgtaaacaaaaagaaactaaagttggagtagaagtagctcgaaatgctttgggcttgctaaatataaaaaacgctacaaagtcagtaattataaccagtaactatttcacgaaagatgcactaaagatttcacaagaatcaaagcgacttgaactcattaatttggacgatttcgacaatgatatgcgagaatatgttgatcccagatgggtttatcgtatcgatggatatattaaagaaatgagaaacatttcaaataaaaacgtaatccctaacattaccaattaa

SEQ ID NO: 232978 - DNA, 354 bp, Klebsiella pneumoniae
atggcgaccatcccctttctccccgaccgcctcaaccgcgaacccgtggtctggcgcggcctgaccaccagcgagctgcttctggcgctggcgagcggtcttggcggcggctgcgcgttcggcattctgctggccctgataacccattactggccgttattccccggttcggcgctggcaggcgcggcgttgttgattcagggtggcggacggattctggcgcgcgccaaacggggcaagcccgacagctggctgccgcaggcgatcctcgcctggctggagcgccatcatcttcggggcgcgcaactggtccagcacagtaccgtatgggtggtgcgcaggagtccgcgatga

SEQ ID NO: 232979 - DNA, 309 bp, Klebsiella pneumoniae
atgaacagaattacactactaaatgtatctattcttcttctccaaggagttgcaatcgcctccccggaatccacccagctagccctcgcgctaaagcaactcgacggcgtgaaaacctcgctggaacgcgcccaaaccagtgccagtaccgatccacagtcgcgctacttcttcgactacttacaggcgcagcaggacatctctgccgttgaacaaggcatccaccgctaccttagcccggcaagagcgcagccgcgcgccgtccagcccctgagcgccagctaccagcgggagcatcccgatgactga

SEQ ID NO: 232980 - DNA, 1605 bp, Klebsiella pneumoniae
atgacgaacacagcaatagcggaaaaagaatcaaaaaaccagtcgatggatgatgattcgacaaagaaaaaatccattgatttcataaaatccagacagtcaaaaacccttataattggcatatgtggcactgttggttccggttttaggtcactcgtcgagactgtaaaggaagaattagatatttatgattatgatactcataccattagagttagtgatataatcacagatctttctaagaaacactcgaaacttgatgaactaattattagcaatgctgcagagcgttatctaaaattacaaaagcaaggtaacttaatcagggaaacaatagaaaccacttatttatctcaagcggtaattagcgaaataaccagaataaaagctaaaataaaggtaaaaaaaagtattcttcctgaaaaaaaagatattggtaaagttgcatttattattgaccaattaaaacatcctcatgaagttgagctacttcgattaatatatccacataatttttatctgtttggtatgcttagaagtgaaagcgaacgaattataaacttaagagatgagggtatatcaacaaatgatatttacaagataattactgaagataagaagtccgagaaaaaaaccggccagcaaactgaaaaaacgatattagattccgatttttttatcaacaataattcaggtaataagtcattacaaaaacaagcaatttcgcgatgcattgcattgattcatggtaagaatggcataactcctacacgtgatgagaaaggcatgtatactgctttttctgcttctctaacatctgcctgtctttcaagacaagtcggagcagctattttaaacgatgatggcgatattatagccacaggacgtaatgatgtccctaaatcttttggtgggctatattatgaaacgggaaacattgctgacgatcatcgctgcattcataagggaggccattgtttcaacgatgaacataaaaataaaatcagagagaagtttgaatcaattttaaaaaattataacatttttactaacgaagatccgagatcttctgaagatgaactacctcgtatgcccaaagcggtctcatctagcgaaattgctgacctattatttaatgaaacgccggtgtcttctataatagaatactcacgagcgatccatgcagaaatggatgcaattacttctctagcaagaaaccctagtgaaagtacaaaaggcaaaattttatattctacaacatatccctgccataattgtgcacggcatattgtggcatcaggaattaaaaaggttgtttttatagaaccttatgaaaaaagcttagcattaagattacataacgatgctattagtgaattaaatgaagcagataaagtaaattttttgttatttgaaggtgtatcaccaagacgatatcaaaaattcttcttggccactggagatagaaaagacgaaaatggaaaagctagacaattaacatctaaatatggaaatcatatagacatccaatttcttgatgctccagatgattatgaattgaaaattcatgaagatttcacgaaaagtttttcgtcatctgattaa

SEQ ID NO: 232981 - DNA, 189 bp, Klebsiella pneumoniae
atgtcagttgaaaatgaaggtgttgtgtatgtcaattttaaatcggtctcgcaaagttctgatcgtgagaaaacgatttttgaaggatatgagaccactacccattcaacgatagtaactatcgaagaatatgaaagaaaaaaaattatagatgaattagtagagcgggctgaaagtataatttggtaa

SEQ ID NO: 232982 - DNA, 633 bp, Klebsiella pneumoniae
atgagtgagcagcgaacgcctccatcacgcccaccacagggaccaattggctggctgctgtcgctgaccgggcggctcatcgggctggttattggcgcgctggtactacgggtagtgctggaactggcggggctgtatttctggtggccgcaggagggaagcaggcacgtttctctggtgatgaggcgggagctggcggaactggtcatcgcactacaaccgcatccgcaggggaatgacattgttatgctgctggagaacgggactacgcacgtgcttaaggccaacatactccttcagaaaccgttcaccgtactgtcttatatgctggtgagttttatgctgcgtctgatatggctggccgccatgacccccctgctctgcctgagcgctttaaccgggctgacagaaggtctggtacaacgggatttgaggcggtttggctccgggctggaatcggtttttcttcaccgctatgtcatcaggtccggcagttcggtcgccacaacactctggatgttttatctggcgcagccactgtttctgcctccgatgctggttttactgccaaccgctttatggttcgggataacggtatggatggtggcagggagttttaaacggtggttataa

SEQ ID NO: 232983 - DNA, 1929 bp, Klebsiella pneumoniae
atgattaacttagacaatgtgcttactgatattgaaactatgctgattggtcttgagttacagccaattaattccagtacaggtgttctctatgtcacaaaaattgacagagatgctgggaaatattttgtttttagcccaaaagatagaaaaacaacaggaagaaccatctcaacggagattggtgcaattattaatgatctaaaccgaaaaggattttgtaatgtagatcaatccctttttggtagtggttctagccggaaccatccggaaactattttcgccaacctgccatatatacaatattttaaatataaaaataaaaaacacattttgcttcgaaataaaaatgttcatgatgctgggactctttcagaagttcaaggacaggatttcaggcttttaagaaagcaggttgataagtttttaaacctaaatcttgatgagttaaatgctagacagaatagaatcttgcaagatatgtacgatgcgtacgatgttgtgttgaagaagtatcctggtgaattatctgctataaaagtggagagttctcttggcctattaaaagaaattaatgattctttatctgaggctatcgtttctttggatgataaaaatgatttcaatagtgacattgaattaaatattaatcactataattcatttgaagacgcacttgacaatccggataatactggtattgattcaggtaatgatatagaagatgatactgatgaaaaggaattcgatagtgattctgttaaaaaaaacggaattataaaagtaataccatttacaccaactttatcactaatatttgaccgggttcaatttggtgatattgagctccaaccggattttcaaagaaaagatcgaatttggaaacaagataaaaaagcaaaattgatcgaatcaattttgatgagacttcctatccctgtcttttattttgggcaaaaaggtgatacctggattgttgttgatggtcttcaaagaataacatcaatttatgacttcataagcggatattttccgttaactgatctagaggtattgccaaatcttaacgggaaatattttaaagatttatcacgtactgagcaacgagatattcgtgaatatgcgataacagcttatcttattgatgtgaacgatgaaaattcaaatatgatagtggagttgttccatagaattaatacctatggagttaaacttagcgatcaggaaattcgatcggcactcaatcaaggatcgagtgttaagtttttgagatatcttgcatcgctcgattcatttaaaaatgcaacaaggaacaaagttaaacctgatcgacaaaaagatatggagctgtgcttatctgcgttatcgttcatggttcaaggttatgaaaattattctcaaaattcatatgactcttttctgtctcaaacaatgcggcttttaaataaatacaaccttattttggataatgaagagaatattgattctggacaagcaactattaatacaaaaagcaagcaatatctagatctatactataaatataatgctgcgttgattttagccaaggaaatttttggtgattttgcttttgttaaagaacctgccaacaagaatgcaccaataagtaaacagttatttgagatcgttatatactatttttctattctatctgcggaacaaaaaataactcttaaaaataatcagtctgaatttttagaccttttatatacagccattgagaataattccccagaatatgctgaatggacgtctcaagcatacagagattcaaatagaggttttagggattcaatttcaacatcaacagggaaaagaattacagttttatatagattttcagccttttccgccatattggaaaagagcactggcatttcattttcaaaatatacaggagatgagtaa

SEQ ID NO: 232984 - DNA, 1164 bp, Klebsiella pneumoniae
atgttatttattgaaaaattgaaactaaaaaactttaaatcttataaagaacagtcgtttgttttttcaaatttgacggtcttttgtggtaataactcagttggcaaaagtacagcaattcaagcaataggcatgttcttacagacaaatattcattctaatgaagcactgaaaattaatggagatttggtacatattggttctatagatgacatccataattatgataatagagaggatgatgacttacttattggtttaaagtttcagaaaaatgaagtgttatggggatatggcaccgaaggtagattttatagggatgagttgcctaataagaatgaattgccaataataagtaaagggggggaattgagaggagttaaaagcctttataaaaaggggtttaaattccaatttcttgaggcagatcgctatggaccgcgagataatatgcccctctccaaccataattaccatcaagattggttaggaaaacaaggagaatatacagttgaagttctagaaggactggcaaacagaagacatctttttatttcaggaaacaaaaataagcaggatcctagaaaacatcataatgtaaaagataataacgcttttatgaatataacttcttggatgcaggagatctcaccagactataaaataatacccaaagtggaagattctgcgaatattgcttttaattcaattgttactcgaaatgggcatcaaactaagccaataaatattggctttggatatacttatgccttgggtattgtcaccgctttaatcttggcaaacaaaggtgatctggtgataattgaaaatccggaggcacatttgcatccacgaggacaaagctatctagggcgtttaattgctttgacggctgaagctggagtgcaagtgataattgaaacacatagtgatcatttactcaatggaataagagttatttctaaaacaagtaaatacttttctccagatttgtttacgctctactatatatctaaagtgaatgattgcacagaagtaacaaaaatagatatcgataatgaaggaaagttgtctaaatggcctgaaggcttttttgaccaacaatctcaagatatgtatacattaatgactggaaccttgcctaaaaataatcatctgggatga

SEQ ID NO: 232985 - DNA, 897 bp, Klebsiella pneumoniae
atgaaagccaatgtttgtcttacaccagatagctttaattttgaagactccatcgatgatattttgtttaatgtggatattttcaacaaattaaaaggaaagatgacgtctgattttatagtgttttctctatgctccgatttttataattcaattgctcctaagttgtattctgcctctttggacagtggctgggcaatgagtaaattttatgatgggattagcaatataaatgtgactgatgttgattcagaaaacgcaattgtgttagcaaatgatgatgctccggagtactatggtcgctggcttggaatatatatatcaggaagtacagagtttccactattaaaggttgaagcgagaatatcatgtgagaatactcttgttgaattctgcactaggattttatcagaaaataaacgagagcattcagaatattctaaagacatacaggatatatataacaatataattttcctcgagaatcctctccatagccaatataaaacttttgatagtattagaaagatggatggtgggtatagaaattttcaaggggcaatatcaagatttttatgttttgctaattgttataatatcatcccgcatgattcacaaaataatatagataatatgaatgcctcactagaatttcctgttacagccgaaggtaaagggaaaaataaaagaaagataaaggcactaaaaagagactttgttattgatgatgtagtatatgaaaacgtgaactgtgaatatcattacaaattagaaagagtagatggtgctaatggaaatggtacctattattttaataggatatactttggtttttttaataaaatagactcaaaaaaacctaaaatatcaattgcccatataggggaacatctttga

SEQ ID NO: 232986 - DNA, 1074 bp, Klebsiella pneumoniae
atgaggataacggcatcgaatctggttcaggcgatttcgagcttacccaaaaatacgctgtttaactatataaacgataggaatagcgggaagattgagattgtacgtatccaacatcccgaaggtcctatcgaaataaagagatttgatcccaagaagggtcaaactcaagcaacagccaaaacagagagtatttcgactcaaatgctttggcgacttgcaaatgcactagaagaaaacagacctgtcaacgttgaaagggttttcggtgccagttacaacacccgctcggtattggagagcttgctcgcgcatactccagagttctattggtgtaggccagccagactggaaatcatgaatgcacaaaagtctataaagccaggacataagcatctgatttttctgcccgatatgccacatgctaatggtttgttagttgagcaccagactaatattgtcgtctctgaaatgagcttcgatgttgttcaccaaagcgtcgatattgagacaataaagccgactaaaggcatgactattgaagaaaaaagacgtcatgctcagatacaaattgctttagtaaaaataggttattgtttaggtttagatacttgggtagcagccaatgatcgtagcttgcaatataatggtaaagctatagcccaaatggacggtgtaataaattcattatcagatgaacaagtactgcaatcatataatgatgcaattaaagatgcccgtctaatagactgcatttggtttagggaaggtcgcatgatgccagctgtaatggagattgaacacagtactggtataaaaagtggacttactcgcatgaaacaattttatgatcatgcaccgaagttacaagatatccgttggactatcgttgcgcctgatgaatatagagcaaaggtgattgaatttgcaaacatgccacaatttaaggaattaaaatctcgtttttttccatattcagcagtagaagaactgtattcgctctgtgaaagaagaaagccaaagggagtttcagacgatttcctagattcatttatggaagaatgcgtttcataa

SEQ ID NO: 232987 - DNA, 138 bp, Klebsiella pneumoniae; identical to SEQ ID NO: 76270

SEQ ID NO: 232988 - DNA, 456 bp, Klebsiella pneumoniae; identical to SEQ ID NO: 106583

SEQ ID NO: 232989 - DNA, 501 bp, Klebsiella pneumoniae; identical to SEQ ID NO: 85998

SEQ ID NO: 232990 - DNA, 327 bp, Klebsiella pneumoniae; identical to SEQ ID NO: 91887

SEQ ID NO: 232991 - DNA, 681 bp, Klebsiella pneumoniae
gtgactcggactccgacagcgattcggactccgacagtgattcggattcggactccgactccgactctgacagcgattcggattccgacagtgattccgattcggacagcgactctgactccgacagtgattcggattctgacagcgactccgactctgacagcgattcggattccgacagcgactcagactctgactctgacagcgactcggacagcgattccgacagcgacagtgattcggattctgacagcgactccgattctgacagcgattctgactctgacagcgactctgactcggacagcgattcggattctgacagtgattcggactctgacagcgattccgactccgacagcgactcggattccgacagcgactctgactcggacagcgattcggactccgacagtgattcggattcggacagcgactccgactccgactccgactcggattcggacagcgactccgattcggactccgacagcgactcggactccgacagcgacagcgattcggattctgacagcgattcggactccgacagcgactccgactctgacagcgattcggattctgacagcgattcggattccgacagtgactccgactccgattcggataccgaaccgcaggcaaataatgatacccatacggcggctatcgataccgtag

SEQ ID NO: 232992 - DNA, 939 bp, Klebsiella pneumoniae
atgtcttcattaaaattctccgttagccgccaggaagcgctccttatcatgatcaccatgttctggggagggacgttccttgccgtacagtacgcggtgagccttagcgggccgctgttttttgtcggtttgcgtttcgcgaccgccgcgctggcggtgggcctgctttcgctgcgcactctgcgcggtctgacgtggctggaggtgaaggccggggtagcgattggcgtggcgattgcgctggggtatggcctgcagacctggggactacagaccatctccagcagtaaatctgcctttatcaccgcgatgtatgtaccgctggtgccgctgctgcagtggctgtgcctgggacgtatgccgggggtgatgtcctgcgtggggattgtgctggcctttattggtttaattctgctggccgggccggaaaataatctgctggcgcttggcgtgggggagatgatcactctggcaagtgcggtagcgatcgcggcggagattatccttatcagcgcctgggccggaaaagtcgatgtccgccgggtgacggtggtgcagctggcgaccgcgtcgctggtggctttcgccgccatgaagccggcgggtgaatcggtgccgtcgttgacgccggccctgctcggcgtcgcgctggggctggggattttcagcgcgatcattcaggtgaccatgaactgggcgcagcgcagcgtttcgccgacgcgggccacccttatttataccggtgaaccggtatgggccggtatttttggccggctggccggtgagcgtctgccgctgctggccctgctcggctgcgttttgatcctcgcgggggtgctggtgagcgagctgaagtggaagcgcaagtcgccgccgcaggtttccacaaacgacgatgcgcagccgctcacggacctggccgatcgccgcgagccataa

SEQ ID NO: 232993 - DNA, 690 bp, Klebsiella pneumoniae
atgagattcatatctgtacaattagaagttattttttttgtttactccatggataatagagttagaccaacatatgtagcttgtcaaataatattagaagtaaatgcatttgctgagagattcgatgatgatatcaaagagatattaaagaaaaatcttttggatgaagttgcattgtctttgaagaatattcttagttattcaggtggtggatatgttgagttttctaatattcttatcgctttaaaggaattgggcggtgaatattatttcgatcaaagttatttgattgatttcattgattctagaatgaatgactctgaggggttaagttattttgtaatttgcagtattttgtattatatacatgggcggaatgattgtgcggatcttattgaaaagatcgagaatatgatacttgataaattcatagataatgcaagcaataaaaatgtttgcgaaatgacattgttgatatccgatgtattatcttgtcctgttcttgatgataaatataaaattaaagcctatagagctttttttccttcagggaaaaaagcgaagccaacggctgaaatacagcaggctatcaattttttcagaggtaaggtggtgttttttaactggctaggaaataaaaacctcgagcaaattctttacagaaaagagttgcgaaccccctatgaatag

SEQ ID NO: 232994 - DNA, 309 bp, Klebsiella pneumoniae
atgacatttttcactctgtatatgaatctggcgccttatgctgcttatcaacaacagggaagtctgtctgacagaaaagtggcaggcgtccagcggtattataccagtgccgaaaatgtgctggcagagcacgaagccgggaaactggataaagacacgcttgtcacgctgagtgacactattgtcacccgcagcagagacaggcgtcagtttaccgaagtgaccattgtcagtgagacgaaaaatgcagcaggagacacccttgtcgctggcactaaagtctggacggttgatcttacccagcaatag

SEQ ID NO: 232995 - DNA, 471 bp, Klebsiella pneumoniae
atgtatagggctattgtatttattttcctttgcgttattgaaacctgttcattcgcatctcaaaacgtggaacagggaccttttcatctagaaggagggggggcatcgattgaatttataagaaaaaatgacgaatcaattgattttataagaaaatcaagtataaaaaacgagttggttgacaactacccggttggcgacggggtgcctgaaataaatactgtgtttttcgctactataaaaaaaataaaaaacattgtggttcttgtttcttgggatgaggccgatattagtgcgattcattacaaggtttacctttatacctataatgaaagcggaaaaataaatataaaccgtgatgcaatggatgataagaatcttgagggatatgatggctattcaaactctgggatgatctttaattataaaaatgcggctgctataagaaagtatctatcgcagctaaaatag

SEQ ID NO: 232996 - DNA, 684 bp, Klebsiella pneumoniae
atgaaggggtttattcgtttaagaaatctaaatcaggaacacgaatggctgttattattaaatctggatattaatgggtggtatttttatgtatctcagatagggcatgagagtaattttaaaaatgttgaagagagattgtcgtattcaccaaaaagaatgagggagaagtttggttgtaaaggcggatcaaaaaattacaattcgtctaatgatgagtgttcattggggcggttgcgcgataaactatggacacaagaaagtacttatgcccgtcatccagagaatcttggcaattatgtgtatgctaatagaatgggaaatggtgacgaagctagtggtgatggctacaaatatagagggagggggatgatacaactaactggtaaagatgcgtatatctcattctcacgaaaacataatcaaatgaatagtgatgatattcaagactttagtgcaaatccgcatcttttaattgatgaggttgaatatggggtagagtctgcatttgtgtattggatacagaaaactaacagacaaggtgttcatctttgtgagatcgccagaactggaaatgttgagactgtgacgcaaatagttaacggtggtcaaaatggctatgatgataggctcgctcgatttaatcgtgtagctccattacttgatgtaagttcagaggcatga

SEQ ID NO: 232997 - DNA, 651 bp, Klebsiella pneumoniae
atgaagctgaggatgaaaactttacttgtgttgttttcttttgtttgttgtatatgctcatttaatgtatatgcaaatgatttttgggtgttttataaagtatccagtactgatttatttttcaggcatgattcaaatacaatacagaatcttaatgagctatatgatgaagttaaaattaatgctgatgataatacactaacgattaataacgatttgctggagagttcaacggtttgctcagttgaatacaggaagaagaaagaaacgcctctttcttatttttactcaaagaaaacattggcaatgtatgaaaatgttttcaaaaatgacaacatctccttagcgaaagatatttacatattacgagcttatgatcctgaaaaaaaccgttcacctccttacgatgagataatagagagtgatgattatttgctgttggtggttaaggattatttgatattttttaaaaacataaagaacaaccctgaacaattaaatgaaatgtctgataaatatgatttttctacattttgtgaaaatcttcaggaaggctctacttttgatggaaaggaaaagtatgtctgtagtttcactaatgataatttatctgatgcatatttaaaatttaaaaaaaatcagtgggtataa

SEQ ID NO: 232998 - DNA, 495 bp, Klebsiella pneumoniae
atgcgaaacggtatttcaatgagaaaatataagatgtttttagcgggggtgttttgtttttttttgtcggcaggcgctttggcagctgaacagaatatggctaaaatcattacttgttcattacctggagagggaggtaaagaagcttcattcttcattgataatattacaaaagaaattaattatggttttaaaagggatggtaaaacagagttaaaagttgtttttaacgaagggaataaactgagacgcaccaaagatagcaagatgggtgtaacttattatggattcaaacgcggtaaatacagttatgtcattgatgtaatcgaaggttctgaaaaaaatgaatacacaatgtcgtttgatatcaaaaaaaatggaaagattattcaatctagtgattgtttaccgaactcattcagaagtgatagtatcataaatgattatatagttgatattccttacatgaatgaggaaaggtttaattttccataa

SEQ ID NO: 232999 - DNA, 1206 bp, Klebsiella pneumoniae
atgtctcttcgtttcagacaaacctttactctatttcctggtgtgagactcaacattggaaagcgtggaataagcgcaagcatcggggtacctggtgcaactgtcaatgttgggaaaaaaggactcagggcgactgtgggactcccgggtacaggtttatcttatactacacctaccctgccctatgatgatggccattcagttacgaatccattaattccttcctcgacagaacctcatttaggcttgacggaatcatttccaaacaacactccatcgaacgctaaaatatatatgcccatggctggcatgaatgaaatttcaagcgcttcggtggaagtcctgacaagctcgtcccttttacctttacgggatttgatggctaaagcgcgagaacaaagggcagagataaaatctgatttacaagaggctcttgctgaagagtcaaaacaaaagaatgagttggttcgacgcaaatcaagtctattccgttggttttacagacgacgcatcgcagaacttgagacagaacttcccgtaacgcaagctgagatatctcgcctagtatcatgggaagacagcacaaaaatagccataaccttcgagagcagtgatgcttcacagcgcgcatatgcagcaatggttcgtgcattcgatatgttaaaatcgagtgtcaaaaaatgggatattactgcagataaagctacagaccagtttgccgaaagaacattagcaaccaggtctgttaatcgtcacccagttacctttgatttcagttcaacggatctcattcaatttacagggcgtgcgatgcgatttgaaaatgtgaatggcgacgatattttgctttatcctggagttgcagtcataccacgagctgatggggcgttcgctctgattgatttacgcgaattacaaatcagttcagaatatcgaagattccatgaggaagaaggtgttcccagtgactcacgcatagatgggcatacatgggcgaaaacgaataaaaatggctcaccagaccgtcgatttaaagacaactaccaaatccctatctgcatttatggaaatattactttccattctcaaactggggtaactgaagaatatatggtatcaaatgcagacgccgcgcaagcctttgctgaggcagtaaagcgctatcagacctcactcgcagaatccgaagcgttgatgaaggcctaa

SEQ ID NO: 233000 - DNA, 672 bp, Klebsiella pneumoniae
atgtgtggccgatttgcacaatcacaaacgcgagaagaatacctggcttatctggttgaagaggccgagcggaatatcgcctttgaccccaaaccgatcggccgatacaacgtagcgccaggcaccaaagtcctgttgttgagcgaacgcaatgaagagttgcatctcgatccggttcactggggatacgcgcccgggtggtgggataaacctgcactcatcaatgctcgcgtggaaaccgcggcaaccagccggatgtttaagcccctctggcagcatggccgggcgatctgttttgcggatggctggtttgagtggaagcgtgaaggtgacaagaagcagccctatttcatccacaggagggacggcaagcccatattcatggcggctatcggcagcggacctttcgagcgcggggatgaatcggaaggatttttgattgtgacagctgcggccgatcaggggttggtcgatatccacgaccgtcggccgctcgttctggttcctgaagctgcgcgcgaatggatgaggcaggatataggaggaaaggaagcggaggaaattgctgctgatgggtctgtatcagctgaccattttatctggcacccggtatcacgcgctgtgggtaacgttaaaaaccaggggccagagctgatagcagaaaccatataa

SEQ ID NO: 233001 - DNA, 444 bp, Klebsiella pneumoniae
atggcagataatgatgaaccaaacgtttttcaggttggtgttaatacaataactgagtatccggatgggaaaagagttattgagcaaaatgggcataaaatgactcagtatccagacgggacaatggtagctgagatgaatggaggccataaggccgtcattagcagcagtgggacggcgcttacgttacactatgcttcaatcaaatacgcctaccctcaaaatatagcaaacgtggtttctgttgacacgattaccaacgcatccggtatgacaaaggtgattacatttatcaacggcggaactgcgtcttgtacatatggacctttgggtgatctagtgtccataacgacaaatagtattaatgcttttcgcttgaataaagatggggatgagatatcttttgacatctcaggtagctcgccaaacctgaccgtgcactaa

SEQ ID NO: 233002 - DNA, 744 bp, Klebsiella pneumoniae
atggctttgcttccggtggatgaggtctggggagtcgggcgccgcatcagtaaaaaactggaggcaatgggcattaaaacggttcttcaactggcggataccgatatccgttttatccggaagcattttaatgtggttctggagcgaactgtgcgggagctgcgaggcgaaacatgcctcgggctggaggagttcgcaccggtaaagcaggaaatcgtgtgcagccgttcattcggcggtcgtatcacggaataccatgagatgaggcaggctatatgcagctatgcgtcccgcgcagcggagaaactacgtggcgagcatcaatattgtcggttcatctcagcgttcgtcaaaaccagcccctttgcgcttaacgagccatactacggaaacagcgcatcagtaaagctgctaactccgacccaggacagtcgggacataattaccgcggcgacgaaatgcctcgatgtaatctggcgagacggacatcgctaccaaaaagcaggggtgatgcttggggatttctacagtcagggcgtagcccagttaaacttgttcgacgataacgccccgcgcaaaaacagcgaagtgttgatggaggtcctggatcatctcaatgcgaaaaatgggagaggggcgttgtactttgccggccagggtatacaggcagcctggcagatgaagcgtgaaatgttgtcaccgcggtataccacgaggtatagcgaccttttaaaggtaaggtag

SEQ ID NO: 233003 - DNA, 444 bp, Klebsiella pneumoniae; identical to SEQ ID NO: 28885

SEQ ID NO: 233004 - DNA, 315 bp, Klebsiella pneumoniae; identical to SEQ ID NO: 28886

SEQ ID NO: 233005 - DNA, 258 bp, Klebsiella pneumoniae
atgctgaaatttttgaaaaaagtttatagctatctagagtttttaggtgctcttatttgggttggtgttgggttgtattccatctggttagggtttagtaaattatttaaagataactcattttctattggtggtgttgaggttgtatctctgcttgacacaactccggttgcaataatgttcattttttgcggggtgattatcattgcatttatatgggttgggtatatcagcaagagactaaataatgaagcgtga

SEQ ID NO: 233006 - DNA, 543 bp, Klebsiella pneumoniae; identical to SEQ ID NO: 104336

SEQ ID NO: 233007 - DNA, 423 bp, Klebsiella pneumoniae; identical to SEQ ID NO: 28887

SEQ ID NO: 233008 - DNA, 264 bp, Klebsiella pneumoniae; identical to SEQ ID NO: 180796

SEQ ID NO: 233009 - DNA, 681 bp, Klebsiella pneumoniae
atgagtacgcaagagccaacatttagtcaggtagtaaaaaacaggtactcggcaagagcctttcttccatctcctatccccagcgatatcctcaaagacattttgctcgaagcgcaatgcgcaccatccaactgcaatactcaaccctggtccctgcatattgttgcaggagataaacttcgtgaattaagccacgcactgacggaagatctgagggcggggaactacagtcttgattttacctttgataaagaagcttatcccgagccattcaggcaacgggcttcggagcaggggcgctcgtactatcaggcactgggcgttgcgcggggggataacttaagtagctcagaagtggtcgagcgtaatgtgagatttttcggcgcgcctcatgttgctctgctgttcattcctgctgtaggggacaacgttcgcgtagcctctgacgccggtatgtatgcgcagacattcctgctttccctggcagctcgcggttacgcaggcgttccacaggcagtgctgagttattttgccaaaacggtgcgtcgaatattaaaagttcctgagggtttcaggctgctttacggtatttcttttgggatcccagataaaacgcatccctccctgagttacagggaagggcgggtatctctggacgaaagtgtcgtctggcatcaataa

SEQ ID NO: 233010 - DNA, 1050 bp, Klebsiella pneumoniae
atgaaattcacgcttatcagtgcaatgctactcacggcaatggccggagtgacctcagtcaatgcggctgattacaaaaaaaatccattcacactcgtctatgacggtgccataactgagaacgtcaaaggcaaggtcaacattcatcccgtgaaatacgatctgcatggcatccagattgctgcgaatgtctatacccctgctaactacgatcccgccaaaaaataccctgctgtagtggtggcacatcctaatggcggcgtaaaagaacaggtcgccgggttgtatgctcagcgtcttgccgagcagggatacatcacgattaccgccgatgcggcgtatcagggcgctagcggtgggatgccgcgcagcgtggataaacctgctaatcgtatcgaggacattcacggcatggctgactacatcagtcagtatcctggtgtagataccgcccgccttggtctgctgggtatttgcggaggcggcgggtattcacttgttgcggctgaaactgacaagcggttcaaatcgatagcaaccatcagcatgtttaattcaggccttgtgcgccgcaacggtatgcaggattcacagctggatactatccagcagcgtcttcagcaggcttctgacgcacgtgctcaggaagcagccggaggagaagtgctctactccggcgatgccaacctgactgatgaacagattgctaaattaccttttgccttgtatcgccagggctacgagtactactggaaaacccacgcgcacccgaattccacgtttaaatacaccaccagcagtcttctggatttgatgagctttgacgtaacggaccatatcaatctcatcaataaaccgctgctgatgattgccggtacaaaagcggatacgctctatatgactgaagacgcgttcgcgaaagccactggtacgaaggacaaagaactcttcctgatcgatggcgctacccatatcgagacgtattgggtgcccaaatacgttgaccaggcaatgcaaaagttagacgtcttcttcaataagaatatttag

SEQ ID NO: 233011 - DNA, 1167 bp, Klebsiella pneumoniae
atgaaaagacagaatgccccaacaatgccagagcggcgcaagctattagtcgccggggccggtattgccgccgcctcgctgattccgcacgtatcagcggcgagccaatcctctcaggtcgattcatccagacaacccagccaacgcaatgctgctccgggcaagcgtaaactcgggaagctggaagtttctgccgtcggtctgggcgtgcagaacatgagtcgtaaatacgacacctccgttccctggcgtcctgagatgatcaatgttatccaccgggcatttgatgaaggagtaacattctttgacgctgctgaagcctacggcccgtttgaagtcgaaaaaattctcggggaaggcgtcgccccgttcagggacaaaattgttatcgccaccaagtttggctggaacattgaccaacagacgggtaagcgtctgccgggccttaacagcaaacctgagcatatccgacaggtcgtcgacaatatgctcaaacgcctgcgtaccgatcgtattgacttactgtatcaacaccgggttgatccacagatcccgatcgaagatgtcgccggtgtggtgaaagatttaatggatcaagggaaagtcctgcactggggtctgtctgaaatgggcatcaacacgttgagacgcgctcatgcggcattacccgttaccgccgtacaaagtgaatactccatgctctggcgtggccctgaaaaacaggtatttccggtgtgtgaagaactgggcattgggttcgtgccatggagcccactcggcgtgcaatttttaacgggctggattgatgagagtacccggttcgctaccggtgatttccgcgcgacagaaacgcgtttctcgcctgaaaacttgccacacaacttacagctggttgaactactgaaatcctgggcaatacgaaaaaatgcggtaccgggacagattgctctggcatggctccttgcgcgtaaaccctggattgtccccatccctggcaccaccaataaagaccatatgctgcaaaacacagcggcgaccggcgtatcgctgacttccgctgagatgaccgagctcacccgctcactggatgccattactatccagggtcaacgtctgccggatgctgtgcaggtttattctgatgttgaagcaccgttgaaaagttaa

SEQ ID NO: 233012 - DNA, 681 bp, Klebsiella pneumoniae
atgcgcctgttgttagtcgaagatgaagaaaaaacgtcaacctatctctcccgtgcgttgggtgagtccggatttacggtagatatctctgcagatggagcggaaggtcttcattacgcgctggagttcgactacgacacgataatactggatgtgatgctaccggggatggatggctatcgggttctcgagggtgtgcgggcagtcaaacagacgccggtgctgatgctctcggcacggggatcggtcgacgagcgcgttaaagggcttcgccttggcgcagatgattatctccctaagcccttttcccttattgagctggtggcgcgtattcaggccctggtgcgccgccgcgctacggatggcgcggacatcacccagctgcaaattcacgatctgcatctcgacctgctggctcgccgcgtatttcgcgccggaacgagactggagctgaccgcaaaagagttttccctgttgagccttctggcccggcatcagggagagattctgtcaaaaatgatgattgcggagcagatatgggacatgaatttcgacagcgatgccaacgtggttgaagtggccattaaacgacttcgggccaaagtggatgcgccgttcgatatcaagctgttacataccgttcgtggcatggggtatgtcctcgaagtccggtccgaataa

SEQ ID NO: 233013 - DNA, 1458 bp, Klebsiella pneumoniae
atgcttaggcgttccatctccgttcacctggcgctgatgtttgccttatccgcgctgctgattgtgtccgttatcggcatcctgctgagaagttccttgcatgactctttgcaaaagcagatgcacaacgagctgttgttccgggaatcgttaatgagtccatggatcaccgcacgaacctcggctgacggctggtcactgcttgccaataaattcagcgtgttaaccaattctgaaggtgagcgcgttcgctactggatagtgagcgataacccacgctttagcatggggggaacaccaccggtaggtgttcagtggtcttctttacaggaaggctttaataaagtgcctggtgcatcagaaggtgcatgctcgctgttcctgttagtgaaaacgatccccgccaacggtgaaaggcctgagctgcgctatgtggttgccatcgactccacgccgtacatgggcacactcgatgcgttcacacgtacattgctgatcattaccgcactgggcgtagtgattgtcgccttactggggtacgtcgtttcaaggatcggtcttcgtcccgttggggcgctcagtaaacaggcccggcaactcgctcccggggaccatggtcagcgcctgaataccgaagcattacctgacgaattacagcagctagcatcatcttttaatggcgtgctggaacggcaggaggttgcctggaggcagctcgaaagctttaatgccgatgttgcgcatgaactccggactccgctgactaatctgatcggccagacgcagctgggtctctcacgccgacgttcacatgatgatctggaagagttactgggctccaatctggaagaacttgaacgcatgacgtctatcgttaacgacatgctgttcctgtcccatgcccatgcgggtgaacatgcttcccagcttacgcaggtgtccctgcgcgaagaaaccctaaaaacagcggagtatgtggaaccctcttttgctgaaaaacagctctctctcgatgttcagggcgacgtcaccgcggacatcgaccgacgactgttccaccgttcactggccaatttactggaaaacagcgcaagacactccccctccaacagtacggttacggtgcggttaagcgaaaccggtcatcaagcctgtgttgaagtgtcaaacccgggcgatccaatagcaccagagcacttacaccggcttttcgagcggttctatcgcgttgacacctcccgggccaggagtgatacccatcatggactgggcctgtcgatcgtgcgtgccgtcgccattatgcaccggggagatgtctttgcccgtagtgaaggaggcatcaatacttttggcctcacctttgcgctacaagcggataaagcggcagacaatgctcaatccggtactgagccgggacccaggttagctgacagaattgtcaggggggcgtcagcctga

SEQ ID NO: 233014 - DNA, 366 bp, Klebsiella pneumoniae
gtgttcgggccagccgagaactttaccggtcgtgtcagggttgatcctctcttcaaaccggataacgacatccctgtttccggggcttatgtcacgtttgaacccggcgctcgttccgcctggcatacgcatccggcaggtcagcggctgattgtgacctcgggtgttgggctcacccaacaagaaggccagccgatgcaggttatccgcgccggtgacgttgtctcttgcccggcgggcgtcaaacactggcacggggcggcccccggcagcgcgatgacgcatctggcgataaccggggttgtggatggcaaaagcgttaactggatggagaaagtgacagatgaacaataccacgcccattaa

SEQ ID NO: 233015 - DNA, 762 bp, Klebsiella pneumoniae
atgaacaataccacgcccattaaaacattagcggcagcggtactgctgacctttggttttggtctcgcggcacatgctgcgtccgtcaataaaggagcctcagaaatgaaccacgaacaaacggtttcagatacgctgtcagccagccaacaggccatcccgttgattgcggcatcgatggccagcagccagatggataagctgaatgcagccctgaatcagggtcttgacgcagggctcacgataaacgaaaccaaagagattctcgtccagctttatacctatacgggcttcccccgtagcctgaatgcgcttagtgaactgatgaaggtcgtcgaagcacgtaaacaacgtggtatcaaaaacgttgagggtaaagaaccggttgccccgatccctgtcggggatgagcttcgccgtgtcggtaccgcaaaccagacaaaaatctcaggcgctcccgtccagggcccactgtttgattttgccccggtgattaaccagttcctgcaaacgcaccttttcggcgacattttcgcccgtgataacctcgactggcaaagccgcgagctggcaacggttggcgcattagcggccacgccgggcgtcgaatcacaactgctgtcgcatacgcgagcaagcatgcgggtcggcctgacggcgtcgcagctgcgccagctggtacaggttctgcgtggacatggcgaaagtgatgcagcaacgcgagctgaaaaggcgctgcagcaggcgctcgcaaacaattag

SEQ ID NO: 233016 - DNA, 585 bp, Klebsiella pneumoniae
atggagcatgatcccaaccgcagaatgttaatcactgcacttgccgggctgacgctggcgaacgtttcttttgcctcagctgcgaccggaaccgcaaacgtgcagggtaaaagccgtgttctggtggcgtacttttcccgcagcggaaatacacgggtgattgcgggcgtcattcaccgcagcctgaataccgatctgtttgaaatcgaaccggctacgccttatccggaagactattttcagaccgttgaacaggcgaaaaaagagtgtgagcgaggcgtaaaaccggcattaaaaaatagcgttgcagatatctcacgctacgagaccgtgtatttaggctttccgatctgggggaccagcgtgccgcctgtagtggaagcatttctcagcagccacaaccttgcgggcaaattactcatcccctttattactcacggtggctacggtaaaggagacagcgacgacatccttgccagtctcgccccaactgcgcgtcgggaaaaaccgctggtcattgaatgcgaccaggagcgaagaaccactgaaacggtaacaagttggttagagacaatacgcagttaa

SEQ ID NO: 233017 - DNA, 1065 bp, Klebsiella pneumoniae
ttgaagacaatcttaaaaacgctggccatctgcgtaatggcgggtggcctggtggctcagtcggtctatgccgagccgctggtcattcaggaacagggaagcttttctgctggtggcactatcatcaccgcaccaggaacatttgatgcgaaaaagccgctggattcagctggccaaacctatcatggcgatcatgcctcagtgttctaccaaatcccggagaatccgcataaataccctatcgtcatgctgcacggcgcaggtcagttctcccgtacctgggaaagtaccccggatggtcgcgaagggttccagaacatcttcctgcgtcgtggattctcaacttatcttgtcgatcagccgcgtcggggcagtgccggacgtacgactgtagaaggtactgttacgcctaaaccggatgaacagatgtggttcaatcagttccgcgttggcgtgtggccagaatattttaagggcgttcagttctctcacgaccaagaagcactgaatcagtatttccgtcagatgaccccaaataccgggccgtttgatatcaatgttatctctgatgcgatgtccgccgtcgtggataaatccggcccggcaatcctcttcacccactctcagggcggcggaccaggctggtacacggcgatgataaacaacaaggtcaaagccattatcgccttcgagcctggcagcagctttgtcttccctgaaaaagaactcccggcccctatgccaagcgcgtttgacacgctgaagggtgagcctgtgccgatggagcagtttatggcactgaccaaaatcccgattctgattatctacggcgataacataccggataaaccggtagccatgcccgcgcaggacagctggcgcgtacgtctggcgatggcccgcgagtggcgtgacgtggtgaacaagcatggcggggatgttacggtgacgcatctgcctgaagtgggaatcaaagggaatacccacttcccgttctctgatttaaataatgtgcaggttgctgatttggttagtaaatttttggaggaaaaagatctgcaatag

SEQ ID NO: 233018 - DNA, 852 bp, Klebsiella pneumoniae
atgcaaactgtaaaactgaacaacgggattgaaatgcctctgctgggctttggtgtgtttcagatgtctgatgccgctgaatgcgaaagagccgttattgatgctatcgatacgggataccgcctgatcgataccgccgcgtcttaccagaatgaaacccaggtcgggaacgcccttaaacagatcggtatctcccgtaacgagctctttgtcacgaccaagctatggctgcaggataccaattacgaaggcgctaaagcccagttcgaacggtccctgaaccggctgcaacttgattacgttgacctgtacctgattcaccagccttacggcgatgtccatggggcatggcgtgctatggaagaactgcagcaggcaggcaaaattcgcgccattggcgtcagcaacttccatcctgacagactggccgaccttatcgccttcaacaaagtggtccctgcagtaaaccagattgaagttaaccccttcaaccagcagcagcacgccgttccatggaaccaaagccatggcattcagccggaagcctgggcaccgtttgctgagggtaaaaatggcctgttccagcatcccgtgttaacggcgattggccagaagtacggcaaaagcgtgggtcaggttgtgctgcgttggatcttccagcgaggcatcgtttcgctggcgaaatcggtgcgcaaagaacgcatggaagagaacatcaacattctcgattttgaactcagctctgaagatatgcagcagattgctgccctcgacactgcaaccagcgccttcttctctcaccgcgacccggcgatggtggaatggctgactggccgcaaacttgatgtttaa

SEQ ID NO: 233019 - DNA, 990 bp, Klebsiella pneumoniae
atgcaaaaacgttatctgggtaaatccggactcgaagtatccgcgcttgggctcggttgcatgggcttaagccacggctacggcccggcgaccgatactcgtcaggctatcgagctcattcgcgcagcggttgaacgtggcgtcaccttcttcgataccgctgaagtgtatggccccttcctcaatgaagaagttgtcggcgaagccttaaaaccgtttcgtgaccgtgtggtcattgccactaagtttggttttacttttggcgacgacaacaagcagcagattttaaacagccgtccggagcatatccgtgaagctgtggaaggatcattacgccgtcttaagactgatgtcattgacctgctgtatcaacaccgtgtcgatccggatgtcccgattgaagatgttgcgggtacggtaaaagacctgatagctgaaggcaaagttaaacatttcggtctgtccgaagcgggtgcgcaaaccattcgtcgtgcgcatgccgtacaaccggtcacggccctacaaagcgaatactccatgtggtggcgcgagcctgagcaggagatcctgccggtactggaggaactgggtattggttttgtgcccttcagcccattaggcaaaggattcctgacgggatcgattaagccaggaaccacttttggcaaggatgattaccgcagcaccgtgccgcgtttcgccgggcaggcgattgaagccaatgaaaagctggtctccttgctgggtgaactggcggcagagaaaggcgtgacgtctgcacaaatcgcgctggcatggctgctggcacaaaagccgtggattgttcctatccctggtaccacgaaactgcaccggctggaggaaaacctgggggccgccgacatcatcctttctcaggatgactcgcaacagataacccaggcgcttgaaacgattaaaatcgtcggcgaacgttactctcctgagcaccaggcccgcgtaggccgttaa

SEQ ID NO: 233020 - DNA, 894 bp, Klebsiella pneumoniae
atgctcaaagaaaacttcaacgaactgcaaatctttcttgtggtggcaagggagcgaagttttaccaaagcagcgggtaaactgggcgtttctcagtctgcactcagccacgcgatgaaggccctggaggaaaggctgaatatccgccttctgacccgcacgacccgaagcgttgcccctacagaggccggtgagagaattattgcctgccttgaaccgcgtattgccgatcttgagcaggagctggaatcgcttgttcaactgaacggcactgcctccggcaatatccgtttatctgccggggagcatgccgtgcgaagtctggtatggccgaagctaaaacccttcctcagggaatatccggaaatcaatgttgaactggtggttgataacggctttgtcgatattgttgaggggcgttttgacgccgggatccgcctgggcgaaagcgtggataaggacatgattgcggtaagaattgggccggacatgagaatggccgtggtaggagcgccgtcttatttcgctgcaaatcctgcacctgaaacgccgcacgagctacaaaatcatcggtgtatcaatatgcgcctgccgacagccggtgggctttaccactgggagtttgagaacgaagggaaaccgttacgggtcagagtggaagggcaggtaacgtttaatctgcaggcggaaagaattgatgcggcgttatccggttttggcatcgcctgtatacctgaagacagggtgcaggattatataaagtcaggagagcttattcaggttttacaggactggtgcccatctttccccggatattacctctactacccgagccgcaagcagcatccccccgcttttgcgctgatgatcgatgcacttcgctatcaggaataa

SEQ ID NO: 233021 - DNA, 792 bp, Klebsiella pneumoniae
atgagaatacttgttgcaggggcgacaggaagtataggcctttatgtcgtcaataccgctatcaaaatgggccatcagcctgtagcgctggtcagaaataagcgcaaagtgaaattgcttccccggggaactgatgttttttacggcgatgtttcattgcctgaaacactcaccgaattaccgaaagatattgatgccatcatcttcactctcggttccgatggtcagggtcgtattggtgccagggcgatagattatggcggagtgcgcaatgttttacgaatattcagggatgtatctgttcgtatcagcctgatgaccacgattggcgtgactgaacgactcagcacctggaatcaacgcactgaggttcatgactggaaaagacgtgccgagcgtctggtcagggccactggttacccctataccatcgtcaggcccggctggtttgattacaacaatgatgatgaacaccgaatcgttatgcttcagggggatcgtcgccacgcaggaacaccggaagatggcgtgatatcccgggaacaaatcgcccaggttctggtcagtgccctgaccaacgacgaggcaaaaaataaaacttttgagctggtggccgagcgaggcgaagcacagcatgatcttaccccactgtttgcagatctgcagactgatgatccacaaaaaaatgatggggttttagacatagacaatatgcctctcagggaagaaccggagtgcattgttaacgagctgaatttgtattcaaaaaaattaactaatctacaaccctga

SEQ ID NO: 233022 - DNA, 252 bp, Klebsiella pneumoniae; identical to SEQ ID NO: 198799

SEQ ID NO: 233023 - DNA, 675 bp, Klebsiella pneumoniae
atgggcacagcaattatggccgctggcactgatgcatcagcgtacgcaaataattatcttccgccggtcactggcccgctagcctgggccaatctggaaagcgatctgctgccggcaggtcggcgccttaaaaacttcggtagcctcggaggtacctttgcgctgtccggtattgctcagctggtagcaaaaggtgttgcagcggcagcgggtacggaaagccgtctgactctgggtacctttacgccggatgcttacaccttcatcgtgctggtcgacgtgggcccggatgcagggatactgcgtcaccgcaatattcgtatcagcacgaatgccagcaaaaagctccagcgcgtcatggatgccggtaccagcgtttcggatatcactgcgcctgcaacgggcgcgttcgccgtattcctgtgtggtgacagcaccgggcatgcgtttggtattgtgacggcttcaggcattcagaaatccatctccacggcggtgaacagcgggacgactgccacctggatgggagggaccaatcaggcaggcctggcagcagcatgggcaggctatggttcggctttctatgaccgcaagctcagtgacagtgaaatggagcgggtggcagaacgccttattaaacgggcgcgttatctgggagtaacggtgaatggctga

SEQ ID NO: 233024 - DNA, 822 bp, Klebsiella pneumoniae
atgcgacaatccctcgccatcaaacgcaaatttcgcagactgaatccccattttcagcccgtcacttatcgccgggttttcacccggctgcaatggcttatacgccagctgtccctgcgttaccggcattggcaggggcgtgttatttatcgttctcatcagtccatcagtaccaatgacgccatattccccgacatggcggacggcagacgatgggtaggccgaccactgaaacagaagatggacgccgtcctcgttaatggctatatcatccgggtaaatagcgcggttggctgtttcagccacatgcgcataacggatccatcgcaacgtgccgacgtcaaagcgataaaggatacccccgcgtttattttccccggtggtgctccggctggcgacccgcatcaggcaatatacatcaccatctggacctctgccggtgatcgggtacgtccagacccagtccacatccggaaagtccagggtcgcatccaccatttgcgacacatcgccaggacgcgcgctgcgaaagtaccgcagaagattaacgtgcatcgacgtgaacacgtggatatatcccgcaccgtccacaaccacagatggctgattatggcccacgtcattgttaaattccgcgaccgtcccgtcgacgttcttgcacattccccgcgtgagggtaccatcggcatcacggcgaacgatttcgacctgatgataaccggcggtgccgtactctttacacagcccgtaacattccactccctgaaagctgtcaagggggtgccaccaccccgcctgattgctctcagatgcctggtctga

SEQ ID NO: 233025 - DNA, 1941 bp, Klebsiella pneumoniae
atgaaaatttcaatttcgtcactcgctgagtataaaggtttcaaattaaatgcgccattagaatttgaggctccttattgtattattactggtaagaacggagttggcaaaaccagattcttagacagtattattgaaaatagagcacaagtttttttcgatgaggttgttttagcacataataaaataggccgaacaaatgtaaacaacccaaatagctctatgctcatgagtgtatcatatgcatatcacattgatttaatttgtaggaatattttaactacaattgaaaatcatgtaaaaggaactgagttcccccctgaaacgacatcaaaaagcgatttcggtgagatacttacaatcccagccctaaaactaatccaagaaatagaagagaaaactaaaaaagaaatcaaagagataacttcagatgaaattaagctatgcctttcattagtaaatgctatatcacaatgcttaccatcttataaattgaacatccctttattaatttcaaaacattactatgaaattgaaaccaataactatttgacttataaaaaaataaataaccatgatttattttgtttggatatgcatcactctaaaaatgaaacaaaatcgccttacgatatactaaacgaaataataagaagctcattcgataataaatattatattaagccccccaccaaatactgttacgactcaacctataagctttcaatattacgagtagacaatgatgaacagatcgagatagaaaacctgtcttctggagagaaagtgattttatggatggtattaaatatatatgccatagacgctctacgttgtgaagatatattagaaaacaagtcattaatattacttgatgagccagatgtgtatttacacccaaagatgataccagaactattccaaacactagactctctaaacaaagtgctaaattgtaatttcattttatcaacacattctccgacaactgtagctttattacctaatgaagaactattcgttcttgaagattctaaaactcaaaccatacacaagaaagtttctaaagacgaggcaataagtaatttattacagggagtttctcagatatctatatctccaagaaacagaagacaggtatatgttgagaatggaagggatagtgacatttaccaagctattttctcgaaactatcattcaaaaatcttggacttgaccctgctataacgttaacatttatggcttcaggcggccagataccaataaatgagattgataaacatgtgaaaagtgtatttaaagatgccacggaagaatcattgaatctgctgacaagaaagattaatgaagaaagtgattgcgacaaggtaaaaagagcggttgaatatcttgaaagtgccggaagcgaaacggtaagaggaattattgattgggataaaagcaatgagactgcaatatcaaaaaaaattatagtggctgcaaaaaactatgcctactcgattgaaaatctagtttttgaccccatatctatattcgcatacctaacaacttttcatcaaaatcatcataaaaaatctgacttttgcagttgcagcgaccgcgatgatctaaaaaacatcatcaatgacaaggataaactacaagaaataatagactcgatcacaaataaaatatttggtcgaaagaatgattataaaatttcgataaaatatattgtcgataaaggactcaagggtgatactgaattctataacatgagaggacatgatttaaaaaacaaaatcctctctgcctatcctaagctatatgaactgaaaccaaaaaaacagactttccaagaaattgagtattatctcatgacaaatataactttagaaatattggggtttgaatttctccccttggaatttctcaatactctaatacaattgcagaaataa

SEQ ID NO: 233026 - DNA, 213 bp, Klebsiella pneumoniae
atggggggtgctatgatgagagtgtcgacaggaaatgcgctcatcattagcaggctgacttatgaatgtgattatctgacagacctgtatgcgagcggacgcttttatgatcactcccgccgtctgggcacagaaatgccgacggatatttctggtcataaccggatcataatggaaatgttggcaggatattttgtcaatgacaattgttaa

SEQ ID NO: 233027 - DNA, 1032 bp, Klebsiella pneumoniae
atgctaaaaaatactatgaataagttattattttcagtatctataattctcagtttaaactctcctgttgcttcatcgttggaaattggaattggtactcattttcaatcatatagttcaactcccgaaacatatatttcattaatcaaagaattaggttttacatcttttcgcgatgattatccatggtcgaaaacagaaggcagtgaaggagtttattctgtttctaaatttttgaaaaaaacagattatgctttacttaatgctgacagggatggtttgaatccactcgttattcttgattatggtaataagttgtataataacggaggttatcctacaactgaacgtgacattcaagcatttgctaattatgcgggatgggtatcgcatcgttataaagggaaagttaaatattatgagatatggaatgaatggacgatagctactggcatggttaaataccgaaatcaagttccttcggccaatgtctattataatttagtaaaaaaaactagtgaagtaataaaaaggaatgatccgaatgccatcattcttgcgggttctataaatcctctcgatttaagagcaagatatattgatgttaatgattggaaatggtttgagcaactagtaaacttaggaattttgaattatattgatggtgtatcattgcacacatattcatttatgaatggtaatccgctgttacgtacaccacagggtaatcttaatcgtatagatgcattccatacttactttactaaaaaaacagggaggagcatagatgtatatataactgaagcaggggtgacgaattatgatggacctggaggaatggatttaatacagtctgcaaattttattaaagaatatactagcctagtcaagaaacgatcttatattaaggggctttggtggtacgatcttattgatgatggaacagatattaaaaacaaagagcataattttggtttcttcaaaaataatttggaaccaaaagcctcagctgaatttatgatggcaaagtaa

SEQ ID NO: 233028 - DNA, 996 bp, Klebsiella pneumoniae
atgaaaaaaatagttaattttgattctcgttggattggtgaacatggtatagggcgttttgcgaaggagattcaagatggtatacctgctttaaatagaataaaagtagctattaaaccaacaagccctttcgatgttttttttgttactctatatcttatgtttaatagaggttattatttcacaccagggtataatgctccttttttccatcttaatcgtacagccataacaattcatgatcttaatcacatagacattgattttaactcaagtgttcttaaacggttgtattacaatttagtattaaaaagagcatgccggaaagcacgagttatattaaccgtttcagagttttcaaagaaacgaatatgtgaatgggctaaaattaatcaagataaagtaaaggtagtagggaatggtgtttcaaaagaatttaatttagaggttaacgggcttaaagaaaattatattttaagtgttggtaatcggaagaagcataaaaatgaaattgcagtgttgaatgctttctgttctgcaaatattccagaggctgtcatgctttattttactggcgagagaagtgaggaactattaaatcatgcaaaaaaattaaatatatcgaatcgaataaaattcatggggcgagttgataatgaaacattagctaaattatataaaggagcaaatatgcttcttttcccatctctgtatgaaggttttggtttacccgttatagaagcaatggcttgtggaactccggtaattacctctaatgtcacatctttacctgagattgctggtgatgctgcattattagttgatcctataaatcacggagatataagcttggcaattgaaaaaatttattatgacatagcgttgaggcaaaaattagttgaggaaggattaaaacaagttaagaaatttacttggcaaaaaaccataaataatgtcaagaacgaactagagacagcatttactattaaattatag

SEQ ID NO: 233029 - DNA, 759 bp, Klebsiella pneumoniae
atggatgtgtcatctgctcaaatgggaacgactggtggatatacaagatatgcgggtttttttaaaagttcgcttcaagcttcatcaaatattttaatattgttggtttatattgttgcatcaacaaaaaataaattctttattcttgtgtgttttattcttagtttgttggtgtcaataataacaatatcaaagacaacatttgcattgcatttgatattgctgttttacgtatttatgaaaattttacctgttaaacttttatggagaagtactcttatatttgcaattgttgtcacgtttttcaccattatgtccacgaactattcctttgaaatgaataatgatcctgcaactactatgttattaggatctttaaatgcacgtttaaccactacgtggccagatggtgtcgagtcaatattaaaatttggcagcttaacgttcggtgctggactaggtacaatcggggttggctcaaaactgggatcagggacttacaatcctggtgatagcatgtatctttatattattgctacaggaggatatatattaggtatatatttattgggatggttatattatcagtctaatattttaaataattctgctatttctcgattcctttctatgactcttattatactttgtttattcggaatttcgatgaccacgccagagtatcctcttatggggtttgcattaggtgtaatatttaacagcagagcaagtaatttacaatataaagaagctgagtga

SEQ ID NO: 233030 - DNA, 423 bp, Klebsiella pneumoniae; identical to SEQ ID NO: 113698

SEQ ID NO: 233031 - DNA, 231 bp, Klebsiella pneumoniae; identical to SEQ ID NO: 222286

SEQ ID NO: 233032 - DNA, 186 bp, Klebsiella pneumoniae; identical to SEQ ID NO: 94749

SEQ ID NO: 233033 - DNA, 558 bp, Klebsiella pneumoniae
gtgaaccatttaatgattgaccttgaaacaatgggcaataaaccaaactccccaatcgtctctatcggtgcggtattttttagcccctcaactggcgaactcggggaagaattttaccgagtagtcagccttaaaagcgcggtagatggcggtgccgttcctgaccctgaaacaattatttggtggatgcagcaaagcgaagaggccagaaaggccatttgcgataaagaagcggctatgaatcttgttactgcattgtgcgatctgaattgcttcattcgcgataatgccgatccagataaagtccaagtatgggggaatggtgcaacttttgacaacgtcattctgcgttccagctatgaccgtgagtttatcccctgcatctggaaattttggaatgatcgcgatgtgcgaacaatcgtcgaattaggtcgggctattggcatcaacccacgtcgcgatattccatttgaaggcgatatgcataacgcgcttgctgatgccaaacaccaggctaaatatgtttcagcaatctggcagcgtttaattcctgcgtaa

SEQ ID NO: 233034 - DNA, 129 bp, Klebsiella pneumoniae
atggagtttgaaaattatagtcgccgcgctcttctctggttcgcggcatttgttgatttggtgggctggttactggtcatcgcagccagttgggccatctgtttactaattgagtggtggacagcatga

SEQ ID NO: 233035 - DNA, 861 bp, Klebsiella pneumoniae
atgccaagcttaggccagctctataacgataaagacgccgggttaactactcgaaaaacctataacgtccctgtctcctccatttatgcggaggaaggctacaacgtccgtgaacttaaccaggcgcatgttgaagaattccgcgacgcattcattgcgggggaatatatcccgccgctggcagtagaagttaccgaacgcggtgtgaaagttatcgacggtcaccaccgttatcacggtgccctggctgctatcgcgctgggtcacgatattgtgcgccttgagtgcaaagattttgtcggtagtgaagcggataaaatcgccttcatggttaccagctcgcaaggactggcgctaacacctcttgaacgtggcgcggcatatcatcggctgcaaaatcaggggtggagcccttcagagattgcgacaaaggtgaagcgctcagagtccgatattctgcaacatctgcagcttcatgaatgcaccccatacatcaaaaagctggtccgtgatggctcaatgaactatgccattgcgatcagcatctctcgtgagcatggcgtatacgcagaccgggaagcatcgcggttaatgaagaaagccgaagcggcgggtaagaaaaaagttaccaagagcattgctaaccctcagttcaacgcagggaaagcacgtaaattccttgagcttatcgcctcctgcgctgacagcaccggcgataacctgatcattgaagttccaccagcaatgcgagcagagctgatttcaattcttcaggaattccaacacggtaatgctccagtaccaacccagcatgagtcagaacatcaggatgatgcatcagaaagaagtgatgccgcatga

SEQ ID NO: 233036 - DNA, 813 bp, Klebsiella pneumoniae
atgtctcaaattgaaggctctgccgtgcacgacattcgcgatctggttgctgcaactttgaaaacgaatactgatatcccatcagttgttgtgccggatggttttaaagttcaatcgctggaaacgcttcaggcatctccttcgcgtatccgccaggtcaccaacctgatttctcccggctctctgatcgcctatatccagcgcttccgggatgagcgttctgtagtttttgctgataaaaccaaaacccgcatcgttgctgtactggactttcaccacgattcgcaatacgccagttggggtgagcataaagcgatttatgactgcccttactctgatgactggaaagcgtggtctggagcagacggtcacaagatgaatcaaatcgacttcgccgaatttctggaaaataacatccagaacgtcgcgcctgttagcgataactactctggtccgtcaggtaccgagctattagagatggttctcgcattccaggaaacccgaaaagttgagttcaagtctgttaagcgcctgcaggacggaacctgccagttccagtacagcgatgacaaatccggctccggtaataccaaaatcccggaaaaaatcagcctggctatcgcacctttccacaacggctcaccgtaccaagtcgatgcccgtattcgctaccgcctccgcgacggtcagttggttctctggtacgagctgatcgaaccgaaaaaggttattgaacatgccttccaggagattgttaccgatatggaaacccagctcggtgaagacctgcctatttacgaaggttctatttaa

SEQ ID NO: 233037 - DNA, 360 bp, Klebsiella pneumoniae
atgtcagcatgtatggctgtagttcttaacggtaataccgaaattaaatatttcccgttccacaattgtgctagcgctgaagtagcaactgatatggcagatgagtggcgttatgccgccatcgaggcgataggttgggatgaagcgcatcgcttccatcttcgcgccgtccgtccgaaagtcgtcttgcggctaccgtctggcgcagtagtggaatgtgacctggatgacgttgatattgacgcggtgaccggttcggatattgactgccgcctttccgcgttcgggtttgacagagagaaacgttattccggttattgggacctggatggcgctgaaattatcgaatacatcgcataa

SEQ ID NO: 233038 - DNA, 204 bp, Klebsiella pneumoniae
atgctcctgccacttagccatgacctgatagctgttcgcttcaatctgtgcgcgttcatcacggtcaataacgccgtcagcagtcgcttttcgaaggtattgagaatgtttcccaatccattcaaccgattccatgagcctttgattgatgtcgccgttatcaacctcttcaacatcagcaaggggtacaaaaacaccacctga

SEQ ID NO: 233039 - DNA, 627 bp, Klebsiella pneumoniae
atgaatcaatctcaattccagaaggcggctggtataagcgccgggttagctgcgcgctggtttccacatattacggcagcgatgaaagaatttgatattactagcccggtagaccaggcgatgttcattgcacaatgtgggcacgaaagcgccgggtttacccaattggtggaaagcttcaactatagcgttaccgggctttctggtttcgtaaaagctaagcgtatcacgcaggaccaggcgaataccctagggcgtaaaacttacgaaaaggttttaccactcgagcgtcaacgagcgatcgcaaatctggtctacagcaatcgctacggcaataagtcggcaggtgatggctggaaatatcgcggtcgcggaatcatcgggattacattccttgataactacatgatatgtggcactgcgctaaaggtcgatttagtcagcaaccctgaactgctggagaaggacattaacgcagcccgcagcgccgcatggttctatacctcaagcggttgtttgaaatattcctgcgatttagtgcgcgtaactcagattatcaacggtggtcagaacggcattgatgaccgacgtgcccgattcctgaaagctaaatctgttctggtgtga

SEQ ID NO: 233040 - DNA, 276 bp, Klebsiella pneumoniae
atgggcattgaaatgattattggtctggcaactgcgttgctggccattgtcgctggcgcatttgggttaggccattcacgcggaactagtaaggcagaagccaaagcagtgcaagagcgtaccgaagagaaagccgccgccagtgtcgctgccgcagagcgcaaagttgaagttacagtaagggctgacaatgttcaggaaactgttaagcgtatgtctggtgacgatgttgatcgggagttgcgcgaacaattcacccgccccggtagtcgttga

SEQ ID NO: 233041 - DNA, 474 bp, Klebsiella pneumoniae; identical to SEQ ID NO: 100493

SEQ ID NO: 233042 - DNA, 162 bp, Klebsiella pneumoniae; identical to SEQ ID NO: 100491

SEQ ID NO: 233043 - DNA, 318 bp, Klebsiella pneumoniae
atgagcacaacgattgaaaagttaagggctcagtgtcggatcgatatcgacgacacaacggaagatgagtcgcttatgctctattatggggctgctcgccgtaaggcaaagaacttcattaaccgtaatctttatgaagatgaagtgccggaaactgatcctgatgggctggtgattgctgacgatgttttattggcattgatgctgctggttgggcactggttcaacagcagggaagaggcatccgatgttaataaaatgagtattccattcgggtttacctcgctgcttgagccctatcgattcattccgctctga

SEQ ID NO: 233044 - DNA, 540 bp, Klebsiella pneumoniae
atggctgatggtgtagaggttaatttaaccgggcttgattctgtgcttgggaaaatggacgccgtttcgaaggttacccgcgataaagctggccgcgcagcactgcgaaaagcagcaaacattatcagggatcgcgcccggagcaatgcttcccgagtggatgaccctctgactaaagaagccatctataaaaatattacggttagctggagtagcaaagcttatcgcagaacaggcgatctgactttccgtgtgggtgttatgggtggtgccaggcagtacgcgaacactaaagccaacgtcaggaaaggcagagtcggcaaggggtataaaacgcttggcgataaaggcaaccccggcggtgatacctggtactggcgttttcttgaattcgggacagagcatgcagcggcacatcctatactgcgtccggcaatgaacggcgtcgataccgatgtaatttatacatttgcgtatgagttggaaaaagccatcgacagggcaatcagtaccgccgccaaaaaaggaactactgcatga

SEQ ID NO: 233045 - DNA, 2127 bp, Klebsiella pneumoniae
atggcctttaatccgccgctgggaactaccaacgccgatgtttttatgggcaacgttcaacgtcttgatgaactggttaacggccccgccgccgacgttcccgaccgcgccggcgacccgctttattcgtggcggggcatccatcagaaccttatcccactgagccgccagtatatgacgctggctgacgcgcaggcggatattgccaatattcccgagggcagtgcaacgtattaccgcagccctgatgatagtgcgctggctattgaagtcatcaataatggcgggactctgacagagactggcagaaaaatgccttcacagagggctattgatgcgctgagggaagttatttctgaagaaatagcaaaagtgatggccagcggcgccgctcagacaacggatgcatatccggatattgcacaactcaatctggatgaaacaggcaaagccacatatcgacggcttgctgatggtgtgagccagttcccggcattaatgattggcgcgggtattctttttgcccagatgccgggcggtgggtttgtttgcaccttgcgtgatacaggcgaagagctattcaaaatatcggcgtctggcagtattacatacggtaatgtaacaacatttctgacggacgatgaaaggttaagtggatatacctctgcctggatggacccaaccgggaagatttacaaacgaagtaggactgatggtggagttgaccaggcgggtgaaaatggaccggagagtgatacgtcagcctatcctatggtcgcatcagtcgatgacaacattattgctgtgcagggtggtgtggtcacacagataacgaatgacacaggaatatcgaacatcgctccggtggcgtacgaggattttctccgctatctgtcaaacatcagcggcagctatctgacaaatcgctctacgtatgatgggaaataccgggtgcgtgaaagcaagaatatcctgcttcattacattggcaccgggcaatctcttaaagcagggggatcgacgattagccaggctcctgtcactatttcctcagaagcagactatggagttatcagcttttcaactggcccgaaggtcgatttcaaatacgatactctggatgaatccctgctagagtcggccacacctgcgcgagaaaacgtgggtacccgtccgggtcaggagtcaccatccagcggcatagcctataaaattcatgagctgacagggcataccgttttggcctccaccgctgcaagttcgggtacagatattgcggggatttcggctggaaccgccacgtttaccgccgccaccaaaatgattcaggcggccgtttcgatggctgatgaactgggcatggagtatgtcccggtacttgtgctcatccacgggaatcaaaacgctgccagcggaactactgtcgcctcttatcgtgccgcaatggagaacctgcgcgcgcagtatgagacggttataaacgccgcaactggcaaaacacagtcactccatatgtttgtcggtcagctttcgaatgtcattccatatggtggcactgccggagctacgaaatctaacaccatcggcattgctcaatatcaggaggctcgcgacaacgagtttattcacctggcgagcgcgcagtatgcccgcccgtattccgacggtgagcacctcaccagtgcagggtatcggactgagggagaggtgattggtacggttgtcggagggtggattaatgacaacacgaaatcctcgctcgtcccggctgagtctggtgtggtgcagtctggaaacacaataaccattcctgttaatggctgcgttggagacctggttattgataccgctcgcgttgctgaccccggtaattacggattcctgctggaaggggcaacaattgcctctgttgccgtcagcggaagtggtgccaatgcaaagattatcattaccaaaacagattcatcgctggcgacgcgggtttcttatgctgaaacaggaatagccgggcagagccctggtgctatcaccggatcacgcggttgcatccacgattcacagagtggcacatcgctggcgggacttcctctttacaacgacctcgccgttttcgcatttcaactatag

SEQ ID NO: 233046 - DNA, 753 bp, Klebsiella pneumoniae
atgaccacccgtatttatgtagaccatggcgttaaagcaacgtattaccttgaccagtacccgtacccaaacgatatcactcaaatccctgcactgattccaggaattataatccaggccgattgggatattaacgaccccgcttcactcacacgtaaccgggttggctcagcaatgacggctgtaggtaacccgacattgggtgattacggcatcacagtgagtgaggggaactacatcgactcaggcattgatatttctgcctataacaccaacgacctgacagaaatttccattctggactggcccggcgctgttcgtgccgttattggccgtgtacaaatcaatgccccgcagcgctcccgtggtattcagacttctaccgcatcatggatcgctaaatggctgacgcaatccggcaccgctcagcaggcaaccattaccaacagctcagaggcaggtaatagtgaaatggtggttggtcgatttatccgggataacggtagcggttctatgctgaccaaaattaagatccctcgcaccgaccaggaaaccacgacaaccgcggcgtccattccgtactcgatgccgtcatctaatattctgattggggcgtcggttgatgctgccaccaccggcagttcctttgtcagagcctctctggttgccagccgcgcactgaccgacgaagagatcgccaccatctactcgacttataaaaactattaccagttgaaaggtaaaaccatctaa

SEQ ID NO: 233047 - DNA, 195 bp, Klebsiella pneumoniae; identical to SEQ ID NO: 112000

SEQ ID NO: 233048 - DNA, 471 bp, Klebsiella pneumoniae
atggcatactcagctgctgctgtagctaatgccttcattgagaaggcgaaaaagggagagctttctgagctcactccaatgaagcttcagaagttgctcttttatacgcagtcctggcacttaaaattgtgcaatggaaggccgcttttcgacgacctttttgctcgctggaagttcggtcccgtcatcccccctttgtaccacttactaaaaaagtatggtgcgggagagatacaggagccaatcagcgtaattattgatacaggtggagatttaaagcggatcaccccaacgatacaaaaagatgacgcagacgccataaaactcatcgacaaaatcattgaggtttatggtggttattccggcacggcgctatctaatatgactcatgcacccggaactgcatggagcctcggctcccctgacggcggtccgataacccatacggatatggctgaacacattcattaa

SEQ ID NO: 233049 - DNA, 240 bp, Klebsiella pneumoniae
atgtttgtggaactcgtttatgacaagcgcaatgtccaggaactgcctggcgctcagcaaatcatacttacggaactgacaaagcgggtacatcggattttcccggatgcagaagtgaaggttaagccgatgcagactaacgcgctaaacagcgattgcacgaaaacagagaaagaacggcttaaccgtatgcttgaagagatgtttgaagaatctgacatgtggttggttagtgagtag

SEQ ID NO: 233050 - DNA, 903 bp, Klebsiella pneumoniae
atgaaaacttcgccagttcatgagttgcagggtttggcttctgacgtcagtaatgacattgttggggttttaataaaagccaaaatgattgcagtgaagttaaacttgcccgaattggccgaatggtttgattatgagcttgatggctatcctgatggggttgccctacctgattatcgtataggtcaaggtgtagtcaggggatggtatccccgtcacggatggataaatgtccaatatcgtaatattgaaccagcaattataacaatgattcaagagtatgggttaagtgactcaatttcagcattgagaaatcttcgtgaagcagatgataacctgcggcttggaatgccacccgaaaaaataaaaatgcttttcccttcaaatagtgctccatcggaagtttgttggtttattaatgcttcaaagttggaatgtatagtaactactgtaaggaataaaatattaacatgggctttggatttagaaacaaagggaatattgggtgaaggtgtagtgtttagtgcaaaagaaaaggaagttgcaccttcaacaacttataacacaaataatttctatggttcagttaacaatttaggggcgataggggcaggtaatcacggtagcatttatcaaaataatataaacttgattaacaactttgagtctcttagtctggtgcttaaaaactatggcttagctgatgagaatattagtgatttagcaagggttattagtgagtcgccacttcctaaaaacaaaaatgaggtgagagaatgctttggagattggattggagttatgacagcaaaagcgttaaagggtggtcttgctatagagggagctaatgtccctaacattttaatgaatgatttgtacagatactttaatctacagagataa

SEQ ID NO: 233051 - DNA, 903 bp, Klebsiella pneumoniae
atgcattctccagttattgagcttcaggctcttgcgagtgacccaaattcagacatcgttgctgttctaatgaaagcaaagatgattgcgattaagttagaccttaaagaccttgttgaatggatagagttagagcttaatggttaccctaatattgcctctgcacctgattataggtctgggcaaggtgtattgaaggctttcaatcctgtaaatgggtggattcctgtggatttggggacatctgacccaaagtttacaaaacattttacaacttttgctttaactgaatcagtctcatcaatggctcattcgaaggtcaaagatgcagggactgtcagtctcactgtgcctgctccacttgctgagatgcttttatctggtcagcgttcaagatatgagattcgttggttctttagtgcgggtaagattcagcatataattactacagtgcgaaataaaattctcgactggtcacttgaattagagaaaaagggaatactcggagaaggattaatatttactagagaagaaaaagaggttgcaccaatgacagttaacaatacgaacatctttcatggctcagtgaataacgccggagctatcggggcaggaaatactggtaacatcagtcaacaaaactctatctcggtgggtgacattgcatcccttgagcgtgagctaaagagccacggtcttgatgataatgatgttgctgaattgaaacagcttgttgagcaatcacctaaaccagcttcgaaagaagaagttgaaaaaggtttcggctcatggattggtaagatgacaggcaaggcttttacaggtgcgttaaaggtcgctggtgcggcggctcctgctgttcttactaatgcactttgctgttacttcgggatccctgtttaa

SEQ ID NO: 233052 - DNA, 189 bp, Klebsiella pneumoniae
atggaagatacaattaacgccccgattaattattatgacgctgaaaagcgtctaatcgttggtcacaatctggttggcaagattcatcctcagttaatggataagctggttcgccgttcaaacgatggttcaacccgttcccagcaagcacgaatcaccagctacttagaaggactgttaaatggctaa

SEQ ID NO: 233053 - DNA, 912 bp, Klebsiella pneumoniae
atgcttgaggctaactactggacgccacgaggcgagtattttgaccatcaggcaagcagtgacagcacgtccgcaaaggatattttcgataagattgctgaagcaggcatggggtattttctgctgtctgacggcttactttccgtcgggcgtgaaggggtcaaaagctggaccggaatcatcaccccccaggatactgtcgaagaaatgcagacatcattcagggtgccttcggaggacgattttgatggcgtggatgtgaaatacatcaatcccgtgacctgggcggaggagaccgtacagtgccggacgcctgaaaatccgttccccaggaaaacggaggcttacaccatcgatgtcgtcatgacagcggatcgtgcctggcgtatcgggatgcgccggttaatgaaatatctccatcaacgccggacgtatacggctacaactgcaatgctgggatggtgccatgattttggtgaccacatcattttgtcagatgatattcgaaccgggaaaacccaaagttgcctgattgacgcaatgacatacgactttcaggaaataacgttacatgtcaccgagcctctggactggagctatacaaatccccggtgctggatacagtttcagaacagtcgtccatcgtcacggatgctgacgccgcagcggatagatgatttcactcttaccataccttacaacgacgatctgcacccggaagactggattatggacgaccctgatattgatctaccgcgtttgctgttctgcgacagtgaaaaaggtgcccggcatgggatagtccaggaggtagccccctccggtgacagcaactgtcagattaccgcgccggaatataaagaaattttctacgcctacgacgacgccacataccccggcgacgtcgcgtaa

SEQ ID NO: 233054 - DNA, 2148 bp, Klebsiella pneumoniae
atggcctttaacccggagctggggagcacgtctcccgcagtgctgctcgataacgccgagcgcctggataagctggtgaatggtgatgcgctgaccgaaccggaccgcgctggcgttgatcttgatacctggcgcggattcatggcgaaaaatgacgagattcgtcagaaccttgtgccattgagtaagcaatacatgacgcctgaggcggcacaggcagatatcgccaacatcccggatggttcaacaacctatgtgcgcagttctgatgatgcttatctggctgttgaatacaagaacacgggtggaacgttagaggctaccgggcgcaggatgatttcagcgggatatgttgacgcgttgagggatttagttaccaccgaactggcgaagattatggccttcggtgccgcgcagacaaccgatgcttatccggacattgccgggctgattcttgatagtgtagggaacgctgtttatcgccgttacgctgatggaacgagccagtttccggcactgatgattggttcagggattgaacttgtgcaaatggcgggcggagggtttgtctgccagatgcgcgccaccggagaagaaatatttaatatttctgcattgggtaacctgacgcatggaagccagacaacttggtttgctgatgatgacagtgtcagtgactatgctgaaatacatatggacggacaggggagaatttttcgaagagttcgcacggatggtaccgtggagcaggtgggcgatgacacacctgatgatgacgcctctgaattcccaatggttgcttcagttgatggaaatatcattgcggtagatggcagcgatgcaactcagatcacgaacgactccggagtttcaaatattgcgccagtggcatatgcggaatttttgcgatatttgtcgaatatcagcggcaactacctcacttatcgatccacgtatgacgggaattaccgggcgcgagagtcattgcgctttcttgttcacctgattataactggccagtctcttgctcctggtggctcaacgcaaacacaaagccctgtaacgacaacagcgcaggcagattatggcatcctagcgtttgaaaccgggccgaaagtcgattttaagtacgacacgctgaatgaagcactcctggagtccgtcatcccatgccgggagaatgtaggaacgcgccctggccaggagtctccatctagcggcatggcttggcaggttcaccagatgaccgggaataccgtactggtttctacggccgggagttccggtactgcaattgccgacatttcatccggttcagcgacttttaccggtgcaacgaaaatgattcagtcagctgtagccatggctgaaaagctgggcatgcagtatgtccccgtaatggtgcttatccacggcaaccagaatgcggcagcaggcacatcaatctccagttatcgcacagcaatggagacgctccgcgcgcactatgaatcagtcattaacgccgcaacaggcgaaacgcagtccctgcatatgtttgtcggccagctatctaataccattccatacggcggaactgccggctcgaccaaaaccaataacatcggcattgcgcagtaccaggaggcgcgtgataacgcgttaattcatctcgccagcgcacaatatgcccgcccgtattcagacggggagcatctgaccagcgcagggtatcggactgaaggcgaggttattggctcggtggtaggtgggtggctgaatgacagtgcaaaatcctcgcttgtgccgatagagtcggatgttgtgcagtcaggaaccacgatcactatcccggtggcgggttgtgttggtgatctcgtgattgacaccgcgagggttaccgaccccggcaactacggatttgtcctgaccggggccactattgcttcggtagccgtcagcggcagcggaacagcggcaaaaatagttatcacaaagaccgattctaccgctgcgacagcgatatcttatgcaagccaggggattgcgggacaaaaccctgggcccgttactggttcgcgggggtgcattcgtgactctcagtctggatcatcactatccgacctgcctctctataacgacctttgcgttttctccatccagctttaa

SEQ ID NO: 233055 - DNA, 210 bp, Klebsiella pneumoniae; identical to SEQ ID NO: 202478

SEQ ID NO: 233056 - DNA, 381 bp, Klebsiella pneumoniae
atgtttgacgctgataaataccgttcagtcacctggctgaaaggcggacgcgtatacccgaaactcgactgttttggcattgtgaatgaaatccggcgtgatctggagttacccctctggcctgacttcgctggtgtaaccaaagacgacggcggtctcaatcgggaggcgagaaagttgatgctttccttgcaacgctgcgagccctgcgaaggtgctggcgtggcctgttattccggctcaacggttacgcatgtcgggatcgttgtcatgctcgataaccagctgcaggttgcggaatgtaatccaggctcgggggttacgtttctgccactggcgcgattcatacgaaggtttaaccgcgtggagttctggcaatga

SEQ ID NO: 233057 - DNA, 477 bp, Klebsiella pneumoniae
atgacaattcttgagcggctatatgccagcagcggttcggaggttatccacgacacgctgcagatatcggctggcgatgataactactggttaaccagcggctgggatgacgtttccgtaacgttggaaaatggtcagccggcgacgtttgaagcctgcgcgatagaaattgcactgccagcgcgaaatgcggacggaacgcaggatctgaaattcgccctgagtaatattgacggtgtcgtttctggagccatcgataaagttctggatgaaatgaaatcagccacgctgacattccggcggtacatttcatccgatctgtctgccccggcatcatcaccgtatacgctcgatattaaatccggctcctggaccccgacagcagtacaggtcacggcaggctatatgaatatcctcaaaacagcctggccccgtaaacgttacaacctcgcagagcatcctggcttacgttactaa

SEQ ID NO: 233058 - DNA, 390 bp, Klebsiella pneumoniae
atgtttacagttaagcagatcatcaacaacgccacctcgctatatgaggtgaaagaaatcacggtagcacgtcccggttcagagcagtggcatcaggcattagccctagccgaggatctgggggttcaaacccctgacatcattgagcacgttccgatgtcatacgaagaccctgaaatgaaaaagcctctcggagatgagcacctattgtcagtggaacggcatggcgtaagtcgggctgattgcattggcatcatctgttccggtctgccttcagcatcccttccggacatccctgaagctggcggtgtaggttatcaattcctgtacaagggagatcagatttacatcaccaacagccacggctcaaccatcgaaacggttaagtaa

SEQ ID NO: 233059 - DNA, 186 bp, Klebsiella pneumoniae
gtggatgtgctaattgatagtgccatggaaggctatatcttcctcgctctggctatgtggcgcgttctgattgtggtattcgttgggatggccctctcattttatggcgtgcaaatgcgtagaactgcagtcacctttttgatgctagctgcggtagtagggattgcgggttcgatttatacctaa

SEQ ID NO: 233060 - DNA, 174 bp, Klebsiella pneumoniae
atgaaaaatgaagaatttgaacgtaaagtcgaagatgagatttctgctctcattaagaaaaagatcgctgaaatcaggaaaaaaactggtaaagaggtttctgaaatcgagtttattccagttgagacaatgaatgggcttgatggatacgaagtaaaaatcaagctgatgtaa

SEQ ID NO: 233061 - DNA, 162 bp, Klebsiella pneumoniae
atgactatctttgatggtcttaagatgtacatggataaacaggtgaaggtgacttgccctcactgctctcatatcatggagcaaagttccagcaaaatacgtaaaaacatcacgtgtatttgccctaaatgtggatactttttccttccggaggaagggtga

SEQ ID NO: 233062 - DNA, 240 bp, Klebsiella pneumoniae
gtgaaagacattaaaaaatttccttctttgctttttaagccatatcgcttaggactttcagctgcaaatgaagaatcctatcaaatgacagatatcgaacttaaggactatctgttcacacttacatgcatcattatttcaggaatggtgctcagcagtaattatcttcctgtaagtcaaacgaaccagttcagatcgctctatcagttcctgggcgaagaatatagaaaaaagatataa

SEQ ID NO: 233063 - DNA, 276 bp, Klebsiella pneumoniae
atgggcattgaaatgtttattggtctggcaactgcattgctggccattgtcgcaggcgcatttgggttaggccattcactcggaaccagcaaggcggaagccaaagccgaacagcagcgaaccgaagagaacgccgctgctaccgtcgccgcggcagaacggaaagcagatgttattcaagaggccagtgatgtacagcagactgttagccatatgcctgatgacgatgttgatcgggagctgcgcgagcacttcacacgccccggtaatcgttga

SEQ ID NO: 233064 - DNA, 630 bp, Klebsiella pneumoniae
atgaacaaatcacaattccagaaggcggccggcatcagcgccgggttagctgcgcgttggtttccgcatattgatgctgcgatgagagaattcggcatcactgctccactcgaccaggcgatgttcatcgcgcagatggggcatgaatccggcggttatacaacgttggtggaaagcctgaactatgccgccgacagacttgttcctacgttcggcaaacaccgaataaccgcccagcaggccgcagcactcggcagaacggcaacacaaccagcaaatcagcgagctatcgctaacctggtgtatgggggcgagtggggtaaaaagaacctcggaaatcaggttgccggtgatggctggaaatatcgcggtcgcggcctgaaacaagttacgggcttgagcaactatcgcagctgcggacaggcgctgaagctcgaccttgttacccagcctgagctgctggagcgagatgattacgctgtacgttcggccgcatggttttatgtctcccacggttgcctgcttcattccggtgatattgagcgcgtaacgctgcttatcaatggtggccgcaacggtctggataaacgccgtgcgctgttcaatcaggctaaatcagtactggtatga

SEQ ID NO: 233065 - DNA, 855 bp, Klebsiella pneumoniae
atggctaaccatgttatgggcgtagctacgcctgtcgataatcaattgcatcaggtaattccggtaatgcagggcacaatgggcgatcagagagcttcgttggtcagcgccaggcgactgcataattttcttggggtcggtcgtgacttcagcaactggataaagtctcgtattagccagtacggttttgctgaaaacatcgattatacagttatcgccagttctggcgaaaacccactcggcgggcgcccggcagtggattacatggtcaccatcgatatgggtaaagagttagcgatggtagaacgcaatgaaaaaggtcgtcaggtaaggcgttatttcattagttgcgagcagcaggcaaaatcagcgataagccatacgcatcctgatttttccaacccggcgctagctgccagggcgtgggctgatgagtatgaagccaggcagaggattgaggctttaagtcaccggcaggctcaatatatcgatcatcttgaaaacctgtttaccgacggcttatccccagtgcagttctgcaaacgtctgaatggtgtcaacgttagtaaagtcagcgccttcctacagagctctaactggctttacgatgacaatcctaacggcaatcacgctcaatggcgtgtcagatctcaggtcagggataagtatctcaccgagaagagcacaaaagtttcaccgagcgccgccgccagtttcacaacataccagcccgtcctcctgcgcgatggggctgtttggctttatcgtaagtatctgaagggacaactgccgatgaagcaatcctggaatggggaatatacccacgataaagagctttctgggggcattcagtga

SEQ ID NO: 233066 - DNA, 507 bp, Klebsiella pneumoniae
gtggtgcctccacctgccgggttaagccataaccggcgacgtacactgcccggaaacgcattccatgaacggtttggctcgtcacgtgcgcatagccgcaattaccacaacgaagagagcactgccggtgtccgaatcgaacggaccttttccctgcccatcaccagatatagaactatcctggtgtctggaatcgaaccagactctatgccttgctcgtcaatgctctcatcgttgtgtcccggactcttcccgggggtcacaccttttcgccgcgctggtggggcgcacgtcgtgcctgaaacacctggcttgcacattccagttgtccggatagcgcatggaacttcaagggaaccatccgggctgctaacgctgcatgtgccatacaacggtcgtgaatattgccgttcacaactggaagcgcactccttcagttacaaaccagtccccacgacggatgaagatggaatgcgctttcagttgtgttgtggtggccggtactga

SEQ ID NO: 233067 - DNA, 198 bp, Klebsiella pneumoniae
atggcacacgtaaaggtaaaagacatggttgcggcagcacatgccgcttcaaaggaattgccaccagcaacagccacgttaatgcgcgacacggctactcgcctggacgttacctacgtcgcattaactgaagcaatggaccacaacacggcgctggcggcggagatcgaaagattgcggggagttaccaaaaaatga

SEQ ID NO: 233068 - DNA, 129 bp, Klebsiella pneumoniae; identical to SEQ ID NO: 179184

SEQ ID NO: 233069 - DNA, 543 bp, Klebsiella pneumoniae
atgaaagaactgactattgctggcagcagtaatgacgagattgttcagacagcacagcagaacgatatgagcattgagtttgttcgctggttcttcaacaaaaagaaagctgactgcggtgaacattggtttcttatgctgggtgcgatgtgggaaggctggaagggctgcagcatcgaaatggataggctggctgcggagaatgtggcgctgaaaaatccagataactggctgtcacagagtgattgcggctacgaagcggccgaagttgccacacaaaatggagcaaatgaagaggaatccttaagggctgggatgatcgcgattattaatcgtattgaaacccccgccaccgacgcttatctggccgggattaaggctgatgctgcagccccgctggtgagcgctcttaaggtgatcgcaaattcagaacagcacaacggcgatacggttgtttgtgattttgacacacttatttctgttgcggcctgtgcgctgcgtgactactacgccaaacagctgcgcgagggggcagacaaatga

SEQ ID NO: 233070 - DNA, 462 bp, Klebsiella pneumoniae
atgactgatatcaccgaactggcgcagcttatgaaggctgcagctgtgcgagctaaggcagcaaccgaagattatgttgcccatagcatgtctatcaccgtctacctcgaagaatgcaaagaatttaacgacctgtcagatgggccagataacatcctcgcgctggtagaggcgctggagctcaaggaagaacagcgcgctaactggttccagatggcacagaaattaggagaaaacttggatgcggctgaaaagcgcatctctgagctggagcgcgaccaggagcatcttcgcccggtcggtgtggtgagcgagaaagcatttcaacgtcttgaaaacagcgaatctcgctttatagcgttgtggccgcgccctggcatctttttgccgcgcaagcgccccgaggatggcgtgatcgtttatgcgcgtacagcagccccgcaggaggtgaaaggtgagtaa

SEQ ID NO: 233071 - DNA, 2193 bp, Klebsiella pneumoniae
atggcctttaacccggagctggggagcacgtctcccgctgtgttgctcgataacgccgagcgtctggataagctggtcaatgggcccgccgcagctgtccctgatcgcggaggtgattcacttaagtcgtggaggcttcagcaacaagaaattgctaataccctggttaatttccaggagaacggcggcgctatgggtttcagttctttgcaggaactgcttgcctttatacctgataaagccaatgttctggctgtcgataccagtacaggagaacaatatttgtggaatggtaccgagtgggtaccttctgaataccaggtcaattcgcagattaaatcgcttaacgaaatcgttgagaaaagccacagcacgaagttctttcatcggtggaaagacaggatcggaacgattatcgccgggtggaaaaacgatgatgtgggcggtgtttattttctgtcacgtctgctgaagtttggcccgaatggtttttttggcgcgggcatgcaactgtcagaaaatgagatatcgaataaaaccatcgcattcaaaaagggactggacggtaaaaccagaatcttcgataaacgcggcgtgatgctggcctcgattgagaacggcaaactgcagatggccaaaatgaatattgaaaccatgctgcagttagctgttaagtccgggaatacttctctaaccatcaaaaaagatggcaaggggatcagcgtttctgacaagcggggagtggtatgtttcaggattgatgaaaggggttacgttcacggtaattttgtgaataaaggcgggagcgccactccggttttgcctgaggaacagattattcagcagcttgaaacttcagcctttgcaaagcaatcaaaccgcttcaataaaattttcagttgctctccaaagtcccgtaaaaaagtaaaagtcattcttgtttacgggcagtctttcgccgctggcgcgcaaagcaatgcagcgctcacgactacaccgctttatggaaatgtgatgttgggtcagtcgcctcgaggatcattcttctctaaccctccggcagggagtgaggtatacgggccggttggcggggagaataaattttatcctttgcatgaagtttgtcaggacgtggacggaaccattatcccgcaaagtggatatggtgaaacgatttgttcaacggtaggcaatgagttcaagcgcctgcacaacgaagcaatgggggtcgccaatgacgatgacatggttgtttgtgtaggtagttgcggtgtatccgggcggtcgattgcgcagctacagaaaggagcatccccggagctttacaacagagttgaaacctttcttgcaggcgtcgcggaggcctgtgcagctgatggggtggagtttgaggttatcgggatcatttacctgcagggagaaaatgataattccgccagcaccacttactatgccacccagtcacagactatgcggcagaaccttatcaattcctgtaaggcggcatccgggcagaccttcgatcctatttatttgattaaccagattggtaacacctatatcaacacaatgggcgtaccacaggcgcagaacagactgccggagcaggccgacaaaaccattctggttggttcgtatcagggactgcctaatcccggcgcacatctctgctcgaactcataccgcaagctgggttgcctcttcgcgcgggaactatggcgctattactctggtaatggtgatttcacttttcggatattgaaagctgttcaccgcgaggacaaagtttatttggctctaacgccacgggtagcgccactgaagttttctgctgtatacgataaatggacagagatactccacgcagataaagggataacgctctcagatggtgccgggacattttccccggaagattttagcgttgaaatagtttctgaccgtgtgatccgcattaatgccagtcgtgccttaaccggagcagtaactgtatccctgggggataaaagccataacggcactcataatattagcgactcgtcaaatgaagttggcgggcttaactgggtatacggaataaacggtcagtatactcaggaaaatataccttctctcgttaataaaccttacgcactcaataattttgccgccattcaacaaattcagtcagaggaaattaaatatgtctcttga

SEQ ID NO: 233072 - DNA, 783 bp, Klebsiella pneumoniae
atgtctcttgatttagttatgggtgattctgtttttgcatccgggataggtattgatgttcctgtatcagaaaacctgctttcttttggtcttgggggcgatcttttcggtgtgaatcttgtagaagatggcgtgcaaccgacaattgtcggtgcacctgccaggctggacgcatattcaacgctgcttggtccgggagggtatcttgatctgaatattaaggagtcggaaaacttcacctactttgcagtgtttaaactgtggaattcgggcgggggcggaaatacgcagcttataggcacattccagagttatgcagcagatggcactaccgcagtggtgggatcagggattgttcttgaggctcagggataccgtgatgttatctgttcaacgtacgatggcggcactggttcatcttctgcaaacaacgtgataataacggatgtttctgatctgccgacaacagaagctgcagcctcctggcgctgccttattggctgctatgacggaactggcattaacggcacaccgcgactcaaacgtattatggataaaacgtccggaaaatccggttcctcgctgacgccgacgggtgtggttcgtgatatgcgtgggacatctactatcagggtagggaatactggccctcgggttactcaaacgaaatcgctggcatttatgggatatgcttgctacgaccgccagttaactaatacagaaatggatctgatgtataaccggtttaaagatattggtgaagttcagggaatgttactttaa

SEQ ID NO: 233073 - DNA, 309 bp, Klebsiella pneumoniae
gtgctcgttctgttacttctgcgcaaatatacccggctggagttcgtaggtcatgccagcctgctgctgaaaacatggtctgtaaagctgggagctatcggcgcgctgattggcgtatgggcgcagtcgttcccggatgctgcgttgcacgcctgggcgatgctgccgccggatattaaaaacctcctgccgccaaacatcgttgcactgattagcccggcgctggtggtgctggccgtgctatcgcaatacgtacgccagccagcattgaaagataaggctgacgaactgaaggagccgcagcaatga

SEQ ID NO: 233074 - DNA, 501 bp, Klebsiella pneumoniae
atgtctgcgaaagatgattttttcaaaaaagtaacagaaaacaaagaacgacaagaggccacaaaagtacaaatagcatcagatactttgcgtttcactaacgccatgcatcatctgatacaacagatagaagcctggttgcataagtcaggaattgacgtcgtcgttactgagaatgaacatcatgacgaaagtatcatgatgtactctggtggcgaaaagctaagcacgtaccgggtgaaatcatgccacatgaagaatggcgaaaagaaagcatcgctgatccccatcgctgtgtatggtggtcaaaaacgcggatgggcttcactatcaatagataaccctaaccgggccccaagaaaccaaaagtatctgctcagtctatccagtgatgatgtatggataattaaacaagacatcgtctcaccacgagcacagcaagacaacggagcagaattaacagaggagtcctttttccaggctctggaatcgctcgcctga

SEQ ID NO: 233075 - DNA, 2148 bp, Klebsiella pneumoniae
atggcctttaacccggagctggggagcacgtctcccgctgtgctgcttgataacgctgagcgtctggataagctggtcaatgggtctgcgctgactgagccggatcgcgctggcgttgagctggatacctggcgcggaatgatggcgaaaaatgatgagatccggcagaacatcattccgctgagcaagcagtatatgacgcttgaggcggctcaggcggatatagctaatattccggatgggtcaacaacctatgtgcgcagtcctgatgatgcttatctggctgttgaatacaagaacgcgggtggaacgctagaggctaccgggcgcaggatgatttcagcagagtatgttgatgctctgcgggttttaattactgaggaagtggcaaagataatggcgtctggcgccgctcagactactgacgcatatccggatattgcagaattaattctggatagcatgggtaattccacgtatcagcgctatgctgatggtaccagcagattccccgcattaatggtgggggattctgttgagtttgttcagatagccggcgggctgatctgtcaagcccgcggtaccaacgtggaggttttcaggattatgtcttcaggaagctttgtttacggtgaccttatctcgtgggtctctgatgacgaaagtctaagtgaatatactgaagtccatatggacgggcaagggaggatatacaggcgcgtactgcgtgacggcactgttgagcaggtgggagaaggaggggcgtcaggagatgaagccagcaactatccaatggttgcctctgttaacgggaacattatttctgtactgaatgatgttatcacacagattacgaatgattcaggagtgtcgaacatagcgccagtcgcttataaaaactttctcaggtatctatccgatggaagcggtaactataaaaattatcgcgcgacttatgatggaaagtttaaggcccgtgaaggtaacaaaaagcttatccatgttttactgacaggtcagtccctggctgctggtggttcaacaataagtcagagtccagtcactactgtagctgaggcagattatggagttatctgcttttcgacgggtccaaaagttgattttaagtacgatacgttgaacgatgcgcttcttgaatcagtgatcccgtgccgtgagaatgtaggcaccagacccggccaggagtctccatcaagtggtattgctaaggctattcttgatgccactggcgaaacggtattgataagcgatgcttgctcctcaggcaccgatattgccggcatttcactcggaactgctactttttcaggcggaaccaaaatgattcaggcggcggttgcaatggcagataagttgggtatggagtatgtgccagttctgatccttatccacggtaaccagaatgcttctgccggaacttccattgcttcctacagaagtgctatggagaatttgcgcgcgtcttacgagaacatcatcaatacggaaaccaatgactcattatctttgagcatgttcattgggcaactttccaatattgtaccgtatggcggaactgcaggcgtgaccaaaactaacacgatggctattgctcagtatcaggaggcccgtgacaacgagtttattcacctggcgagtgcgcagtatgcgcgtccgtattccgacggcgagcatctgactagcgcagggtaccgtactgagggagaggtaattggtacggttgttgggggatggattaatgacaactcgaaatcctcactcgtaccggttgagtccggtgtggtgcagtctggaaacacaataaccattccagtagcaggttgcgtgggaaatctcgtaatcgacacgactcgcgttgtcaatccgggtaattatggttttctgattactggtggaactatcgcctcagtaaccgtggagggggcagatgagactgctcggatcgttattaccaagacggataacactgcgaccacccgcatctcatatgctgaaactggcatcgctggacagagccctggcgctatcaccggctcacgcggttgcatccacgattcacagagtggcacatcgctggcgggacttcctctttacaacgacctcgccgttttcgcattccagctctaa

SEQ ID NO: 233076 - DNA, 312 bp, Klebsiella pneumoniae
atggcaaagcatatgcaagacaaagagagcatggccggaatcacctggctggctctgctgatcattgctggttggggcggccttgtccgattcctgatggatgtgaagcagggcaaagcaaaatggagctggataaatgcttttgcgcaaattgtggtttcggcttttaccggggtcattggtgggctcatcagcattgaaggtgggcttagtatttacatgatactggccactgccggtatcagtggtgctatgggttccgtagcgctcacgtatttctgggaacgaatcaccggagtgaaagcacaatga

SEQ ID NO: 233077 - DNA, 1194 bp, Klebsiella pneumoniae
atgaatataagtagacgtttttttcttggtggcgctgtaagttcattcgcatgttatgtttttgccaatcaaagtcaacatttgaccttagctaatgataacaaagttgcagatgcgatgagcactgagattggagatgcgtataaacaatccgtcaatggtgaaaatgtttcattattaagttttctaaataaagaaaaaaccgaagctcttaatgttcatggtaatgaggttgatattacaaatgaatttaatgatgcacttaagaataatgtaatgaaaatttatttccctccacaaaaaggtatctacgtcttagatggagagaatattgtattacctgtcggtttttctatgtttggggattcaaagaaaatctacaatgtaaaatcctcaaaatcatttaatgattctggaaccgtaatacgtatagcaaaaaactcaaaacgattattcagtatgacaggtaatcacatcttttttgggattaatttcgatggtataaatcgacataattattttatgcaatcaacagagaaaagaataaagaattgcaagtttataaactgtggattttatagatggaaagcaggcgttgggaatagttcatattgtgcgacattatcactttttaattgtataattacatccaattatattggtattatgaatgttattgattcaagtattataaattctatcgtcaacgcgaatctagctgacggtgtgagactaatgaaaggagcaaataataattcatttcttggtgttcgaaatgaatggaatggagcgaccaattatttttcaagtggtgcaacgcaaaacattgttacaggagagttggttgatcgtgctggtaaaaacggttttgttgctttgaatggaggatcttggctggttaatagtgtaatcgtcaagagatctggtcgtaatgctgatgatagttcacatgattctgcacatttttacgttgatggagagaattcatcaataatattatccggtgttaaaacactcgcaggcagagatgacggaaacacaggacatttatcacctcagcattcattaataattggttcagaaggtgctgcgaaaattatcattggctcaagtgatttaactggctctgtcggtgaaccaataattggtatcgagaaggcaaaggaaaaatcaatttctgggttgattcagtga

SEQ ID NO: 233078 - DNA, 633 bp, Klebsiella pneumoniae
ttggtttctgtatgcattgcttttgattttcattttatcatatataataaatacttcactaaacacatacctttcattttggttttatctttcttagcttatatttatggagagaaaatcatatctgtctattatataaattatatttttgacaattccgtattttttttcttgggctgtctagtgtataaatacactaatcttctgaaatctcttttaaacttaaattcattttttatattaacgtgcgtttttattttagttgagtatctatattttattcgcttaggtaataattatttcgctttgaatttgtataccgctgcgattgctattgttggcattttctggatttcgaatttatctattgtattatctagatatgatataagttggctatcccttctggggaggcaaagtataattatctttcttgttcatatacttgcctcgagcggagtgagaattgttttaacgaaattcttacatatagataattggtattttaatatctccgttggtacaattgctggtatcatattaccattggttttctatcatcttgctatgcgcttgaaaatgcaattcctttttgtatacccttcttcaaaaacttctaatagtttgaaataa

SEQ ID NO: 233079 - DNA, 132 bp, Klebsiella pneumoniae
atgcataacgattggcaagagtaccagttgagcaaaatgagaagcaactttcttcgcgccgtgctggcggtttgtgaagataaggaaaagcgcaaagtaaaagcggaaaatgaaacggcgatccctttttaa

SEQ ID NO: 233080 - DNA, 1533 bp, Klebsiella pneumoniae
atggctacgattgactccatgaacagggacaccacccgtttaagcgatggacccgactggacgttcgagttactggaaacctacctggccgaagtggaccgggtcgccaagctctatcgtcttgacacctacccgcaccagatcgaagtcattacttccgagcagatgatggacgcctactccagcgtcggcatgcccatcaactatccgcactggtcgtttggcaaaaaatttattgagaccgagcaggcctataagcacggtcagcagggtctggcgtatgagatagtcatcaactccaacccctgtatcgcctacctgatggaggaaaacaccatcaccatgcaggcgctggtgatggcccatgcctgctacgggcataactcgttttttaaaaataactatctgtttcgcagctggaccgacgccagctcgatcatcgactatctgatctttgcccgtaagtacatcaccgagtgcgaagagcgctatggcgtcgacgaagtagagaaactgctcgactcctgccacgcgctgatgaactacggcgtcgaccgctataaacgtccgcaaaaaatctctctgcaggaggagaaagcgcggcagaaaagccgggaagagtatctgcaaagccaggtgaatatgctgtggcgcaccctaccgaagcgcgaagaggaaaaagcgattgaatccgctcgtcgctacccttccgaaccgcaggagaacctgctgtactttatggagaagaacgccccgctgctcgaaccgtggcagcgcgagatcctgcgcatcgtgcgtaaagtcagccagtatttctacccgcagaaacagacccaggtgatgaacgaggggtgggccaccttctggcactacaccatcctcaaccatctctacgatgaagggaaagtgactgagcgctttatgctggagtttctccacagccataccaacgtggtgttccagccgccgtacaacagtccgtggtacagcgggattaacccctacgcgctgggcttcgccatgttccaggacatcaagcgcatctgtcagtcgcccacggaagaggataagtactggttccccgatatcgccggttctgactggctggaaacgctgcatttcgccatgcgcgactttaaggatgaaagctttatcagtcagttcctgtcgccgaagatcatgcgcgatttccgcttctttaccgtgctcgacgacgatcacaacaattatctggagatctcggcgattcacaacgaagagggttatcgcgagatccgcaataagctctccgcgcagtataacctcagcaatcttgagccgaacatccaggtgtggaacgttgacctgcgcggcgaccgatcgctgaccttgcgctatgtgccgcacaaccgcgtcccgctggacaaaggccggcgcgaagtgctgaagcatgtgcatcgtctgtgggggttcgatgtgctgctggagcagcagaacgccgacggcagcattgagctgttggaccgctgcccggcgcggccgaacgtgctatag

SEQ ID NO: 233081 - DNA, 963 bp, Klebsiella pneumoniae
atgcgtctatcattttcaggccgggtggcggccgcgctgatgctgctggcgctgggcggctacgcgacagcgcaggagcggcttaccctgcgtatcgccgatcaaaaaggcggcatgcgttcgcagctggaggcggccaacgccctgcaaaatctcccttacgacattaagtgggccgagttcccggccgccgcgccgctggcggaagccctcaacgcgggcgccgtggacgcggggatcattggcgatgcgccgttgctcttcgccctggccaacggtgcgccggtcaaagctattgccgtggataaaagcaacccggtggggaccgcggtgctggtatcccccggcagcacgttaaaaagcggcgctgatttaaaaggcaaacgcatcgccaccggtaaagggtcgattggtcatttcgtggcgctgaaagcgctggagcaggcggggatttcaccgaaggaggtgcagtgggtgttcctcggcccggtggacgccaaagtggcgttgctaaacggttcggtggacgcctgggcgacctgggagccctacaccacccaaatggtgaagaccaacgaggggcagatcctggtgagcggcaaagggctgctgccggggaataccttcctcgcggcaacggattccgcgcttaacgatccgcaaaaacgcgccgcgctgcaggattatctccagcgcctggccggcgccgagcgctgggcctacgccaatctcgacagctacggcaaaacgttgggggagatcatccgcttcccggcggagatcgcccgcgcgcagtttgccaaccgccagtcgcagtggcagccgctggccgaggaaacagtggcccaacagcaggcaacggcggacttttatctcgccaacggcctgatccgcacccggctggacgtgaagccgacctttgaccgccgttttagcgtacccgccgccgaggtgacaccatga

SEQ ID NO: 233082 - DNA, 1038 bp, Klebsiella pneumoniae
atgaccagaacccctttttcccgccgccgttttttacagctcagcggcggcctggcgctggccggggtctctctgccgctgtgggctcatgatatggcggacatggccggcggcgatgcccatccggcgctgcgcctgccagagccctacaagatcaagctggcgatcaacaaaagcgcggtatgcctcgcgccggtcgccgtcgccgagcagcagaagatattcagtaaatacaacctcgacgttgagtttgttaacttcggcagctccaccgatgtgctgctggaggcgatcgccaccggtaaggccgacgccggggtggggatggcgctgcgctggctgaaggcgctggagcagggctttgacgtcaagctcaccgccgggacccacggcggctgtctgaacctgctgacggctaaagactcgccgttcggcggcctcgagagcctgaagggtcaaaccatcggcgtcaccgacatggccggaccggataaaaacttcttcgccattctgcttaagcgccacggtatcgacccgatcagcgacgtgcagtggaaagtctacccggcggatctgctcagcgtggcgctggacaaacgcgaaatcgccgccatcagcggcagcgagccgtttagctatcgtctgctggagaccggtaagtatcagctgatcgccagcaatatgaccggggattatgccaacctcagctgctgcgtgctgggggtgagcgggagcctggcgcgggaccataaaccggccgccgcggcgctcacccaggcgatccttgaggcgcacagctatgccgctgcgcatccggaaagcgtggcgcaatccttcctcgcccatgccctgaataccagtgaagcggaggtgagcggcatcctgcacgggcagggccacggccatcacgcggtgggcgaagcgttcgtgaaagagctgacgcagtatgcggtcgacctgcagcgggtgcaggtgatcaagccgggtaccgatccccatcagttcgcggagagtatctatgccaacgtattcgcctga

SEQ ID NO: 233083 - DNA, 240 bp, Klebsiella pneumoniae
atgcagcgggagctgatcgccctctggcagcagcaggggtataccagcctgctggtgacccacgatatcgaagaggcgctgctgctgtgcgagcgggtgctggtgatgtcgccgcgtccagggcggattattgccgagtttgcgctgccgctggcttttccccgtcatcgtgataacccgcagctgctgcagcatcgtcaggatatattgcgcatcctcggccaggaggcggactggtaa

SEQ ID NO: 233084 - DNA, 615 bp, Klebsiella pneumoniae
atgaaaaagctgatcattgctcttgctgtaatggcttcttttggcgcacaggctaaccgttgcgactatccagaccaaatagctaaagatggctctctgtgtggagctagggcggcttctgtgcgtcccggtggctatacgcctccccctgaatactcaacgcctgtacagagttctgaggatcaggagatccagaagaatatagaagatgaacgtatagagcactggagagaacaaaataaagcgttaaacagtgttaaagacagcgtagttaatacaggtatgcaaaaatggctatgccctactgttagacgcacttattacacagtagaaggtgatctaaataccaaaaatcaatacatggttgttgagggtcatgtgtggtacaggatgccgaatgaatacggaaatattgaatataccaatacaacatattcagattttagtttctttccgatggatgttaacggcggcatagccttaataaatactggtgacattggcaatgctgagccagagccaaacgcatgttttaaatttacagggaaatcacctgcaatggctccagcgaatcatattgattttttagttcttaatacgtggttgaagaaatga

SEQ ID NO: 233085 - DNA, 177 bp, Klebsiella pneumoniae
atgctgatgatgtttttcgtctgttggttaagttacataatgcgcattattaccctgcatgaaaaagatgttaaatctttagatgaaatttgcgatgagttccgcaaggagttatataaaaatgaaaaagctgatcattgctcttgctgtaatggcttcttttggcgcacaggctaa

SEQ ID NO: 233086 - DNA, 960 bp, Klebsiella pneumoniae
atggcacgaaaattaattatttttggtaatggccttggtatggctttagatcctgagcacttttgtttgcatagagcattacaggatgtctggaatctcccattatttttaactgatgttgaaaaacggctcattgagcgctgtctgcgaaggtctggaccgccaacaggtgaggatgagttggatactcttcatcaagtcgttctttattgtaaggcgcttactgagattggctcggggagcgtgcattggttgactgacgatggattgcgttttcctgaaagaacttcaatttatattcataaggttgcgacaaggttgcacaattatgatggagaattacctcaaaattttataaatgcgcttgtcgattttgtaaaggcaactcgtagccatatagcaacccttaattacgataagttattatataattcctttatagataatcacatatttaatggatacagtgggtatctggttgatgggatgttaactgcagggttttctgcagaagctttagaacgaaagtattatcgaatgtttggatattatttacatttgcacggttcaccactattcgttaatgaaagcaatcgcactgtaaaacttcccagagctgagttaacgattaattctgatgtgccaagtgaacacatagttctaactcacattcaaaaaaaaccatcagttattgctgcatcaagtgttctttctacttactggaaatatcttcagtttgcgttattcgaagctgaagaggtcatactatttggttactctggtcttgatactcatctaaatatgctgattaggccttatataagatctaaaaatgtcaaaatcatcgagtggagtggaactggggaacaaaatgaaagagagcaatactgggaaaatttgttggggaaaagagtaacagtcatcagaatgaacacaattactgattttactgactggtga

SEQ ID NO: 233087 - DNA, 432 bp, Klebsiella pneumoniae
atgcggatactggtcaaaacgctgttccgggtggctgagaccgactttagcgagcaggttaagaacctgctgtcggcgctcagcggcggagagggactgatgcagccgcaggatctcttccacctgctgaccaatggtttttaccgggttgagcgaattaccgggatcctgcgggaccaggctgatgctcactccgcgcaggcggttcaggcgtttatccgaccagtcgctaatcacttcgccattgaggacaatccgcccggcatcccggcgggcattatccgccagcaggccgataatggcctgcgcggtggtggttttccccgagccggattctccgacgaaggccagcatttcgccgcgctggatggaaaagctgatgttgtgcaccacctcgcgccattcgccccgcgagcggtagctgatgcgtag

SEQ ID NO: 233088 - DNA, 519 bp, Klebsiella pneumoniae
atgtatgacgattatgatcagcgagaggcgaatattgccagcttcctgtcgaacaaaataaaacgatgcattaaatgtgggcgtgagctggactacaaagagaagttttattacacagatcgaatttgcaatctctgccgcgggcttcaaccgttcgatagtgaggacgttccagaggtagaatctgaggttaagtcaccttttccaattattaatctcgatttatcaaagtatgaggacaaagggcagcaaaacaggtctgattttgagaagcaggtctttagccgttatcccgaatggcaattgttacgagaaaaagcggaaaaagattggtatgcagctcatccgcggcctgaagaaataaactttgttactcaaatccctagttatagtttgatcattactgatgagcgcatagcagaactgattaatcagtatgatgcgaatggggcagtgaatattaaagttgaagagttaatttcattgctttgggaaataagggtttatcggaatttttga

SEQ ID NO: 233089 - DNA, 2265 bp, Klebsiella pneumoniae
atgaatgattataattttaatgttctcaacgataaagagttcgaaaaactagcaattgtgctcataggtaatcaggaaaatgtattagttgaacgatttactcctggaagagatcaagggatagatggccgtttttattcaccttcagggggttctgtaataattcaagcaaagcattatgctggaacaggcttgaatgggctattgagaacgcttgtaaatgatgaactaccaaaaataaaaaagctaaacccaagtaggtacatcttagttaccagtgttggattaacccctcaaaataaaaacaccataaaatccttacttcacccttatatagtaagcacaaacgatatatatggaaaggaaggtgtcaatgatttgcttacacaacacccatccgttgaaaaaaacttttataagctttggatttcaagcactaatgttttaattaacattctaaataatggaatcgtacaaaaaagcaagtttctaattgaagaagcgcatcttgaatcagctagatacattcagacaaaacagttcgatgaagctttagatatattaaaagaaaaacatacgcttgttataaccggtttacctggcgttggaaaaactactttagccaagcaattagcactttttcactcctataaaggatatgagatttatcacattgaagactcaattagtgaggccgaagcttgtttttgcccagaaaaaatgcaatttttttattttgacgattttctcggcgcaaactatttggatgttatagaaggtaattttgattcaaagataatgaattttatccgaagagtaacattagataaaaataagagacttgtattaacatctagatcaaacatcctcaatagagcaaaaagaattagtgatatatttaactttgaaaacatatcaaaccgtgaatatgaaataagtgtaactgaacttactcaaattgaaaaagcgaacattttatataatcacatttggcacagctccctgcccactgagttttcagatgtatactttgataataaaaattactgggagataatcaaacacaaaaacttcaaccctcgattaatatcaattataactaatagcgaacaattatccggcttgtctaatgaagaatactggccttatataaaaaacgccttgaacaatccagaggttatttgggatttatattttaagaggcagatacctgatgaaatttatgatctaattaatattgtcgtcttaaatggcggaaatattgaagaaacaaaatgcaaagaaatattaaagcgagtctttgaggaaaaacacaaaaacaattactatgtcaaagttcatcaaatcgatgacttcattaaagaatcgttaaaatcaacactcaatagaaatattcgactaaatcaaaatacgcagattgcaagtataactccttttaatccatcaatttctgactatattattaatcgcatatcaaaagatgacactaatctttctttgtatatgttggcatcaaaaacttgtcagtcgattaacaccttattttctttagcagttaacaaaaaaatagataatcacactttcaattcagttttgaatatattaatatccgactccatgagtaaggacattaatgattactcaacgcatctatattacaaagtaataaaatcagatatatctgacactgaaaaactaaaaaaaataccaccttctacatttttaaatataaataaaagccaagtatcttatgattctgcaataggtgagtgtattatttgggcaattgagaatcaaccacatttattctcaaagaaattcgctattgatttcattgactatgctctttgcccaactaaacaatactctttataccatgacgactatcttccccttgcaaaattaatgacattttatcctgatattgagcaggatattaaattcatagaattaaaagagcatataatagatttttgggagtcaggatttgatgagatccttggtgactcagctaaaatccaaaatctctcccctgatgactttgacacagcggatgatgttgctttgaattatcttcatgagtttctcaacgagtatccttttgagtttgatgaaagagatattgagtccattatgtataatactgacatctcctcacacttgccagactatagctattatcatgatgatgatgatggatatagacctactgccacccagtatgtaaatagtgtaagctacattgacgatttattcagcagataa

SEQ ID NO: 233090 - DNA, 894 bp, Klebsiella pneumoniae
atgaaaattaaaaacaaagcagcaataacctattctctgataattgtattttttgctgtagtatactattgtgcttggttagcttatccagactcattcataaaaaataacgctctgaactctactcctattcataatgctataaatttagcattttcgtataatggtgaggattttgaggattatgaagttatttcaaacgaggatttttccaaagagacattgaaagaaaaaaaagaatttgacagaataattagtcaaaacattaagcttgaaagtatactatcccagcaagaatcaaaactaaaattaataaacgtaaatctgtcaaaagcatgggctaagaatacacaggcctatgtggacgaagcgtctttaaaaattcacaaggagctgaatgttaaagaaggcgagcttaaagctatattgtcacagaagaataaaattcaagaaagccagtttaatattatgttggctgataaaaacatcgaaatatcgaaaattaaactcaggatagcaactttagaacgagatgttttagaatatgttttatcacatgctggtgacttcaatgatccaacgatcgtttctgaattaaataccaccaataaaataatagatgacgcgagatctaaattaattgtaaataataaaaaaataattaaaataaaaaataatgtgcaagatttgttgagtaaacgtcaaaaggaagatctcaatttttgggatttcgctttttacagcattggaatatcaacaacaactacatttggtgatttagtcgctaactcaagattaatcagaatgctagtttgcatacagctgttgttatctattttagtgctagccaacgtaactcaaagatttttgtcaaaaaataagaaatcactatga

SEQ ID NO: 233091 - DNA, 1227 bp, Klebsiella pneumoniae
atgtacgacaatgaactaaaagcatttgcgaaagagcaagagcaaaagttgatcaacaccttggcagatactagagaacactctggtgccattcttaaagtaagaaatcgagatgactatcagcgtgattatgcacgaattctatattcatcatcatttcgtagattacagggaaagatgcagctttttgaagtcgatcctgaaaaattcaacagaaacagattaacgcacagtcttgaggtagcgcaaatcgccagaagtatcgcatcagacctcgaactggttcatcccgtggtggttgagctggcagctctcgcgcatgatatcggcaatcctccatttggtcattcaggtgaaaaactgcttaacgaactgtctaaggatattggtggttacgaaggtaacgcgcaggcgctacgcatactgaggaaacttgaaaaaaaatatgcagactgtagtggcttgaatctgactcaccgcagcttgctttcggttattaagtatcccaatatccgctctactgctaacaaattcatttatgatgacgactttgaattttacaataagctgctttctgaaaagcaactcgatctaaaacctggagagaaaacgattgatgcgcagataatggatctcgcggatgaaattgcctatgcagcacatgatctagaagatgccctaagcagaaacatggtcacgatcgaagacattgagtatgaatttcttatttctgacgatttcaaaggcgcgttagaccagtttagggaacttgtcattcagtcaaaagaaacagcctttcaggcaatttcactcaagacctcagaagagtttgcaatgatttttcgtaaggaattgacctccaatattgtcaatcgcctcgtcacggacatttctgtaataaagaacaaaaatggctttcatgagcttggattcggaaatctgaatgccttatctgaaggtcttaaaaagctactttttaaagtcatcatgcgaaaacgtaatatactcacctatgagttcagaggaaatatgataatcaatgatttatatgttttctataacaaggatgagaattataagttcctctcccctgaacttaagttttccttgccagaaaaagacactgatgaatttatggacaagaaaaagcgggcggtggttgactatatttccggcatgatggatacgtttgctataaaagaatgggaaacgcattgcaagaaatag

SEQ ID NO: 233092 - DNA, 1425 bp, Klebsiella pneumoniae
atgtctagaaatgcattacccgaatgcccgctcgaggggtttcgtacagttgagattttaggcagcggtggcaatggtgacgttactaaaattgcaaataacgataccggggaagaatttgcattaaaaatactaaggcgcatccaagatgatacttatcaaaggtttaaaaatgaggttaaaatcgttacagaatgcggaattgaaggagttatgccaataacttcatcctatttgcctgaggaccctagaggaagtaaaccatggtatgttatgccgttggcaaagccattcatcacattcatagaaggaaaaagtttttctcaaattattaacgctttcatcccactggctgaaacattagaaagattgcatatgatgagaatttttcatcgtgatatcaaacctgataacttcctaatttataatgataggatttatataacagatttcggtttggttaaattcccagacagtgggaatttaactcctgaaaagcgtgatgttggtgctaaatttactatggctccagaaatgagacgtattgctttcaaagcggatggagaacctgcggatgtctattcatttgcaaaatcgctttggattgcattgacaaaacaaatcttaggctttgatgggcaatatattaaaggtagtactctttcgttagctaattatgagaaggacgtgtacctagcaccattggatgaactgctgcatagagccactgataacgacccggcccgacgacctcctatcaaagttttcaaagaagaactgatgaagtggcttaagttaaatgaagattttagttcacgtaatctaacagaatggttagagatccaaaatctactatttcctatgggctcaccagcgcacgcagaatggaggaaaaaagaagatataatcaatattctttccgtcattgctgaaagaaaatctttaaatcatatgttttatccgacaggaggaggcatggatcttaaaggagttgaaccgtcaggagaatcaggatttatctcattattagtaggatttcagtcagctgaaattttaaagcctcaaaaactatgttacgaatcatttggatttgatccggagtggaattatttttggttagaagcagaaaaaatagaaccaatctctggtgtggctctttcaaataacgggttcgatcaatacctaacagagttagatagaggtgcatacacaggcccggaggcctgggaatataatgaatataattgcaaaccattaccagaaacggcccgtaggataaatagatatattaagggtgcttttgtatttttcagtaaagcttcacgatacaacagaacatcaagtacttatgatgcatggcaaaacataggtgaggtaaaatttagagagttaattgaaaaggctgccgcgcgatacagacgttaa

SEQ ID NO: 233093 - DNA, 444 bp, Klebsiella pneumoniae
atggaaattatttttgacccgtcgttaatcgcccttaagcagaatatttcccgtgcggaagaagccatcgaactggcgggttcattacttgccaggcgccagatttgcagcgccgaatatgtcaacgagatgctgacggtatatgaagattttggcgccgccatcgtgatagatgacgggattgccatgccgcatgcccgcccggaaaaaggggcattacagaccgggttctcacttgtcaccaccgccacgccaatctccttcggccacgatgagttcgatccggtttccgtggtcatcgcgatcgccggcgccgatgctgacagtcatatcaaaatgatccaactgatagcctcgctgatcgagtcagatattgtgacctttcttcagcaggaaaatgacgttaattcagtcttacatttcattcaaaaacaaatggagtag

SEQ ID NO: 233094 - DNA, 1089 bp, Klebsiella pneumoniae
atgcgcgttaccgattttgcttttgaactacccgaatctctgatcgcccactatccgatgcctgagcgcagtagctgtcgcttgctctccctggacgggccgacgggcgcgctgacgcatggcaccttcaccgacattctcgataagcttaatccaggcgatctgctggtgtttaacaacacccgggtgatcccggcgcgtctgttcggtcgtaaggccagtggcggcaagattgaagtgctggtggagaggatgctggatgataagcgcattctggcccatattcgcgcctcgaaagcgccgaaaccgggcgccgaactgctgctgggcgatgacgaaagtattaaggccacgatgctggcgcgccacggcgcgctgtttgaagtggagtttaacgacgagcgcccggtgctggagatccttaacgggatcggccatatgccgctgccgccctatattgaccgcccggacgaagacgccgaccgcgagctctatcaaaccgtctatggcaccaggccgggcgcggtagccgccccgaccgccggtttgcatttcgacgaaccgctgctggacaaactgcgcgccaaaggcgttgagatggcgtttgtcaccctgcatgtgggcgcgggcaccttccagccggtgcgcgtcgacagcattgaagagcacaccatgcactccgaatatgccgaagtgccgcaggaggtggtcgatgcggtgctggcggcgaaagcacgcggcaaccgcgtgatcgcggtgggcaccacctcggtacgttcgctggagagcgcggcgcaggcggcgaaagacgcgctgatcgcgccgttcttcgacgatacgcagattttcatctacccgggttatcagtaccaggtgatcgatgcgctggtgactaacttccatctccctgaatccacactgattatgctggtgtcggcgtttgcgggttatcagcacaccatgaacgcctataaggtggcggttgagcagaagtatcgcttttttagctacggggatgcgatgtttatcacgtacaatccgcaggctatttctgagcgtcccttaaaaggccggtacgccggcttgtag

SEQ ID NO: 233095 - DNA, 333 bp, Klebsiella pneumoniae; identical to SEQ ID NO: 134691

SEQ ID NO: 233096 - DNA, 282 bp, Klebsiella pneumoniae
atgatcaaccgcaacaaactggagcacattctcgaatacgccaaacagcagaggcacatcggccagtcctgcaaggttccgccagaagatatggtcgaaatcatggagcgattgctcaacgctggcaactctcaggtaattccggatggttcggcgtccatgctacggcgctggttggcatttggtcgcggtatgcaaaatgcaggtagccagttgcctcgcaacctgattgcagaaactgagtccatgctcgcagctgcacctcaggaggtgaaaccataa

SEQ ID NO: 233097 - DNA, 198 bp, Klebsiella pneumoniae
atgaccatgacaatcggccctatcacgttaactcttgatatgagagagcaggttgcacgttcgcgcgaagtacttgacgagttgcagcgtagagcgagtgggcttagccctctaatctcagaggaggacgcgctacgcattctcctcctcggtatgacatttgattacctgaaggccaggaaatcattgggggattaa

SEQ ID NO: 233098 - DNA, 345 bp, Klebsiella pneumoniae
atgaaaaaggctcttcttttgttgtttgtcgctttcagtggaaatagttttgcgacgtttttgacaggcaatgacctttacaccagatatcaagcatatgtgcgaagtgacaacgggacggcttcaagagaagactatttcgcggcatacgattatatggggtatgtaaccggcgtatgggacacattggggtcagagctaatttgccctcagggcagcattacccggggacaaattgccgatgttgtcggtatgggattgcagaaaaatccacagaccagagccgcagatgcggacaaattaaccgccttatatcttatgcagtcatttccttgtaaaaaataa

SEQ ID NO: 233099 - DNA, 1137 bp, Klebsiella pneumoniae
atggcaaaagaacggtttgattttattgactccttgcgtgggttggcgatccttggtgtgatttttactcatgccggatcgcaaactctacatggcgattcttttttatcgaaagccattggcaagctcgttggatttggtggaatgggtgtacctcttttttatgtagtaagtgcatttaccataatgcttttatataaaaagagatacaaaacagaagataattatgtgctcatgttttatattcgtcgctttatgaggatagccccggtttactggggtgggataatattatacaccttagtatacggggtatatgaaagcaggggttggcaaaactcacctgagttgtggcattatccgtttcattttttattcataaatatgactaatccatatactccaagttctgttgtccctgggggatggtcaataagtaatgaggtgatgttctacgttatatttcctctgctttttctgctgcttaaaaacttaaagcaagcagtaatattttttgttttatgcgttatttgtagccctgtattcgaggttttaggtaactacttccttgaatcctatttccctgatgcaacagggaagtacagagaacagttcacatacagatggttacctaatcagttgtcatgctttgcagcaggatttgtattttattatatgtatataaaaatggcaggtgaaaacatcaaggaaaggtttacagataagcaaggggtatattatatggctgtgcttataatatctatacctttcgtaatcttagccagaaaagggccaattcttgaaaatcatttttgggctatttggtttgttgcgttagcaactggattatacctgtttaactggaccattctcgttaataaatttatgacatggattggaaagataagtttttcgtgttatatatttcactttttaatcataaaggccgtattgtcgacaaacccgttccacggagatgttgcgagttttatatatacctcgctactatctcttggcataacgatagcagtggcatcaattagctttaaatattatgagtctttctttatgaagctcacaggcgtaataataggtaaagttaattctaaaagaatacgagccggacaggttgaatag

SEQ ID NO: 233100 - DNA, 408 bp, Klebsiella pneumoniae
atgccaaatgcacaccctgacctgtggcagcgctaccaggccaccaaagcggccagtaccgcgaaatatgcccgcgatatcgccgcggaaatggggatcagcgaagccgagctgaccgccgcccgcctcggccatgatgccgtgcgcctgagcgatgacgcccgggcgctgattgccgccctggagcgcgtcggcgaaaccaaatgcatctgccgcaacgagtatgccgtgcatgagcaggtgggccagttcacgcaccagcacctcagcggccacgccgggctggtgctgaacccgcgcgcgctcgacctgcgtctgttcctcagccagtgggccagcgccttccatctgaacgataatggccgtcaggcatccagtttttcgaccaccacggcgacgccctgctga

SEQ ID NO: 233101 - DNA, 597 bp, Klebsiella pneumoniae
atggcggcctgggagaccctgatcgcggaatatcgggtggcggcgccggcaccgctgaccctgcgcccgctggagccggtgaaatatgccgataccgccgatggcgccgccctggagaacgactggcgcgcgatgaccgacgttcaccagttcttcggtctgctgcgtaaatatcagctttcccgccagcaggccttccgtctggtgagcgacgacctcgcctgccgcgtggatcgccatgcgctgccgtcgctgctggagacggtgcgccaggagggcaatgaaatcatgattttcgtcggcaatcgcggctgcgtgcagatctttaccggcgccctggaaaagctggcccccatgcgcggctggctgaatatcttcaatactacttttaccctgcatctgcgcgaagagagcctcgatgaagtgtgggtgacccgcaagccgacttcggacggacacgtcaccagcgtcgaactgttcgctaaagacggcacccagattgcccagctctacggccagcgcagcgaggggcaccccgagcagacgcaatggcgccagcaggtagaccgcctgacccgtgaagggcagcccgcatga

SEQ ID NO: 233102 - DNA, 366 bp, Klebsiella pneumoniae
atgacacaagcgctgcgacagaacctgacgctggcagtcctggtactgactgggatcaatatgcggccgctgcttacctccattggtcctttgctgccggacatccgcgcagccagcggcatgagctataccctggccgcactcctgaccgcgctgccggtgatcgcgatgggggtgctggcgctggccgctggctgggtcgatcgctatatcggtcaaaagcgcagtattgcgctgagcctgctgattatcgcggcaggcgccctgctgcgggaaatcgccccgaatagtggcttactgctcaccagctctggccggaggaattggcatcggcattattcaggccgccattccggcggtaattaa

SEQ ID NO: 233103 - DNA, 240 bp, Klebsiella pneumoniae
atgcaccgtcagtcagacatcaatcaggcattccgcgagtcggtattgcgcaactccaaaggctaccagtacctgcacacaaaggattttgtgtcagcgctgcgccggcgtgggctgcactttaccgactcagaggctaatgcgtggatatctagagagcagacgtactttgtcgacaaaaccaccgaccatagcgaaaaccgtttgtggatgatggccaacatggggagggttctgtaa

SEQ ID NO: 233104 - DNA, 3381 bp, Klebsiella pneumoniae
atgcctgacattatcccgcaccaacaacagccggaacgtcttcataaatttcactccctcaagggagggcaatactggcgcgcaaaaaacgatattcctgagcaatgtattgaacaggatgaagtgttgctgattgagtcgctccgctgggttgataatgcactccatactgtgatcctccgcacccatccgtcaaaatacggcaaagactttgttttcaaatttaccgatgctgctggccgtagctgccgcaccacgaaatcgtttaaagagcatcgatttctgtttaatgactttctggataaatttgaatttgcagatgatgggcaggatatccggagccaggaactgcttgcagctcaaaaccgggttagccagctgactcagcaaatgaccgaaaccatgtctgatcctgaagcactgcgtacggaactcctcggcagggttgaagcaaagaaagccagttcatcgacgccaggcgatgacaaaaagcaacttcctatggttatggagctgtcttcatcaactgagatagcgtctcttggcacagctctgtcatcaggtatcgatgaagccaaaatagcacagctccagcaggctgttgagttcagacatgaaatcgcacaggcgcaaatcgactggattaaagaaaagaataatgcgatttcgagagccgtcatggctattactccctatctggaagagtcggctgccgcccagcttgccattgccgaagaaagtcgcgaaacgctgaataaactgatggacggtataaagtcccttgacctctacatcgggaaagatgtggtggtgaacactatcagggagggtgaatcagcaccgccacacattcccttgacgttcgtacagcgtaagctggccgtcgatgaggaaacggctgtttttctcgatataggagaatggtttgattttgaaaagttgccactttttttccatgcattaaacaaccatccagggctggtggagcagatcttcccgtcacagcgctgcgtggtatgtatgaccactacccgtcgctatattgattatcaggaccgttgggctaactgggagctcaatgcaaaaaaccagacggtctttctgatggttagggacggcgaacggctgttccaggtttactctggagtagagtctcacctcggcgctcatacactttttccaaccaccgatgaacagggaaatatctttcgaggcattgacggttcgcaggttacgttcaatgacgtgtcatacactgacaagcttaaagcgcatgagatggttgctctgcattattaccggtttcttatcctgtgctgcgggctcgaccaccggcttaagctgtttggcgagttctacgaccctcaggaccgcttaagtttcgtctctatggcgttccaggagaagtattgtcgattcatttatgatcatgatggtactggccttctggacgatcctgatgcgaaagtgcgcccctctattgaggagtatataacccaggccaatagccatttgcgctcaggttcaagggtgttctgcgagtggagagctgtttgtacaccaaataccgcgccgggcgttgtgaaagtcgatactggtaccagttaccgatcctattattttaccgccgatttcatcaatgatgagggaatggcggtggcctttacccgcaacaatgagatttgcgtggaggttccggtcaaaaaagatatctaccgtcgcacccgggctaatgatgtacgtgaatttaatgcgaaagtatccctcacgaattttcagcgtgatccgtgggatgacgccagcagcgtgggattcctctgtctggacgctgtaaaagccgatgatcttgattattacatacacagccgctccagtcgtaggaattttatgtactacataaagctcttcaaacgcctttcagctgtcctgagaacggaagaagtgcaggagatgccctatcggcaaaagctcatcagagcgctggtggatggcaatataggcactaaagctaaccgtgctgaaatcgtcgacaagacagtcatcacctggcgggcggacaaaaaaggtcagccgcttagtgaaggaatagacaacgagaaaagctggaaagcattacttggcatgatggacctgatcgcctggcgcggtttgagccataaagaggctgcagtggagatggctatctcccggggtagcaaaccgttacgtcttatagtcacgacaaatgccagactggctctgtatgttacccctacagccgaggaacgtgacgatcgcgtggaaaaacataagtgggccatgctgctgacctttaaaatgtcagcaaaagggctgactcttgattccagcaaacctgcgttgctaagcaaaaatagtgtttgcgaaacaaccctctatgaatggccggaggccaatgagtggaaagggttgaaatcagtgttctccagctttcacgaaaagcaaagagcgtttgaatatattgagacaggcaaagaggacctccgaaaactgtctccggctaacccctcagaattcgaggctggggtacgtgaatggatgacggcctactgcgaaatgaatgattaccgcaaaaccgggggccaggtgcagcagccgagattgatgataccggtaggcatctacattaaccggggagactggcagtatatctacgtcacaacagaaagtgaggccgctgggtatttttatcacaacagcagcgaacgcctgaaaaaggaactttatcaggaatatgtttcacgctttgctcacccggaaggaaagctcgaaaggcttgaaactcgggggaacaggctggcattgggcatgacgaacagaactcccgacatcggcatgttctgtgcagatcgcaatgttgaaatggatagcgtgaattatggacctttatcttacagcgcctacagtcagcttcagcgaattgaaaaccgattgttttttgtcctcgctgaagcggaacgtgggttacatcgcaggatttatattgccgataaccttaaaagcgataatggtgagtttatcatagataaactccttggttcttcacatctacaggtgcagtctgccgttgatgtattcgaagtcattctacctaagtcgttgtcagaagggccgctgccggtaatcaaatcgagtggtgaaatctaccgtattcaccactggtttgatatctgtccaaaaggcgctgaggctaatatttcattgagcaatatcgaggcaccagtaaataaggttaccagacacagtttcgatagcagggaggcggcaatcatgcatatcctgatgcagaaggaaaccgttaagaaaagtgtctccggagacagatccaacacgccagaaggcgttgtcgaaaggtggtattag

SEQ ID NO: 233105 - DNA, 663 bp, Klebsiella pneumoniae; identical to SEQ ID NO: 95376

SEQ ID NO: 233106 - DNA, 552 bp, Klebsiella pneumoniae; identical to SEQ ID NO: 185233

SEQ ID NO: 233107 - DNA, 309 bp, Klebsiella pneumoniae
atgactctgatgactctgacggtactgatgactctgacggctctgatgactctgacggctctgatgactctgacggctctgatgactctgatgactctgatgactctgatgactctgatgactctgatgactctgacggctctgacggctctgatgactctgacggctctgatgactctgatggctctgatggttctgatggctctgatggctctgatggctctgatggctctgatggctctgatgaccctgacggctctgacggttctgatggctctgatgactctgacgtctctgatggttctgtaa

SEQ ID NO: 233108 - DNA, 1875 bp, Klebsiella pneumoniae
atgaatacatcagcggtatttgagtctgccggattgtcgttacgtaaggtccaacaggattatatcgaggctgcagctggtgcactgactcaggatcataaagttgcactgattagtgctgaaacaggtgtaggaaaaacgctgggctatctggtaccggcgcttctgattctgctgaaaaaccctgaggcaaaatttgtgatcgccacgaattctcatgccctgatgcaccagatattcagaagcgatcgtcctctccttgaacagatagctgaacaatgcggcataaaagttactttttcccggcttatggggaaagcaaattacgtatccctggagaaagtacgtggactgttactcatggacgaatttaccgatctggatacggttaaggtccttgaaaaactcgctaactggtcaaaacctctggttgagtttgaagaagagtatggtgaactgccagcgcagatcacgccagagatggtcacctactccatctgggatgatatacaggacattgatgatattcgcctgaatgctctcagtgctaactttattgttacgacccatgcgatggtaatggtcgactgtatgtgtaatcaccgcatcctcggtgacaaagaaaatatgtacctcattattgatgaggcagacatttttgtagatatgcttgaggtctggaaacagcggcgcttcaacctcagagagttgactagtgcgttcaatgaacatattccacgtaatggcgtgcatgtcatcgaccagttaatgaacgacgtgacttcgatagcgggcgatctgcatttttgtagtacgcctgcagcggttgccttgtttgacaatagctttaacgccttatcaaaggtagggcgggaaataaaaaatgaagcggcccggaaagctttctttgactgtatctacagctgggaaatgctcggattgtccggggggcaaaagggtgtaggcgtttccaataaacgtcgtgaaccagccctgatcgctgtaaacccgtttatcgggatgaatgtgggcagatactgcactcaatggcgtagtgcgttactgacgtcggctacgctctcaattaccagtaccccagagaccggaatggagtggttatgtaaagctctggggttaaccagcgatacgatttcaatcaggaaaatattctccccagacgtctatggctcaatgaagctgaccatcgccggtgctgattttccaaaggtgttcgatgacccgaaagaacagatattttcaggtcaatggttaaaggcagtagttgaacaattgtcctgtattcacgggccagctctggtattaactgccagccattatgaaacccggatgattgccaatcagctgggtgaggtctcgcaaccagtttatattcagaaagcaggtcaggccctgtccgaaattattaaacagtatcaggagaaaccaggaattctgatttctgccggtgcttctgttggtgtgagcccacgaggcgagaatggggaacagattttccaggatttaatcatcacccggatacctttcttacctccggacagaatgaaggctgaaagcctttatgggtatctgaaggaacgaggctatagtcgtacctttgaggcagttaaccggaacatctacctggaaaatttgcggaaagttattcgcaaagcaaagcagtctgtagggcgggggattcgtagtgaaaatgatactgtcaggataattatcctcgatccgcgttttccggaaccgactgacctttcgtctaaacatcggtcgctggaacacattattcccgttcgatttcgtcgtgaatatcgttcgtgtgaaattttatcaccggcgtattttgaagaggatatccagtgttaa

SEQ ID NO: 233109 - DNA, 567 bp, Klebsiella pneumoniae
atgattttctacgataatgcgtttcggttgcgtatctctcacacaagtgtttaccggatccaccagcacctggattttttcatgcaggaacgtaagggagagaagctgccgtactcttttaaaatttttcccggtaccgggaatgattcgagactgctggtccgcacagccacagctctggagctgccaggggagaaaaaaagagagcttattctctctgagggccatgaaattaagttcattacgtcaatggccatctttcataaaggaacaaagttagaaggccatggccgacgccagtttgctccatctgatgaagcgagttatcagatggccctcaccaaattagcgaaggctggtcttgactcccgtcaaatcgtcgtgagtggcccggaattcgtccatatcgacaagggcaatgctcgccgtggttttatgcttcctgtcttcactgttcagggggccgccactatcagcaatcaacaggaagctgaaatggccatcgtttatggcgtcggccctaaacgcgtttttggttgtggtttcatgcatctggcaggggagtag

SEQ ID NO: 233110 - DNA, 687 bp, Klebsiella pneumoniae
atggcggacggaatttccgtgtggatacctgtgattacagcgctggcaggtataggaggcgcattagggagccagtacatttcccatcggtttaccctgagtcgggagaagaaggcgtcagaagataaaatgcagagggagcgatattttattgcaaccgggctggtctttcttcttgagcgatttgcgcagagatgcgtttattcagcttacgagtccggatttaacgaacccgaacacgggcatttcagagtgaatcatactctaccggagttgagctatgacggcatagacggtgactggcgatctcttcctccggagcttatgttccgtctgagtcagatgccggttctgcagcaggaagccaagcagtcaatcgagtcagcgtttggaaatgacaatccatatgatggtagtaccggtctgtcagaaattaataaacagtcatcccggcttggcctcagggcaatccgtctttcgcgtgaactccggcagatctgttctatgccgcatgatgacctctctgcccatcactggtctgcctggcgtatgctttcaatcgcgcgtgcgcggagcattaatgctgagctgcgttatgcccgcagtcaccacaaatatcatgcttctcttagattgatggaatctgttgatagcttagagagcaccggattgccagacaaagaatag

SEQ ID NO: 233111 - DNA, 1005 bp, Klebsiella pneumoniae; identical to SEQ ID NO: 191081

SEQ ID NO: 233112 - DNA, 690 bp, Klebsiella pneumoniae; identical to SEQ ID NO: 191082

SEQ ID NO: 233113 - DNA, 879 bp, Klebsiella pneumoniae; identical to SEQ ID NO: 191083

SEQ ID NO: 233114 - DNA, 618 bp, Klebsiella pneumoniae; identical to SEQ ID NO: 191084

SEQ ID NO: 233115 - DNA, 1149 bp, Klebsiella pneumoniae; identical to SEQ ID NO: 191085

SEQ ID NO: 233116 - DNA, 477 bp, Klebsiella pneumoniae; identical to SEQ ID NO: 191086

SEQ ID NO: 233117 - DNA, 780 bp, Klebsiella pneumoniae
atgacacgcacagagatgcttatgcaggatattcgccgccggattatctccggtgcactgcccgccggagagtgtctgccttcggtgcgccgctatgcggcacagatgcaggtgtccccctccaccgtgatggaagcctacgagcggctggccgcgacggggattatcgttccgcgccgcggggccggtttctttgtgacagggtcacatcaggccccgcttaatctggtggaaaaaaaagcggactatcagcgcgatgtcgatcccttctgggtgtcccgccagtcgctggatgccgatccggcggtgctgaagcccggctgtggctggcttcccgccgactggatgccggtagaggcactgcgtaaggcgatgcgccagctcgcccgttcggacgccagcctgctgagtgattatggcagcacgcgcggagccgtcgccctgcgtcgtctgctgctgggccggtttgccgccgaagggctgaccacctcgctgcagaatattatgctgaccggttccggtacccaggctctggatctgatctgccgctttctgctgcggccgggggatacggtgctggtggatgacccctgctactttaactttcaggcgctgctgcgtgcgcatcaggtaacgatggtggggatcccctatacgccttccgggccggacgtcgccgcctttgaacaggcgctgaccctgcaccgcccccggctgtatatcaccaactcggccctgcataaccccaccggggcctgcctttccgcacagacggcatga

SEQ ID NO: 233118 - DNA, 1458 bp, Klebsiella pneumoniae; identical to SEQ ID NO: 191090

SEQ ID NO: 233119 - DNA, 2769 bp, Klebsiella pneumoniae
atgaaaaggacggcggacctggtggagcgctacaagggcaccagcaccgccgacgtcttaaacagcgcaatcggcgtgtacagcggcgatgcgcgcaacagcggcgcgctggatcccaacgttcgcggtattcaggggcaggagcgtgtcccggtgaccgttgacggcaccgagcaggcgctgaccgtctggcgcggctacaatggcgccaataaccgcaactatattgacccgaacctgatcagcagcatcgaggtggagaagagcgccagcctgaccggtgacgtcaagacctcggtcggcggcgggatcgccattaaaaccatcggcattgatgatgtcgtggcgccgggcgaagagttcggtatgagcctgaagctggagaccagcagcaactcaaaaacgccgcgcatacccaactatggctatggcgacgactaccgcgaccacccggagctgtataaagaccgtaacaactacgtcttctccgatccgacggtcaatatcgatccggcttcaaaggggagtgccggcttctttaacctgaaggataactccggccggttggcggtgggcacacggcaggagcggtttgacctgatggcggcctacagccatcgtcgccagggtaactacttttccggtaagaacggggcaaaacgctatcgcgagccggtgcagctgaacggcaatcagacctcgggcgaaagcgtcgggccggatccctatctgccgtttgccgccaacgtcttcgagccgggtaaagaggtggctaacacctccatggagatggagtcctggctggtgaagaccaacctgttcctcaccgacagccagacgatcaacgtggggttccgccgcagcaccaatacctacggtgaaatcatgccgtcgcggctgggctacaccaaactggcggaaacgcacacccagccgcagtggccgctggccaacttcagcgttaacgcctggaatctcggctacgcctggaagccggaggacaaccgctggatcgatctggacgccaccctgtggaccacccatgccgttggcaacaccaatacctccggcggctatccgcgtgaaccgcgggcgagggactatctgtttgagtatggcctgcgcccgcgtaatccggatattgacggcagcctgatcaataccgccgccacgaactcgcgcaacgaccgcaccggcttcaccctgcgtaacaaaatggcgctgacggacaatctcgatctgacgctggccggggagatgatgaaggagaagctggactccaacgatacctatattagctacacggcgagtccgttcattgccgcaccgcgtaaggggcaccgccaggagggcagcgcggcgtttaattttgactaccgcccaacgagctggctggagctgaatgccggtgcaaaatatatcaacggctgggtagaagacgatttcctgaaggaaaatctgaataaccgcacgcgttttagccggacggatgagatcgtttctaagactatcagtaccagacgcatgctgaccagcgaggagtatagtcgcgcacgggatctgggctgggagtcgagcggaccgaacgacggtacctatgataatctcctgatcctcgccaaagtactgaacagggttaacgagtatggtcagccagtaatgcaatatggtactggtagcaatggtatcttcttcgttgatgaagaggccgcctggcagcctgatggcgacggccgttacaccaccgcgacgaatccgtaccataacggcacgattaaccctgaccagaccgcgatcgatccggtctccggtttagaaggccgcgtcatccagggagggggatctgtcggtgatgtgcgtcaagagctccctgagtccgagcactggaaacagccgggcaagcagaagaacagcggatgggcaccggcctttggcgccacggcgtggatcaccgatgatgacagggtctatgcccgctataccgaaacgctgcgcctgccaaccatctttgaaaacacctcgggcgccggcggcggcgatccgcgtcgctatacgccgaatatgaagtggcagccggagcgcgggaaaacggtagaggtcggctacgtacgcaatctgcaaaagctgctgaatgccgaacgccatgcggacgttaaaatcaactactacaacacggtaatggagaatgtgttcgaccgtaacggacggctggagtttacccaggtggacaagcataaaaccgccggtatcgaagcccaggcccgctacgacgacggcggcttctttatggacatcggtattgattaccgcctgaagaacgaagtctgcgacagccaggccgcggcccagctcgaccccattaatacctaccatctgaagcagtgcgtgacggccggcttcccgggcggcttcctgcgcacccagctgcagccgaaatacgccattaactccaacctcggtctgcgctttatggaagagacgctggaggtgggcacccgcctgcgctataccagcagcgcgcggaatagcgatgagccagatctgatggccaagttcccgaaccgttactcgatggccaacaacagcccgatgcactggacgccgacgtttacggccgatctctataccagctatcagataaaccgtagcaccaacatagaactgctggtgaccaacctgacggatcgctactacatcgatccgctcacgcgcagcatgatgccggcccccggccgcacgctgcgcctgagcctcagtagtcagttctga

SEQ ID NO: 233120 - DNA, 351 bp, Klebsiella pneumoniae; identical to SEQ ID NO: 191092

SEQ ID NO: 233121 - DNA, 453 bp, Klebsiella pneumoniae; identical to SEQ ID NO: 191093

SEQ ID NO: 233122 - DNA, 507 bp, Klebsiella pneumoniae
atggcgcgatctgtcccgtcgccagccgggccgatcactcccgaaagcagcatccccccggacgacagactcaacgttgtgcccacgtcgcggctaacatcactgccaccgcttgccgcactctggcttctgccttctgccttctgccttctgccttctgccttctgccttctgccttctgccttctgccttctgccttccagcgatcgttcggacatacggtccggcgtaaagggaatacgtattttcccgcacggtttctgcacaccgcgccttgagacgcgtgctctgcccgatcggagcatcttcaggttgtcgtcaggttgtcgtcaggttgtcgtcaggtttcctaaggaggcacgactgacaacgacgggttacccggcgaaacggatcgctacgcgtagcgatattgcgtcgttggcttgttcgttttgtgatctcgattgtagtactgaatttaaagcttgtactacaatgagcgcgtactgtgaaagcggacgttaa

SEQ ID NO: 233123 - DNA, 855 bp, Klebsiella pneumoniae; identical to SEQ ID NO: 191094

SEQ ID NO: 233124 - DNA, 258 bp, Klebsiella pneumoniae; identical to SEQ ID NO: 191095

SEQ ID NO: 233125 - DNA, 1311 bp, Klebsiella pneumoniae; identical to SEQ ID NO: 191096

SEQ ID NO: 233126 - DNA, 1005 bp, Klebsiella pneumoniae; identical to SEQ ID NO: 216447

SEQ ID NO: 233127 - DNA, 330 bp, Klebsiella pneumoniae
atgctgttgaaaacgtctcgacgaactttcctgaaggggttaaccctctctggcgtagccggaagtcttggcgtatggagtttcaatgcgcgttccagtctgagcctgccagttgccgcgtccctgcagggtactcagtttgacctgaccattggtgaaacggccgtcaatatcacgggcagtgagcgtcaggccaaaacaatcaatggaggcctgccggggcccgttcttcgctggaaagaaggtgacaccattaccctgaaggtcaaaaaccgtcttaatgaacagacgtccattcactggcacggcattaggcactgttgcaaatag

SEQ ID NO: 233128 - DNA, 690 bp, Klebsiella pneumoniae
atgagcgcagaaagctcaggagtgtttactttgaaagagatcaaccggatcaagattatacaggacgtcattgaacgtcgcatcacaacgcgccgtgcggccgagcacctcggtatcagcgacaggcaatgccgcagacttcttgcccgttaccgtgaaggcggaccgcttggtatggccagcagacgatgtggcatgcgtggtaaccgccagttgccacccgggctcgcagatcaggctctggaactgatcaagacgcgttatgctgatttcggtccgactctggcgcgtgaaaagctcgaagaactccacggactgtttcttggcaaagaaactgtccggcgcatcatggtgcgggctggcttatgggttccccgtaaacaacgtgccgcaaggatccctcaaccacggtaccggcgtccgtgtactggtgagctgatacaaatagatggctgtgatcacgactggtttgaaggccgtggcccggcctgcaccgcgctggtctatgttgatgatgcaaccagcaaactgatggaactgttgtttgttaaatcggagtccacgttttcttacttcgaagccacgcggcgctatatcgataagcatggtaaaccgctggcactgtacagcgataaagccggtgtttttcgtgttaacaataaaggcactgttgcaaatagtcggtggtga

SEQ ID NO: 233129 - DNA, 1023 bp, Klebsiella pneumoniae
atgaccatcaccactgtcggtatcgatcttgctaaaaatgtgtttgctgttcactgcattgaccaaaatggtaaagctgttctggttaaacccaaggtgtcgcgtgcagcactttctgaactcatcgcaggtttacctccctgtgtcattggaatggaagcctgctcgggtgcccactattgggcaagattattcaggcagtatggccatgatgtccggttgatggctccgaaatttgtctcaccctatcgcatggcgggtaagaccgggaaaaatgatgcagctgatgcaatagctatttgtgaggcagtgcagcggccgcatatgcgctttgtaccagtcaaagacgaaagccagcaggcaatgcaatgcttacatcggacaagacagggatttatccaggaaagaacagcgacgtataaccgtcttcgggggttggtatctgaattcggggttattgccccacaaagcactgatgctctgcgtcatgctgtttctgaccagaaggaaactctgccagtacaggtcaggctgtgcattgatgatctattagcacatgtcactaatattgaagagaaaatcgccgaatatgacagggtgttatctcgtgttgccaaaacagatcatcgcagccagcagttaatggaactgaaaggtattgggcccacaacggcgagtgcgctggtcgccagtattggcaatgcccatgattttaagaacgggcgccaactggcagcctggttggggctaacgccatcacaatacagtagtggcggaaaatcaaagcttggcaggataacaaaagcgggtgatgcctatctgcgaaccctactggtccagggagcccgttctgtaatggtaggggcagagaatagaacggacccgtttagccgttgggtctgctcgttgattggtaggcggggatactggcgtgctgtcgttgcaatcgccgccaagaatgcgaggttgtgctgggcatcattacattacggcgatgacttcagactgtattcaacaacatga

SEQ ID NO: 233130 - DNA, 2628 bp, Klebsiella pneumoniae
atgcaaaaagactgtatccgtcatctgcacccctatgccatgcgaactgacaaaggatttatgctggcggaagaaatgctcagctggctacataacaataatgttattttcccttctgttgaagtgatcgaacggacgcttgccgaagtcgtcacgctcgctaacagatcggtattttcgacacttaccgcgcaactggaaaagcagcataaatcagcactcgacagcctgctcatatcagagggtgaacaaccttcccgtctggcatggctgctacagcctccgggtaaaataaacggtaaaaatgtgctgcaacatatcgaccggcttaattccatcgctgcgctggggttgcctgatggtattgcactttccgttcaccagaacaggttgcttaaactggcgcgtgagggccggaaaatgagcagcagggacctggcaaaattcaccgatgtcagacgttacgctacgctggtttgtataataacagaggccagggccaccctgactgacgaagtgattgatctgcacgagcgtatcctgggtagtctgttcagcagggcaaaacgcacgcaggccgaacggctccagcaaacgggaaagcttattcagagcaagctgaagcagtacgttaccgtcgggcaggcgttacttaacgccagagaatccggggaagatccctggactgcaatagaagatgtccttccctggcaggaattcatcaacagcgtggaagaaacgcggtttctttcccgtaagggcaatttcgacgcgcttcatctgatcaccgaaaaatacagtacgttgcgtaaatatgccccgcgtatgctgtcagcattgcagttcatggcgacacctgcggcgcaggcgctcagcgatgcgctggacaccataacggaaatgtaccgtaaacaacttcgtaaagtgccgccatcagcgccaacagggtttatccctgaaagctggcgaaaactggtgctcacgccttcaggcatcgaccgcaagtactacgagttttgcgtactgaatgaactcaagggtgcattacgttccggtgatatctgggtaaaaggatcgcgccgctacaaaaattttgatgattatctcatcccgactgctgagtttgagaaatcccgacataatgaccagttacagttggccgttcagaccgatagccaggcataccttcaggcccgtatgactcttcttgcatctcggctggaagaagttaacgcgatggcgcttgccggtgatttgcccgatgtagatatctcagataaaggcgtaaaaatcactccactggagaacagcgttccttcaggtgtttcgccctttgcagatttggtctatggcatgcttccccatccgaaaattacggagatactggaagaagttgatagctggacgggatttacgcgtcacttcgcgcacctcaaaaataataacgtcagaccaaaagacggaagactgttgctgaccaccattctggctgacggcatcaaccttgggctgacaaaaatggcggaatcctgccctggggccacaagatcgtcactcgaaggtattcaggcatggtacatcagggatgaaacttattcagcggcactggccgagctggtcaacgcacagaaagagcggcctctggccgcattctggggcgacgggacaacatcgtcgtcagacgggcagaactttcgggtaggcagtcacggacgttatgccggtcaggtcaatcttaaatatggtcaggagccgggcgtgcagatttatacgcatatctcagaccaatacagcccgttctacgccaaagtgatcagccgggtgcgcgactcaacccacgtgcttgatggcctgctgtaccatgaaagcgatctggaaattaccgagcattacaccgataccgcaggcttcactgaacatgttttcgccctgatgcacctgctgggattcgcttttgcgccaaggatccgtgatcttcatgacaagcggctgtttattcatggaaaggccgagcgctatccggggcttcagtctgtcatatcaacaacctgcctaaatatcaaagacattgagtcgcactgggatgaggtattgcgcctggcaacctcgattaagcaggggacagtcaccgcatcactgatgatgaaaaagttagccagttacccaaaacagaatggacttgccaaagcgctgagagagattggccgcatcgaacggacactatttatgctggactggttccgtgatcccggtctgcgccgacgcgtgcaggcggggctgaataagggtgaggcccgtaatgcccttgcgcgagcggtctttttgcaccgtctgggtgaaataagggatcgtgggctggagaatcagagttatcgcgccagcgggctgacattactgacagcagcgatcacgttgtggaacacggtatatatagaaagagctattgagtcactaaaacgaaagggtatcccgataaatgagcaactggtctctcatctttctcccctgggctgggaacatatcaatctgagtggagattacgtctggcgtaataatcttaagctgggatccggaaaataccgctcattacgtacagtcgataccgctttgtacaaaaaacagtcttag

SEQ ID NO: 233131 - DNA, 609 bp, Klebsiella pneumoniae; identical to SEQ ID NO: 213515

SEQ ID NO: 233132 - DNA, 702 bp, Klebsiella pneumoniae
atgaagcgtattgccctttttttctgtttcatttttagttttgcggcccacgccaacaatattattgttaacggtacccgctttatttatccaggaaatgaaaaagaaataacggtacagctttcaaataacgccgaccgtccggcgctggcgcaggcctggctggataacggcgatgccgatgccacaccggataccattaccaccccgtttattatcaccccgccgatttcgcgcgttgacgccaagagcggccagacgctgcgtattaagctcggcagcagcgccggtctggcgaaagataaagagacgctgtggtggctgaatctgttggaaataccgccggtggtggccaatcagaaaaatgaaggccagaacgtgctgcagctggcgatccgttcgcgctttaaatttatttatcgtcctgccggactgggcaaccgcgatgcggcggccgagaagctgaccctgaccgccagcggcagtagtctcgccatcaacaacccgacgccgttctacattaccgtcagccgtatttcccgcgacggcggtaaagccctgaacagtaaaaccgtgatgctggcgccgcagtccagccagacggtggcgctctcctccgccgtcaaccgcggcgaaaccctgaccgttaacaacattaatgactatggcgccgatgtcgcagtgaaagtggccgttaaataa

SEQ ID NO: 233133 - DNA, 1221 bp, Klebsiella pneumoniae
atgcgtattgcaccaatgacggaggaatacggccaggatattcacaatgtactacagcaggatcccgataattttccctatgaatactattccgtgcggttcagcaccttctccggtggtcatttcgccagcttcagacgctatctgcgccatctgctcttagacagtgcacgcatcgataacgagcacgccgcacaggaatatacgcgcacagtttacagcgtcaatgtgccggtggccgatcggtaccggcttgaaaacagttaccggcaacagaaaatgcacttctgcacccggcatctgtcagccataaacgacacgctggaaacgtatcagtttggcgtgcgttccggtgctaaatcagggcttgaggcgaatctggacattaccgaggacggtatttccattcgtcaccgtggaaaaggaaggcagtgcttcatcaaaacggagtttgcgctgcagcggcatcagcagcagggagagctccacgtactgttgcttgaggagccggaaaatcatctcagccatgtcagtatgaagaggctggttaatcagcttgccactgaacggcagacgcaggtgtttattgccacacacagcagccatatctcctcccgcctcgatctgcgtaaggcaatcctcctcgggtctgcccggccggtactgatgaatgaactttccgctgagactgccgccttcttcatgaaagcaccggataataacgtactggaatttgcgctggccagacgtgtgctgctcgtggagggggatgctgagtttattctgatcgaggccttttatcgccgcctgtatggcagggcaccggaggaagacggagttcacatcatcgctatcggcggaacgagtttccgtcgttatcttgaactggcccgtcttctggaaaatcgcgtcgcggcccttcgtgataatgacggcaactatcagcaaaactgcgatgaacgctatgctgacgtgatttgttcccgctcccgggtatttgctgatcgcgataacacccgatccacatttgaaatcagcctgtatcaggataacgctgatctgtgtgatacgcttttcctcggaccccgccggacactcacggtgcaggaatacatgctggccaataaggcagaagcagcattccggctgttacagctgcacgccggagagctgaccgtacctgattatattcaggaggcactggcatggataagagagtga

SEQ ID NO: 233134 - DNA, 336 bp, Klebsiella pneumoniae
gtgatcggcataaccaccacgctcatcgataatttcaccgccgaaaggcgcggtgccgctggcgacctgtgtttcaccctgccacaaagaaaccgtcacccgcagctcatcgcgcagctcgccgtacatctgaacgtctgcctccagtacagcgcggctgaaatcatcattaaagtgagtggctacatggaaatcgctgatttgcgtgctcggtttatgcagcaacgagacgtcacggaaaatgccgctcatccgccacatatcctgatcttccagataactgccgtcactccagcgcagcaccatcaccgcgaggcggttttctccggcgtgtaa

SEQ ID NO: 233135 - DNA, 528 bp, Klebsiella pneumoniae
atgggtatcattatttgcctgcggttcggtatccgaatcggagtcggagtcactgtcggaatccgaatcgctgtcagaatccgaatcgctgtcagagtcggagtcgctgtcggagtccgagtcgctgtcggagtccgagtcactgtcggagtccgaatcgctgtcagagtccgaatcgctgtcggagtcggagtcactgtcggagtccgaatcgctgtcggagtcggagtcgctgtcagagtcgctgtccgaatcggagtcgctgtcagagtcggagtcactgtcggagtcggaatcgctgtcagaatccgaatcactgtcggagtcggaatcgctgtcagaatccgaatcactgtcggagtccgaatcgctgtcagcatccgaatcactgtcagaatccgaatcgctgtccgagtcagagtcgctgtcagagtcagaatcgctgtcagaatcggagtcgctgtcagaatccgaatcactgtcgctgtcggaatcgctgtccgagtcgctgtcagagtcagagtctga

SEQ ID NO: 233136 - DNA, 417 bp, Klebsiella pneumoniae
atgtccggttttcaacaaactatgcaaatgctgaatgagggcatcgttcccactgcgatgctggttgccaacgatcagatggcgctgggcgcaatgcgcgctattaccgagtccgggctgcgcgttggtgcggatatctcggtagtgggatacgacgataccgaagacagctcgtgttatatcccgccgttaaccaccatcaaacaggattttcgcctgctggggaaaactagcgtggaccgcttgctgaaactctctcagggccaggcggtgaagagcaatcagctgttgcccgtctcactggtgaaaagaaaaaccaccctaccgcccaatacgcaaaccacctctccccgcacgttggcagattccttaatgcagctggcacgacaagtttcccgacttgaaagcgggcagtga

SEQ ID NO: 233137 - DNA, 222 bp, Klebsiella pneumoniae
gtggccagcggccaggcggcaggcaatgcctttcactggcgctacagcatgaacgtcgaggccagcggcagccggtggctgctgcactttgacgactggatgttcctgcaggacggcagccatttatttaacaaaaccgagatgaagaaattcggcattacggtcgccaccgtgacccttttctttacccgaaccacagcagaagagaggacagcgccatga

SEQ ID NO: 233138 - DNA, 126 bp, Klebsiella pneumoniae; identical to SEQ ID NO: 221027

SEQ ID NO: 233139 - DNA, 123 bp, Klebsiella pneumoniae
atgctgcgcttctacgtgaccggcggccaggtggacaatgagcataccgcgaaggtcaacggcacccaggaccagcagctggattcgctgaacgtcggcgggatgtttgaggcgtcgttctga

SEQ ID NO: 233140 - DNA, 123 bp, Klebsiella pneumoniae
atgctgcgcttctacgtcaccggcggccaggtggacaacgagcataccgcgaaggtcaacaacaccaaagaccagcagctggattcgctgaacgtcggcgggatgtttgaggcgtggttctga

SEQ ID NO: 233141 - DNA, 315 bp, Klebsiella pneumoniae
atgagcctgtataacgatttagtgtcctgcaactttgatggttgtacacctgatgatctgaaaggaattgagatccgcgccagtgatgccgtgagtgatttaatgctgggcgtcagtgccattggtagcctcatgttctgggcggctgatagcgatgactacccggaggaaggcgctaaagctgatatgtacagattaggcgcaatgctgggacgtatcggagaggttgcgcaggcgctgaatgatagcgctacaaacgccgcattcttgcgctcaatcagtgaaaaagaagccaaagggagggcgggcaaatga

SEQ ID NO: 233142 - DNA, 135 bp, Klebsiella pneumoniae
atgttgaaaaccctgtctgacaaagcggcttccctgaacattcccgttcagcccatcgatacgatggactacggtatgcagcggggagacaacgtcctgaattatgctctgtcgctgatcccagcggcgcactga

SEQ ID NO: 233143 - DNA, 207 bp, Klebsiella pneumoniae
ttgaggaataaaaatcctcctgtatatgctgtaacttttatctttatcttgcagggtacctttcactataacttcactgttttctttatgaaatgcaacaacatttatatttatgttgaattcaatcctgtcgccatttttttttgcaacgtcagcactcaaatgggtattgcagcgaaatggatcccaggcgttattatctattga

SEQ ID NO: 233144 - DNA, 1071 bp, Klebsiella pneumoniae
atggctggtattttttcgtcagtagagaaaaatttaattggtggaataaccaacgctaccagcggtctaatgatgtcttattcttctatgatgatgggactggcagcagcgtcagtcaccatctacatcatgtggcgaggatatcagacgctggctggtaaactctctacaccgatggaagacacgatgtgggacatcatgcggatggctatcatcctgtcctttgtggctaatttgggtggttatctcgatggcgttatcgacgctgttaatgggttaaaggagggattttctggaggagaaaacatctggcaaatgttagataatttatggaaaagcgcaagagtattagggaaaactctacatgacatggataattccacttatgtgaaggatgaggggtggacagctcaattttatgtctggcttggcatatttattttaatgcttattacagcttttgtttcaatgatagctgaagtaatgattctattactgagcattacagcccccattttcatattttgcctgatgtatggttttctgcgtccgatgttcaacaactggctacaaaacatttttgcagcgatattaacgatactattttcggctttatctctacgtattgttataaattttttaacgtcgagaatggcagaagccaccgcacaagcgggtaaggcaaatatcgtagaattaggggcacaagtctgtcttgctggtttctgcgccgcaatactggtgtatatctccgctaaagtagccgcagcactggccggggcaagtgctaccgtatccatgcaggggctggccgctgtaggtatcggtgctgctgcttttggtgccgggaagctggccgggggagcagttaaagaaaccaaacgttccgcccaggacaacattcagggctggaaggatgcgaatgctggtaagcctggcaagcccggaggtgagttagggtataacgatgctaaagcgcgtaaatacgcaattgagcagatgatagcccggaacgaagcgcggaggctggcacagtcgagagaatccgcggttaagaagttcaatagctaa

SEQ ID NO: 233145 - DNA, 1086 bp, Klebsiella pneumoniae
atgcacgtcatttacggagaaactattaacgatgtaataatgaaactcctagaaaaagtgcttaatgaaggagttcgtatttcgacaaggaatggggatgctataactatttatgatgttagtatgatcttacgaaaccctagatcaaggcatttaagtttagcgggtcgaaaaaataatatattttccacatttgctgaagctatatgggtttttgctggcgacaacagaattaaaccatatctaaatttttttttaccaagagcgcctaaatactcagatgatggtgtcatttggcgagcagcttatggggaaagactatacgctcacgggcaacttgaaaatgtcgtgcaacaattcaaaaaagaaggaatatttacaagaagagcagtcattagcttatacatgcctgacagagatacgaatgaaagcctcataaaagtatacaacatagaacatagtgtcgatattccttgtaataacttaattcatttttttatcactcctgacaaaaatttaaacattaaaatagttcaaagaagcggcgatctaatatttggagtgagcaatataaatcttttcgagtttagtttacttcaagagatagtactttcaatattacagagggaagttgatagcgagattaaactgggatacttacatcagtcagtaacaaatcttcatatatatgatgatagagtaggacaagccaatgaaatatacgaaagaaaagaagaacaaatgacagatttgataaacgatgatgaaatatcattccctccatcgttacaaaatataaaatcattattctgtgatatagtttcattccttgaaagaataataacagaaaatgaacataaaatagacacaatagatatggaaaccgaaaatctaaaaaaaatatttattaaacactttgtagaaactgaaaggaatttactttggggatatgcagaagcagctctatcatatattttccaggaaagattcaaccaaccaatagtgttaaaaactaagttaagcaatgatttcaatctaagcgtaacttctaattattttaataattctaataaggaccgtctatga

SEQ ID NO: 233146 - DNA, 558 bp, Klebsiella pneumoniae
atgaaaattgcattcatgggcatatcgggtagtggaaaagactttcttgccaattatctgatatccaactatagatttattagattatcatttagcgatcaactcaaaaaattggccaattatatttacccttggatggaaaaggattacccccctgaaaataaaatgttaccactcaatataaccttacctaccggcgactttatcagccattcaccaagagatatatggctgagcttagacaacctaaggaaaattgaagaaaaaatatttattagaatgctatcagaagagttgaaaattttagaaaaaaatggagggatgaataaaaatataataattactgacataagatcaaatgaagaattcgcatggtgtaagaacaatcagttcactatagtacatatagaacgggaaaataacaattataaaaaatacgaaatcgacaagtatgtcactgagaataaaacaaaatcagaatatcattttgacaacaatgtgaacggaattgatagttttaaacatttcttcgaaaaggtattattaagtgaacagtaa

SEQ ID NO: 233147 - DNA, 1032 bp, Klebsiella pneumoniae; identical to SEQ ID NO: 126496

SEQ ID NO: 233148 - DNA, 492 bp, Klebsiella pneumoniae; identical to SEQ ID NO: 83795

SEQ ID NO: 233149 - DNA, 663 bp, Klebsiella pneumoniae
atgctaattgatcccaactcacacctttatgtttatgcaataacgagagactttggttttgcacctaatccatttcatggaagttgtaccttggcaacatgcaaacctggaattagaaagtcggctaaagtgggtgattggatactcggagttggtggagccaatttaaaatcagctaaaaaaaaatgtatcctattaatgaaagtttcagaaaaaattagtttcaatggttattgggaggataccaggttctctctcaaaaaacctgctagaaatggtagtcatgtacaaattctgggcgataatatctaccatcaaaatgaaaacaatgaatggatacaagaagattctcatcatagcaatgctgatggttcatttaacatgacaaatcttgaacgagatactagctccaataacgtgttgatttcagatcatttttattatttcggtaataaagcgattgaagttgacttagactcaattgaatatcacagaattagaaactataaaaaaatccctttaaattcgactataccagccattgatcttataaaaaaaatagaatttgattttcgtagtgataaaaactcagttatatctgacccatgtaatttttctgatttctataaacgtgtagatcagggaactggagaactttactaa

SEQ ID NO: 233150 - DNA, 1788 bp, Klebsiella pneumoniae
atgaaacttgaaaaactaatcttaaagaactttcgtggctatcatggagaacatagcattgacattaactcactaactgcattagttggtcgtaatgatgttggtaaaacaactatcttagacgcacttggtgtcttctttgaacataaactatgtaaatatgatgctaccgataaatgtgtcgatagcgtggaaaatgaagacgtgtcaattggatgtatcttttcaggagctgatatacctatagttttggatgccacatctataactaaccttaaagaagaatatttattaaatagtaatggaaagctagaaatatatagagtatttgcaaaaggtaagggatctggcagcgttcaagctaaatgtatggctccctcagcaaaaggcgcgaaatctttacttgctaaaaaaaatgatgaacttaaagtaattgccgaatctattggtgttgatggagctgataaaaggtccaatgttagtttaagacaagaaatttacaggaaaattggagatttaaagcttaaagaaatcttcgttaaattaaatgctgaggagggcaaggttatttgtgaaaaaatatatgacaaactccctcactttgcattattccgcgcagacaggccgagtaccgatgaagaatcagaagtacaggatcctatgaagtcagcggttcaaacagcattgcagaagattgacattcaacttgaatccattaaagaaagcgtaaaagaacatgcagttgaagtggctgaaaacacaattaaacatttacatgatatatctcctaatcttgctgccgggttaatcccaaagtttaaagtggaacctaagtgggaaaatattttcaagctaacattggaagatgatagaggaatagctatcaataaacgtggtagtggtgttagacgtttagtcctgattagtttttttaaagcggaagcagaaagattgcaaaaagaattcccagataaaggagttatttatgcaattgaagaacctgaaacatctcaacacccatctaatcaaagacttcttattgatgcatttcaagaattagcaaatgctgataaatgccaagtattgattaccacccacgtccctgcacttgtggaaaagatacctacagaatctctacgccatataacccgaacactcgatgatggtttagaggttaaaaatggtaatgatgatgtgctaaagaacatagcgaatgatcttggcgtataccctgatagtagggcatctgttcttgtatgcgttgaaggccctaatgatataaactttttaaagaatatcggtaaaatttatctcgaccaaggtgttccaaatgttcctgatatgataaatgatccgcgtatagttttcattccaatggggggacatactcttaaagattgggttaataataattacttaaaaattctaaataaacctgagattcacatctatgatagagatgttgccatccctcctcagtatgaaaaagaatgtaagtcagtaaatgctagaaatgatggttccatagcattcatgactgaaaaaagggaaatggaaaattatttacatcctgatgctattcaggcggtgtttggtgtaaaaataaccatagatgatacgacagatgtatcaacagaggtatctgctttaacacgttataatgaaagtaaagcgaagaagaagataaataaatttgctacagcaaaaatgagttatcaaatgctcactgcaagtgatgcaaaaggcgagacattaacttggtttaatgctatatatgcgaaattataa

SEQ ID NO: 233151 - DNA, 819 bp, Klebsiella pneumoniae
atgacttatcgtgaaatgcttagtcagcatgttattgcaatatctacatcagatagcccagatatgcctgtattggggttaagtcaacagcatttatatgacgcgatgacagaaattgcgcgtcatttattagccttgggagcccggattgtttatggaggagatttacgtgctaacggttttactgaactgttatttgagttagtagcacgccatagaagagatgcggatgagggggatgaacgttccagtatattgaactatctggcatggccggtgcatatgcaaaaagattccagtgacttggaaaggctcagtgcggacctgaaaggaatggcaaggcttgttttattcaatcgggatggcgagtcgttgccaatggcagaacgagcccattacatagcaactattccttctgatgaagattgggaaaaaggtttgacagcaatgcgacatgctatgttacaagacacacatgcccgtattattcttggcgggcaggtagataagtataagggggcaatgcctggtatagcagaagaggctatattatcacttcgcgctaaacaaccccttttcattatggggggctttggtggatgtgcaaaagatatcaccgagtctctgaatattgtggcatctgacggaatgcagaaacgcaactggagaggtcgggaagaattttctggtttctctttccaggatcttaataacggactcactgaggaagaaaatactgtgctagcacagactccgcatgtggaccaagctatcgccatgattttgagaggacttttccgattagtaaaacgttgctga

SEQ ID NO: 233152 - DNA, 1194 bp, Klebsiella pneumoniae
atgcttgagacgaatttggcaaaaccatttctggttgtttatatcatttggcacccggatttcgccggtggtgctggactggccgaaatattgcgtggacactttcgtcgggaactctatcagaatgttgctggaggaaccggtttaagtgttatttttcgttctgagcctctacctaaaacggggaagccgctgccgatcaatttttcagaatcagagaccaccgcagtcctcatacttgcagaatcatgtatggcaaatgatcctgaatgggggacttaccttcgggagctttccacgcagtcggaaatagctggactaggtacacatcttttccccattgctattgatggagaaggattaaatctgggactggaagagcaggcattacgctgggaccaatggatacaggatgggagcaacgatactgcaaaccttcatatacgattgattagtgagcttacatacgaattttgcaggatgctgcgccattacctggaacatctgaaacaaccagaaaaagatgaagatgagttgcttaattatctcaagaaagttcagatattccttagccattctaaacatgataaagatggagagcggattgctcatttgatacgtgagcaattacatagtggacatgggttaagttcattctttgatgtccatgatatccctgccgggcttcggtttcatcaggtgctattgaaacaactggcgcaaagcgcagttgttgctatacataccgactcttattcttcgcgtgaatggtgtcgccgagagattatagaagctaaacgtaatagtgtacctttagttgttgccaactgtattagcgaattggatgaaaggggatttccttatatgggaaatgtccccatagtgagaatggatccacagcaggctgaacgaattaatatcattattgcacgactgcttgatgaggttctgaaagattttctgtggcgctgtcgtatacaattggttaataccgaacaaagtgcagtgcagtttgttccgcgtgcgccggagttaatctcacttgctggcttaaagttccacggtatcgggcagcctacaattgtatatcccgacccacccttaagttcggaagaggagcgcttatttgaagaagttaaacccggtatcaggcttagaagttttaccgaatggctggcagagggaacatcatga

SEQ ID NO: 233153 - DNA, 513 bp, Klebsiella pneumoniae
atgtataataccaaaataattaaaagaaaagtttttttaagctaccaccatgatgctgaccaatattattatgatgaattctcaagaaaatttcatgatgaatatgaggctgtaacggataattcccttgatcgtcgagttgacagtgacgatattgactatgtcatgcgacgtattcgtgagtattatatcgcagggacttcatgttccattgtcttggtcggtaatgaatcatggggaagaaaatatattgactgggaaattaaatcgacgcttgataaacaacatggacttattggtgtccagttgccaacattgttatcaaattcttatggacaagtgactgtgcccgctcgactcagtgataatattgattctggatatgcgctgtgggtaagttgggctgattttacagctagcatttcatcgtgtagggaatatatcgaacaagccaattgtcgtagtaatactctgataagaaacactcgtgaacgccgcttaaggaatgcataa

SEQ ID NO: 233154 - DNA, 612 bp, Klebsiella pneumoniae
atgcataaaacttttctgagttatcatcatgcaaacgaacaggatttgaagaacggaatcattgaagcatttgctggtgcgtcatttattgacaagtccgtcagtgacggggatatcagcactaatgtcagtgaagattacattatgcggaaaattcgggaggactatcttggtgactctaccgtaacagtagtactcataggtacagaaactgccagcagaccttttgttaactcagaaattcaagcatctttatggggggagaatcctgctggattaatcggggtaattcgagatgaaatatattcgagcgtgtttagctcgggtgtgtgtagtgatacctcttgcaattgcgggattggaattagaaccattgattggggttatgaacattatctcccttggttaattaaaaaaaatcatagtttttcaaaactcgtcccccactatgatgatatggatgtttattgctccctggttaagtattcagattttatagggaatagtgaattttatattaaccaggcatttgataaaagaaatattatggaacctgcagcaaagaaaaatcccgctgatgttcctgctataagaactaatttactatggtga

SEQ ID NO: 233155 - DNA, 729 bp, Klebsiella pneumoniae
atggttaggggattgttactgttcggaattattttgatggtaattattttgatggggtacttctcttttttaccggcctcacaatggtggtttatcaaaaatatcatatcaaattttgattttgtaaaagcgctcctttcaattctaatattatcattgattactatatttttgtttttcggtattttagagaaaaaatactcattaaagttagaaaaattaactttcggtgggttaaatgttttatttgatagttctgacttgctatataaaagatctgttcgcaatttccttgatactaaaagaagtgtgttcaaaattgatccacattttgattcatttgaagaggtttttaactctttatatgatatctataattttattcgtgttgaaataagagtactggatgttaagcggaaaagagatatggagttgtatggtatatctaataaaatgctaaaaaaactgaatcaactgcttaccaaacatcagaataattacaggcgttggcataagtacatctcaacaaacgatattgtattgacgagggataaagattctaacggtgaaaatgtttctttgatttatcatttaacaccgattggagtaatccagactcattattatcatttcagccagttgatggctgattttgaatgcattaataaattcttctgtgaggaagttagtgttgtatttaacatcgatattgctaagtgggatgagtaa

SEQ ID NO: 233156 - DNA, 297 bp, Klebsiella pneumoniae
atggtggtcttgacagaaagagcattcaggtttagcttatttattagccagttactggcaaaggcgatcccagtcagaggagccaaatttaagaagcctgctttcgagcaggctttttgcttttttgcgtcgctgacgttaactcagcatcgcatccagcctggcaagcacctcgttgacaacgacgccaggtatgcgttccagacgcttgcctttccctaccgccttcctacgccccgcgtgtcctccgtgaacgcaccccagctcagcctgaaaaagcgcctgccagtaggatga

SEQ ID NO: 233157 - DNA, 1656 bp, Klebsiella pneumoniae
gtgaaacaaacattcctttccggcgcgacccttgccgccctggtgatgctggtcgcgttaccgttagtgtttattgtgctgcaggcgatttttccccattttagcgccggttcgctcggggacgcctttggcggcatcccggcgctgctggccgatcctcagctgccggcgatgctcggcggtacgctgtggatcgccgccggcgtggcgctggtcagcgtaatgattggcctgccgctcggcatcctgcgcggtatgttttcgctgccgctgccccggctgtgggatctcctgtttttgatcccctttctgacgccgccctatatctcggcgctctcctggatgctggccctgcaaagccagggctatctgcagcagctgaccggctggcagctgaacgatctgctgttcagccgcagcgggatcgtgctggtgatgacctttaatatatttccggtggtctactttgccgtctcccgcagcctgctggcgagcgggacccggctggcggtggtcgcccgcgtccatggcgccagcgcctggcgcgccttctggcacgtgacgctaccgatgctctctccggcgctggcggcggggatgctgctggcgtttaccctcgccatcgaggagtttggcgtaccggcggcgctgggcagccgggcgggagtggtgatgctgacggtcggtattgagaaaaagctggccgactggccggtggatctccctggcgccgcgctattgtcgctgctgctgatggcggtggcgttgttcgcctggtggctgcaaaggcggctggtgggggagaaagaggtcaccagcgtcaccggtaagccgggggagaaccacggggcatcgctgggctggatgacgctgcccgccgtgctggcgatggcggccgtcggcggcctggcggtcggcgtccccgccgtctcgatgatgctcaccagcgtgatgggcacgctctccggtggcgtgagtgttgagaatgtcacgctgcgtcatttcgcggcgctgtttgaccagcagggagatgccctgtcggccctcggcaccagcctgtcgctagccctgggttcggcgctaatcgtcggcgcgctgggcctgctggccgcctggctggtgatggtgcagaagattaaagggcgcgggatggtggacgcgctgtcgctgatgccggcggcgctgccgggcgtggtggtgggggtcggtttgatcctgctgtggaatcagcccttctggccgcgctcgccctataacacgctgtggatgctgctgctctcctattgctgcctgctgttgccctggccggtgcgctatgtcggcagcgcgctgcgccagctgggcccgaaccttgagcccgccgccagggtgcacggggcgtcgccactgcaggcgctgcggttgattgtcctgccgctggtctttccggcgctgctggcggcgatgctgatggtgttcgcggtggcctcccgggagctggtgacctcgctgctgctctctccggccggtacgcaaaccgtggcggtgtttatctggcgccagttcgaacagggttccgtcggtcagggcatggcgatggccagcctgacgttgttgaccggtctggtcctgatgctgacggcgctggcgctgatgcagcgccgcacgtgcggttaa

SEQ ID NO: 233158 - DNA, 375 bp, Klebsiella pneumoniae
atgtcacaagcaattcaatacaattccagcgtggcgatgatccgtcacccgcgctttttacagcgtgcggccgacctgacgcccgcgctgcaacgcctgcgccagacgccgcaggccatcgtcgaggccgtcgctgaaccaggagcgctgaacggctggcgggggaataccgtctgcacgccggagcagttttatcagcaaccgctcaacgtcggcgacagcatcattattgattttggcagccattttgttggctacctgcagttcagctgccgcagcgtcggcagcccgcccgatgccccggcccatctgcacttcaccttcggcgagacgctgagcgaagtctgtgagccgttcagcgaataccagggatag

SEQ ID NO: 233159 - DNA, 162 bp, Klebsiella pneumoniae
atgagtccggcgttaaccgggtctatcgccgggcactactcctatgccaccgccttcggcgtgctgagcgttatcgcgattgtcgccctgatggtatggtggcgcagcgctccgctgctcaccgtctccgcgtcaccgccagtcggcgagagcgggcagtaa

SEQ ID NO: 233160 - DNA, 729 bp, Klebsiella pneumoniae; identical to SEQ ID NO: 230174

SEQ ID NO: 233161 - DNA, 327 bp, Klebsiella pneumoniae
atgaagtggcgctattctctgcgctggaaactgccgcacaggccctgcccaggtccacgggaactgatttccgttgtcgtggaggctgggcaggcggcacctgaagaggtgatgtcacgctgggtggctggctcaggttacgctgtatgcgtggattttctcggccagaaacagatccaacgctggagcgatgaacggaaagcagcggtgagaaggcgcaacatgcaggcacgtattaatcgtgttgcccctttgtttgccgacgagttaatcgagcgtgaactggctgcgcgtccggagtatttcaatggcaagtccgcccgatga

SEQ ID NO: 233162 - DNA, 321 bp, Klebsiella pneumoniae; identical to SEQ ID NO: 103996

SEQ ID NO: 233163 - DNA, 885 bp, Klebsiella pneumoniae
atgattaatgaatcagagctaaaaaaatttatcggaaaggtcgaccaaggttttgacgcagataaaacccctatacctcaccgcatagggcgatgcttatcagaggttagcaaaaaatacgatattagtttacctattttttgcccaatagaaaaaaagtcattgaatgagtctcacagagtaacttatattgttcaagagtggtataaagaaagatatggaaacaggctgtacgccaactatgatattggctttttattgttgctcttacgaggtcaaatattgacttgtagagttcctaacttttttggtgaatgcaatttttttattgaccaagatttaaatgtcaaaaaaaacaggaacgaaacaaacattcttgaaatgatagatggtattacacaagatttttcaaactctttatctgacaaagaacagtcttatatattttcatcctttcaaaaaggattaaatgcggcaattattatctcagactggagactgagtaatttagaaatgataagagccgcgacaaacgatctggaaggaataaagaataacttcattctaaatcaaccccatctggcaaattctaaatgggcctataatcaatttttggaaaaaatactaaaatcatggctattgaagactggagcaacacgaccagagcttaaaggaaagggccaccaattgaatcatttagttagtatgtttaacaaaaattatcaaaataaaatagatgaatacaagattcctacaataattggtgatgcttcattgagatatgatgaaatagagatcacgaatgaggacttaattaaagttcaggatagtgtctttgacataatcttacagattggatcatctccaaaatctttaaagcaataa

SEQ ID NO: 233164 - DNA, 1479 bp, Klebsiella pneumoniae
atgaagggatacgtagctaaatcaggcaaatcatttaaaaatagagttgattatatattaaaagatgatcacgattttgtttgtagcaatatgtcagcagataaaaataatgttagtgatttaactgatgagttcaagactgtaagcagctttagacaagatataaaaaaaccagtgtttcacgcttttttatcagttcctcttaatgaaaaattaacagatgagcaatggcaagagatagcaaaagactatttgaaagaaatgaatattgatatagaaaaacatcaatatatttgtgtgcgtcataaagatactgataaagaccatatccatatagtcgctaatcgagtggctttagatggttcggtatggcacggtcaacactcagcatttaacacaatagcagcttgtgaacatttagagataaagcacggtttaactattactaaaggtttacaaggccaaaaatcagacgtatcagcaccaaccaagaacgagatcgagcaagccttgaggacaggtgagaaaccagctcgtctcgttctacagaacgctctacaagcagctatggtaggaaaaccagaccttgagacattcatagacagactgcaggctgtaggcatcgatccggcctttaacgttgcttctactggcaacgtcgccggagtgtcatttggtatcaaaaataatgaaaaaaatattttcttcaagggttcatctcttggcaaaaaatttagttggaacaatataaaaagtaaggtgaaatatgacaaaaatagagatgatgaactcattaggagcttctcagcaagaaaagatgatgaaccaaatagtgttggacgatcatttgttgaaccaaatatcaatgacggtagaacctctaacggaatcaatgatgattctttcggaatcagtcagcacagcattaaatcagacgcaacagacactaaccagagtgaacaactcattagaagcaacaacaaccactttaaactcagcgaaaaatataatagaccaacaagccataaagttagaagaacaacacaaaaaactgcacaaatactcaacagagttaaaaaacaatacaataaagaatcaatcaaaacttataataaaagtggcctcaatagttggcgcaataaatctgatagcggttctatcagtaggatacttgatcgcgcagaaacagccacaacagccacgaatcaatttagactcaaaagcggtagcagtttcaatagtagagcagctaagatcgaagaaatgagagagcgattaggggtaaagaaaccaataatagtgcctaagagtagagtaaaaatcattcatgatgaaataaagaaaaactcatataatatagcagtaggaaaagataacttcagaaaaagattaaagtcaaaattaaaaaaagatacattaaaagagataaaattagatatggatgagtgtgttaataactcagtatataaaattttttga

SEQ ID NO: 233165 - DNA, 1731 bp, Klebsiella pneumoniae
atgctgaatggaaaaacagtcttatcaaaaagaaacaggctaaactcagaaaataaaaaagaagcagaaatacaagccaatgattcttctgaaaaaactcatcgttttttcttggcttatgtatttctgctttcctatgtccttgttatagtgtcgtcaacaactgatctacaacttttattggaagacaaaggtatcgttttaccgatcctaaatgttaatgtctcactcgtgggcttttacgtaatagcacctattttaattacagctgtacacattaatctattattacattcttctataacatatagttcattaaaatatcttagcttaatttactcaaaaaaagttccaaatataaaagttaaaaataacatactggacattgcaatactaggaaaagattcttcaataaaaagattataccaagcacttgcaaacatcctatatatttactcatccccgatcgtattatctattatcctgttcagattttctgattatcaaagcactccaatattctgtcttcatattctgatgataatgattgattttatttttataatatattttgggagattacagcaaaaaacaaacaccgagacgggacattgtaataaccctatagggtttccttttggggacaataaagcaattaaatgtctaatatatttgtttttctctctcttgataataaaaatagtcgtttgctgggacgtatttataagggattggcgcgactctgtgtccaaagatatcatttatcattattataacgttaccgatgatgatggttctatagatgacctatacgggtttttaccaattataaaaattgataggacaacgaaattatctaaagaagaagattccaactatttcggttctcttaatctaaaaaaggataccagctcgttacattcctttattaatagaggaatgtccattgatctaagaaatagatcattacgatatgccgctcttccaatgcagaatttagctagagcatggttcactaattctgaccttcaaggtgctaatttattgttatcacagttacaaggcgtggttttaaatcagactcaattgcaaggctcaaatttgtcaggttctaatcttgatggtgcttatgtttttaatgcaaacttaaccgatgctaatttaagaggagccaccataaggggggcaatttttgatgattcaaatttaactttcacaaattttgaagaaagtgacttaacatcatctgtttttacaggaaataccttaatatcaacaattttagttaaggcagatttaagttcatcatttcttgcaaataattattatacccatagcttgatgcctgagggtgaaattgcaatttttgatatagattttaatagagaaccatttattcttaatgtaattagtgagaaagatattaactatcatttaaaagaaattagctcatcaaaggagcttttcttacagattgttcatgctgaagataaaagagatccacgcaaacttgtaattagagatagcaatagggccaattataaaataatgactaagttatgtaaaaatacaaacaaattaaacaacctagtcgctcttgattatattttcgggaaattaacgttaattgattatgaacaatcaaaaaatctatttaattatctaaaaaaacatgatgaatgtaaaaatgctataatctatttagaagaaaatgatcttgcccctatttaa

SEQ ID NO: 233166 - DNA, 660 bp, Klebsiella pneumoniae
atgaactctatctattgggtgatattcatgggactgctgttgaacataccatcactggtccctgtgttgtttctccgtcagactcaaaagaatgtgaagatatctattgcgatcagactttttctacttaacgctttcttggtgctgtcccttgtgacgctatcgcagaatatcacgcaaaaatacgggctgtttccagtatggctggtgttagctgcaatagtgctgtttgcggtcacgttagtaccaacggtaaaatttgtgcgtaagcatttaactgtcgggaaaagcagggctgttatcctctcatcattccttattgtctatgctgtcagatttaatggcgtgttttcagatgtgaatggaggtggatatacgcttaatggatacaatgtggtgtggacgttgttcttcctgtttgccagtctgttggcttatatcggttgctctgggagtaaaacatattctggttattctgcaccgtcatctgcatcgcaacctgattattctaaaccgactaaagagtatgaaacacaatctcaaattgactacgatattgctgtaaaggggcggagtgttctgtctgaccccaatctgagtattgttgagcagcagcgttatcgggatgctcttgagaaaaaagaaagagaagattggtaa

SEQ ID NO: 233167 - DNA, 561 bp, Klebsiella pneumoniae
atgcataaaatatcgttagtggccatggggactattttgcttgtcggttgtggagataagggagattttgagaaaacgataaataaagaaatcagtaaggagcctgtttgttattcttttaatacaaaagaaaataacagcgatgcttatgaaagcttcagcgaacccggagttttcgtcagagttaatgttcgaggaaatgatgtgagtcctatcttggaaggacttaaaaaatcgggcttaatcgatattgaattcgaacaacaagggtttacccgtgttgcagccttatcagcaacagataaaggtgctaaagcgaaattttgggataaggagcatggggcttgcgtaggtactagaacagtagatgaaataaaagagtggactgaacccagcgatgctggtggtcaaaaagtaacacgggtatcatatacatggaaactctcagatattccaagctgggttgataaagatgctttctccagcgtgaaaggagtgtcagaatcagaagaagcaaaaattattctggtgaaaaccaataacggctgggccacaaggtaa

SEQ ID NO: 233168 - DNA, 216 bp, Klebsiella pneumoniae
atgttgggacaagaaccacacaccactgacgcagaagccgttattgagattttgaaaatattttatatgtctcttcctgccgatgtgaaaagtacaatcaattatgaaattcaaaaaaaaatcaaggatgaagacaagcagcttccctataaagataagggtagggctatttatcgggtagcatccaagatcattcctgtagctaatcttgtttag

SEQ ID NO: 233169 - DNA, 180 bp, Klebsiella pneumoniae
atgaaagaagatgataaattaatatttatatgcactaaattagaaaagttgtatcaagtctattttcatatgaaagttgatgcaattaccgaccttgaaaatagacttagagagaaaatacgaactgaaatacttaaaaccttagcatcgcttgaggatcttataactaaacaagattag

SEQ ID NO: 233170 - DNA, 450 bp, Klebsiella pneumoniae
atggttgaggaagttattttaccgcaagaaaaacaacagattctggatgaaataaatggatggcttaacacagtctatccttataaaaaatcacctgcatatctttgcgattctattgagttctccgaaccttattttcgtatcatggctcaaagaaagaaatatgacatatacatacgattcggaaaaacatggatttccgatgacataaaatccatagtagttgcaaggatagggttcgatcagcagcgtagcggtcatggcactaatttattaaaacttttagtgagaattgcaaaattaaacaattaccagtctatcggtatcgaaagtgttaatcaaaacagtaaagcatttgcacttacattcgattttgaagaacatacgagcagtagcataaattacgttatctcaacagacaaactgagtaatgctcttgataataaataa

SEQ ID NO: 233171 - DNA, 525 bp, Klebsiella pneumoniae
atgaataaacttagtaaaaataaatggcgaacaaatgtatgtgtccgcattttcaaaataatccttcccgcaacaatattaatttcagcaaccacagctaacgcagcagtctgtagcccggatgtcagctcatcattaaaacaagcgcaatataacgcaatgaagcaggatgcggctcagttagagccggtagcgaagaatttcatggataacatcaatcagtcactcgagacgattggttgtacggacgcttggcctgtgggaaacctcggcatcagcctgccatctgtggattcaataattaaaaaaacgaaggaagcggcaataagtaaagcctgttcgattgcgagagaaaaagtcagtcaactgaccggaagtatatctgaaaatatttctattgatatgcccgtgattgggaatatcgcaaatggaagtgtttctacaggaactggctcttcatcaggatcgggagcaaccgtcaatggaaccgatgtctggagcagcatcagtaattcaatgaagtaa

SEQ ID NO: 233172 - DNA, 183 bp, Klebsiella pneumoniae; identical to SEQ ID NO: 206128

SEQ ID NO: 233173 - DNA, 1629 bp, Klebsiella pneumoniae
atgaaatttaaagcagatcagacagctcaaaaactacgtggtggttattatacaccacaaaacatcgctgactttacaaccaaatgggttcttaataacaaacctaaaagtattctagaaccgagttgcggtgatggtgtattctttcagtctctatacaataataaatttgacaaaaacactaaagtacaaggttatgaacttttcgatatagaagctaaaaaatctatggagttatgcaaatccttaggtttttcagacgttgaaatcacagaaggtgattttctggaatgggcaaaagtggcaattcagaaaaaaaatacttctttcgatgctattattggcaaccctccctttatacgttatcaattcttagaaaaggatttccaagaaaatactgaagcaattttcaaattgcttgacttaaaatttactaaacatacaaatgcatgggtgccttttattttgtctggcgtttcgctcctcaatcccggaggacgtcttggcatggtaattccatcagaaattataaatgtaatgcatgcacaatccttgaggacattcttgggtgagcattgctctaaaattgtaattattgatccaaaagaaatatggttcagtgaaaccttacaaggcgcggtcattctattagttgaaaagaaaattaatctggattgtgcatcacaaggtgtcggaattaaaggggtcagtggcttcgattttttacaaaaaaatcccgaagatatattcaacgaaacaaatacaatcaatggtgataccgtaaaaggtaagtggacaaaagccgtcctagataaaaatgaagttaaccttcttaatgagattattaaacatccaaacgtacactcttttgatactatagcaaatgttgaagtgggaatggtcacaggtgccaatgagtttttcctcgtaaataaagatgtagttgacgcatttgatttaagtgagttcacccatccaatgtttggaagaagtcaacattgccaaggtgttatatacgatgaggttcaacatttagctaatatagagaataagcttccagtttattttttatatttggataaagaatttcatgaactacctaaaaaaacgcaagaatacattttcaatggtgaattacagggctttcacaagcgatataagtgcagaattcgaaaaccttggtataaggttccctctgtatttagcacaaaattagctatgcttaaacgatctcatgatgctccaagattaatttataatcaatatcaagcttatacaaccgatacagcctatagaattaaacctaaatctaatattaatgaggaaaaattgtcctattgtttcctcaatcctttaactgctatattcgcagaactagagggtcgttcttatggtggtggcgtaatggagcttgtcccttctgagataaggaagctgtttatccctctaccggaaaaaattgagttcgatttatctgagttaaataactctatgatgaacagatccatggagcaaattcttgcagagcaagggaagaaaatattctctcacatgggatatgatgacgaagtagttgaaaagttaatacatatttggaataagttaaaaaatagaaggcagcgaagttag

SEQ ID NO: 233174 - DNA, 258 bp, Klebsiella pneumoniae
atgattattaacggaaaaaagataaaagcaaaagatttcgcaaaaatggctggcgtgtctcgtaaaacgatagtgaaatattatgctatgcctcgtgaacagtatgaaaaagaagcagcagaaaaaagacagcttgcttttgaattgagatcagctggtcttaaatggcgtgaggtagctgaaaaaatggatactaccttagatagtgctatggcttattatcgtagatatttagcattacaagaaaaacaaatatag

SEQ ID NO: 233175 - DNA, 870 bp, Klebsiella pneumoniae
atgatattgaatcaaaatatttataatatagaaaaatacaaaagtcaaatacaagaatatgctttatgctgtgatgattttaatgatggtgtgtatcgaaaccctaaagaaaaggcattactgaagaaatatattggatttaataatcgttctttcgttaacggtcttgtattcgatgtagaccacgaatacggagcaatagcgtgggatttagtaggtttaccgaagccaaatattattattcaaaatacaaataatggtcatgcacatcttctgtatgcgttaaaaagtcctgtattgaaaactgatgcagcgaaaataaaaccgttgaaatttgcggcgtatgttcaggcgggactaactgaaagattaaaagcagataaagcatatgctgatatattgatgagaaacccactaaataaaaacgaatcaagaacaatatgtaatgatataccagaatatgggcttgattatctatctgatttcgtacgcgaagatttttcaacccaaaataaaaagaagaatcgaagtgatatatatggattgggtcgcaacgttaatttatttgaagatttaagacaaatagcatataaagatattttgagatataaatcaaaaaaatcatataatgaattcttcaatgatatgttttcaaaagctattgtattaaataactttagcaatgctactgatccactttctcacaatgaaataaaacagatctgtcaaagtatatgtaagtggacttggatgaatttttcgaaagaaaaattttctgagatacaatctaatcgtggaatgaaaaataaaggaaagaaaaaaatcacaaatttaaaaacaaaactagataagatatgggagatattatga

SEQ ID NO: 233176 - DNA, 288 bp, Klebsiella pneumoniae
atgcggaaatttatgttagtggcaggtcttgccgtcctgttagcagggtgtggcgatgatggcatctatggcaactatgttaatcaacagtttggcgtcaggcttgatattcagaaagatgtgatcaagtttcgcgatggtgtttttaccgttaaaagctgggatgaaagcaagaaacccatctatatcgccaaaacgcaaaacaaaaatctcggatcttggacttttaaaatcgaaaaagtcaaagatggagttgtttaccaaggtgcggtttttaagaaagattag

SEQ ID NO: 233177 - DNA, 375 bp, Klebsiella pneumoniae; identical to SEQ ID NO: 195012

SEQ ID NO: 233178 - DNA, 291 bp, Klebsiella pneumoniae
atgaatgtagaaaacttaatgaatagtatgactatagaatataagctcgaaatactggcaaggtttttttattacatagaacaaaacaaagatataccatttaatgaaatcaatagtgatgagcgagatttgtgttattttgtagccaatagatacattacagaaaataaagctgatgagcttattgaagcattaattattgaaaatgataacgactacataagagcaacagatgattacattatccagaggaataaagaatgcgaacagatagaaaaagaggacgtatag

SEQ ID NO: 233179 - DNA, 492 bp, Klebsiella pneumoniae; identical to SEQ ID NO: 217343

SEQ ID NO: 233180 - DNA, 546 bp, Klebsiella pneumoniae
ttgcaaaaaggtgattactctgttggtgtgacctggcaacaggcaaaagactattgtcagtggttaggtaaggagtctggtaaaaaatttgatttaccaacagaggcgcaatgggaatatgcagcaagatccagagggcaatacattccgtttgcaacgaataatggtgagttcctgcccggtaaaaacatccccagccaggatgagctgagtgaatatactgatggagcaggtattcctatttatccagtggggaaatatcccccaaacctcctgggtctgtatgatatgggacttagtggctcagaatggaccaatgactggtatgcgtcagattattactctcattctccggtaaacgatcctcagggacccgtaaaggggaccgaaaaagtcctccgcgggaatgttggcggtgacagacaatacgctttaaccgtgttcagacaatcagatttgccagttccaaagatcaataaagacgatgattatgaaaaatatggtgttggtccgcagtatgttttccgttgcgtcatcaataaataa

SEQ ID NO: 233181 - DNA, 192 bp, Klebsiella pneumoniae
atgaatattgacgtcgaaacattggtgaaacaattaggcaaaccataccaagcgatttttgaacaaggtttgattccttataaaactaagccttatgattctgttggcgatagcactgctagattagatatgaaacgtgagggaatatatctagcgtttattaatgatctggaaaaaaacttaaagaagtga

SEQ ID NO: 233182 - DNA, 549 bp, Klebsiella pneumoniae
atgatcattgacgtcgaaaaactggtaaaacaactgggtaagccttatcatgaaatttacagtcacgggttgattccttataaaacaaagccttacggtcctattgatgaagatgaagatgaagatgaagatgaagatgaagatgaagatgaagatgaagctgaattagatatgaaacgagaaggaattcttttggttttcaccaataattctgagaaaaatcttactgaaattacattaaggttagaagataaaggcaaaacagactgggtattccccaatccgatgccatttggtatggaaccggtgatgacccaattgtgggttagagagcgctttgggttgcccatgatttatgctgatgtggaaatcatcatgactatttatatgggggtgaaagaggtctatgctctgcctgctcctcatcaatatatcgctgccgtgtttacctataacaaagatttatttgtagaaaccgtgactttttacccactggaacgggccaaagagattcaggcagtactggagaaaaaacgattagagagttaa

SEQ ID NO: 233183 - DNA, 534 bp, Klebsiella pneumoniae
atgaccaacaaacgactgtacaacaatccgaaatataccaccaagcgtggcaatactttttacatcaactttcgtcttccctctggcgcattctttcgtcaatctctcggtactgattccttgaaagctgtagaggttacaatgtcacgtttgataccctttattcccttagtacaaagtggggttatgaacgtggacgattttaaattgcggcttaacgggatgcgtgaaatgactcgggatggtctcaacaaacttctgctgaacgtcttggaaataacaattgaagatgcttctttttcttcatcaaactcacgatattaccagagaacccaacctcttgacgtccaagccaatcatgccaaggctatggcagaagcaatgcgccgtaagatgatgagcattgatgcggaagaagccttaaaattttgggggttagatatggaatatattatccccgaagacctaaaaccagctctccttgagaacgctaaaaggctgcatatttccacgatttgcaatttcaagcgataa

SEQ ID NO: 233184 - DNA, 1059 bp, Klebsiella pneumoniae
atggatctcttttccaaagagaaagctcgcataacagctgaactgtctcctttcgaaccttcagcgcaaactacctccctgctcctatcagaagcatgggggatgttcaccgcagaaaagggtaaaggctgggctgctaccattgccaacgagaatcagcgttattacgacgttttgatatatgttgttggtgaccttcctgtttcttcaatcagtaagcaaaatattcgacagacattggaagtcgtcaaaaacctcccacgtagaaataaaaaaccttactcagagtggacgcttgagcagtgtgttgaagctgatatcccggaagatgatctgatcagtagtgccaacgtaaaaaaacacctcaagatctattcctcatttttcaaggtgttccttaaagatgaaaaggacattttggaaaaagcgccaactgaggggatcaagtatgaggtgcaggaaaacaagagcggtcattactcgcggcctgagatgaggcgcttcgtcgaacggctgaacaccttcacggattggcggcgggattacttcctaactttgatttatacgggagcacgacgaggtgaaattgctgccattcgtaaagagcagttccgtaaagatgaggagacggggcgttattacatttttatcgctgatggtaaaactgaacatgctcagcggcagatacctgtgagtagaacacttgaggcccttttggttgagcgagttaaaaacatcaaatcttctgcactcgttttcggtgacttgccaccatacgaacagatcgggattgaatggtacagcttaatggagtcctgccaggtgctgaaatacaacgaattcggacaacggcgggttatccatgcactacgccacaccttcatatctgaagcgatagccaaaacacataacgccgcgcttgcgcaatttgttgttggtcatagtcgtacccaatcactaggtatcacggcgagatatgctcacaggccgctgcttaaggatcttctccctgttgtggactgcattcaatggtacacagcaactagtatttcctcctga

SEQ ID NO: 233185 - DNA, 210 bp, Klebsiella pneumoniae
atgagaggtattctattgatttgcggtatgttgctggcttttaatactgcggcaagcaaaatcaccatgagcaaccccgacgagaaggagctaaagggcggaaagcggctttgcacttacgaaaacaacatttacctgtttacgctggtgactcgttctcagacctgtccctattctaagacgtttgacactactgaaaacgaaaagtga

SEQ ID NO: 233186 - DNA, 789 bp, Klebsiella pneumoniae
atggtgtacttaatctattcagctatggaggctgttttgaaaaagattcttgtattacctcttatgttcttttccttctcgtccttctctgaaggcgttccgtctacagatgtacagccatatcctgattacctagctgcttatgtcaaaacgattgttactgccggatgcgaacaggcgctgaaaggtggttcaaaggatgtattgatcgagcgggcaacgcaggggatgaagaaggatactgagagttactataccttgcacaatgctgttgtactgggaacggcttttggcggtgagctaaaagaaaagggaaaatttatcactaaagagaaagttgcgattgatagttgtggaggtgcagccgcttataccttattgcaaaaggatttcatgaaaaaagtgattggtactttgatatcatcagcacaatcgcaagcctcagaatcaaaaccaaaggtagcaacttctgacgaaagcgtgtatcggacgacagcaaaagatctggctgcactgtacgatgaaaatgaagttgcagccgatgacaagatagcaggccgcaaggtggaagtgaccggagttgtccaggacataacaaaaaatttcgcgaatgatgtagtccttaaacttgaaagcggtaatcgcttcatgcctgtcagcctgagcatgacggattcagaaaaatcacaggcgtcgaagctgaagaggggacagaagatcactgtgacttgcgaaaagatgctgcttttcatcggtgcgccgtctggcggcaactgcacctttaactaa

SEQ ID NO: 233187 - DNA, 996 bp, Klebsiella pneumoniae
atggctgcaaagtctgagttcttttccagttttgtcgatatagaaaagcgtccgcgcttctcctctgaatgtgaaatcagtcctgaaaacttcaaagctctggttggtgagtaccgattgggtgaagatgtcatttgccaggtgaaaggtcacaaggggatttgccatcaaaagcatagaagcggctggttaggggtaaccagtgatggatttgaagttctaatcggcggtcactgtgcccgtaactatttcaaagcggataaatcatttgcactcgagcggaagcgtgttcgaaaagaaattgatagaaagattgccctgtataagctggaagagtaccgaaaaaataaaatgagcatcaatgatgagttgtcccagttgcgacaagaactcattgataccagagtaaaactcgaccaggttcacaagcattttccaaatgcggtccttagctttatcgagagcgctcagaaaaccaaaaactgggagctgaaaatcgatgtgctggacggattcgccgatgatggcgaagctagatgggtatcaggttcattgggcaaacggaagacgctgccatatagctatgaagtctttggattgataaacaatgtgaaaaccctttctgcaacttttgacgaggcatgtcaggtcaacccagacgacatcaaaacaccaaagttgaagagaataatcgaaattcttaatgaaaaagaagagtttaagaaaactagctcagctctacacagagatgtttttgccttcgttgatccacggaatttggaaccgttaatctacacatgtgatgactacgaagaggagttcctcgtagcgaaagcaatcatggcggtcacaggtgcgaaagtgtcgagtgaggggcatataaatcttcgactgaggcggattaaggaacgtatagagaagcaatttgacggaaaacttatcaggaaaaaccagatttccgaaaggttccagcgtcgaaatgcattcgtgggttaa

SEQ ID NO: 233188 - DNA, 732 bp, Klebsiella pneumoniae
atgtgcacatacgcgagagagcattcatgtaaacagtcagcacaaccacaaaccacgccttacaggatagttgttcacgaatacggacgctatccggtcatcacgggcaacaaatttttccataacggctacccctatcccgtcaacactacagccgaatccggtgtccggttagatatccttaccccgatagccgcagagcttgacgcaatactgagttcttacagtcgtgtttacctcacccgctttgattttcgcttgccagcaggcacacccgtagacaccgccaacgaatgggtaagccagctattcaagaaactacgcgagcggctgaaatcgaaatttcgtagacctgaaggaattgccgatccgatcctcaacttcgcttacggctgggtgcgggaaaaagaaatggcaaaacaggtgcattaccattgctggatagcccttccgcaccggcaggtaaaacgacttggaacgcctacaagtggcattgctggcgctattacggaaatctgggcgaagctatcaggaggtgaaccaacgctggtggagttcccaaaaccaagcgacaggtacacgaagtactatgttatcgaacgaggtaaaccggaaacccttaaggggccgatcctctggttgtcatatctggcaaaggagcgcgggaagtatcagacgggaaaaggtgacaaggttcattcgacctcgcaacttcgaaacaaaaaaccatga

SEQ ID NO: 233189 - DNA, 492 bp, Klebsiella pneumoniae
atgacaacaaagaaaaaactctctaaccagattacccctgaattgcagagttttatcgataagatcgcagcgaaataccaaccaaacgcagaagttttgcaacgtcgaattgataatgccgaggccagatacaaccgatatcagcaattttccgatatcccggcgcgtttggtgagcacacttcaaaagctgatccttgaaggctggcggttttgccccggtgctaacgcttcagtttttgccaacgcagcgatggtttccgttactctgcaaaagcccgcccaactgatcgcagcggaactaaaagagctacgctcgaaggcctccgactcctataccaatgaactgttctcagcgatggagcgcgagatcgatgaattgatgcaacaagccgccgaggactcccagcggaaagccgaggaacaagcagaagcagaacaggctgcaatgcgggatcgcttacgcactctcctgaacggagctaaagcatga

SEQ ID NO: 233190 - DNA, 897 bp, Klebsiella pneumoniae
gtgagcaagcatgacttgactcacgcccggcatgacccggtgcattgtctagcacccggcctgttccgtagccttaagaaaggggagcgcaagcacagcaagctcgacgtggtatatgactacggcaatggcaagcgtatcgagttcagtggcccggaaccattgggagccgacgatctccgcattttgcaaggactcgtagcaatggccgggccttctgggctcgtgctttcccccgacccgcagacagaggccggtcagcagctccggctattccttgagcctaagtgggaagccatccagcaggatgcaatggtggtcaggggcagctatggggcgttggccagtgaagtgggctatgccaacaaaaacgacactgaacgagtacgcgaatgcatcgagaggctatggaaggtctccatcattgcgcaaaacggaaggaagcgacagggctttcgcctgttgtccgagtacgccagcgatgagcaggacggcaagctatacgtggcattgaatcctatgattgctcgcgcaatcatcggcgggcaacacatccgcatagacatggccgaagtgagaaagctacagaccgaccccgcccgcctgatccatcagcgactttgcggctggattgaccccggcaaatcggggcgtgtcgagctaggcacgctttgcagctacgtctggcccgacgaagctacgaacccgaataccatcaaaaagcgctgccagaaagcacgcaaagcgctggtcgagctggtcgccgtgggttggaagctggacgaatatgcgaaagacaaatgggagatcggacgtcccaaggcccacgataacggtacccgccccacgttttcagtacccgacccccacgttaatggtacccaacccccacgttaa

SEQ ID NO: 233191 - DNA, 321 bp, Klebsiella pneumoniae; identical to SEQ ID NO: 187401

SEQ ID NO: 233192 - DNA, 1569 bp, Klebsiella pneumoniae; identical to SEQ ID NO: 187402

SEQ ID NO: 233193 - DNA, 795 bp, Klebsiella pneumoniae; identical to SEQ ID NO: 187403

SEQ ID NO: 233194 - DNA, 225 bp, Klebsiella pneumoniae; identical to SEQ ID NO: 187404

SEQ ID NO: 233195 - DNA, 570 bp, Klebsiella pneumoniae; identical to SEQ ID NO: 187409

SEQ ID NO: 233196 - DNA, 1470 bp, Klebsiella pneumoniae; identical to SEQ ID NO: 187410

SEQ ID NO: 233197 - DNA, 957 bp, Klebsiella pneumoniae; identical to SEQ ID NO: 187411

SEQ ID NO: 233198 - DNA, 567 bp, Klebsiella pneumoniae; identical to SEQ ID NO: 187412

SEQ ID NO: 233199 - DNA, 813 bp, Klebsiella pneumoniae
atggccgacctgactgcctttgagcgtcgtaagctcgaaaagctgtttggtatggggggcggttatgttttgaatttttcagaccgcacctattccgaattcttcattgattaccgtgtggaaattgatgcagctcagtaccgaacaggtggcgactccaaggccaagcggatgcgcacgttctgggatgttgctcccaaccatacggctggccgtgtgattgatggtttgattgctgttggtattcaagaggactgccttggagatagcaatcctctgctgatcgaggattgtcggaagatcgctcagcgccttcttagtaaccagccagtggctgaactggatgcgttgaccgccattgcggatgagcgagatttcgaggtggtggcggagcacgtccgcgaggcaatcgagaagaatcaacccgagggcgggctggatcggctgcatactttcgtcaacaaattcatccgcgtgacgtgtgaaccgcacggcatcactatcactcgtgataagccgctgcatagtgttttcggagagtacgtcaaggcgctgcgggaaggtggtcatcttgagtcggccatgaccgagcgcatccttaagtccagtatttcagtgctggaagcctttaatgacgtgcgtaacaacaagagtcttgcacacgataacccgatactgaattatgaggaaagcttgttgatctttaatcacgttgcagcatcagttcgttttatcaagtccttggaggccaagataaaagctaaaataacacaggcaaaacacggggggtgggacgaaagcatccctttctag

SEQ ID NO: 233200 - DNA, 198 bp, Klebsiella pneumoniae; identical to SEQ ID NO: 187414

SEQ ID NO: 233201 - DNA, 312 bp, Klebsiella pneumoniae
gtggcactggttggagggggtccggcgggcacgcatcttctgcagcgccatcatcatctccaccacgttcatctgcgccatcacctcgaccgctttggccggcgtgatggcggtagtgatggcaatgatctcctcccggctgacgtgaatatccaccagcatgcgggctatttccaccgcctccaggcgcattgcctgctctgtgcgctcaacgttgatcgcgtaatcggcgataaaccggtcgatcatgtcaaactggtcccggcgtttgccgtccagctcgacgatcagaccgttgtccacttttactga

SEQ ID NO: 233202 - DNA, 5112 bp, Klebsiella pneumoniae
atgagtctagaaataaaaaaacaaagtaacccgttttctactggcggtgggggagttaattttgaaacaagagttcaagcagctttcgcactatccttattgactaaatcttgtgttccttgtttgagtaactacatgagggctaaagagttaaaattccagaacaaatatgatggtgtaaatactgatgattttgtattgactgccacagacaactcaaataatgaaagtaagatctttgctcagattaaacatgaaataactattagtggctcatcaaactcagtatttgcagaagttatacatagtgcttgggcggactttaaaaatgtgggctttaagtcagaaagagattctatcgcgttaataacaggtaatttaccaaaaactgacataaataatactttgccgttacttgaatgggctaagttttcatcgaactcagaagattttataaagaaatctcaaacccaaggatttaccagtgaagcaaagctcgaaagattagggatatttagagatcagcttactcatgcgaataacggggtagctatctcagaagaagaattgtggtctttcttaaaatcgtttcagattttaccttttgacttagatgcagaacattcaatcgtagcaaacttactttgctcattgattcagtgttactcagacgtattaccttctctagtcttagctagacttgtttcctgcgttcaaagtttcaaccagaatgcgggggttttaactcaaaataatataccagaagacgttaaaggattatttaataaatcaagccacttatatttcgaggatgacttgataaagctttatgaacgcagtcagcatatttttgaaggtatttctacaactataaatggactccatgttgataggacagaacaactagcagcactatctaactgctatagcgatagtgagtttgtatttgttaccggtgcaagaggggctggaaagtcaggcgttgttaaagattttatcacaacaaaaaatttagatattccagtcttctacttaagagctgaagatttagataaaagtaacttaaatgaagttttcacttccatgggaattacatcttctttgggagaaattgaaagtcatttctcattgcttcacgaaaaagtactcgtaatagagtccctagaaaaagttttagagctaaattatccaaatacttttgttgagttattgcaatacattagaaaacagtctggttggactatcattgcaactggccgggactatgcttatcaacaattgttatttaatttcctacagccttgctctataaattttagcagcatgaatattgaagggcttgaagatagtcaagtcgagcaagtttgcgagcatattccagagctaaaatctttagtatctaataactcattagtagaactactaagaataccattttttattgagattgctgtaagagctataaaaaatggcgctcaatttgggattggagatactgaagaagactttagggatacagtgtggcggactgtcgttgcaaaagaagctgatagaaagtcagggatgccagatagaagaagagcaacctttatcaaaatagcaatagagagagctaaaaagatgctttttggtgtcagagcaagcggttttgacccggaagtaatcgcaaagttggaagaagacaatttgatctacagagatcaaaaatcatcttgtgtaagtcctatgcatgatgttttggaagattgggctttagaggagttcatcgatagagagcattttgataattctcataatgttgcaagctttttgttaaatataggaaatgaacctgcgataagtagggcattcaggttatggctgtataggaagctaaaatttgatgatacaactaatgaattcgtagaaggtttattatcttcggacgagatagagagttattggaaggacgaggcaatttctgcaatcatgcagcatgactctcccgggatattttttaattcactcaaacgccaacttcttaaagatgattgtgctcttttgacacggttttgttttattctcagaataacgtgtcaaagaccaatatctctacacaacggactattgataaaagataaaaaatcgggattgctcaaatcccttttcctgaaaccatatggagaaggttgggaagcactattccattttatttatcaggaaagagatgatttgagtagtcctgtgcgcactcaagttattgaattaatagatgaatggactggtctcattaatatacatgatgagttgccaaaagcgtctgaaaaggttggttttttaagtttatggctccttgaaaaggttaaagattcatatcgtggtgaggggcaaagaaaaaaaatattaaatgctttattaaaagtttcaacggctattaaagatgattttgatgaattgatgaaacaggacgttttcacctcaaagataaagcctagacgattaagttatgttgatgaactgagtagtttggcacttataggcttcaatgttcctatgttgtgtaagttttatcctgacttcgtagttaaactttcaatgcatgagtggctgttggaagaatccgaagagaacgattatggctacgggtcatatcgagtagacgtagaggaatcatttgggctagatacagaacgagattttttccctgcaagcggtgccaaaggccctttcaaatatcttcttcaattcaagccaaggctaggcttggatttcattattagattgtgcaatttgacagcacaaaaatactcagaatcggatttttctaaaactcaagacaataaagaagacactatttacgccttcgaaacagtagctaaacaagtcgatataaccctgaatgatggcacagtagttaaacagtatgcatctccccacctctggaagggatatagaggacagtctacgttgccctacttattacagagtgctcttatggcattggagaactggttagttgagtacgttgaaaattgtggtaagaataatgaaatagattggatttttgattatgttcttcgctctagtaattcagtaatgcctacatctgttttatcttctgtggccacaggcttccctaataaagtaggtaaagcagcctttcctttgcttaaaactgctgatttataccatttagatttgattcgaatgacacaagaaatgggtggaaatgagatgcatttctttggtcttaatagggatgcattgtcgaaaatatacctagaagagagaagagaagcagcacttcgaccatggagaaaagagtcattagaaaccttattaacaaggcttcagttcgtaaatgagttaagggatgatattttaaaaattgttgatgaactgaaaaatgaagctactgcaagtaatgaaaaaagccttcggtatatggtgcacagagtcgatacaaggacttggaaagtagttgaagacaaagaaaatgacagagtattgtttcaaagctcatcagagcttccggaagatttaaagctggatcaacaagaatttaatgaaaagcacgcaatggataacaccgtaactagtttaaacttatggggtaaaaaactattcgatgagcaattactagaagaaaaatacttctcttcatatcaggatgcattaatagctactaagggattgctcagcgccctccaaaaaggtgaagtacacaactttgctgatatggcggttggcacaatcacaactgttgcagcggtttgtgttcgtgatgttcttttagaattgagctatgaagataaaaagtggtgcttagaaatcatcctagaatcaatattcatgcacgcagacaatatgaatgggacagctgcacatgataagactgattattatggctctggagcatgcgcatttgtcttacctaagttatttgatttagatctagattcagaacaaatagaatatctgaagtttgcgttagctacagcattaacgcatgagaacctgaacgttagtgcttgtgctgctaagggagtaagagagtttctttggtctagagacgctgaattagcatcccgttgtataggtggaatagttgagtatgccagattacgaagggaagatagtgaggtacgtaggttttatcatttacaaggtgctgaattgcaagccgcactcgaaaaatggaatgatcttttaacaagttttcgtaacgacttgattgagggaaagtttaagctttcagttaacgatatatctttggaaagccactgttcgtggtttattcatttaccaatgctaatggttccttactgtactaaggatgagatacaaattcagttggtcaataggttaatgagttttgtatttgatacggagtatcaaaaccatcgttcgagtgatgatgaaaaaataaatcatgaaattaaaaagcagattcaagactgtctctctgaacatgttgtttcttcaagaaaaaataacttcatgccctttaaagatctattggtgttagggtgtacaaaagctcccggcttcatttattctttaacactctcctatcatgtcgctgtagaaaaagaaggtgattatgatgctatatgggcactttggtgcctgttagcaccagaagcacacaagatagctttgaatgatgttaatgatcgttatatcggtttacagaatgacctaaatcagctcctgcgtggaatgatgtatgcggattgcccttggcaaggacatgagaatgaagagaaagatatgaagcgaggtgctaaatatttgctcgattttgctaggcaatctgcacataatagccatgtgtttgaagccttgtcttcattgatttataacttctacaacgtattcttcgaagaaggcattctgattttagctgagcattatagtgccaatcgacatattatcgggaagcaagtcaatacagcattttatatagaaatggttgttggaagatttttgcagatagaaaatcgcggaactctcaatagaaaaatgtacgatatatgcctgcttctcttaacaggaattgtagaaactggctctgctagagcttattacttacgtgaagaattgattcgttctcgaaagatttcagcctag

SEQ ID NO: 233203 - DNA, 1938 bp, Klebsiella pneumoniae
gtggaaaaagccaaaaaaatggcgtggcatcttttggctgccagcgttggtttgttgacgttgagtcagctggcgcatgcggattcactggatgaacagcgcagccgctacgcacaaattaagcaggcgtgggataaccggcagatggatgtagtcgaccagctgatgcccacgttaagcacctatcccctgtatccctatttgcagtaccgacagatcaccgacgatctgatgaaccagccggcgctggtggtgaaaaactttattgacgccaatccgacgctgccccctgcgcgttcattacgttcgcgcttcgtgaatgaactggcccggcgcagcgactggcgcggcttgctggcgtttagcccggataagccgaccagcaccgaggcgcagtgcaactattactacgccaagctgagcgtggggcagtcgcaggaggcctggagcggggcgaaagagctgtggttgacgggcaagaatcagcccggcgcctgtgaaccgctgttcagcgcctggcgcgactccggtcagcaggatccgctggcctatctcgaacggatccgcctggcgatgaaggccggcaatatcgggctggtgaaatcgctggcccagcaaatgcccgccaactaccagagcatcgccagcgccgtggtcgccctggctaacgatccaaacagcgtcctcaccttcgcccgcaccaccggggcgacggactttacccgtcagatggccgccgtcgccttcgccagcgtcgcccgccaggacgtggaaaatgcccgcctgatgatcccttcgctggtacaggctcagcagctcaatgaggatcagacccaggaactgcgcgatattgtcgcctggcgcctgatgggtagcgatgtaaccgaagagcaggccatctggcgcgatgacgcaatcatgcgttcgcagtccacgccgctggtggagcggcgggtacggatggcgttggggacgggcgatcgccatggcctcaacacctggctggcgcgcctgccgatggaggcgaaagagaaagacgaatggcgctactggcaggcggatctgctgctggagcgcggcagggatgaggaggcgcaggcgatccttcgctcgttgatgcaacagcgaggcttctacccgatggtcgccgcgcagcgtcttggcgaggagtataccttccgcatcgataaagcctcgggcaccatcgatccggcgctggcctccgggccggagatggcgcgggtacgtgagctgatgtactggaatatggataacaccgcgcgcaccgaatgggccaacctggtcactagtcgcaccaaatcccagcaggcgcagctggcgcgctatgccttcgatcagcactggtgggatctgagcgtgcaggcgacgatcgccggtaagctgtgggatcagctggaagaacgtttcccgctggcctataacgacctgtttgcccgctatgttagcggcaaagatattccgcagagctacgcgatggcgattgcccgtcaggagagcgcctggaacccgaaagtgcgctcgccggtcggcgccagcggactgatgcagattatgccgggcaccgcgacgcataccgtcagtatgttcagcattcccggctacagcggcccgtcgcagctgttggatccggaaaccaacatcaatatcggcaccagctatctgcagtacgtttatcagcagttcggcaataaccgtatctacgcctcagcggcctataacgccgggccgggccgggtacgcagctggcaggggaatagcgccggacggatcgacgccgtggcgtttgtcgagagtattccgttttcggaaacccgcggctacgtgaagaatgtcctctcctatgacgcctactaccgctactttatggggcagcaggataagatcctcagcgatgcggagtggcgccagcgttactga

SEQ ID NO: 233204 - DNA, 894 bp, Klebsiella pneumoniae
atgaccctcaccgtattctgcattttgctgttcgccgccctgctgcacgccagctggaacgctatcgtcaaagccagcggcgataaaatgtacgcggcgatcggcgtcagcggctcggccgcgctgatcgccctggtgatgctcccctttgccccgctgctcggcggcatcctcgacaccctgtggagctggcgcgcctgctacgctttcctgctggtcctgtgcgccggggtgaccttcagcatggcgaagtggatgccggaaacgcgcccggaaggggcgccgcgcaccaaacttctggccagctacaaaacgctgttcggcaacggcgcctttaactgctatctgctgatgctgatcggcggcctggcggggattgcggtattcgaagcctgctccggggtgctgatgggcgcggtgctcggcctgagcagcatggcggtgagtattctgtttattctgccgatcccggcggcgttcttcggggcgtggtttgccggccgccccaacaagcgtttcccgaccctgatgtggcagtcggtgatctgctgcctgctggcgggtctgatgatgtggatcccagggctgctgggcatcatgaccgtctggaccctgctggtgcctgcggcgctgttcttcttcggcgccgggatgttgttcccgctggccaccagcggcgcgatggagccgttcccgttcctcgccggaaccgccggggcgctggtgggcggcttgcagaatatcggctccggcgtgctggcctggctgtcggcgatgatgccgcaaaccggtcagggcagcctcggcctgctgatgatgctgatgggcctattgattctgctgtgctggctgccgctggcctcgcgcttcacccaccatcagcagccggtataa

SEQ ID NO: 233205 - DNA, 786 bp, Klebsiella pneumoniae
atgaatatcgtatttctgggtattgatctggctaaaaatgtttttcagctctgcgggttaaaccaggccggcaaaccggtttttacaaaacgaactggccgaaaagaattgctccagacgctggcaaatattcctgcatgtctgattgggatcgaagcgtccagcggggcattttactggcagcgtgagtttgagaaactggggcacaaagtaaaggttatcagtcctcagtatgtaaaaccctttgtccgcgggcaaaaaaatgatggtaatgatgcacaggccatcgcagtggctctgatgcaaccgacaatgcagttcgtgccaccaaaaagccccgaacagcaggatatccaggctttacaccgggcaaggcagcgtattgtcaatcaccgcactgctacagtctgtcaaataagagggctgctacttgaccgggggatccccattggcagtgctgtctccagagctcgccgggctattcctcttatccttgaagatgcagaaaacggtctaagttcccgtatgagcagaacaattgccgagctctatgatctctttaacgatctcgagcgtcggatccatttttttgataaggaaattgaaacagtattcaggcaatcagaagcctgtcagcgtatcgccagagttaaaggcattggccctaaaacggccacggccgttgttgctgctattggcaaaggaactgtaagaatggccgccactttgctgcatggctgggtctggttccacgccagcattcgagtggcgacagacaggtgctga

SEQ ID NO: 233206 - DNA, 228 bp, Klebsiella pneumoniae
atgaatatgacgaaaaaaggcgacaagcatctgcggacactttttattcatggtgccggcgctgtcgtcagggttgccacgagtaacaatgatgtctttatgaatcagtgggttaaccagttaaaggaacagcgcggatttaataaaacgaccgtggcggtcgctaacaaaaacgcgcgaataatctggtcgatgctgagaaatgagaccgagtatcaggtagtgtga

SEQ ID NO: 233207 - DNA, 1152 bp, Klebsiella pneumoniae
atgtccctccctacaaattttaataatattcttcgtctttttgaaaaagattacgatacagccaaagaagataatgccttaagtgcacgcggccaatttctgcaactttacccccttaatcgcctaaaaaaaatgacgcttgatgactatgtcatcggcaaaggcacggcctcattttgtgcttgtgttgaagtaaaaaccagaacatgggcaaatatgcaaggtgcgacggctctcaaatttggtatttattatggaaaatcaaaatcagatccaaccgtccgctatcgttttactcagaaatttggcgatgatgatagtactaataaagaagttttcgctaatgttaaagacgctttactagacctaatacagtcagggaaagaattagattttagagcgattgacgagaaccccctatcccagatgtttaaggctaaaatattgagcctttactttccagaacactttataaacatttgcagcaaagatcatcttaaagaaattgctatggaaatgggtataaaagagcaacagtttattagtaaatatcaacatttgttattcaagaaaaaactagagcataaaatcacccgaaactggagcaatccaaaatatatgtccttcctttatgcccagttcatacgtaaggatcttagcagtactcctgctgtgatagttaaaaaaccacaaaaaagaaaccatcccgaagtcaatttcgaagaaataacggacaatcgtgatttaataggcaaaaaaagcgaagaatatgcattaaactgggaaaaaaaccgcctaatcggtctcggctattcaaaactagctgaggaaatagatgatcgccgtaatcgtccaacttatggttacgactttctttcttttaatgccccaggtgatgagcgatacatcgaagttaaatcaattggccgagatggaaaagagggagcattccgttttttcctctcaggaaatgaactcaccgtttctaatttaagtaaccaccgtaaaaactattatttttatcttgtacagtatgggaaagatggagagccatgcaatctatatgtaaaacatgctcaagatctttacactaagagtgaaatgtccccttgtgcttacgttgttaggttcgatctggaagaacctgcttaa

SEQ ID NO: 233208 - DNA, 1329 bp, Klebsiella pneumoniae
atggctacaactccttcggttccttcacttcctgaacttcccagtgttccaacaacaattctacctgcaattgccgaacttaccgctgcactgggaatcccaagaaatgtattagctagtgatgaagaaataagctttgcttggcaggatttaccaagggaactaagactaattccttcggatcttcgaggtgaactcgtcgcccgtatgtgtgttgcagtaagcgctggcttatttgatggcgcaatgaattacatatggaatgccgcaattttacaaatcagacaaaaggtaaggaattttggtttgcccatcgtaagtcagatgcttcaatccgactttgaagagaagcacttgatcgacttacaagatagtaaacttttagaacttgcattaaaattaaatttagtaaatgaagatggttatttcttcttagatcattgcagagaaatgaggaataatttctctgccgctcacccaactatcggaaatattaatgatagagaattcacaacattcctaaatcgatgtgttagatatgccttggctgatgcttcttctccaagaggagtaaatgttgcagatttcatagcatcaataaaaagtgctcgttttacagggcaacaatgtgctatttggattcagcgaattaatgatacacatgcagcacagaggcaaattcttattggaatggttcatggcatatattgcgatcccaatacatcagaaccagccagattaaatgcaattgatttatgctccgctatcagtgaacagttcactgcggcaattcgctctgacttgatcaacaaacatgctgaatatgctgctaaaggagatgaacaacgccacacagcatctactcaattttttgaaaaactcggtcagataagatacctaagtgaagccgatcagcacatcatattctatcgagcaatagaaagactttggaatgctcataatggaatgaataacttttataatgaaccccccttcgctgaaaggctttgtgagctagcaactcacggagcagtacctgaaacagtacaggaatattttgttcaggttgtagtggcatgtgcgattgggaatggatatggtgtatcgcatggtgcattatcatattacactgaaatgattagaacattttcccctagagaaatagcgactatgattagactctattccgatagaacaaatattgtaggatatcgtatagctacatactccaggggaagagaacgatttaaagagtatttaagaacactcgatccagccagtatttctagcggtgttcgttctgattatgatagaatattacgagaatag

SEQ ID NO: 233209 - DNA, 501 bp, Klebsiella pneumoniae
atgtggatttgtcgaggtacttgttgcaaccaattgaaaatctgcctcctttttttgatcctttcagggcaggcccgttccccttatccccccattcctttcagcctttgcagtcccttttcgccattttcatttcttctttttttgaggtggtacaggtgggacaagtggtacaaccgcgccagccatggctttgcgctgtactatctgaaaaatgtcagcctgaaaagtgggacagactcagcaacggctgtcccaccctgtaccactttttttaaactagattctctaaggtgggacgctgtaacccgcaccagccctgcgtgtaccacttgtcccaccctgtaccacctttttttgaaacacgcgagaccgcactcagatactgaggatgcgggaggtgagccgatagaccctggttttgccgatctccggcaggcgaacctgcgactggtatttcccgtcgctgccgggcagaaggcattccgcttccagacataa

SEQ ID NO: 233210 - DNA, 1557 bp, Klebsiella pneumoniae
atgaaacgcgccccctttctctgtaagcagtctccggaccgcacgctcgaggtggtaatccttgccggaagcctggcatgggagacctcacgcgagtggcgaaaagatcccgaccaagaagatgatgtacctccagtggtactcggcccggatgaactggccgatctggacaacctgaccattatcaggcccgacacactctacgcccgggtattccgcaccggcgatatccgcgaagaagatctgctgaaaatcgccgtaaaactggcgcacgcgggtgtgcagatggcccggctgatgacccctgacggtgaggtactggagaactggaccggacagcttgaacgcctgcgacaggaaaggccttccgacatcctgccggatcactttcgtctcgatgaagaggcactgtggtttgacaagctgaccgagcgacgcgacggcgaaagcgacatccagccccagcgcatctgctcccctctgcgcgttaccgctatcacctgcgacagccatgacggcagctatggccgcctgctggaatggcacaccaccaccgggcagttacggcgctgggccatgccaatggcaatgctcagcggcaacggcgaggagctgcggcgcatcctgctggaaaacggcctgacctatatctccacccgccccgccctgcgcagcctgctgtgcgaatacatctcacggtcacgccccggacgccgggtcacctgcgtggagaaaaccggctggcacaacggggtttacgtgctcccggatgaggttatcggtccggatggcgacagcgttatccttcagggcagccactacctgactggtggctttgcgcaggcagggacgctggcagagtggcaggagcaggtcgccgcactctgtgcaggcaattcacggctggtctttgccgtctgctgtgcgctggccgccccgttgctgcgcctgaccggaacgggcggtggcggttttcacctgcgcggtgagtccaccgacggcaaaaccacggtgatgaaggtggccgcctccgtctgtggcggcacggactactggcactcctggcgggccaccgggaatgcgctggaaggaattgccagccgccacaacgatgccctgctgccgctcgatgaactgcgcgaagtggacccgcgtgaggccgggatgattgcctatatgctggcgaacggtcagggcaaggggcgcgcccgaaccgacggcgaggtacgtaaccgcaggcactggacgctgctgctgttctccaccggggagctgtcgctggcggaacataccgaacgcgccggggagcgcctctacgccgggatggacgtgcgcatggtacaaatccccagcgacaccggacagcatggtgcgtttgaacagttgcacgggtttgccagcggccagcagttcgccgatgccctctgcgaccgggtggcccgtttccatggcaccgcttttcgtgcctggctggccttccttaccagcaacctggacgccagcaccaccctagcaagagagttacttcgccgctaccagaccgccctgacgccgtag

SEQ ID NO: 233211 - DNA, 888 bp, Klebsiella pneumoniae
ttgctttatgcgcaggcctgcatttacgacaatgtgaaaaactggaataagttaaatttcaccttcagtattatcataccactgctactttcggtcttgacggtttacaaccgaagcctgaaatttgtcgatatagagctgctatcttccctgttgggactgtacgggttgctcgtgctcactttgaacattgccgtcagtagtcacattgcgtcactacgcagaaaggccgcgtcggttcaggagatgtacgactgtcgggtgcttggcatacggcgtaatgaactgaaagtggaggagatcccccgggacgagatctgcagggcagctgaacgtttcaaaaataatcaggcaaaagcaaataagcgatttggcgatgagggatggtacgtcagtaaggtgtatgacgcgccgcatagtgtgatggcactcctgtgtcacgggaaaaatctcggctgggacaggtcgcttagggaagtaatgcatgtgttttatctgtcagctttcattatcgctccagtggccatgattatttacggcatagtaatgaaatcaggaatgaatgaaatccttttctatatagtgtttacgatgccggttatccgctattttttgcttcagtttctggataaccgcagcagcatgaagagaagtgaaaaactgaaaaagtatgttgagaaggaaatatccagtatcagagtgtctggccgcattgaagaggagaagcttggatatacactcaggaatattcaggatgaaattttttcctatcgagtttcatgtccacccgttccgaactgtatccagaggctgatgaagggcaaaaatgagcggatttatgatgattatttcgagtcaaatctgaaaatgatgcacctgtcagactga

SEQ ID NO: 233212 - DNA, 195 bp, Klebsiella pneumoniae
atggaagatccggacgccgcattacaacagatgtaccgcaaagttatgcctggccggaccttcgacttgctgcaggttattgcagccaacgccgtattggtgtggactgagcccaccacggtagacaaattctgtccttacgtcgaggcctgttcaaaggctatcggactgatacacaagctctccatcgtttaa

SEQ ID NO: 233213 - DNA, 1941 bp, Klebsiella pneumoniae
atgcatcatttaaatgatttccccaaaagagatagaaaccacaggattgaaagacttgcgatatccgcttttgaaaattttcttagagattcaaatgatttcttcattcaaagtcaggatataaatgattacggcgtagactatcaactcgaaatcacaacaaatggtcaagcaactaatattagattgtttgttcaactaaaaggtactgagcaagaattgaataatgatggatcggtcagtatatctgttaatagagccaacctgaattatttattaatgcacccttattctttttatgtgtgtttccatgcaccaagtaatagtctaaaaataacattcgctgaaagcgtaattcgaagctatgaacagtctgaaaaacaatggatagagcaagaaacactcacagtaagattcattgagaatatttctgactctcgtttgcatgaaattgcagagttggctagatttaatgccatgaatgaccgtaatgctagaatcgagttgataacaaatcatatttcaaatgttagcaatgttattaataaagccataccgaagatacatataccagaggataaaaaattagcttatgaattgcttaattcattgtatgaaaataaccatgatgatgtaataagtgctaatttttatgagtttttggctattttcggccctgaccatccggcgatgatcattccatatatgtcggaaattaataaagctatggatagagttaatggcaatgaagcaagggttttaaatgggatacaatatcttagagatagattggaagagggtaatataacaaagggaagtttatattattcaataggtaatggatttacggcacttgacagggacaaagaagctattcaagagtataaaactgctcttgagcatataatcgaagcagataaattagctgcgcaatgctacaaaaatatgggtagtagttactcaaggctagggaatgaaaatgaagcatatgaatgctataagaaggctcttgagttagaaccaaacttaagtgaagctaatttggctttgggagtaattcataatcgtaggggtaattatgaattgtcattagaatatttagatagagtgcttttcccgggaaattatcaacataaaataatttatgttgataaatggagaataaacactcttttcaatataggggattatcgttcggcatatagagagataaataatctattaactcggaatgataataaagaggacttatggaaatggtgcttaatgctagttgcatcgttctgtcgaacttcgactgcgtctgctaagcttagcttgcctttttgggctcgttttttagaattctaccctaatcaccctgatgcatctagagagattctattggcgaaaaattacttaagagttaatgataatttaactaaatattcgtaccatgattttaagaaggagtttgaattacgaataaataatgttagtaatgaagatagtgctttcttgtgggatcgtataggtcattgggcacaagatgaagacgagtgggaagatgcagagatgcatttccgtaaagcatatgaaattgcgggtggcgaatatggatattgtcttggagtagctctgaatcatcttggtcgcttccaggaaagcttgcctattttggttgagcaagctgaaaaaatccaacctgatgattttagctggttccaggtcgctgttgcctacgaatttcaaggatatattcaagaggcaatcgactcttatgaaaaatgcttatcaataaataataaaaatgaattggcattattcaaccttggaggtctttactggaattcgagaaattatgatgaagcaagtcgcgtctggaagttggctgtggcgtattatcccgaacatgagctttcgcataagcttcgaaaggacattccatttattttaaattaa

SEQ ID NO: 233214 - DNA, 744 bp, Klebsiella pneumoniae
atggccgtcgacgacaacccggctaacctgaagctgattggcgccctgctggatgatcttgtgcagcaggtgatcctctgcgacagcggccagcaggcggtggacaaggccaagcagctgcagatggatctgatcctgatggatattcagatgccggatatggacggcatccgcgcctgtgagcttatccatcacctgtcccatcatcagcaaaccccggttattgcggtcaccgcgcacgccctggagggccagcgtgagaaattactgagcgccggcatgaacgactatctggcgaagccaatcgaagaagagaaactgcacgcactgctgctgcgctatcagcccggcctgcacagcgtcgttccggcgtcgttaccgcccgcagagccgatcgtcgatcataatcaaacgctcgactggcagctggcgctgcgccaggcggccatgaagccggacctggcgcgggagatgctgcaaatgctgatcgcctttatgccggaggtgcgtaacaaagttgaggagcagctggtgggcgagcagccggaagggctggtggatctgatccataaactgcacggcagctgcagctatagcggcgtgccgcggctgaaaaagctgtgccataccctggaaagtcagctgcgggcaggcaccgccgccgaggatctggagccggagctgcttgagctgttagatgagatggataatgtggcccgcgaagcgtgccggatgggggtgtaa

SEQ ID NO: 233215 - DNA, 1113 bp, Klebsiella pneumoniae
atgactcttcccttcgtccagtcgctgctgcgcgatcgttttctccatttgctgctgattatcgcctgcgtgctcagcgccatcgtgccgtttgtcccggcaagctggccggcggccattgactggcataccatcgtcacgcttagcggcctgatgttgttgactaaggggatcgaactgagcggctattttgacgtgctgggccgaaaaatggcccgccgctttgtgactgagcgccagctggccatctttatggtgctggcggcggcgctgttgtctacctttcttaccaatgacgttgcgctgtttattgtggtgccgttgacgctgacgctaaaaaaatggtgcgccatcccggtgaaccggctgattattttcgaagcgttggcggtgaacgccggttcgctgctgacgccgatcggcaacccgcagaatattttgctgtggggacgatccggcctctctttcttcgggtttatcggtcagatgctgcctctggcagcggcgatgatgctgaccctgctggcgctgtgctggttctgttttccggcgaagcggctcagttaccagagcagcgacaggacgccgtcatggcaacctaagctcgtctggagctgtctgggactgtatgtggtgtttctgacggcgctggagatgaatcaggccctgtgggggctggcgctggtgctgctgggcttcctggtgctggcccgggcggtgatcgtccatgtcgactggtcgctgttgctggtgtttatggtgatgtttattgacgtccatctgctgacccagcttccggcgctgcaccaggtgctgagcggggtggggaccctctccggcggtggactgtggctgaccgctattggcctgtcgcaggtgatcagtaatgtgccctcgactattctgctgctcaactatgtcccgccgtcgatactgctcgcctgggcggttaacgtgggcggctttggcctgctgccgggctcgctggccaatattatcgccctgcgtatggccagcgatcggcgcatctggtggcgcttccatctctactccattccaatgctgctatgggcggcactcagcggctactggctcttcaaactctgcgcctga

SEQ ID NO: 233216 - DNA, 285 bp, Klebsiella pneumoniae
atgggcacaccacgttttacccctgaatttaaggaagaagctgtccgccaaatcaccgagcggggctattccatctctgaagtatctgaacgactcggcgtttcggcgcacagtctttataaatggctccgcgctgttaagcctgacaacaatgggcaacaggcacaggacttactggatgccagaacagaaattctcaggctgaaagcgcagcttaaacgcactgaggaagaacgggatattctgaaaaaggcagcgcggtactttgcaagggagcccgactga

SEQ ID NO: 233217 - DNA, 204 bp, Klebsiella pneumoniae
atgcacatgctgaagttttacctcgtcagtaccggcaacagacatttcatcacctctaacgaatccgcaaccggcgaaccattgattatgctggaagggtgtactctcagtaatactgtaaagccggagcatgtctccggctttacagtatgggggggaacagagggcgatcgctcaaatggtatgctggtttatttcatgtaa

SEQ ID NO: 233218 - DNA, 987 bp, Klebsiella pneumoniae
gtggatagagatcaaacaaacagcagcctgttcaatgatgatcccgtacttcatgcaacatggctgtactatcaggaaggcaaaagccagactgaagttgcagccatcatgggggtatcccgcgtcacggttgtcaaatatctgcaaacggcccgggaaaatggcctggttcacatcaacctggatgtgaatgtttttggatctatcgatgccgctttgcagatccgcgataaattcaatctccagagagtgatcatcgtgccggatggcgaacatgccggaaaacgtgatgatacaaagctgatgcggactcgtctttcacgtgccggtggcatgtatctgaatcaggtgattgagaatggtgatgtgctgggggttgcctggggaagaacaatccatcagatgagcaaaaccatgacgccgaagtcatgtaaaaatgtcaccgttatacagatgctcggctctatgccctctcagccagacctgacgattattgaatcctcatcgcaaatcgcctacaagctttcaggtcgtgtcgcttcgctgcacgttcctgccgtggtatcaagcgccagactggccatggagttacaggcagagcctattattcgatcgaattttgacgttctgactcgctgtacgaaagccttttttgtcgtgggtaacgcgcttgatgaaaatcccctgattcgggtgggcgtactgaataagaaggagatgcagacgtatcgggatttaggcgcagtaggtgtcatttgtggccgcttctatgacaaggaaggaatgcccgtcgtggctgatgttgaccagcgtattctgggaatcagtctggctcagttaaggcagattgaacggaagatcttccttgctggtggggaaagaggctatgacgcaacgttgggtgccctgctgggaggatatgtcacggacctgattgttgatgaaggaacggcagagtttttgctggcgtgtgaattaccacactaa

SEQ ID NO: 233219 - DNA, 315 bp, Klebsiella pneumoniae
atgaaaaagcctatttcaggagaaccggtcaacgggaaaatgtatttttccgggagtttacgggatcatgtttgtggctggctgggcggtatgatttggtgtgtcggtctggcattcagtctgattgcgtctggtcaggcgggttatgccatttcctacggtctgggacagggtgccacgatgattgccgtgatctggggggtcttcatctggagagaatttgccagtgcgccagtcggaaccaataaactgctgctgaccatgtttatttcatacattgtgggtattgttcttattatcgccgctaatcaataa

SEQ ID NO: 233220 - DNA, 582 bp, Klebsiella pneumoniae
atgattgaatggattatccgccgctcggtggccaatcgcttcctggtgatgatgggcgcgctgtttctcagcctctgggggacctggaccatcgtccatacgccggtggacgccctgccggatctctccgacgtacaggtgatcgtcaaaaccagctacccgggacaggcgccgcagatcgtcgaaaaccaggtcacctggccgctgaccaccaccatgctgtcagtccccggcgccaaaacggtgcgcggcttctcgcagtttggcgactcctacgtatacgtgatttttgaagacggcaccgatccttactgggcgcgctcgcgggtgctggagtatctcaaccaggtacagggcaaacttcccgccggggtcagcgccgaaatgggcccggacgccaccggcgttggctgggtcttcgaatacgcgctggtcgaccgtagcggcaagcacgacctcgccgaactgcgctccctacaggactggttcttaaaatatgagctaaaaccattcctaacgtctcggaagtggcgtcggtgggcggtgtggtcaaggagtaccagattgtcgtcgacccgatga

SEQ ID NO: 233221 - DNA, 384 bp, Klebsiella pneumoniae
gtggaaggcccggccagcacggatgactccgccttgtcctctcttgcctcccgtgttgtccgcgaagcagaaaatctgtatatccccggcgtcaatcgccgcgacagcgctgacgacgtgtttgcctggtccgtgcagactcagtttccttctgacaggctcttcggcacacggattttcccgtcaaccggctggtttgaacgtccggatatgattaaacatccggtgaaatgctactgcgtctgcctgcagtacacgactgaaacattgccatccacactgtatgccctggtcgatgaggccggacggcaggtggcgaagtcgtatattaaaggcgggcactgccctggctcagagggctataccttctgcataacctcttaa

SEQ ID NO: 233222 - DNA, 1155 bp, Klebsiella pneumoniae
atgaaaacggacattaacattggtgtcgtggctgattggtttatcacttatgctggttcagaaaaggttgtcgctgagtttttaagtttatttcctaaatgcgagctttacgctgttgtggattttctctctcaagagaataaattacattttcagaataaagtaataacaactactttcattcaaaacttgcctaaagcacgtacaaaataccagtcatacttaccatttatgccactggcaattgaacagcttgatgtctctaagcatgatgtaatactttctagtagccatgcagtcgctaagggcgtgcttacaggacctgaccaacttcacataagttatgttcattctcctattcgttatgcatgggatttgcaacatcagtacttgagagaggctggattgagtaagggagtgaaagctctcttggctcggtggatattacataaaataaggatgtgggattcccggactgcaaatggtgtagaccatttcattgctaattctaattttattgcgcgtcgtataaaaaaagtctatggcaggaatgcggatgttatatatcctcctgttgatgtcgacaacttcacatttcaagaagagaaggaagaatattattttacggcatctcgtttggttccgtataaacgtattgatttgattgttgaggcatttagttgtatgccaggaagaaaacttgttgttgtcggtgacggacccgaaatgagaaagataaaaaataaagcaacaaaaaacatagatattctaggctaccagtcaaatgaggctatgcgggagtatatgcaaaaagcaaaagcatttgtttttgcggccgaagaagattttggcattaccccggttgaggcccaggcgtgtggaacacctgttattgcctttggtaaaggtggatctttggaaacagtaagaccatatggagtaagcaatcctactggtattttatttgaaaaccaagatatacaatctataattaacggtgttgatttatttgaacgtgtatgcgatgaaattagtcctggagattgtagaaagcatgctgtaaaattttccattgatagatttcgtaatgaaataaatgattatgttctagaaaaatataacaaattcttagatgcgaaaaaaataaattattaa

SEQ ID NO: 233223 - DNA, 1227 bp, Klebsiella pneumoniae
atgtccatcgattattttgcggatcactatagaaatatagcatttaaatataagcatatattatgctttttatctttactttgtgttgcgttcgcagtttttgatggttttcgcgggacgcaatataagccttacttcccatttgcgtttttaagagacttgtctgtttttgtggggggagggctaggtttttttataatcgcaaaaattaaaatacaaaaaagctttgccttattggtttttttgcagatttttatttgcgcttattcatttttcactagttttttggtttcagataaagccgtattcgttaggcaattgactttaggtgggggcattggattttggtccaaaatgttaagcatgatttgtatttgtttccttacatatgcttatatttacgtgtccgggaaaaaagctgttgaaaaaatatttaagtgttttatttattgttcatttctctattcgttgctcaccattatattgtatttgtttttaccgtctctttatgcatccttaccaaggcaatggtacggtcgaatatctattggttatccgactcaagatgtttatgttttagctatttcgctagtgttacttctggagaatatattaaacaaaactctttcaatattaatttctgcggtaaatgtaagctgtattatcatgcagaacacatttacaggctatattcttattgtgttcgtgttttttatttattttatccgatttggtttttttagcaaggcattaatattatctttaggtttctttttgctcatgtttgttttttatatctataaaaactatgaggtctttggcaattttggtgttttgattaaggtgaaggctgattcacttattctaggcggcacggatgacccatctttttatttaagattgcagcaaatagcaatgatgatgaagtcgttattttcagactggatatttgtattatttggctatggagggattggtggtttttctgttgagtcgggagtatattcaactttagcattttcaggagtattaggcattataatatatgtgtttacgattctatacttcctttttctctcgattaaaaataaaagcttcatccttttttccataccatcaatgtacattctttcatctttttcaatcagcccaatatatttaatgtctacatattggactttgggttttttaatagcctatcaatcttttgttgatgaggttaaataa

SEQ ID NO: 233224 - DNA, 1428 bp, Klebsiella pneumoniae
atgtctaaaaacaaaacgttgtctggaggggttgcttggtttttcattagtaatctatttcctgctataagtgctcttttaatattttctttagcttcaagattaatatccccatcagagttaggaacagtagctctagcaacaactattgctacggtgcttactagtttatgtgcagtaggtttcggagatgcattaattcaatgtaaagagataaccaaaagacatctgaatacggtttttacagtatgcatttgtgtttcattatttgtctatgttatctctgtaaccttgattgagacaatcaacctagatgcctttactcatttatttagggtggtttatcccttaactgcgtttaaaataatactagattcttgtgcaatcgtaccattaagttatttaacacgaacaatggaatttaaatctattgcattaaggacgatgtattgctctcttgcctcttttattttatgtatccctattctttattacggaggaggggtgtgggcaattgtcgtcagccaattgacgacatcagctgtaagttttttaatattaattaaagcagccaatcttaaattaagagttgcttttcatcgtaaggaatttaatgaattaaaaaaatttggattgacgtcaacaattactaagttgattacgtctatcagtgttgataatctcatgattggcttttatggtaatgcaattacccttggtttatatgcttttagtcgacgtatttttggagttatttctgacgtattaaataatgccattgcgaacgtttcttatcctttatatgcatccaaacaagataatcttaatgagttaaaaatcattttcctaaaaacaacatttctttcagcacttatcagtttgcctgcattttgtggtttgatactgatttcgccgtatctgattcctatggtttttggtaatcaatgggagcccgctatctctgttgttcaagtatgtagtgctattggttttatttcctgtattggtgcattacaaatgtcattgataaagggattaggtcatacttcttggatactcaagtatcaaatagcacaacaagtttcaactgctatattggtactgatttttgcaaaggatggagcatatatagtaatgttagctatagcaataaaaactttttctatctggcctttttctatgcgctatgtatcaaaaatattgggagtaggtatagtcgattatatgaggaactttgttaaaccaattttagcggtttcggcaatgattacagtttgtgttataattgaatgtattacaaaagattatggctcgttagttattctgttgagcgttattttagggggcgttatttcctatatattaagtgcctttttattggcaagaaaggaaacctttgattttataaaggcaattaaaaaaagatag

SEQ ID NO: 233225 - DNA, 1161 bp, Klebsiella pneumoniae
atgataattatggacttaatggcgactcagtcatcgcctgaagctgcatttcatggtggtggtgaatatgctaaatgtgttttctatgctgcaattaagaatgggtataaagatttcacaggaatatataataatactttaaatcttgatcccgacattacttttttatgcaatcagaataatataacattaatacccgtctcttcatcggcagagttggttaaaatcgttaactctcatccaggttctatattttactctgcattgccgtatgctttaaatggtattgatacttcaatcattaactttataattacaatccatggtttaagagagcttgagtgtccatatgatgaagttgtatgggattatactcatggtcttaaaaacaaattaaaagtatttctgaaaaactatgtattcaagtcatacttcttagataaagttaaaagtaactttgagaaaatagctgtaaagaaaaatgtaaaaatatttacagtatctaatcattcaaaatattcaatattaagtttttttccgactatcgataaagatgatattttggtttttagagctccatgtccatttggaccgcatgagccagagtgtaaaaaccataatcttttgtctttaggtggacgaaaattttttttaatggtaagtggcaatcggtggcagaagaacatagttagagctctacgtgcattagataactattttgataaaatagctgattgtgatttaaaagtaatcattacaggtagtaaatcaccattaataaaattacgtaatgataaacgctttatattcatcgattatgtcgaaggaagtacattagattggctttataagaatgcattttgttttatttatccctctttaaatgaaggatatggttatccgccgttacaggccatgaggtacggtacacccgtaattgcatcttgcacatcaagtattccagaagtatgtgcagataatgtactatattttgatccaaggaatataagcgaaatcgaaaatcgaattctgcaattatctacagatggtgaactttataataaactagctttgaaggggagcgagcattataaaaagatattacaatcacaggacaaagatctatctaaattactaaggggtatttttgaggcacgttaa

SEQ ID NO: 233226 - DNA, 774 bp, Klebsiella pneumoniae
ttgatccagtctggaggaacttttgctattgccatgtacacatggacacttttttctaagctacgtaatgtagatatatatatcattggtgttgggtgcgctgagcattttgatagaatagatcggttcttgttcaagcgctcgttatcaagagcgaaggatatattagtccgtgaaaagagttctataagtaaaataaaagatttctttgattgtgatgtaagatatattcctgatcttgcatatgcattatttaaacaagatgattataaccacaaaaaagacaatttagctattataggttgcactgcttattatgtttatatgaaaaacataaacgaattgggtctgaaagatattatgacctttgagcaatatataaatgcttggatttcaattattttagacgaatgtaatgagcacagagtattacttctatctactaccgttgaagacgctgagtttagtcgtatcgtgtataaccaaataagtaagaactatattcatttattggatcgtataataattaaagatgaagtgttgcctgtccgtgaatatattgaattactgaaaactgcaaaaatagtacgttctgggcgcatgcattcactaattcttggtcatattagtggatgcaaatgtattccatataatataaataaaaaaatagaacatttttcgcatgagtatttggaccatgatgcatcaaatataagcaagagtgtttacaactcatttggtaatgcattttccggtgataaagggagtaagtaa

SEQ ID NO: 233227 - DNA, 861 bp, Klebsiella pneumoniae
atggatattaagttattgcgtgcatttgttactctctcgcaactgaagcggtaccactcggcggctgaaaaactatgtgtcactcaaccggcattgactaagcagatacagacactagagtctttatcaggaataaccctatttcagcgaggccgtcatggggccagattgaccgttgcaggagaactgttactacaacgggcttctgaagtactggcatcctatgataatttccggactgatgtgtccagcattcagcaaggactagtgggtaaactgacggtaggcttcggtatttcatctttccgcgtggcccctgaaaaggttgctattttccgtgctctgtatccagacgtgcaagtgtccctgaatgatatgtcctcggcagtacagttccagaaactcgcagaagggcaacttcagacggggtttgttcggcttcctgcacctgaacgactggagagtaaaattctggcagaagaaaagctagttcttgccgtagcccacgagcatgatactgagttatctagtgcggcagagctgctaggttcgaggaagctcctgcaattatccagggacagaggggagggtctgtcggaacagatattgcgttttctttcacttcgtcaactcactccgcagacagtctttccagcagatgacattcagactcttctggctcttgttgccaccaaaaatggtgtggccttattgcctgcgggagttttccatattcttccttgtggcgtcaggcttatacctcttgagggagaacatacaacctggcagacaggaattgcctggaacccgcaaataaaagaccctgtaagagataattttataaatatagtgacaccataa

SEQ ID NO: 233228 - DNA, 330 bp, Klebsiella pneumoniae
atgattgatgttctaggtccagaaaagcgcagacggggcagcgttcaggaaaaaatcgccattgttcagcagagctttgagcccggaatgaccgtgtcgctggtcgcccgtcagcatggtgttgctgccagtcagttgttcctgtggcgtaagcagtatcaggaaggcagcctcaccgccgttgtcgcaggagaacaggttgtacccgcgtcggagctggcttctgcgatgaagcaaatcaaacagctgcagcgtctgctgggcaagaagacaatggaaaacgagctgctgaaagaggccgttgaatatggccaccaaaaaagtgaatag

SEQ ID NO: 233229 - DNA, 381 bp, Klebsiella pneumoniae
atgctggttgcagtagagcgtcgcttcggtaacagcctgccggcatcacctgttgagtggctgacggataacggtgcggcctaccgttctcatcagacgcgtcagttcgccagaatagtaggactggagcctgaacatacggcggtacgcagcccggaaagcaacgggatgacagagagcttcgtcaaaacggtgaagcgcgactacatcagtatcatgccgaaacccgatgggttaacatcggtaaagaaccttgcggaggccttcgaacattacaacgaatggcatccgcatagtacaccgaggtatcgttcgccacgggaatatctgcggcggcggaccagtaatgggttaagtgataaaaagtgtatggaaatatag

SEQ ID NO: 233230 - DNA, 420 bp, Klebsiella pneumoniae
gtggataattttagtcgggagtgtgtggcgatccatggcggaaagtcgctgaaaggtgagtatgtggtcggtgtgatggaaaggttgcgggtgctgggcaagcgtctgccggtacgtattcagacagataacggcagcgagtttattttgaaaagtctggataaatgggcgtatgagcacggtgtcacaatggacttatcccgccccggaaaaccaacggataacccgtttattgaatcatttaacggcagtctgcgggatgaatgcctgaacattcactggtttctctcgctggaagatgcgcaggacaaactcgacaactggcgcagggaatataatcatgagagaacgcattcatcattaaatgacatgactccggctgaattcatccgaagtctccggaaagacgaagatctctga

SEQ ID NO: 233231 - DNA, 570 bp, Klebsiella pneumoniae
atggtaaaaataggttttatcgttgaaggtgatactgagtcaatcatagtgaattcaccagcgttcattgcatttctgcgcacgaataattttgaattggtaactcccgttattgatgccaaaggtggtggtaacctgttaccgaagtatgttgataatttcgttgcaaggctcagaaatgtaggcgctgaacgggtctgtattctgaccgatctggaagatgcggcatctgttgctgatgtgcgggcccgaattgcccatcaagatgtcgacatctcgtttatcgcagtcaaagcagttgaggcctggtttcttgccgattcagaggcaatgaaaaaatggcttaaagtagacacatttaatgaagagttacctgaagctacaactgaaatgccatgggatcgtttaaaagaaatttcacgtgagctaggaaagcagggtccggggagttctaaaaccgcatttgccaagagaatggtaacgcatcacggttttgatattcagagttcagccagccacccagcctgccctagcgcccatgaactggtcgactggtttgagaatcaataa

SEQ ID NO: 233232 - DNA, 2598 bp, Klebsiella pneumoniae
atgcaatttaaagaactggaatccgggcttcgtcagaagtttaccgacaaccgtatcgtcttctggcatgatccggaacaacgtttcactgattcgctcaatgagctggatctcgacaacgttgcgctgctggatatgcgcggcgtttctgtgctcgcaacaaaaaaacgactcgaaatcgacgagcctgagcaaaaatttttactctatttcaccagtgaggttcccgctcgcgagcaggactggttgctggatattcgcctctatagcaccgaattccacgctgattatgcggcgatcactctgaattctcttggtatcccacagctagggttgcgcgaacatatacagctgcgcaaagccttctttaccgtcaagcgaactcagatcctgaagggatgggtcaccgagcgcgaaacggaaagctcactcgataagaaaatgctagcagtggtggtcggggccagtacctttgaaaccaaagaaattttgtttgctctgattcagcagtttgtcgcggcacggcagcaagatgatagcgctctggagaacaccttcgccgtactgaagaaacttggcctggatgaggtactctgggagattcttcgtgttgagctcgggtaccagtttgaatctccgtcactggaaaacctgcttctgaaactgttctgtaccgatctctgggcacagggtgatgaagcgcatcgtgactggttgagcaaaaatgtactggttaccgctgctggacgggcgtcttcactggcctttataggggcgtggcgcaacgatcgtcgctataaagcagaatatgattattgtgcagaggatttgcagcagacgctccagccaaaagagcactacaactacagttcaccgtacgccttggcaaaatgtgaaaccttcgaggccattgaacaacttattatccgtggtctggtgacacagctgcaggaagagagcaccactctagatagagatgcttttaaagcgttggtttcagagcgcagtgcgaaatactggagccaaacccgcccagagtatctttctatctggaatgctattcgtcaggcggaacgcttgctgaatttgcgtaaccactacactgacgggtttaatttccccaatacagccgcgttctggaaggcctactgcgacgaaatttatcgcttcgatcagacatatcgtttgtttaatgaatatgccgcaccggtgcacagcaaaggggcgatgatcctgcatgaactggataaattcattgaagagttgtacagcaactggtatctggctgagctgagtcgcggctggaacaaactgctggaagcggaaaaccgtatgcaggcatggcagtttagtggcatacccctgcagcgcaatttctataaagagaatgttaaacgtcagtttgacacctctcaggtgaaacgcgtttttgtcgtgatctcggatgcactgcgctacgaagtggcggaagagctgggcaggcatattaaccatgagaagcacttcagcgcagagctgcgctcccagaccggagtgctcccaagctatacccaactgggcatggccgcactgttgcctcatgagtcgttgagctaccttcctgataattctggcgtagtttacgctgatgggatgtccacttccgggtttgaaaaacgcgccactattctggcgaaggtgaatggtgtagcgctgaaagcaaaggacttgcagaacgccaataaccaggaagtgaacgagcaaatccgcaacgcttccgtggtttatatctggcacgacactatagatgcgatgggtgataaggcggctaccgaagataaaacattcgaggcttgccgaagcgctattaccgagctaaaagatttggtctcacgcctgcgtagccgatttaatgccagccgaatttttgttaccgccgatcatgggttcctgttccagcaacaggcgctggtggagcaggataaaacgaagctggaaagtaaagccaaagacacgattgaagcgaataagcgttttattgtaggtcatcaactgcctgaaagtgaattttgctggcacggtaaactggcagatactgcaggctcaagcgatgagagtgaattcctgttacccaaaggggtacagcgtttccacttcgtaggtggtgctcgtttcgttcatggcggagccatgctgcaggaggtgtgtgttcctgtgttgaagattcgcgcgcttgaaaagaaagcggctgagaagcaaccccagcggcagcccgtgtccgtcgttgcgcgggatcaggtgatcaaactggttaacagcattgataaagttggttttattcagacttcggcagtgaatgatttaaatgagccgcgcacgctgaatatctttatcgtcgatgaaaacaaccaggtcgtctccggcacggagacagtatgcttcgacagtgataacgaagatatgggtaaacgcacccgcgatgtaaccatgaaactcatggggacggcattcaatcgtaaaaacaagtatgttcttattttggagaatgcggacagcgcaacagagtatggtcgctacccgatcacgatcgacctggcatttcaggatgacttcttttaa

SEQ ID NO: 233233 - DNA, 2076 bp, Klebsiella pneumoniae
atgcaacagcaggataactcagccagtaacatggaaacggcctctgtgttggctcaggacctggattcattgttgaatcagcactttcgcggtcgcgtggtgcgtaaggatctgactaagcaacttaaagaaggggctaatgttccggtttacgtactggaatatctactcggtatgtactgtgcctccgatgacgatgaggttgtcgagcaggggctacagtcggttaagcgtattctttctgagaactatgttcgcccagatgaagcagaaaaagtgaaatcactgattcgcgagcgtggttcttacaaaattatcgataaggtcacggtaaagctaaaccagaagaaagacgtttacgaagcccagctttctaacctcggtattaaagatgccctggtgccgtctcagatggtgaaagacaatgagaaactgttgacgggtggtatctggtgcatgatcaccgtgaactacttttatgaagaagggcaaaaaacgtctcctttctcgctgttcacactgaagccgatccagatgccaaacatggatatggatgaggtgtttgaagctcgcaagcagtttgatcgcgaccagtggattgacgtgctgttacgttctattgggatggagcccgcgaatatcgaacaacgcaccaagtggcatctgattactcgcatgatccccttcgtggaaaacaattataacgtctgtgagcttggccctcgtgggaccggtaagagtcacgtttataaagagtgctcccctaactctctgctggtatctggcgggcaaaccacggtagcgaacttgttttacaacatggccagccggcagattggtcttgtgggtatgtgggacgtcgtcgcgtttgatgaagtggcagggatcaccttcaaagacaaagatggcgtgcagatcatgaaggactacatggcgtcaggttcgttctctcgtggtcgtgattccatcgaaggtaaagcctccatggtgtttgtcggcaacattaaccaaagcgtggacacgctagtcaaaaccagtcatctgcttgcaccgtttccggatgcgatgattgatactgcattttttgaccgcttccatgcttatattcctggttgggaaattccaaagatgcgtccggagtttttcaccaatcgctatggtttgattacggattacctcgctgaatatatgcgcgagatgcgtaaacgtagcttctccgatgcaattgataaattcttcaagctgggaaataacctcaatcagcgtgacgtgattgccgtacgccgcacggtatccggtctgttgaagctactgcacccagacggcacttacgacaaagaagatgtacgggtttgcctgatctatgcactggaggtccgccgtcgcgttaaagagcagcttaagaaactcggtggcctggagttctttgatgtgaacttcagttatatcgataacgagagcctggaagagttcttcgtgagcgtaccggagcagggcggcagtgaattgattcccgccggtatgccgaaacctggcgtagtgcatctggtcacgcaggctgattcaggcatgacgggcctctatcgtttcgaaacgcagatgactgccggtaatggcaaacatgcggtatcaggtttagggtcgaatacagcagcgaaagaagcgatccgcgtgggttttgactacttcaaaggtaacttaggtcgtatcagtactgcggctaaattctctgaacatgaatatcatcttcatgtggtggagctgcacagcacagggccgagtacaaccaccagtctggccgcgttaatcgcgttctgttccatattgctggcaaaaccggttcaggaacaaatggtcgtattgggcggcatgactttgggtggcgtgacgaatcccgttcaggatttagctgcatgcctgcaggtagcattcgatagcggtgctaaaaaggtattgctccctatggcgtctgctatggatattccgaccgtaccgactgagttgtttaccaagttccaggtaagcttttatgccgatccggtagatgctgtatataaggcattgggtgtcaactaa

SEQ ID NO: 233234 - DNA, 663 bp, Klebsiella pneumoniae
atgggtatcagaagatacaccgatgttctggcaaaacgatcatttttacatgcttattactataagcaagttcatcagcaagataatacttatccttttgaggatttttatcgtactaacagtaaaaacccacaagcagcattgatgagtatgctctcctggtggaaaagcctttcagccccgccgtctaatgaggatattcatcttgggatttacgctccctatattcgcgaaaacttgtcaaaaaataatattggctcattgactgaggataagatccatcaaatattctcttatacacatgcaacaatggaccatgtgataaaaatgagtgctgaaacatttggccaacctgccacaaagtccttaaacaaggaagaacgtgccgttttatttacaaaatggatcatgggccaaacaaatcaaaaaggcatgactattgctgaattactcaattatgtgctctacggtggaacgccttcttttatgtgggaaaggatctatcaggcagggaaagatgagcaatataaattccagcattacggtattaactccattgctgaagttgttggctgggccagacctgatgatacgcctcccagaaatggcagaaccaataaagcattgcgggcattgggctatccagttcaagtgaatatttga

SEQ ID NO: 233235 - DNA, 132 bp, Klebsiella pneumoniae
atgctgtttggtcactggttggaaggcaaagagatcccagatccttatcgtaaaagcgacgaggcatttgattctgtatatcagttaattgacattgccagccagcgttgggctgccaaattgagtggataa

SEQ ID NO: 233236 - DNA, 2169 bp, Klebsiella pneumoniae
atgacttcagtcacaacaaacaaaccggcaacaccggattctgatgaaatcgatctggggcgccttattggtgagttgatcgatcatcgaaaattaattattgctataacgaccgggtttacagtactttcagtactttatgcgctattagctactccgatctaccaggcagatgcactaattcaggtggagcagaaacagggaaacgcgatcttaagtagtttgagtcagatgttacctgatggccagccgcagtcagctccggaaatagccttattacagtctaggatgatacttggtaagactgtggatgatttgaacttacaggcacaggtaagaccaaaatattttcctcttgtaggccgcggtttagcacgaattatgggtgataaaccagggaatattgctattagtcgcatttatttacctagtcgaggtgatgatgaaagtgcgccaaaagttattcttactgtgaaagatgataaacattatctggttgagggcgatgattttagtgctaatggtactgtagggacgttacttaatgaacatggcatctctcttttagttaactcaattgatgcaaaaccgggcgataagttcactgttagccagttgacgagattgaaagctattactgatcttcaggagatctttagcgttgccgatcaaggtaaagacactgggatgttggagctaacattaagtggagataatcctgagctgatatctcgcatacttgatagcattagccagaactatttgacccagaatatcgatcggcaagctgcgcaggatgcaaaaagcttagagttcctaaatgaacaattgccgaaagttcgtagtgatctggatattgcagaagataagttaaatgcttatcgcaaacagaaagactctgttgacctaaccatggaggctaaatcagttctggagcaaattgttaatgttgacaatcaacttaacggcttgactttccgtgaagcggaaatatcacaactatataccaaagagcacccgacctataaagcattaatggagaagcgacaaacactgcaggaagagaaatccaagctcaataaacgggtgagtagcatgccatctacgcagcaggaagtattacgtttgagtagggatgtagagtccggtcgtgctgtgtatttacagttgttgaatcgtcagcaagaactaaatattgctaaatcaagtgctattggtaatgtgcggattatagataacgcaataactgaacctgatcccgtaaaacccaaaaaagtgttggtggttgcaattggcattattttgggcctgtttgtttcgatcagtctagtactggtaaaggttttcttacgtcgtggtattgaatcccctgaacaactggaagagatcggtgtcaacgtttatgctagcgttccagtttcggagtggttggcaaaaaataaccgtaaatctaagcaattacgtaagaatgaatctgatgctctgctcgcagtagagaatccggctgatttggcggttgaggccattcgtagtttacgcactagtctacattttgcgatgatggaagccaaaaataacgtgcttatgatttccggtgctagtcctaatgcaggtaaaacatttatcagcagtaacctagcggcaactatcgcattaaccgggaaaaaagtgctgttcatagatgctgacttacgtaaaggctatgtacacaaaatgtttggccgtaagcaggataaaggattgtcagagatcttagctggacaagtggctgcagaaacagtgatcgaaaaagttactggcggtgagtttgattatatcggtcgtgggcaaattcctccgaatcctgcagaattgctcatgcatccacgttttgaaaaattattaaaatgggcaactcaagtttatgatttaatcatcatcgatactccaccaattttggctgttaccgatgctgcaatcattggtcgttatgctggtacatctttattggttgcacgctttgaagaaaatactgcgaaagaaattgaagttagtatgaagcgatttgaacaaagtggtgtaattgtaaaaggctgtattctaaatggtgtcgtgaaaaaggctagcagctattatggctatggctataaccattatggttattcttattctgataaaaaacacgattaa

SEQ ID NO: 233237 - DNA, 327 bp, Klebsiella pneumoniae
atggaaaagcgaacaaaagagatcaaaatccggctcaccgaaaccgagcatcagcgactgcttgatcgctgcgaccggactcaccttgcggagtggctgcgtcagcttggtctgggtgaacacacttcacgcaggcgccgtgtgcccgatgtggcgcccgaactgctgcgacaggtcagcgggatcggtaacaacctgaaccagatcgcccgccgtctgaaccagactgactccctgacgccttcagaacgtgcctcgctgcttgtcgtactgaccagccttgaccgtcagcttggcgacctgctggagcagaaccgtgatcgttaa

SEQ ID NO: 233238 - DNA, 486 bp, Klebsiella pneumoniae
atgagcgagattttaaatttggcgaagggcttcgaggagaaatcgaagcagcaggcgcaggataccgagcagagcgtgaagcgcgagttcgcgaggctggagacgtctatcagcgcggaactgcaatcaagctcgcagagcatcagcaacgctatccgcgagcagaacggcagactgacgggcatgctcagagcctctgtctcaacggcgatggcgtggatattcatctgcttcgccctgctgatcggcatcctgagcgggataatctggtttcagggcacgatcatcacctcgcgcctgagcgagatggacagctacagccagcagctggcgaacctgaaagcgaaaagcggcgcgggcgtggcgatctacagcgacgacaagcaccggaacacctacatggtggtgctgccgaagcaggcgcacggcgtggaaacctatacatcgacgaccgacaacaccgtagtgaaatacacggcgaaataa

SEQ ID NO: 233239 - DNA, 234 bp, Klebsiella pneumoniae
atgaccgagatggaaaaacagcttctgagcgccttagagagcttacagacaagctacgagcaacagcagcaggcgtggcaggacagctacagcagcttgcagcacatgttcgaggctacctcacaggcgctgacgcacagcgaccgggtgtgtcagcacttgagcagtcaggtagagagcttgcgcgcgcaggtcgagagcttgagcaggaacgtcagccgcttgatgcgttga

SEQ ID NO: 233240 - DNA, 333 bp, Klebsiella pneumoniae
gtgagtcacgcgattgagtttatcgagaccccgatgtttacccgtcagataaaacagatcgccacggatgaagagctcagggagctgcaaaagacgctgattgagtcgccggacaaaggcgatctcattcagaaaaccggcgggctgcgcaaaatcaggatggcgacgggcaaccagggaaaaagcggcagcgtgagggtgatttactttctggccaccgccgaggtgatctatctggtgatggcctacccgaaaagcaccaaagacagcctgacggacgcggaaaaagccgcgctgaagacgctgacccaacaactgaaagacgaggtgtga

SEQ ID NO: 233241 - DNA, 285 bp, Klebsiella pneumoniae
atgagtttttttgacgagctgaaagcatcgctggaagaagccgttgaaatcaaaaacggcgtcagagagcctgcccgcgtcacccgttacgagctggcagacgtgaaagccatcagggcacagctgaacgtatctcagagcgagatggcgaaagtgctgggaaccagcctcgacaccatcaagagctgggaaaccggacgccgtaacccgaccggactggcggcgaaggtactggcaaccatccaggcgaacccgaaattcttccaggaactggcggcgcactaa

SEQ ID NO: 233242 - DNA, 888 bp, Klebsiella pneumoniae
ttgaataacgcagtactcgaacttttcaacgaccgcttaccgcacaagccgtacttttcggacgatctgcactttggtgtacgcattgcagggaaagaacgcgccattctggcgaaatacatccagttcaatcagcctcacgccatgttctggctgggattcgacgtcgatcgcgccggtgctgctatcgactggagcgaccgcaacgctccggcacccacgctgaccatcaccaatcccgacaacggacacgcgcacctgctgtacgcgttaaaaacctcgatacgcatcgcgccggacggaaaaatgaagccgctgcgctacgctgccgccgtggagaacgcgctacgcaaaaaattagaggctgacgcggggtattcggggttaatctgcaaaaatccgaaccacggtcactggaaaattgccgtgtggcagccggagctctacacgctggactggctggccgactttctcgacctgagtgcggcgaacgacaaggaaattgtcgccgactacggcttaggccgtaactgcaccctgttcgacaaaacccgcaagtgggcttaccgtgccattcgtcagggctggcctgagtatgagcagtggctaaaagcatgttatgagagaacgtgtgcctacaatctgcaatttgcagtacctttggatgagaacgaggtaactggtattgctaaaagtattgcacgttggactaataaaacattcacgaaaagctcctttgatgaatatgtccttactacacattcctcagaagttcagtcaataagaggaaaacgtagtaagggaggaggaaggccatctctaaataaaccttggatagaattaggcataagtagagctacgtactttagaaggaaaaaggaaaaatga

SEQ ID NO: 233243 - DNA, 1941 bp, Klebsiella pneumoniae
atgatggggatagaacaaaagagtgtatctgcatgtcttcagcaaaagttcaatttaccaacatatcagagagagtataaatggggcatcactcagttacaggatttgctttctgacatacaacatacatttctttctcaatgggacgcgtcacatggaagaagtcatgccttatcatataaagagtacttcttaggaagtatcattacggcacctggagttaatggcagcaaaataataatagatggacagcagcgagtaacaacacttactttggtgctctgctatttccatcgttattctttgttaaatcccaatctagacatatctccggttgatataaacataagaagaaagctagctggtgtaaactcttttaatctcgatgttagtggagcaagagagagtctccttaatatattaatgggggacgatattgatgatatatctttctgttcaagtgttgattcaatacccaataaggatactgggacaattaaaatgtgggatcaataccaaaaaattggcgacttaatagatcctgagattttgtcaaataacttaatgccaagctttatagattatctgactgagagagtttatctttatcaaattatcgttgatgatgaaagcgacggtcataaagttttcgttactatgaatgatagagggttgaagttgactcctattgatttgttgaaagggtttctactttcaggtgtaagtgttcctaagcagaatcgacaggcacacgaagcttggcagaactcagtaagtgagttgaacaaactcagctatgatgagtcctcgctatttataaagaattggcttcgatccaagtatgcaaaaacaaatagagcaaaacgtacaaatgaagagccaaaagactttgacgtcattgcagctaattaccatcgatgggtaatagagaaaaaagatgaactgtctctcaaaaataacgataattattttgagttcataacaaaagactttgtgttttactcgaaagtatatttaaaaatacgagagttagaatgcaagctaaatatggattttccacatgtttattataacggttcgagagatttaaccgtccaggcaatggttattatgtctgcgatcaagcctagcgacacagatgatatagtagataagaagatatctcttgtatcatattatctagatttcatgtctacagtaagatatttaaactctaaagctaacacgcacgactcacttagagacttatcttttaaaatggttattgatttcaggaataagggcatcgatgatctgaaggatgttatcttttccaagataaaattgatagaaaatgacatccaaaaaatagatagtattagatacgacaaggcaaacaggaagttagatttacttagattcttatcaagaattgcatcgtttctagaagtggaaatgtcaataacaaacgcagtaggttatgaaacctatgtcaatcggcagttggatcataaaacattcgacattgaacatatgttgtgtgatgactatgttgcagttaacagttacttatccggcaatggcagtacagttttttctacaaaagaagaattctcaaaagtaagaaattctattggcaacctcattcttcttcctcgcggaagaaataggtcaatgcaagatgcaatgtataacaataaactatcagtttatagtacggagaatgttctggctcaatgtctaactgacgcgttctacaccaatcaacctaattactctcgatttagcagttctcataatctagtgataaagccatatccaataatggataaagaagtgattaaagaaagaatggcgttgtatcaagcgattgcaataaaactgtggtcattagatacagcaacccaactttttggacatgcaaacaaactggatcttgccgtagttaatgacactgattga

SEQ ID NO: 233244 - DNA, 1227 bp, Klebsiella pneumoniae
atggccgggctggaaaagcagcgtgagcagtatgctcatgcggtagaggctttgtccgatcctgaacgtacccgcctggttctggttgcacgactgcaaaattctacactgcaggaagtcgtccgcactcatgaggaactggctgagattggcctgaaaaatcaatatctggtgattaatggtgtgctgcctgaagccgaagctgaacatgacgccctggccgcggcgatatggcaacgtgagcaggaggcactggcaaatcttcctgccggtttatctgagctaccgacagataccctgttactccagccagtcaatatggttggtgtttcagcattgaagggactgctggatacccgttctgaggcattaccgctcccggtaacgaatatcctgtacacgcctgaaaacttatctctctctggcctggtcgatgatatcgctcgcagtgaacacggcctgattatgctgatgggcaaaggtggtgtagggaaaaccacgatggctgctgccatcgccgtcaggctggcagacatgggatttgacgtgcatctcacgacttctgatcctgctgcgcacctgagtacaacgctgaacggcagcctcaaaaacctgcaggtcagccgcatcaaccctcacgatgaaaccgaacgctatcgccagcatgttcttgagacgaagggaagagatctggacgaagcagggaaacggttactggaagaggatttacgctctccctgtacagaagaaattgccgtgtttcaggccttctcccgtgtaattcgtgaagcgggtaagcgctttgttgtcatggataccgcccctaccggacacacgctgctgttgctggatgcgaccggggcttaccaccgagagattgccaaaaaaatggggagtaaaggtcattttactacccccatgatgcagcttcaggatccggatagaaccaaagttctgctggttacgcttcctgaaaccacaccggtcctggaagcggcaaacctgcaggctgaccttaaaagagcggggattcatccgtggggatggattatcaataacagcctttccattgcggatacgcgttctccgttgctttgtcagcgtgctcatcaggaattgcctcagattgaggctgttaaggatcagcatgctgaccgtatagcgcttgttccggtgctggcgtcagagcccgccggtattgaaaagctcagagagttgatgagctaa

SEQ ID NO: 233245 - DNA, 498 bp, Klebsiella pneumoniae
atgaacagtcttttaacgctggcgaaggacttagagcagaaatcgaaagcgcagcagcagactaccggcgagatgctgaaagccgcattcagcgagcacgagaagtctgtcagagcggaattgaacgaaagcgagaagagaatcagcgccgccatcctcgaccacgaccggaagctgtcctcagccatgagcctgcgcacgaaaggcatggtgcgcatggtcagccagacgtggctgaccattgtcctggtgtccgtgtttctgatcgcctcaggcgcgggcattctttggtggcaggggcagcagatactcgacaattacacgagcatccgggagcagaaggaagcgctggagaagctgaacgcacggacgtggggcgtgagctaccaggaaggcaaccaggggcgctttctggtgctgccggaaggcgtgaaggcagacacgaactggacgttcgacaacggcaggaagaacggcatcagactggtgcaggagtag

SEQ ID NO: 233246 - DNA, 264 bp, Klebsiella pneumoniae
atgaacagaaaaaaaacgaatggaggaaatatggctggtaaagttaataaagtagagcataaagaaccggcaaggctgcaaccacctgcgtttcctttaggtatgagatttgggtttgctagggatatgtgcattcttgattttttagatcaacaaaataatggtggcggccgatactgtttctattctgttgcgataacaaaacaacacgcaatagaaatggttaataacttaacgaaatttatagaatcacaaggcgactaa

SEQ ID NO: 233247 - DNA, 708 bp, Klebsiella pneumoniae
atgaaacccgataatgttattttgacggtggatagaaccaaggaacagttgttctatcgagaaacgacgtacgaaataacccctcatgaactagaggataaagggtcggtatactttagcgtaaataaaaatagttttgtcagctggggcgaatggaattcttgcttagaagtctacaaagtgacaaaaccgggcgaagaataccctgctgttctagaggcgcttaaaatcaatgatttatcaacgccatccccgtcttttgaactggtttgtgaggggtttaatcacatagctgacaccctttcagagggtaagcaagaggaagtaaaaaaattccttggttatgtaaaaaacgcagtttctcattacaaaagaaaaaaggatgagtctcaagaagaattaactcctgttaagttatattcctcagcgaaatcttttatcgaattcatgagatatattcccgccttttataataaattggggattaaagtatatatagatgataggactggtttttttggtgttatttataagagaacatcatttaatgcaggcacgctaaacatactagtgaaagataatcatgaaattgatttttctttcgcaaagagaaggaaaggggttgtcactataacaggagtggcaaaatttggtaagcacttagataattcagatcaaataagatcagtgtttaaactcatggagtga

SEQ ID NO: 233248 - DNA, 462 bp, Klebsiella pneumoniae
atgacttctggctcaatgagcggatgcgactttttggctatacctcaagttcaacacagcgaagacagcggggtgtggaggtatgttatggaagccgggtttggcgctgaaggtattttggatatttcatgtttagaaatacttgagaaagacgatggatatttgtctttctatcactcagacagaatgcctaagtctgattttatcagtaaagtcaaacacatacacaagcttataagcttaacaaaaaccaacccagctatctatttgaacttcgacgtcattgaggccaaagaatcaactgaggatcggacttatttctttgatgcaggttatcctcatatagggatgtattatcctgaagaaagtgacttaaattcgctcgaattaagaaccatattagtggaaatttctgaggtttatcagagagcctatggcggggtagtaactaaaatattgtaa

SEQ ID NO: 233249 - DNA, 192 bp, Klebsiella pneumoniae; identical to SEQ ID NO: 103080

SEQ ID NO: 233250 - DNA, 909 bp, Klebsiella pneumoniae
atgaatcacgatgccagtgacgtgggtctgcagcgttactatgaccttcttatcaaaacccgaccaacggcaattaacctcaaatgggctctcgacaggatgatagccacactgaaggatctctgtgtatcagagcgcaaggatgtggcctgggcgctggcggcagaaattgccgaggaagatgtcgcgttgtgtgaacaaattggattacatggtgcagaagtcatccgcgaaatagcccagaaaaaaccggccgggagtgtggtcaatatcctgacacattgtaacgcaggctggctggcgactgtagactggggaaccgcgctttctcccatctataaagcgcatgaaaacggaatccctgttcacgtctgggtggatgaaacgcggccacgtaatcagggcgggctcacggcatttgaactgggctcacacggtattcctcacaccctgatcgccgacaacgcgggtggccacctgatgcaacacggcgacgttgatctctgcattgtggggaccgatcgaaccacggccagaggggatgtctgtaataaaattggtacctatcttaaggcgctggcggcccatgataaccatgttcccttctacgtcgcgttaccttctcccactattgactggactatcgaggacggaaagaccattccgattgagcaacgtgacggaaaagagcagtcccatgtctatgggataaaccctcagggagagttgagctgggtcaataccgcccctgaaggaacccgttgtgggaactacgctttcgacgtcacgcctgcccgatacattaccggcctcattactgagcggggagtctgtgctgccagtgagtcagcgctggcggataggtttgctgacctgaagagtaaatcactccaggacgagcagcattaa

SEQ ID NO: 233251 - DNA, 642 bp, Klebsiella pneumoniae
atggaaaggattacattagcagaaaatatcatttccacttgtcgggaaatgaatgcgtcaggtcttaatcaaggaacatcaggtaatgtgagtgccaggtataccggtggcatgttgattacgccgagtgggatcgcttattcaaagatgacgccggacatgattgtctttgtagacgataagggaatatctgaagcgggtaaaataccgtcaagtgaatggttatttcatctggcgtgttataaagccagaccagaattgaatgctgtcatacatacgcatgcggtgaattccacggcggtggcaatacataatcattcaattccggccattcattatatggtggcggtaacggggacggatcatattccctgtattccctattatacctttggcagccctgaactggccgacggtgtatctaaagggatcagagaaagtaagtccttgctgatgcagcaccacggtatgctggccatggacgtcacgctggaaaagacgttgtggctggcgggtgaaaccgagacgctggctgatttatacatcaaatgtggcggattatatcacgatgttcccgttctgtctgaagacgaaatgaccattgttcttgaaaaattcaaaacatatggtttgaaagcgtaa

SEQ ID NO: 233252 - DNA, 702 bp, Klebsiella pneumoniae
atgtttatcgtggaatcgtatgctgtcgccataataatgtgttttattaccatgatttgctggggttcatgggcgaatacaaccaaacttgtcagcaataaaaaatgggagttccctctattctattgggattattcaattggattattgctgtgttctttgttatttgccttcacgctgggttctatgggcgaagccggtcgcagttttatacctgatattcagcaggcgagcagcagtagtctgatgtcggcaatactggcagggattatcttcaatatttccaatatccttctggtggcttctattaatcttgccggtatggcggtagcttttcctgtgggtgtggggctggcactggctctgggtgtgatcaccacctatatcggcaatccgcagggcgatccgctcattctgttcctcggtgtcgcctgcgttgtgatcgccattatttttaccgcgatagcctatggtcgtgtcacgctggaggcggataaatctcgccgtaataaaggtctcatcactgccattctggcgggtatcatcatgggatggtttttccgcttcctggcggactccatgtctgacaatttcagccagcctgccagcggtctgatgacgccctactcagcacttgttctgtttgccgtggggctgtttttgtcggtaagcgtcgtctcagcaccgtctggcagatcctga

SEQ ID NO: 233253 - DNA, 357 bp, Klebsiella pneumoniae
atggtcggtgtgatggaaaggttgcgggtgctgggcaagcgcctgccggtacgtattcagacagataacggcagcgagtttatttcgaaaagtctggataaatgggcgtatgagcacggggtcacaatggacttctcccgccccggaaaaccaacggataacccgtttattgaatcatttaacggcagtctgcgggatgaatgcctgaacattcactggtttctctcgctggaagatgcgcaggacaaactcgacaactggcgcagggaatataatcatgaaagaacgcattcatcattaaatgacatgactccggctgaattcatccggagtctccggaaagacgaagatctctga

SEQ ID NO: 233254 - DNA, 444 bp, Klebsiella pneumoniae
atggggcctttattcagcgatgctctagaagagagcgatctagaaagtggcaccatttatgtgttgcgttcgctatctgataacccttatgtagctgaacatcgtgatgtcattcacaagattggagttactggcggcaaagttgaggcgcgtattgccaatgcggaacacgattccacctatctgttagcgaaggtcgaggtggtagcttcatacaagcttgcaggcatcaaccgcacccggatggaaaacctgtttcacaggttgtttgcacccgcaaggcttaacattaccattaacgaccgtttcggccatccagtacagcccgaggaatggtttctcgttccgttattcgttatcgatgaggctgttgcacgtattaaggatggtagcatcattgggtatgtttatgaccccatgtctgcgaaactggtgaaggcatag

SEQ ID NO: 233255 - DNA, 1017 bp, Klebsiella pneumoniae
atgaaaaaaatgttgataatactcatagccgtttttaatccgtgctactccttcgaattaggtattggaacacatttttcctcttatccggggcaaccggataaatatcttcggctcatcaaatcttatggttttacatcaattagagatgactatacgtggaataaaattgaagacgtcaaggatgattttaattcacgtggtaaaattgctaaagttgataaggctataaatcaagctgcatctttcaatataaatactttagtcgtattggattatggtaataaacattataactctaattattatccaaatacagaagagtctttaaacgcttataataggtatgttgaatggacagtcagacatctaaaggggaaagtaaaatattatgagatttggaatgaatggacaataggtacagggattaaaaaagatgggaaaatcccaccatcggttgatgattattataatttagtaaaactaaccagtgccacgatcaggaaagaagatcctaatgctattattctggcggggtcaattaatccattatccgataaacctagatttatcggcgtaagtgatgagcaatggataacggctttaataaaaaaagggatgctggagtatatagatgggatttcattacatccatattcatatgctaatagttcggaaagtctacgaactgttaaaggaaatatagatgctattgattcttttcatgataggattaaactgatttcggggaaagaaattcctttttatattactgaaatgggagtgcctacccattatggccatggaggagtttcacttgatgaacagagtgattttataaacgagtattcgcgtgaagtaatgaatagaaaatatatcaaagggctttggtggtacgacttaataaacgatggtggtaacattttaaataaagaagataattttggtttcttctatgaaaatttatctccgaaaccagttatgcaggattttaaaaaaaacctcatatctaagtga

SEQ ID NO: 233256 - DNA, 405 bp, Klebsiella pneumoniae
gtgaaagcgtactatatacttggacataacgttgcatggcttaacggtatatgcctgattttttttgttattggtgtggtcggtgcgctggcaatggttgccatccctgaaaaattcaatcttcgagttaacagaggcgatacattcatatactgtgcgcttatagcggtggttgggttttccgggatgttcgttatctccattcactcattttcgatggatgaacttgaagcaggtagacactggaaagatgactgccggacacttgaggtaaacatgccgacaggcgcttttaccagccctgttaataaactggactgtgatggcatcatcattaatgtgcctggtgggcagtattattcctatatccatcagtgggaattatataaagctaactcaaaatga

SEQ ID NO: 233257 - DNA, 312 bp, Klebsiella pneumoniae; identical to SEQ ID NO: 152581

SEQ ID NO: 233258 - DNA, 924 bp, Klebsiella pneumoniae
gtggcaaagcaaaagttcaaaatcaccaactggcccacctacaacaaagccctcatcaaccgtggctccataactttctggctggacgatgaaactatccaggcctggtatgagtcggcaacgccttcatcacggggaagacctcagcgctattctgagctcgccatcaccaccgtgctggtcattaaacgcgtattcaggctgaccctgcgggctgcgcagggctttattgattccattttttctctgatgaacgttccgctacgctgcccggattacagctgtgtcagcaggcgggcaaagtcggttaatgtcagtttcaaaacgcccacccggggtgaaatcgcacacctggtaattgattccaccgggctgaaggtcttcggtgaaggcgagtggaaagtcaaaaagcatggccaggaacgccgccgtatctggcgtaagctgcatctcgccgttgacagtaaaacacatgaaatcatctgcgctgacctgtcgctgaacaacgttacggactcagaggccttccccgggttaatccggcaaacccaccggaaaatcaggtcagccgccgccgatggcgcttacgatacccggctctgtcacgatgaactgcggcgtaagaaaatcagcgcgcttatccctccccgaaaaggtgcgggttactggcccggtgaatatgcagaccgtaaccgtgcagtggctaatcagcgaatgaccgggagtaatgcgcggtggaaatggacaacagattacaaccgtcgctcgatagcggaaacggcgatgtaccgggtaaaacagctgttcgggggttcactgacgctgcgtgactacgatggtcaggttgcggaggctatggccctggtacgagcgctgaacaaaatgacgaaagcaggtatgcctgaaagcgtgcgtattgcctga

SEQ ID NO: 233259 - DNA, 273 bp, Klebsiella pneumoniae; identical to SEQ ID NO: 216530

SEQ ID NO: 233260 - DNA, 351 bp, Klebsiella pneumoniae; identical to SEQ ID NO: 216531

SEQ ID NO: 233261 - DNA, 135 bp, Klebsiella pneumoniae; identical to SEQ ID NO: 233142

SEQ ID NO: 233262 - DNA, 228 bp, Klebsiella pneumoniae; identical to SEQ ID NO: 135571

SEQ ID NO: 233263 - DNA, 564 bp, Klebsiella pneumoniae; identical to SEQ ID NO: 135568

SEQ ID NO: 233264 - DNA, 567 bp, Klebsiella pneumoniae
atgaaaggacataacttcttaccactggcggtctctctggtgtttctttctggctgccagcagctcaacgatggcgtgaatacagttaatggagcaatcagttcttcgttgtcttcagtaggtaaagcgctggggggaaccgccaccactcaaagccttggcccggtatcgtctgtatctggccttggtgctgtctgcaaagactatgaagaaaatgcgatggcagcagaaaagaactggactggcaaaaggatttctatcaccaatgccactgttcttgaagtaacaaagggcagaagtgccagcgacatgatgacgggaatacccatgtcaacccctaactattacctgctattcaaaacagccgatacaagctattgtggtggtatggtctggattgattactattctggcctttatgatgcggttctgacttacaaaaaaggtcagaaagtcagtgtcactggaacagtcaacaacttcgaagttcgtggctttgctaccgtcaacaatgccgatatgccagttcgtctggttgttctgagaaatggcactatcaatcattaa

SEQ ID NO: 233265 - DNA, 786 bp, Klebsiella pneumoniae
  misc_feature (706)..(715): n is a, c, g, or t
atgcccacttatacactgctacgcagtgtgtggggtctaccgacgttccctgcggggctaaaaccgtttccttcggaaacaaagtcaacgtcaaccccgaagtttttcttgcgaaaaactaacggcagcatagctatcgttgcgttttatatattggttttattttatattgaggttatatcattagtggctatatttcatctggagtttaaaatcgtgaaacgaagtgagggtatgtcttccgttgcgaaagctgcctatcatgctcgttgcagaatcacagatgaaagaacaggtgatacctatgattatagccgccgtaccgatttatacgggcatttcatattagcacccgttaatgctcctcaatatattgtaaaagactctacagcattgtggaatgaagttgaacgggtcgagcgtcagcaaaatggtcaaacagctcgttatttcgatgttgctattcctgccgagttaaacaatgacgacaagaaaaaacttgtccttgagtattgccagaaaaatttcgttgataaaggcatgattgccgacatcgcttttcatgatcttgatagcgacaacccacatgctcacgttatgttgacattaaaaactataagcccggatggttttggtaaaaaagaaagaagctggaacgacagaaaaatgtctgtgttgtggcgtgaatcatgggcattgatggctnnnnnnnnnntcttactgctgctggttcaccagaacgtattgatcatcgttctctccaagcccagcacgaagaagcgttag

SEQ ID NO: 233266 - DNA, 312 bp, Klebsiella pneumoniae
atgaaaactccatatgacgaaccaaaaactaaagaagtcaacatatctaatctcaaggaacaagatacactacactccaaattgcagagtaaaaagaagccagaatgtaaaatattggcattgagtgtttttgtattaattctgttaattgttgccatatatgaatatttcgccctagggaaaaaattagataacgcatcaatcaccttttttattgttgtgattttttcattggctataataataaagaagataaggaaaatagaagaatctgtctcttatacacatctgacgctgccgacgaaggcttag

SEQ ID NO: 233267 - DNA, 636 bp, Klebsiella pneumoniae; identical to SEQ ID NO: 104002

SEQ ID NO: 233268 - DNA, 567 bp, Klebsiella pneumoniae; identical to SEQ ID NO: 233264

SEQ ID NO: 233269 - DNA, 2340 bp, Klebsiella pneumoniae
gtgccggagccggagaaaaaggtcaactggcgttcgctggcggcgctggaaggggtgcacggtcgctatacgcagtggctggaaaaattgcctgagcagatgaacgcccgcaccggccatctggataaacagaaagagctggcgcacctcaatcctaaactgcgccgggcgatccttgggggggtgaccttctgctcgctggtgctggcgctgatgtgtattacgcagccctttaacccgctgtcgcagtttatcttcctgatgctgctgtggggcgtggcgctgctggtgcgacgcatcccgggccgtttctcggcgctgatgctgatcgtgctgtcgctgacggtgtcgtgccgctatatctggtggcgctatacctcgacgctgaactggaacgacccggtaagcctggtgtgcgggatcattctgctgttcgcagagacctacgcctgggtggtgctggtgctgggctacttccaggtggtctggccgctgaatcgccagccggtgccgctgccggaggacatggatttgtggccaaccgtggacatcttcgtccccacctataacgaagatctcaacgtggtgaaaaacaccatttacgcctcgcagggcatcgactggccgaaggacaagctgaacatctggatcctcgacgacggcggacgggaagcgtttcgtcagtttgccaaagatgttggggtgcactatatcgcccgcaccagccacgaacacgccaaggccggcaacatcaataatgcgctgaaatatgccaaaggtgagttcgtctcgatctttgactgcgaccatgtgccgacgcgctcgtttctgcagatgaccatgggctggttcctgaaagagaaagagctggcgatgatgcagaccccgcaccacttcttctcgcccgatccctttgagcgcaaccttggtcgttttcgcaaaacgccgaacgaagggacgctattctacggcctggtgcaggacgggaacgacatgtgggacgccaccttcttctgcggctcctgcgccgttatccgccgcggcccgctggacgaaattggcgggatagccgtcgaaacggtgaccgaagatgcccacacctcgctgcgtctgcaccggcggggatatacctccgcctatatgcgtattccgcaggcggcggggctggcgacggagagtttatccgcgcatatcggccagcgcatccgctgggcgcgcgggatggtgcagatattccgcctcgataatccgctgtttggcaaaggcctgaagctggtgcagcgcgtctgctacgccaacgccatgcttcactttctctccggtattccgcgcctcatctttctcacggcgccgctggcctttttgctgctccatgcctatatcatttatgcgccagcgctgatgatcgcgctattcgtgttgccgcacatgatccacgccagcctgaccaactcgaagattcagggcaaatatcgccattcgttctggagtgaaatttacgagacggtgctggcctggtatatcgcgccgcccacttttgtggcgctgatcaacccgcataaaggcaagttcaacgtcaccgcgaagggcgggctggtggaagaggagtatgtcgactgggtgatctcccggccctatatctacctggtgctgctcaatctggtcggcgtcgcggtggggatctggcgcttcatgtacggcccggaaaatgaaatcctcaccgtctgggtgagtattgtctgggtattctacaacctgattattcttggcggcgcggtggcggtctcggttgaaagcaagcaggttcgccgttcgcaccgtgtcgaaatgagcatgccggcggctatcgcccgcgaagatggtcacctgttctcctgcaccgtccacgactattccgacggcggactggggatcaaaattaacggcgacgcgcaggtgctggaaggccagaacgccaggctgctgctcaaacggggacagcaggagtatgccttcccggtcagggtcgcgcgggtcaacggcagcgaagtggggctccagctgctgccgttaaccaaccagcagcatatcgattttgtgcagtgtacgtttgcccgcgctgatacgtgggcgctttggcaggatagcttcccggaagataagccgatggaaagcctgctggatatcctcaagctgggctttcgtggctatcgtcacctggcggagttttcgccgccgtcggtgaaggtggttttccgcgcgctcacttcgctggtggcctggatagcgtcgtttgtaccccgacgccctgaacgcgccgcgccgacgctctccgcagacccggcaatggctcaacaatga

SEQ ID NO: 233270 - DNA, 1407 bp, Klebsiella pneumoniae
atggtttataattccccattaggaaaaactaaatttcctctagccccggtttctgatggatgtactttcatatccggttatgcatttaagagtaaagattttacagatattggatatcctgttattaagattaaaaatattcatgacgggtttgttactcttgaagatagtcactgcgttacttccaaaacagttgaaggtctaaaaaaattcagattaaataatggtgatgtattaatcgcaatgacagggcaaggcagtgttgggagagttggtcgcttatcttttaatggagataaagccccctatctaaaccaacgtgtaggtaaattcattgccgatgaaaaaaaactcaacattagctatttatattatattttaacaactaagcagtatcaaaacatattgtttaacaatgcttcgggaagcggacaaccaaacctaagccctgcagttattcagtcaatattaattccctatcctgaatatcatttgcaatgtaaaatggcaaagatactggatgaaattaacgatcgaataattaaaaataacgctattaataacaccctagaacaaatatcccaaaccctgttcaaatcatggtttgtggatttcgacccggtgattgataacgcgctggatgcagtaaactcaatcccggaaacgctgcaatctcgcgccgaactgcgtcaaaaagtacgcaatagtgcagatttcaaaccacttccggcggatattcgtgcactattccccgctgaatttgaagaaacagagttgggctgggtaccaaaggggtgggagagcgtgactttcgattcattctgtgatttgattcagagtgggggaacaccttcaagaaaggaaacatcattctgggatgaaggtacaataaaatggctttcatctggcgaagtgaaagggaaaatagtattagatacaaaagaaaaaatcacagatattggattactaaatagctcagcgaaattatgggcaaagtatacaaccgttgttgcaatgtacggtgcaactgcgggagaagtgtgtcttattggcgataagatgacagccaaccaagcatgttgtggattgtattcagaaaaatatccattctatgtctataattttgtcagcgataaagcatatgaaatagcatcaaaagctacgggctcagcgcaacagaatcttaataaacttataatatcctcaacaaaatttacacgtccctctaatgcgataatttctatatttgaagataatgtagccccattatttatgaactggttttctaatacagctgaaaataatactttaacagccctccgcgacactctgctccccaaacttatctccggcgagctgtccctggaggatctaccagatttagtaacccaaaccgaacccgcttaa

SEQ ID NO: 233271 - DNA, 651 bp, Klebsiella pneumoniae
atgactagttttctaaaattgggtattttcgagcgagaagccaaagccccggaactcaatattaaacaacttgcactacttatgtgtggggtagatccgacagttaaaactgctgatatccctgaggcgaaagttgaagcttacaatatatactatcgacaactgagtagatggttatcagcatctaaattatttcgaggtggaaactcaacagcctatcccgcagactatatgtttgctctggcatatcctcttattgatgaagatattacaccacaacccataaaggacagatgccttgcagcggtggctataattgctaatcaaaacaaaggaaaagagcatctttatgctatgggaggggatgagcttttacaggtcggaattgcattgaaaagcagcaaacgcggcttgcatcgtaaagaagatgaaaaggaatataatgataaattaatggggatgctggtcaagcttatagcacataagataggccattcgtttggcacctctaaaaaaccaagcatctcggctattttaaacgaactatataaattagctgatgaggaaggtatatctaaaactggattatccaaatcagcaatatatgataaaattcgcaaggcattaaattcgatttattatacggaatga

SEQ ID NO: 233272 - DNA, 693 bp, Klebsiella pneumoniae; identical to SEQ ID NO: 20387

SEQ ID NO: 233273 - DNA, 975 bp, Klebsiella pneumoniae
atgacaggcaaaacaaaggcggccatgccgggccgcctgagtctcaacgctttactgaaacatcgccagattaccaggcttgccgctggtggtcaaaccttgagccaacgaaatccgtacgcacaaattaaccgcgtacgtttaacgtacggacatcgcaatccattgaaggaacttgattataacgaatcgttagaatcggctggcaacaaacacgaacagtattcgggttcgcctgaacatcaacactgcttaggttcagaggttccgacgaataacgtagagagctgcgaagataaccaaccctctttaagaggtgagcctctgcacaacgcattaagagttgcgcaaaacaacccctctttaagaggggcagttcacagcattacggagagtaaccctgttcagctttcaggttccgatctggctttcttgcgctgctcagatttgagtttgcgcccgcaggcatccagaacccacgcagagaaattagcaccggcgttatctgctttctctcgctctacgctggcgtcaatctcttcaataagttcgtgcggaaatcgtatctttttctgcgctgatttagcgtttactgccttagtagccatttaccctcctgcgtatagtgagggtacaccatatcagaaaaatagcttgacgtgtacccccaccgaaaatatagtgggggtgcaccttgaggttgaagatactcaagatacagcgaagcccggcagtgttaccagcactaaccgggcctctgaccacaacgtaactgaggcttacatcatggcttgtatacagcatacccaaactcgccccaaatatcagtatcgttttcttgcgctgagcgccatcgggcgcaacgtcattcacatcaccgctaccactgagcgcgaagcccgtgagcaatcaccggatggatgcgtgatggtattcgctggtcgtctgccagttcgggaggggcaccatgcgtga

SEQ ID NO: 233274 - DNA, 195 bp, Klebsiella pneumoniae; identical to SEQ ID NO: 190546

SEQ ID NO: 233275 - DNA, 219 bp, Klebsiella pneumoniae; identical to SEQ ID NO: 198532

SEQ ID NO: 233276 - DNA, 1752 bp, Klebsiella pneumoniae
gtgaaaaacgcgcctaatgtgaaaaccctcccgcgcgacaaaatggaggaggccatcatctttgctggaacgggagcatggaaagccgctcaggattaccagaaagggaagggcgagcatggagacgatgttccgcctgtggttctggatcacacccaactggcggaattaccacacctgcgcattgttgataaaggccgtcgatttgcccgtgtctgtcaggccgggcttatcgagcaaaaccaaatcagcatgattgcaaataagttgtgtgaggctggcgttaccaatgctgagtttatcaacgaacaaggcgagaaagaggactggacgccattgatgaaacgtctggaagacgagccccttatggtgactacgaggggaagtgctacgccagcgcttaaccagatgggagccagccagcgcggggaagttctgcttgctcattacaatggcaatctggcgatccatgctgattccgacacggttcatcattacaacggcgtggtgtgggttccgctttcggataaagagctgcagcgagaaatggcgcagatttttattgattccgaagtcgcctattcgcagaacgcgattaaatccgctgtcgatacaatgaagctgggcctcccggtaatgggtaacacagcccgtaacctgattggtttcagcaacggggtttttgatacccggttaggccaatttcgaccgcatgataaaaaggactggcttatcgttgcgagcgaattgccattcagcgaaccagcagaaggtgaaactctggcaacccatgcgcctaacttctggaaatggctccgccgctctgtggcggataatgaccgaaaagcagaccgcgtactgtctgcgctgtttatggtgctggcgaaccggtacgactggcagctgtttcttgaggtaacggggccgggcggaagtggtaaaagtgtcatggctgagatctgcacgatgctggcgggcaaggccaatacggtatcggcgagcatggcggcgctggagaacccaagggaaagggcgctggtagttggctattcgctgattatcatgccggatatgacccggtacgctggcgacggcgcagggattaaagctatcactggcggggataaggtggctatcgacccaaaacacaaagcgccatattcaacccgtatcccggcggtggtgctggccgtcaataacaatgctatgacgttcagtgaccgcagcggcggtatttcaaggcgacgggtgattttcaacttcaccgaagtagtgccggaaaacgaacgcgatccgatgctggccgagaagattgaaggagagcttgcggtaatcatccggcatctgcttgtgcgcttttccagccagaacgaagccaaacagcttttgcatgagcagcagaaatcagaagaagcgctggccatcaaacgtgaaggggattcactggtggacttttgcggatacctgatggcttcggtggtttgtgatggaatgctgattggtaatgccgagatcgtgccattcagcccgcgccgttatctgtatcacgcttatctggcttacatgcgggccaatggtcttagcaagcctgtatcgttaatgcggttcggtacggatatgccaggcgcaatggctgaatatggcaaggagtaccagaagcgcaaaactaaaaatggcataagatcgaacgtcaccctgcatgatgattcagaagactggatgccaatgtgtaccgatacaacaaaagaataa

SEQ ID NO: 233277 - DNA, 561 bp, Klebsiella pneumoniae
atgagcacaccctcgcatctgaatgcccaaccgctggtctggggacacggcccgcggacgtttgaggtgttccttgagcccacctgcccctactctgtccgcgcgtttaataaactcgacgatctgctcgatgaggttggcgccgataacgtgaccatcaagatacgcctgcagtcgcagccgtggcatctgttctccggggttatcgtccgctgcatcctcgccgcgtccaccctgccgcacggcagagagcaggcgcataaggtgatgcaggccgtggccgaccatcgggaagagtttgagtttaccgatcactgcagcgggccgaatatgaacgccacgccgcagcaaatcattgagcgcattgaacgctacagtcacgtgctgctgggggccgcctttgcccgcccggagctgcaggacgtgatcaagtggcacagtaaatacgcccgtcagaacggcatccatgtctcgccgacctttatggtcaacggcctggtgcagccggatctgggcagcggcgatgatgtcagcgtgtgggccgcgcggattatggcctga

SEQ ID NO: 233278 - DNA, 1131 bp, Klebsiella pneumoniae
atgcagccggaggcagacagccgcagctacaccctcggcggctttgtccaggataagatcaacttcgaccttgatagccacaacttcgccattattcccggcgtgcgcgtggtgcatcaatcgactaagccggaaaatctgtccgaccttgccgccagcagcagcgtactgagcgaatcgtcggtggcgaatctgtacggcaaaaacagcgatacccaggttctgccgtcgttgaccttccagtacgacctcaccccgcgcctgatgacctacctgcagtaccagcgcggggcgcagttccccaacgccagccagctgtatggctcctggaacctcggctccagctacgccggcagccagcagtatgccctgatcggcaataccgatctgaagacggaaaccagcgataatctcgagtgggggctgaaaggggaagttaccgaaggcatcaccctgcgcacggcgctgttctacaacagctataagaactttatcgcctatacccgctatacccgcgccaacaatccgggccagttcacgaatgtgccgtcgaacatctacaccatttatcaggcggaaaaccgcgataaagcctatatctacggcggtgagattagcactaaatttaactttggcacctggtttgagcaggtggacggcctgagcgccaccctcgccctcggctatagcgaagggaaatcgaaatccagctacagcggcgataaatacgtcgacctcgacagcgtggcgccgatgaaagccatcgtcggcgtggcgtgggacgatccggcgaaacgctacggcaccgccctgacggcgacctttgtcaaagggaaacaggcgaccgccaccaaccgcgaaagctacagcaacagcggatccgccatcaccgatgccagcagcgactatatgcgcgtgccgggctacggcatgctggactggaccgcgtactggcaggtggcgaaaaacgtgcgcctcaatggcggggtctacaacctcaccgatcgtaaatactgggattacctgagcagccgcaatatcgagaccggcaccaaccaggacgccaacgataaagcgctggcggtgatgccgggccgcacctggcagctgggcgtcaacgtcgacttctga

SEQ ID NO: 233279 - DNA, 339 bp, Klebsiella pneumoniae
atgacactgaacagcattcgaaatgctctgtttgccgcgatgcatggcctaagcgttgagcaatatgaacttcaaaaggcacgggataatctgaagagcgtcaccgatgactttctggatcagcatcctgaatatctccgcgagagatttgccgaaggcaaacccgctaccgagttagaattgctcaaatccgccccggttgatgacggaacgtttacacctcacattatagatgagggcactctcgaacgtgctcgcgttaaatgccgcgaggttgtagcctcagacccagaccgctattcacatattatcgaatcatcaccgctacgtgctggttag

SEQ ID NO: 233280 - DNA, 177 bp, Klebsiella pneumoniae
atgaaactgacatttagcaattcaacgatggacgcaattatgcacgaatgccgccgaaccgggacacctgttgcaacgttcattaacagactcgtggatgcagaggccgaacgcatccgaaccaatatgaagaatcccattgaaggagagaacaatgtccgagaaagtagaaactaa

SEQ ID NO: 233281 - DNA, 150 bp, Klebsiella pneumoniae
atgtcgtatgcctcagaatgtctcgccagccaaaatttcgggagttatgccgaggctgagtcatacgcaagaacactgtccggggtgcctgtcaatgaggatttaccttgggaacatctcgttacatccacctcaactgagcttaagtaa

SEQ ID NO: 233282 - DNA, 228 bp, Klebsiella pneumoniae
atgagtctgcaaactcatggcggtcatgcttcagagaccgggtttgtgaaaatggacccggttttttatgcctgcaatttaggcaagggtactacatgtagtggcatgctcatgactacctactacataagcaatattttattaaggaatcttttgagtacaagggttgattttgacgttaaattgaggttgcggaagggtaataattcgcaagcccacgtcgcataa

SEQ ID NO: 233283 - DNA, 249 bp, Klebsiella pneumoniae
atgcccccttattggattgcgattcttaacctacattgcggtaagaatcattcacaccgttacgatacccttcagcaaaagcagcctgtgggcttttatgacgcacagtccctgcctgactatcaggaagagccgccaaatcaacccaaggttgacctgtacgagctagaccagcgcgatacccctgatcgtaagcgcatccacaacatttgtggcggccctcgccaccttgatcatgaggtaagctga

SEQ ID NO: 233284 - DNA, 261 bp, Klebsiella pneumoniae
atgagcatttactttaatgaacacggtagcgcgattggataccaggtagaaggacgttggacaatcaagggcgattatttgcaggtcaaccatggccccaacatcccaggcggcttgtacaaaattaacgataataaagtgaaattcccattcgattacaaagaggttgagggagtgatcgatactgagaaactcaccttcaccgtgaatggtcaagcgtacccaatgaggaaaatgaaaacaaatccgtgggatgtatag

SEQ ID NO: 233285 - DNA, 399 bp, Klebsiella pneumoniae
atgaatgctatttacttagctgtattagatcctgttttcgctggcaatttccctaatgttcagccttattttgtatcactacttgctgaagtagaagagcctgaggtattaggtgatgtccttcacaatgaagatttaataattgaagcatgggcggcttccaaagcattggttgattacattgaagatcaagtagattacactgaatgcaactctgctaccaataacctacagatgcttaaacttgtattagggcttcagttctggatctgtgatagtgaagaagttgaagaacttgagcaaatcagtattaagatgctgaaaatatgcaacgtgttacaggaagaaaatatgctccctgttcacgttccagcaagtagcccggtcaatcagcgttaa

SEQ ID NO: 233286 - DNA, 942 bp, Klebsiella pneumoniae
atgtcaccttcaccgcttccacgtatcaagcaactggtaaaactcatgccagcgattgaagctggtgaatgcaccttgaatgagatttatgtttacctgaatgagatccgtttagcgcgtattgaaaaagacgctaacagtaagatggctagcgaaaagacgctgcgcaagtgttggaacctgcttaaagaagctaagcaaaagtatccacatcttgagaaatatcctttagctcaggctgcatatcagatccacaaaggggagacggttaaggcagcacctaaagccaaatgctcagaggctgcgtataactacgctcgcctgttagctggtgagcctgtgaacggcaagatcttagtagatgatgccaactatcagctaatgcttaaagactctgagatcttaggccgtctgctcagtgaagagactgtaaacgggcagcgcttgattggtgagattccgtttaacgctctggagtggatcaaagccaacgatcaaaaggcttacgagaaggccatagaagccactacagcagacttgaaagcgaaagctgaagagaagctacaaacggcgttagctgagcaagagaagctactcagagaacagatttatgcacagcttggactaacagcaccagagagccaggctgataaccctgctgagcttccagcgcctgaacagacagcgccaacgtttacacctctaggcgtggctgatgctgtaggtaaagatgttgctgaagagcttaaagctaagaagaaaaaagaatcagatgctgattttctggatcgcatgaaagcgcttatctgtgagaacaaggcaatggataacgcagactatcagcgcctgttagatctgaagggtaagaacaatgcaatggctacagagttggtagagcttttcgagacttcaccagaagagccagaagcggctaatgcgtag

SEQ ID NO: 233287 - DNA, 447 bp, Klebsiella pneumoniae
atgaaaaaggtattattagcttttctgccgcttatgcttacaggctgtgttaatccagttaatcaggttccagcctataacccgactccagtagttcagcctgaagaagcgcctttagtcactatcacacctgatcaagtgaagaagctaactaatgaatatttagcttattgtaacgtaaccccttacacctttttggggaaagaacaattagcctctgataaagaagcctgtgataaagaaaccaaatacaggctaaagcataaaaaactaacaaaagctgaagagcaaaagaatgaaagctatgctaaagagatggatgattttgatcagaagataaaagaacaggggcaaaagagccttaaagctttagaagcatgtaatgagaatccgattatctgccgtattcatatgacagataaagagctagatgaaggtggcatgtga

SEQ ID NO: 233288 - DNA, 594 bp, Klebsiella pneumoniae
atggcacgtgtaagcatgtttaataaatctgagattgattacatgactgaagagcaaaagctagccagatggcctaatgctctgaaactgaagagggaaatagaacgccgtagggaagaagaatttaaaggtaaattccctaaatgggtaagtaaaaaaattcaaccctataccccctatcataagcagactgcttttaaacaagcctatattaatcaatctaaaaaacttgatcttagtgattaccgacaaattgagattattaatgaagaaatttatcaagtaattccagctactggtgaattagttctgtgtaaaatcagtacgccagatgatcaaaatgtttatccttcagttgggttaatgcctttaattggcttcaataaaaagcgtttacccgctcatagagtagtagccgcatattataatgatggggttatccctgaaggaatggtagttgatcaccgtaatggtaatagacaagattatagaattgacaatttaaggatcatcacacatgagatgaatatgaaaaatctccctgctgatcgtctattaagtaaaactacaaatgggattgaaggtaatttctga

SEQ ID NO: 233289 - DNA, 195 bp, Klebsiella pneumoniae
atggcttcacagatcacgctaaaactgagcaacaaggaagtgagacggcttaaagagatagcccatgatctagggtatgatgacgagggagagatgattgttacggtgatcaaaatgctctctacggcatcttgtacagtggatgaagaaacaggtgaactatctttctatcagacgatgttcaacaatgcataa

SEQ ID NO: 233290 - DNA, 912 bp, Klebsiella pneumoniae
atgaatacctctattccctgggagtggtaccgaacctttctcgccgtcctgcaggaaggctctttatcgggcgcatcgcgtaccctgaacatcactcagccgacggcggggcgccatattgccgggctggaaaacgccctcggccaggccttatttacccgctcgcaaaccggcctgctggcgaccgacgcggcgctggcgctgcgggtgcacgccgaggcgatggacaataccgcccgggcgctggaacgcaccgcggctaacttcagtcgcgacagagccgagctgcgtggcgtggtgcgggtggccgccagcgaggtggtcggcgccgaggtgctgccgccgctggttgcccggctcaggcaggcgtgcccgaatatcgtcatcgaactgatgctctccaatcggtttcaggatctgcttcaccgggaggcggatattgcggtgcggatggtcgccccgcagcaggagcagcttatcgcccgccgtctcggcaggatcgagcttgggttacatgccaccgccgcctacctgacgcggcagggcctgcccgcgaccctcgacgatctggccagccacgcgctaattggttttgatagcgccacccctctcgtgcgccgggcgctgcaggcttacccccgttttcagcgcgaggcgttcgcgatgcggaccgatagcgacctcgcccagttgagcctgatccgcgccggagcggggatcggcatctgccaggcgcctcttgcggatggcattattcccctgcagcgagtgctggcggccgacttttctctgtatcttgatacctggctggtaatgcatgaggatctgcgccacagccctgcctgtaagcgggtatttgattttctcgcccaggggttgcaggcgtatattcgtggcccactggcgagctga

SEQ ID NO: 233291 - DNA, 129 bp, Klebsiella pneumoniae
atgatctgcagggacgagtcgcttaacgcggatgcgaaagcgaaagcgaaagcgaaagcgaaatcgatgaagtatttaattagtcacaaaaaacagagccacgttataacgcggctctgctactcctaa

SEQ ID NO: 233292 - DNA, 207 bp, Klebsiella pneumoniae
atgcatgacttaatctgcacatctgtaacaggaattgcctccagttacttcgtcgttggtgagacttacagcgcagacgaagagtggaggcttacaactccgaatcctgatggaagcctggctttatggactgttgaggggaatatgatatatggaattgttggcgatcatgactctgaggttttagcaaaattcgaaggtttatag

SEQ ID NO: 233293 - DNA, 297 bp, Klebsiella pneumoniae
atgcaagctattggctttatcgtttacatcgtggtggggattttccagttagcggctattatggccggccttgagtcgtggtggggcttgcactggataatagcggcaccgattgcattcatcgtcagctatataccactggttggatctatcgtgggaatggttggagccatggacgtatggcgctgggagtggtggcaggctgggcttcttttctttggtggcctggtttttgctattgcctgcggaggaatgtcttcgttcttggaatggttatctttcaggaaaagagtgtga

SEQ ID NO: 233294 - DNA, 588 bp, Klebsiella pneumoniae
atgaaattcttaccagttgttggttgggaaggtatttaccaggttaatgagtgcggagatgtcattagtctgccaagagtgattttgaggagggatggaactaagcagcgctttaatggcggaccgctaaaacaatttcttaataccaatggatattgcgttgttaggctgagtgatgcttcaaatgggaggagggaaattgcaagagtgcatagactagttgcagaagcatttctaccgaatccttatggtaagcccgaggtaaatcatatagacggaaataaggccaacccacacctaataaatcttgaatgggtcacgccacaggagaatagaaagcatgcatgggaagcagggctgagaaacaggtcacatcttccggcatataaaggggaaatgcaggccaactcaaagctaaacaaccaaagcgtaagtgaaataaggatgttaagggggttgggcgcctcttttgggtcgctagccaaaatgtttaacgtttccaaaagaacaattaggagagtggttagtggtgagtcgtggtctcatgtatcgctgccagccgccccgcaggaggttagtgatgcctaa

SEQ ID NO: 233295 - DNA, 819 bp, Klebsiella pneumoniae
atgacaacacgcgtgattgccctggatttagacggcaccctgcttaccagcaaaaaaaccattctgcccgcttcgctggaggcactggcccgcgccagagaggcaggctatcaggtcatcgtcgtcaccggacgtcatcacgtcgctatccatcctttttatcaggcactggctctcgatacacctgcaatttgttgtaatggcacctatttgtatgattatcacgcaaaaaaggttttggccgccgatcctatgccggtagagcaagcggtaagcctcactgccatgctcgccaaacagcagatccacggcctggcatatgtggacgacgcgatgctttatgaacaccccaccgggcatgtgatccgcacccgcaactgggcgcaggcgttaccggaagatcagcgtccggttttcgctcaggtcgattcgctggcgcaggcggttcgcgaagttaacgcggtatggaaattcgctctcaccgatgacgacattccccgcctgcagcggtttgcgcagcaggttggcgagacgctgggcctcgagtgcgaatggtcgtggcacgatcaggtggatatcgcgcgcgccggcaacagcaaaggcaaacgcctggcgcaatgggtggccgaccaggggctgtcgatgcaggatgtggtggccttcggcgataactacaacgatcttagcatgctggaagcggcgggcaccggggtggcgatgggcaacgcggtggacgaggtgaaagcccgcgccaacatagtcatcggcgacaatgagtccacgagcatcgccgagtttatctaccgccaactgctgtaa

SEQ ID NO: 233296 - DNA, 789 bp, Klebsiella pneumoniae
atgcaggccgaaattcttctcacccttaagctacagcagcgcctgtttgccgatccgcggcggatcgccctgctcaaacagattgaccagaccggttcgataagccagggggcgaagcatgcgggtatcagctataagagcgcttgggatgccatcaatgagatgaaccagctcagcgaacaaccgctggtggatcgcgccaccggcggaaagggcggcggcggcgcggtgctgacccgctacgggcagcgtctgatccagctgtacgatctgctggcgcagatccagcagaaagcgtttgatgtactcagcgatgacgatgccctgccgctggatagcctgctggcggccatctcgcgcttttccctgcagaccagcgcccgcaaccagtggttcggcaccattaccggccgcgatcgccagcaggtgcagcagcacgtggaagtactgttggctgacggaaaaacccgcctgaacgtcgccatcaccgcgcaaagcgctgagaagctgggactcgatgagggccaggaggtgctggtcctgctcaaagcgccatgggtcggcatcaccctcgatcccgcagcagcccgccaggccgataaccagctgtcgggacgtatcagtcatatcgaatgcgggtccggacagtgcgaagtactgatgaccctggcggacggtcaaaccctgtgcgccaccctgccacaggcgcaggccgctggcctggcggaaggaacggaggcgatcgcttacttcaatgccgatcgcatcattctcgcgacgttatgctga

SEQ ID NO: 233297 - DNA, 333 bp, Klebsiella pneumoniae
gtgcagcaatggctggatattctcggcatcgataagcgcaccgccgacgcgccgtttcacagtctgtcgtggggccagcagcggctggcgcttatcgtccgcgcgctggtgaagcatccaaccctgctgatcctcgatgaaccgctgcaggggctggaccccctcaaccgccagctggtgcgccgctttgtcgacgtgttgattggcgaaggggccacacagctgctgtttgtctcgcaccatgcagaagatgccccggactgtattacccatcgcctggcgttcgttcccagtggagacggttacacttatcagctcggccctgtggcctga

SEQ ID NO: 233298 - DNA, 1149 bp, Klebsiella pneumoniae
atgagtctgaaagagaaaacccaaaccctgttcgctgacgccttcggctacccggccagcaatgtcattcaagcgccaggccgcgtcaacctgatcggcgagcataccgattacaacgacggttttgtgctgccctgcgctatcgactaccagacggtgatcagctgtgcgccgcgcgacgatcgtaccgtgcgggtgattgccgccgattacgacaatcagaccgatgagttctctctcgacgcgccgattatcagccacgacacccagcagtggtcgaactatgtccgcggcgtggtaaagcatctgcagcagcggaacagccactttggcggcgcggatctggtgatcagcggcaatgtaccgcagggtgcggggttaagctcctcagcctcgctggaagtcgccgtcggcaccgtgttccaacagctgtatcatctgccgctggatggcgcgcaaatcgccctcaacggccaggaggcggaaaaccagttcgtcggctgcaactgcggcatcatggatcagctgatttcagcgctgggcaaaaaagaccacgcgctgctgatcgactgccgttcgctgggcaccaaagccgtctcgatgccgaaaggcgtggcggtggtgatcatcaacagcaactttaagcgtaccctcgtcggcagcgagtacaacacccgtcgtgaacagtgcgaaaccggcgcgcgcttcttccagcagcccgccctgcgcgatgtcacccttgagcaatttaacgccgtcgcccatgagctggatccggtcgtcgcgaagcgcgtacgccacgtgctgacggagaatgcccgcactgtggaagccgccagcgccctcgaaaaaggcgacctgaagcggatgggtgagctgatggcagagtcccacgcctcgatgcgtgatgatttcgagatcaccgtcccgcagatcgacaccctggtggagatcgttaaggccgcgatcggcgataagggcggcgtgcgcatgaccggcggcggctttggcggctgcgtggtagcgttaatcccggaagatctggtcgataccgttcagcaggccgttgccaacgagtatgaagcgaaaaccggtattaaagagacattctatgtctgcaaaccgtcacagggggccgggcaatgctaa

SEQ ID NO: 233299 - DNA, 261 bp, Klebsiella pneumoniae
gtgaccagtaaagcggaaatttgtatccgccatgtgcccgaccggggccatttttctctcccgctggtggccacccactccaatgcccacgccctgtgcccgcagccgcgcaatctgaccgaccagcaactgcgggcgatccgcgacagcggcggcgcggtgggcgtcaatttcggcaatgctttcctgcgcgccgacggccggcgcgatagcgacacgcccttaaccaccattatccgtgaggcctgtagtcatttttaa

SEQ ID NO: 233300 - DNA, 351 bp, Klebsiella pneumoniae
atgaccgtttccgcgatgttggcggagattccggaactgggaacgctctcccggcgcgaaatcagtgcgcttataggtgttgctcctgtcaaccgggactcagggactatgcgtggccggcgaaccatttttggcggcagggctggcgtaagatcagcactgtacatggctgcgcttgtggcaacccgctttaatccggtgataaaaacgttttatgtgcgcctgcttgcagccggaaaggccaaaaaagtggcgctggtagcctgtatgcgtaagctgcttactatcctgaacgcaatgctcagaaagaacgaagaatgggatgagtcgtaccaccacgttgctccataa

SEQ ID NO: 233301 - DNA, 2259 bp, Klebsiella pneumoniae
atgtctgataagcacccgaaccctcaccaacagcaggcaccggtccacgacagcgaggaagcgcagccgggtctcgattcgctggcgccggacgatcgggagtggcgccccacgccgaaacctaccgctccgggcgtcgaacccaccgccccaggcagcctgaaagcgcccgatactcataacagcaaactggattccctggaggcgcaacgcaaagggggggaagattttccgctgaccaccaaccagggcgtgcgcattgctgacgatcagaattcgctgcgcgccggtagccgcggcccaacgctgctggaagattttatcctgcgggagaagatcacccactttgaccacgagcgtattccggagcgtatcgttcatgcccgcggctctgccgcccacggctacttccagccctacaaaagcctggctgcgttgactaaagccgattttctttcgtcagccgataaaatcaccccggtgtttgtacgcttctccaccgtgcagggcggcgcggggtcggcggacaccgtccgcgatattcgcggcttcgctaccaagttttacactgacgaagggatttttgacctggtgggcaacaacacaccggtcttcttcatccaggacgcgatgaagttccccgactttgtccacgccgtgaagcctgaaccccactgggccatcccacaggggcagagcgcccacgatactttctgggactatgtttccctgcagccggaaacgctgcacaacgtgatgtgggcgatgtcggatcgcggcatcccgcgcagctatcgcaccatggaaggcttcgggatccataccttccgtctgattaatgccgagggcaaagccaccttcgttcgctttcactggaaaccggtcgccggcaaggcgtcgctggtgtgggatgaagcgcagaagctgaccggccgcgaccccgattttcatcgccgcgatctatgggaggccatcgaagccggggactacccggaatttgagcttggcctgcaattgatccccgaagagaatgaatttgcttttgacttcgacctgctcgatcccaccaagctgatccccgaggcgctggtgccggtgcagcgggttggcagaatggtcctcaaccgcaacccggataacttctttgccgaaaatgaacaggcggccttccatcccggacatatcgtcccgggcattgatttcagcaacgatccgctgctgcaggggcgtctcttctcttacaccgatacgcaaattagccgcctgggtgggccgaacttccatgaaatccccatcaaccgtccgacctgcccgtatcataatttccagcgtgacgggatgcaccggatggacattgacaccaatccggccaactacgagcccaactcgattaacgacaactggccgcgcgagacgccgcctgccgccaaacgcggtggctttgagtccctcgccgagcgcgtcgacggcgaaaaaatccgccagcgcagcccttcgttcggcgaatattacgcccagccgcgtctgttctggctgagccagacgccgattgaacagcagcatattatcgatggtttcagcttcgaactcagcaaagtggtccgcacctggatccgcgagcgggtggtcgatcatctggcccacattgatactaagcttgcggaagcggttggggcgaacttaggcatcgaactgagcgacgatcagcgcaacattaccctgcccgccccggtcaatggcgtggagaaagaccccagcctcagcctctacgccgacgccgaaggcgatgtgaaaggtcgcgtggtggcagtcctgctcaacgaacgcacctcagcgcaggatctggttcagctcctgcaggcgctgcaggcccagggcgtgcacagcaagctgctctactcgcgaatgggcgaagtcattgccgacgatggttctccgctgccgatcgccggcaccttcgccggctccccgtcgctgacggtggatgcggtggtggtgcccggcggcgacctcagcgccctgagtcagagcggtgacgcgcgctattacctgctggaagcctataaacatctgaagccgatcctgctggcaggggatgcgcggcagctgacgtccgttctgcatgttccgacccagggtgaagagggggtcatcgtcaccgatgcgctcgacacgccagcggcggacaaactgctcgccctgatgacggcccaccgcgtgtggtcgagaagcccgaaaatcgccgctattccggcgtag

SEQ ID NO: 233302 - DNA, 237 bp, Klebsiella pneumoniae
atgatgaccccgatatggttaggaaccagctggaaaatgaacaagccgctgtcgcaggccatggcctggtgcgaaacgctggcagcgcggatgccggagggctgtcaccccgctattcagcccttcgtcattccccccttcaccgcgatccaacccgtcagccattttctgcaaacgcatcagttaccgcttctgaccggcgcgcagaatatgcatgaagcggatcagggcgcctag

SEQ ID NO: 233303 - DNA, 1719 bp, Klebsiella pneumoniae
atggaaaaacatctgttgattagcaagggctgtaagggctggggcgggccgctgactatcacgccaggtcaggggaaaaagattgcgtacatcaccggggggatccgtcccccggtcgtcgaccgcctgagcgaactgaccggctggccttccattgatgtattcaagaatggcgaaccgccggcggaagagattggtttaatggtcatcgactgcggcggcacgttgcgctgcggactctatccgaagcggggaattcccaccatgaacctgcatcccaccggtaaaagcggcccgctggcggaatttatacacgaagggatctacgtctccggcgtgacgccagcctgcattgagatggtctggccgcaaggggaaggcggaaagcttgggatcgtggctgacgatctgaccggggcaactaccgtcggggtgctgctggcgcgcagtggtttaaaaaccgccgcgtttttcgataccgaatccttcgcccgcaatgaggtagagtatccggcgatggtggtcagcagcgacagccgcccattgccgaaagcggaggcccagcacaaagtgagcgctgcggtgaaacagctgcaggctcgcggcgcgcattacttcaccaagcggattgataccacgctgcgcggcggcatcggatttgaaatcgacgccatgctggaacaactgccgcaggagacggtggcggttgtggtgccggcgatgccgcagtcacggcgtattctcgtcggcggttactcggtgattgattcggtagccctgtcgcggaccgatgtggctcgcgatgtacgtaccccggtcaccgagtcgtgggtgccgggactgttggcggcgcagacccatcatcaggtcgggcatatcgcgctgacatcggtgatgaaaggcgaagggcaaatccagcaggatttacaggaacaacaacagcgcggcgtgcgggtgatagtggtcgatgcgataaccgtcgacgatgtcgatgccatcgccggggcggtagtggccctgaactggaacgtgctggccgtcgatccggggccctttaccgaacggctggcggttcgtcgcggcctgatgcgcgaagcgcggagcagcgcgcccgcgagcctgacagcggacggccagcgcggctcgattttgatcgttgccggcagcgcaacgccagtaaccaaaaaacagctccagtatttgatcgctaatgatgcccgggtctgccatatcccggtggatgccgagctgttggttgaccggaaaaacgccgctgagattgaagtcaatcgcgtggtgcagcatgcccgacagtgcgttccggcgcagcacaacgcgctctttgtttttgagtccgccttgaccgggcggttgctaaaccttcaggaagaggagcagcgatttggtctggcccacggtgaggctgcgcaaaatattaaccacggattgggcagtattgtgcgcgaggtgcttaactgtgcgtcgggtgaaattaaaggattgtatatgaccggtggtgacaccatggtcaatgtactaaaagagctgggcgccaccggaatagaaatgattgactatgtcatcccgcaaaccgatatggtgcggatcattggcggcgattatgccggcttaatttgcgtcgggaaaggagggctaaccggaccggaagatattattagcatcattgttgaccgaatttatcaggaagcacagcaataa

SEQ ID NO: 233304 - DNA, 540 bp, Klebsiella pneumoniae
atgaaagtagaccaaattattgaaggcatcctcggaaaagaaggtgggtatgtcgatcacccttctgataaaggcgggccaacccgctggggcatcacacagaccacagctcgcgcgcatggctacaccggtgatatgcgagagctgcctagggaaacagcaaagcaaatcctgctgagtgattactggatcggaccccggtttgaccaggtggcaagtttatctacgttactggcagatgagctttgcgacactggggtgaacatggggccatcggttgcaagtaagtttttccagcgctggctcactgccctgaatatgcgcgggaagctgtatcccgatctgagcccggatggagccattggcccccgaaccatcaccgcgcttaagggatatctttctgcccgcggaaaagaaggcgagcaggtgctgcttagagcactgaactgcagccagggggccagatacctcgaactggcggagggccgcgaagccaacgaggattttctttacggttgggttaaggagcgtgtgttgtga

SEQ ID NO: 233305 - DNA, 276 bp, Klebsiella pneumoniae
atgagcttcgaaattattgcaggtcttgtggttgttattctgggcgctatcgctggcgcgttctgcatcggccatgctcgcggaaccagtaaggcagaagccaaagctgatcagcagcgtaccgaagaaaacgcagccgcaagcgtcgcagcggcagaacgtaaggcggaagctacgaaagaggccagtaatgttgaagagagcgttaagcgtatggctaatgacgatgttgatcgggagctgcgtaagtacttcacccgccccggtagtcgttga

SEQ ID NO: 233306 - DNA, 573 bp, Klebsiella pneumoniae
atgagagatcaagatgttagggctgcggttcatcagaagcttcttaaagagtcgcatttagatcctgattgtcttgtgatcgatgagttttccatatcccttggtgccagcagagcagatatagcggtagttaacggcgttcttcacggttatgaactgaaaagtgaatatgattctttggaacggttgccgctacaaatcaagcattattctgccgttatggacaaggttactctcgttgtagcagataagcatctggacggagcgcttgagttaatacctagctggtggggggtgaagaccgtatcagtagggccaaagggggcgattcgtatcaagcatatgcgtgccgaaaagctcaatcggaattacgattccttgatgctcgctcagttgttatggagagatgagtgtattgacgttctagagcgttggggccgttctaaaggttttaaaagcaagccccgatttgagttatggaatgtcgtcgccgattttatacccgttgcagatcttcgacttgaagtcagaactgcattaaagaatcggatcgactggaaggttagggtctag

SEQ ID NO: 233307 - DNA, 1068 bp, Klebsiella pneumoniae
atgagtcttcatcattactacccacagctaagatggaaacctgctgagtatgaatctctgatgcagttagatcagacaataatctctggtttcacccctatcctcaccattcttgatattgactgggactacgaaaatgactgttataaaaaatcgttaagcagctatttatctgacttcggtgctaatctcgcagcatcctggactcctatacgtccagttttgttagacctgaagtatctggataaacatggttcaagtcgcaatcatcctttagatatgtgcattaacgacgccagggcgtacggaaaggaaattgtgccagttgtttctcctgcatccactgcaaactacatacatgctgttcagcgaaacatatctaatggtgttgctatttcacttagcccccaaacatggcacttgtttgcacacttgctaaatcagttaaaccttcctcctaacttgattgacatcattgtagattatggcgatatccaaagtgctaatgatagcttaaaacaacaagccttagccgttattagttctctttcaggacaagcaccttggagaacattaatcttatcttcaacctcttaccccagctcgcagacgggaattcctcagcatgtagtccatcatattccacgacacgaatacgatctctggttatatgtagtgaaaaattctatcaatggcaggacaccctgtttcagtgattatccaacagcaagtgctaccataacgagcgtagatccacgattcatgtctcaatatgttgcagtaagatattcgaatgatacttcatggatttttgtaaaaggtacagcagttaagggaaatgggtggagccaaactaaaaatctttgttctatcctagtcaattcggctgaataccaagcatttggcccaggcttcagtttgggagaccagtacatatacgatagggctgctggtattaataaatcagggggttctaaagattggcgtaaagtagcccatatacaccatcttacgctggttgttagacagttaaatctattgtcacagtctattccggctagaccctaa

SEQ ID NO: 233308 - DNA, 162 bp, Klebsiella pneumoniae
atgaagaacttaaaaattgcatacgtagacgagaagctggtggcgattgagtgtgacggtttgtcatgcacatcgctgccagtttcagatcctcccctcgacagtaccgctttaactctccctcaattcatgctcaaggatgtctatgccaccacgagctaa

SEQ ID NO: 233309 - DNA, 276 bp, Klebsiella pneumoniae
atgaaacgtttgcccttgctggcagctttgcccttgctttgcgcttccgcgctctctgcccaaccgctgatgtccgtcggctattttaacggcggcggcgacgtcaccgccgggccgggcggtgatatcgataagctggacgtccggcagatcacccatctcaactactcgtttggccttatctataacgatgaaaaagacgagaccaatgcggccctgaaggatcctgctcatctgcacgagatctggctgtcgccgaaggtgcgccctgcgtaa

SEQ ID NO: 233310 - DNA, 1638 bp, Klebsiella pneumoniae
atgcactggcaaacgcacaccgtttttaatcaacccaccccgctgaataacagcaatctgtttctgtccgataccgctctgcgtgaagccgtggtccgcgaaggcgccggctgggatggcgatctgctcgccagcattggccagcagctggggacagccgaatcgctggagctgggacgcctggccaacagcaatccgccggagctgctgcgctatgacgccaccggcgcccggctggacgacgtgcgcttccatcccgcctggcacctgctgatgcaggggctgtgcgcgaaccgggtacataatctcgcctggcaggaggatgcccgcgaaggcgcgtttgtcgcccgcgccgcccgctttctgctccatgcccaggtggaggccgggacgttgtgcccgattaccatgaccttcgccgcaacgcccctgctgcagcacgccctgcccgcgccctttcgcgactggctgtcgccactgctgagcgaccgttacgatccgcaccttgcgcctggcggccagaagcgcggcctgctgatcggcatggggatgaccgagaagcaaggggggtctgatgtgctgagcaataccactcgcgcggagaaaacggcggaagggttttaccgactggtgggacacaagtggttcttctcggtgccgcagagcgatgctcacctgttgctggctcaggctccgacggggctctcatgcttctttgtgccgcgtctgctgcccgacgggcagcgtaacggcgtgcgtcttgaacgcttaaaagagaagctcggcaaccgctccaacgccagtagcgaagtggagttttatgatgcctgcggctggctggtgggcgacgaaggcgacggcgtgcggcagatcctcaggatgggcggcctgacccgctttgactgcgcgctgggcagccatgccctgatgcgtcgcgccttctcggtggcgctgtatcacgcgctacagcgtcaggcgtttggcaaaaacctggtcgaacagccgatgatgcgccagctgctggggcaaatggcgctccgtctggaggggcagaccgcgtttctgtttcgcctggcgcgggcctgggaccgtcgggatgatgcccgggaaagcgcctgggcgcgcctgtttacgcctgcggccaagtttgccatctgtaaggccggtatcccgtttgtcgccgaggcgatggaagtgctgggcggcatcggctattgcgaggagagcgaactcccgcgcctctaccgtgagatgccggtcaacagcatctgggaagggtccggcaatattatgtgcctcgatgtgatgcgggtgctgagcaagcagccggcggcgatggagctgctggccgcggagtgtgcggaggtgaaaggacagaaccgccatctcgaccgcgcatggcgtcagctgcagcaactgctgaaacgacccgccgaagagcaggggagagagattgcccggctggtctatcgtcttggcgcgggggcgcagatgctgcgccatgcttcgccgccgctggccgaagcctggtgccggatgatgctcgacacccgcggcggcatacgtcttgacgcgccgaccctcgacgacctgctgctgcgggctatggggcgcgggcgccaggcgcctcaggcgtag

SEQ ID NO: 233311 - DNA, 849 bp, Klebsiella pneumoniae
atggcaagaaaatcagtaagatcgctgttacttactgcgctgctcgcgacgcccctcctcagctatgcaacccaatatcccctgacggtcacggaccttgacggccggcaggtcaccctcgccaaagagccgcagcgtattattttgcaggatggtcgcgacattatgaccctcgccctgctggaccgggacaatccgtttaaacggctggtggcatggaataatctggcgaaaaagcaggatgttgccacctggcagatgctgaaaacgacgtggccgcagtcggccacgatccttgacatgggcttcagcgataaagggaacgtcgatcttgaaagcgtcatcgcccgtcagccggatctgatgatcgcccagctgcgcgccaggccagcgctgatggagagcggcgtcatcgacaagctcagcgccctgcacgttccggtgctgtttgtcgactatgagatcgacccggcgaaagataccgcccccagcatcgacctgctgggcaaagtccttaaccgcgagagccaggccaaagcctttaccgattactatcgtcagcagctgcagtcgattcgccagaagaccgcgaccatcacaccgaaggcccaacgtcttcgtggaagcgctggccggcaacagcgacgcctgctgctttacccacggccacagcggctggggcgggctggtggaggcggtcggggcgaacaatatcggttcgcagctgctgccgggcgcctccgggttcgtctcgctggagaaaatcataagcatgaagcccgacgcctggatcatgaccggctcgaagcgcggcaacagccaggtgttgcccctgggttatgcggttaa

SEQ ID NO: 233312 - DNA, 717 bp, Klebsiella pneumoniae
atggtgaatattcccgcgttttcgctggtctattaccaggacggcagtcaggtgctggcctcgcgggtgatcgtcggacgtccggaccgcaagacgccgatgatgagcagcgcgctgaacaacgtagtggtcaatccgccgtggaacgtaccgcccaccctggcgcgcaaagatattctgccgaaggtgcgtaataatcctggctatctggagcagcatggctacaccgtgatgcgcggctggaacagtaaagagaccatcgatccttaccgggttgactggtcaaccatcaccgagaacaatttaccgttccgttttcagcaggcgcctggggcacgtaattcactggggcgttacaagtttaatatgccgagttcggatgctatctatctgcacgatacgccgaaccataatctgtttcagaaggatgtccgtgcgctcagttccggctgcgtcagggtcaataaagcctcggagctggccaatatgctgctgcaggacgcgggctggaatgacacgcgcatatccgacgccctgaagcagggggatacgcgctatgtcaatattcggcaaaatataccggtgaatttatattacttaacggcgtttgtggacgctgatggacgtacacaatatcgaacagatatttacaattacgatatcaccgcgcgatccagcgcacaaattctgacgaaagcggaacaattaatcaggtaa

SEQ ID NO: 233313 - DNA, 180 bp, Klebsiella pneumoniae
atgcatatgtgcatcggtatgggaattgcgctcaattttgcttcatcgtttatcgccgacatctgtgtgcgcggttcaatcaggaacgtcaacataaccggtcttgcagaaggcgtatcggcgctgggtgcatcgagtttcagtatgggaatgaacggtcatgaactggatgaaagttaa

SEQ ID NO: 233314 - DNA, 1254 bp, Klebsiella pneumoniae
atgaactggatgaaagttaaaaattttcgtacgcttctctcatctcttttcatctcaaagtccggcgattatgcctatgaggtggttttcgtatttattgtgctggaaagcacgcataataactacctactgaccggctttgtatatttttttcggtttatcccttttctattcttcggccccgttggcggctggctggcagataattatcgtcttaaaaataacctgttactcagtgaatggttgcgtctgacagtgtcgctgcttctttttatcaccagtctgaatggtgcagtcaaccttactatccttattgtggcatcaattctgacaaccattggtcgcagtatttttcaaccgagctaccaaacagccgtacccagaacagtgagtgctgacaggcttaccggcgctaacggcgtgtcgcaggttgcagaggaaaccgcctcagtggttggtcccctcctttgctctcttatcctgtcattcacggataagtcatgggttctgttatttaattctgtaacgtatttcgtatcaataattattctctcaacattttctgaatctgattcggcgacaggagcgccttttcgaattaaaaaagtatataaggaaaccttttccagtattaagctcctttaccgggactcctgtggcttgtttattgttatactgggttcctctgtctgcattctgtttaccggctcggttatccgttttattattcctgccgtgacgcttagtcacggtcagggagaggtgtttaccagctggattttttcacttatggctgcgggaacaatcaccggtgggctgctttacggaagatttgtgcggtcgacgtctcctgaaaaagtgatgcaacattggttcatttacggcctgctactgttgttaatgtccttcacagccttttattcattggcatttcttctaccactcgcgtttgtgcttggtattagcggagcgtttgttgatatttctcttgtcacagtcatacaatcgtggtctccagaggagaacattggcaagacatttggtacgttttccacattggcaaacacagccgaagcactttcaggtcttatttccgggctttttgccgtaggtggtttgatgattgtttttgtgggaatgagttcacttatcgcgctgaccggcataaccagtatgacttttcttacccgaaaaacggtgaagaataatcacagcagctcgacgggaagaaatgaacctgacggctcatcgtaa

SEQ ID NO: 233315 - DNA, 426 bp, Klebsiella pneumoniae
atgcaatatgcgaaacctgtcactctgaatgttgaagagtgcgaccgtctctcctttctgccttacctgtttggcctggattttctgtatgccgaggcatctgtgtacgcgctggcgaaaaaaatgatgccggaatatgaaggcggattctggcacttcatccgcctgccggacggtggcggttacatgatgccggatggcgaccgttttcatctggttaacggtgaaaactggtttgaccgcacggtcagtgccgatgccgtaggcatcattttgacttcccttgtgattaaccgccagttgtggctgtaccacgacagcggtagcgcagggctgactcacctgtacaggatgcgcgatgcgcagttgtggagccacatcgaatttcaccccgaatgtaacgcgatttacgcggcgctggactga

SEQ ID NO: 233316 - DNA, 348 bp, Klebsiella pneumoniae
atgagtgaagattatttgaaaatgtttacaggtgttgttctgttaatgcttgtcattattgttggttatttcttttctgagcgtaatgacaggaagatgtttctcctgagctcactggttttccttgttattaatatcgcgtgtttatatgtgcttaccgccagtctctggtttctgtgtggtgcaattatgaatcagggcgcagcaatggttgttccaatggttattggctcattaccgaacgttacgagcttcgacaggttcagaagaatatttatctgtattatgttgtcatcagcatggtccggagtgatgtggttttttataagggggcttatgacaggctaa

SEQ ID NO: 233317 - DNA, 396 bp, Klebsiella pneumoniae
atgatgaaagaaaaaataaatgatacagaaccgggaatcaaacaaattgaaagggagattgaacgtggttgtgataatgcaaaaaaatacttctggctttttgtggttttctttgctgccggattgattgtaaggaacgttatgcatgattttttcagtgccggtattgattcgtggaaagctgacccggaattaaataattttcgttatatgtggaacaccctgatgtatgtcattccgattatgttatatgcgcttgcagctggttttcttgctgcggcttctctgtcgccgttgtgcgaaataatatttgggggtgtccggatattcctgctgaaacgccgtatgcgccgggagaacgaattaagggagggcaagaatgatgccacgcattaa

SEQ ID NO: 233318 - DNA, 612 bp, Klebsiella pneumoniae
gtgttaatcagaaaatgcataatgttatcaatttgtttcctcattcagggatgcataagtacacaagtatctgaaggaagtttatatgaatataagaataaacatataagagaatttttgtccgaccaggtaatgtataacattcataatgagaattataactatattacccgtactggcggttctgatacgtatttcctatatactccggctctgtttgttgataaacaagtagcggcaccatcagtgaatgtggaaaatttatgtgctataagtggagggcagggacgaattaagaaattcacctctgatacttttattgaatccggctataaagttgctaaagcctttcgtgatatgggattgtatgctcatttcggagcatatgaagcattcagggattcttatcagagctttgaaaaacaaaagattgcgtatagatttcaaacagaaaaactggatgagtatgtaaataaaggttatttctttgatgatttttcctgtattgtcaatggtaaagaaatatggtcactttcaattgagccagttgctgttgatcaagattcatcaggtgttgatcaaatatggatgcttatgacggtaaatagctga

SEQ ID NO: 233319 - DNA, 306 bp, Klebsiella pneumoniae
atgcaccgactgggggaaatcagagatcggggactggaaaaccagagctaccgggccagcggactgacgttgctgactgcggcgatctcactgtggaatacggtttatatagaaagagcaatagattctttgagacgaaaagggatcccgctaaatgaacagcttattgctcatttgtccccgctgggatgggagcacataaatctgagtggggattacgtctggcgaacaaacctcaagttgggacagggtaaataccgctcattacgctcagtggatagcagtctgtacaaaaaacagtcttag

SEQ ID NO: 233320 - DNA, 2169 bp, Klebsiella pneumoniae
atgacttcagtcacaacaaacaaaccggcaacaccggattctgatgaaatcgatctggggcgccttattggtgagttgatcgatcatcgaaaattaattattgctataacgaccgggtttacagtactttcagtactttatgcgctattagctactccgatctaccaagcagatgcactaattcaggtggagcagaaacagggaaacgcgatcttaagtagtttgagtcagatgttacctgatggccagccgcagtcagctccggaaatagccttattacagtctaggatgatacttggtaagactgtggatgatttgaacttacaggcacaggtaagaccaaaatattttcctcttgtaggccgcggtttagcacgaattatgggtgataaaccagggaatattgctattagtcgcatttatttacctagtcgaggtgatgatgaaagtgcgccaaaagttattcttactgtgaaagatgataaacattatctggttgagggcgatgattttagtgctaatggtactgtagggacgttacttaatgaacatggcatctctcttttagttaactcaattgatgcaaaaccgggcgataagttcactgttagccagttgacgagattgaaagctattactgatcttcaggagatctttagcgttgccgatcaaggtaaagacactgggatgttggagctaacattaagtggagataatcctgagctgatatctcgcatacttgatagcattagccagaactatttgacccagaatatagatcggcaagctgcgcaggatgcaaaaagcttagagttcctaaatgaacaattgccgaaagttcgtagtgatctggatattgcagaagataagttaaatgcttatcgcaaacagaaagactctgttgacctaaccttggaggctaaatcagttctggagcaaattgttaatgttgacaatcaacttaacggcttgactttccgtgaagcggaaatatcacaactatataccaaagagcacccgacctataaagcattaatggagaagcgacaaacactgcaggaagagaaatccaagctcaataaacgggtgagtagcatgccatctacgcagcaggaagtattacgtttgagtagggatgtagagtccggtcgtgctgtgtatttacagttgttgaatcgtcagcaagaactaaatattgctaaatcaagtgctattggtaatgtgcggattatagataacgcaataactgaacctgatcccgtaaaacccaaaaaagtgttggtggttgcaattggcattattttgggcctgtttgtttcgatcagtctagtactggtaaaggttttcttacgtcgtggtattgaatcccctgaacaactggaagagatcggtgtcaacgtttatgctagcgttccagtttcggagtggttggcaaaaaataaccgtaaatctaagcaattacgtaagaatgaatctgatgctctgctcgcagtagagaatccggctgatttggcggttgaggccattcgtagtttacgcactagtctacattttgcgatgatggaagccaaaaataacgtgcttatgatttccggtgctagtcctaatgcaggtaaaacatttatcagcagtaacctagcggcaactatcgcattaaccgggaaaaaagtgctgttcatagatgctgacttacgtaaaggctatgtatacaaaatgtttggccgtaagcaggataaaggattgtcagagatcttagctggacaagtggctgcagaaacagtgatcgaaaaagttactggcggtgagtttgattatatcggtcgtgggcaaattcctccgaatcctgcagaattgctcatgcatccacgttttgaaaaattattaaaatgggcaactcaagtttatgatttaatcatcatcgatactccaccaattttggctgttaccgatgctgcaatcattggtcgttatgctggtacatctttattggttgcacgctttgaagaaaatactgcgaaagaaattgaagttagtatgaagcgatttgaacaaagtggtgtaattgtaaaaggctgtattctaaatggtgtcgtgaaaaaggctagcagctattatggctatggctataaccattatggttattcttattctgataaaaaacacgattaa

SEQ ID NO: 233321 - DNA, 321 bp, Klebsiella pneumoniae
atgcgtatgtctctgatgtttgcagccgtgacgcttttaaccggtattaacctgttttttattccgtttcagcctgttccggctctgtggggggctatcctggccgttgcttttgttctgattaatgtcgtggcggataagctgcgcctctggagtggcattgcgtggattatcgttgccggcatcatcataacgctgatgctgaaggggaaagagccgggtgacgaattacgcgggttgatcaccgtttttgctttcctggcttcggcctggtactgcgttgtacagtacagaaaagagcagggcgaatctcagtcctga

SEQ ID NO: 233322 - DNA, 582 bp, Klebsiella pneumoniae
atggaaaacgtcaaccgccccacatcgcctttagagccgctttcagggctggttgagcgcgtcacctatcacaacggcgaaaacgggttttgtgttttgcgtctgaaagtgaaaggcgaacgtgacctgataaccgttgtcggccacaccccgtccgtgcccccgggagaatacgcctccgcctccggccagtggctgatggacaaggcgcacggtcgtcagttcaaggccacctttttgaagatagcgccccccaccaccctggccggtatcgaacggtatctggggtccggcatggtcaaggggattggcccggcctattccgcccggcttgtccgggcatttggcgctgacgtcttcgacgtgattgaaaaagagccgtcccggctgcgtgaggtggggggcatcggcgccaaacgcgccaataaaatcatctcaggatggggtagtgaccgggtagctgcgataactgccaacttttctcccctcccaccttcgcgcataaacgaacgtttgtgcaactatccctgtcccaacgtaacgatgcgaccttgtgcattgcaaaaatgtattgcaatataa

SEQ ID NO: 233323 - DNA, 576 bp, Klebsiella pneumoniae; identical to SEQ ID NO: 232806

SEQ ID NO: 233324 - DNA, 591 bp, Klebsiella pneumoniae
atggttcaccaatctgacagcgatgaattatcggcactgcgggcagaaaatgcccgattgatttcgctacttgatgcccatggaattgagtggagacttaagcggcaggctccggtgcaaaaattatcaaccttatctactgacgacaaggttgcgctgtttcgccgactgttccgggggcgggatgatgtatgggctctgcgctgggaaagtaaaaacagcggaaagtcgggctattctcccgcctgcgccaacgaatggcagccaggtatatgtggtaaaccccgaataaaatgtagcgactgctctcaccgccagctcattcccgtatcggatcccgttatctaccgacatctggctggcgaacacaccatcggtgtatatcctttgcttgaagatgacttctgttattttctggccgttgattttgacgaagcagaatggcaggccgatgcgtcagcgttcatgcaatcctgtgatgaactcgatgtgccagctacactggaagtatcaagatcgcgtcagggggctcatatctgggtgttttttgcgtcccgagttctggccagggatgcccgccgtctggggtga

SEQ ID NO: 233325 - DNA, 867 bp, Klebsiella pneumoniae
atgacggaatggcatatccggtatggcggccgtggcgtcatgatttactggcatgtggaaaagaaatccacctgcatttactcccagctcaagcgttgctcttcttctgaagtcgccgccatgatagagggtgttttacgccactgtactgatatggatatcgagcgacagtacgtcgacagccacgggcagagtgaagttgcttttgctttctcatatttgctcggttttgacctgctaccgcgccttaaggctatcgccagccagaaactctatcgtaccggtgatgaaaaaaacggagattattcaaatctggaccccgtgttaacccgcaccattaactgggaactcatcattcagcagtacgatgagatgattaaatacgcaacagcgttaaaacagggaaccgcagaaccagaagccattttacgccggtttaccaggaacaacgttcagcatccgacttataaggctctggcggagctggggaaagcaataaaaaccattttcttatgccggtatattggctccgaagatcttcgcattgagataaatgaagggctgaacgtagtggaaaactggaatagtgcaaatgcgttcattttttatggtaaaggcggagaggtggcgacaaaccgtctggaagagcaggagttgtctgttctggcgctgcatctgttgcagatttgcctggtctacgtgaacacgctgatgatccagcaggtactccatgagcccgtatggctgtcacgaatgaaggcagaagacttcagagcactgacaccgctgatttacgctcatgtaaacccctatgggatatttgagcttgatatggaaacaaggttaccgatcgacgtggttgcctga

SEQ ID NO: 233326 - DNA, 366 bp, Klebsiella pneumoniae
atgtttaatacggattcgcttgcctggaagtggcacattccggagctggcccggcagatttacccgtgggtcagctggctgtaccgggagtattatagtctggtcggtttttttctggttatcggcctgtttttcggtctggcagaactctgggctgggcggatgcgttttgtggggctgagtcagaaagaatggcgggagtatgctgaacgctataaacgcgataataaccgtgccgcgccattttcggtgctggcctcgctggattcgcccgggcggatggtcagggctcggcggcatgtctggaactacgcgtactggctgaccggcgctgccggtctggcccttctggggggcttgttgtag

SEQ ID NO: 233327 - DNA, 576 bp, Klebsiella pneumoniae; identical to SEQ ID NO: 232806

SEQ ID NO: 233328 - DNA, 591 bp, Klebsiella pneumoniae; identical to SEQ ID NO: 233324

SEQ ID NO: 233329 - DNA, 867 bp, Klebsiella pneumoniae; identical to SEQ ID NO: 233325

SEQ ID NO: 233330 - DNA, 426 bp, Klebsiella pneumoniae
gtggcgattgacatccagtggttactcgaacgtggtcgcaaacacggcccggccggccacctgcgccagcatcttgagtacctctttcgctcctgcagcggcaatctggccgctcagtccgacctgttccgtctcacctacgcctctgaaaccctgaaagaccagggctgggacaattatgtgctggacgcacacgagtggaaatccggcgtcgtgccgacaccgtcacagcataacgggttctatgtcgaaaaaacggcactgaacgtcgcttttgcccaggacggtcgccatctgcaccccgtcacgtttcgggtggtcggtgacgccgaccggtttatgcatgtgatggccgagtacggactgtgtacgcgccggcagggcagcacgtcagcctgccacaccatcgcgcttgaaccggcgtaa

SEQ ID NO: 233331 - DNA, 228 bp, Klebsiella pneumoniae
atgcttccttaccgccaccggcagattggtgaattatccggagggcaaaagaagcgggtgttcctcgcgcgttctattgcacaacggggcaaagtaatccttcttgatgagccttttaccggtgtggatgtcaataccgaaaagaaaatcatcacgctgcttggcgaactgaaagaagaaggcagcaccctggtggtttcaacgcataaccttacctccgtatcctaa

SEQ ID NO: 233332 - DNA, 228 bp, Klebsiella pneumoniae; identical to SEQ ID NO: 102449

SEQ ID NO: 233333 - DNA, 189 bp, Klebsiella pneumoniae
atgggcatcgccattagggccgacaatagtacgcagttcgatgcggtcccgaccgatgttttttgccatatcgccaataacagaaaagcttgctatgacattaattttcgctttcgccgggaaagtaaaaaaagcatagatgtcgtcaggatgcataaagatataaaaccgggttttctcattaaataa

SEQ ID NO: 233334 - DNA, 1242 bp, Klebsiella pneumoniae
atggagcaacggcagtacaatacaaaagactttgaccgcactctagttctggagaaacgcacagctcttgtcgccaacaaggtatgggaatatctccaggcaaccgatccgatggccaagacgattgttttttgtgacgaccaggatcatgctgagaggatgcgccaagagcttgtaaagctcatccctgccgctgcaaacaatcgccgctacgtcatgcgaattaccggagacgataacgaagggaaagcacagctctcctactttatcgacaacgatgagccttacccggttattgcaactacctctaagttacttaccacgggcgttgatgctaaaacctgcaagctgattgtcttggaccagaacatcaactcgatgacggagttcaaacagatcattggccgcggcacccgcctgcgcgaggactaccaaaaactctacttcaccatcatggactttaaaggtgctacgcgactgtttgctgatcccgattttgacggcgaacccgtggtgatatacgaacctagccctgaagatactgtggtaccgcctgatgtcgtcacgccccccagaatagaagaactagaacctctcccctctggctctagtgtcacagataaggctggaagcaatgtaggccgaataaagtatgtgattgatgacgtcaatgtatgtttagcggttgaacgctcgcaatacctcgatgccgagggtaagctcatcactgaggactaccgagtcctgctcaaaagtgagattaaaagcaccttgcaggctaaatttggtaacctaaccaactttctacggcgctggagtagcgccgaacgcaaacaagctgtgatcgaggaattaaccgaacatggcgtaccattcgcgatcctgcaacaggcagtcgctaacggcagcgaactggatgcttttgatctggtaacccacgtcgcctttgatcagaagccactcactcggcgtgaacgggctaacaacgtgaaaaagcgtgatgtgttcggcaaatacagtgggcaagccaaggccgtactggaagctttgctcgaaaaatttgccgatcatggtgtacaagacatagaggatgcaaatgtgttggaattacctccatttgacctatttggtagcaagacacaaatccgtcggggtatttttggtggcgtagagcagtacacccaagccgtgaaggagctggagttggctctctacgacatatccgaacaaaaacaggcttga

SEQ ID NO: 233335 - DNA, 1782 bp, Klebsiella pneumoniae
atgaatctcagcagtaccattaaatccattcaagacatcatgcgtaaagatgacggcgtcgatggtgatgcacagcgtctcggccagctcacatggatgttgttcctcaaagtgtttgaccagcgcgaggaggaatgggccgatgataatccggcgtatatatctcccttgcccaaagagtaccgttggcgtaactgggcagcatatataccgggggctgatggcaaaaagaagccacaaattgccggtagtgaattgatcagcttcgtcaacaacgagttattcccgacgctcaaagagatagatgcaaacaaaagccctcagcataaagtcatccgtagtgtctttgaagatgcgaataactacatgaaatccggcccgcagatgctggccgtgatcgagaagctggaagatgctatcaatttccacgattttactatccgcgcaaacattggcgatgtgtacgagcaattactcaacgatttgcgcggcgcgggtaacgcaggagaattctacactccgcgcgccatcaccgcttttatggttgatagagtcaacccgcgtttagataagcgtgagacggtaatggacccggcctgtggaacaggcggttttttgaccgctgccatagagcatttccgcaaccaactcgcgacaatgaaatcaccgcgtcctgaagacaaacgcgccatagaagcgctaatcctcggtatcgaaaagaaacagttgccgcatctgctctgcacaaccaacatgctattgcatggaattgacgttcccagccagatcgagcataaaaataccctaggtatcggctggaacgagtggaaggccagtggcaaggttgactgcatcatcaccaatcctccattcggagggtatgaagatgatggcgtgggcagcgactatccggctgatctgcgcacccgtgaaactgctgacatgtttatggcgctaatcatcaagaaactgttgaaggaaaaaggccgcgccgcggtggtattacccgatggattcttatttggcgatggcatcaaaagcacgctgaaaaaaatgctgctgcgtgactgcaaattgcacaccatcatacgtttaccgaaaggcgtttttgcgccgtacaccaccatcaagaccaacctgctgtttttcaccaagggcagcactgttgaagatggaaccgaacacttccacactgacaccatctggttttatgaacacccctatccaacgggctacaaaagctactctaaaaccaaacccatccggctagaagaatttgaacccgagcgagactggtggggctcggaggaaaacgattttgccgaccgcgaagaaaatgaattcgcctggaaggttgatttcaaaaccaaacgtgaacaagctgaaaccgccgcacaaccgcactggcaacgcgccgaggagctgaacaatcaggctgctgtgctggaaaccgaagcaggcgatttacgcaggagtttggttggtaccattgatgctgtctatcgtgaaaagatcgacgcgcagattgccgaacttcgtgcaaaggccgaatcactgcgcctgcaagcgcgggatgctcaagttgctggagatcgcctctactggcctatcttcaaccttgacctgaaaaatcccaacgcgccggaagaagaaaacctcgacccagacctgctgttggagaagtacaaaaaactactgggtgaaattgaagaaaccgaaaatcagctcaaaagtgaattggccgctgcgctggcgcatcactttgccggtgaggatgcctga

SEQ ID NO: 233336 - DNA, 1830 bp, Klebsiella pneumoniae
ttgctcgatgagatcgaacgtcaacggctggatttcaacggcgagactcgcaaacaacgcctgaccaggcagggcaatacaacggcaaactctgtcgctccatatgaaattccaaaacattggagttgggtaagcctgagcaccgttggccacacttggggtcaaaagaaaccgttgaactcattcaattatattgatgtttcttcaattgataacaagaccggagtagttagtcatagctcgcaggtaataagcgcaagtgcagcaccgagcagagcgaggaaggtcgtaaaaaaagggacgctgatctactcaaccgtccggccttatctattaaatattgcaattatagatcgcgatttcgaatttgagccgattgcaagtactgcgtttgcaatcattcatccatgggaaggtattttaggtcgctatctgtatttttatctgcgtagtccgatttttgtgatgtatgttgagagcgttcaaactggaatggcttatccggcgataagtgatgaaaaattctattctggtgttgttccactaccaccgacggaggagcaatcccgtatcgtcgccaaagtcgatgagctgatggctttgtgtgacaagcttgatgagcagttgcaatctcgtcggacacttcaaaacgccctgcgccaatcaactatgcaagctatcgccagtgccaccagcccacaagaactgcaaatcaactggacgcacttggccgataattttggtaagctgttccatgcgccggaggatgtttccgacctcagaaaactggcttcagaacttgctattcgcggtgtacttgatactaaccaccagccagccgatacatcatcagttgatgtctatttggcagaactaggtagaaagaagtcaggtaaacgattcgcaaaatctgttcagccggacgaagcgttttcactaccaaacggatggcgctgggttcttttagaagatttgttatctggctcagaatcaggttggagccctaaatgcgaagcagaacctcgtcgtgaaggtgaatggggggtacttaaagttagtgccgtaacatggggagccttcgatccgaacgaaaacaaacgtcttccactttcgcttgaagctaggcctgagtgtgcagtaaagcctggcgacttcatgctatctcgcgcaaacactgccgaattagttgcccgcagtgttatcgcgcctgaggactgcccagaaaaactattaatgagcgacaaaattgtccgtctgaatttcctagacgatgctttaaaaccatgggtgaatttggttaacaactcggttttttctcgtgtgtactataaagaacgagcaactggaactagtgactcgatgcgcaacgtatcacgacaagtcatccatgagttaccgataccgcttccttctctgaaagagcaggagcgtattttgctcgcattaaatcgtttgcttcaccattgcgactcattagaaaaacaagcggcttctcgcatggaactgagtactcaacttgcagcaagtaccatctcggtctttgccggcctcaccatcgaacaacaagaggaacccatgaaagcccctcaaactgagctgatcgccccgctacgtttgggggcagcacccgacatcaaagcccaagctccactggccaccattcttgcccgccaccacggcgaaatgagcgccaaggatttgtggcagcgcttcggaggtgagattgatgccttctacacgcagttgaaaacagaagtagcgcacggctggattcttgagcccacgccagcagaggtgcgagaaaaaccagccaaagcggagaccgcctga

SEQ ID NO: 233337 - DNA, 1749 bp, Klebsiella pneumoniae
atgcaactacggcgtatctttatcccaacttttcgcaatcttcgcgatcttgacatcactttcgcgacgcacttgcagccaatggcaagtacaaccgaggctcctcccaaactcatccgtagccacgccctgattggtcagaacggcactggcaagtccaacctgatcgaggcactgatcaccatctttcgtgatgtggatctggaccgcgatgcagcttttgattacatgctggaatatagcattcgtggtcgtggggtacgcattgaggctgatacttccaagcaaaaacgcccctatgtgtgggtggacggtaaagctgaatcacaaggctatttgctgaaaaaccgtgagctgctgcctgcgcatatttttgcttattactcgggccgtaacgagcgtatcgaagccctgtttcaagagcaccagcgccgctttaaccagcgccaggaaatcactacagatgaagtgctgtctgagcaactgctggagaactatacaggctccgagtcagatattcgcgccgtcgaagaagccaaacgccgtcacgattcgcggctgaaacaagctggagacgatcgcttgcgacgccttttttattgtcgcggtggccatagtcaactggtgttgctggcttgcctgctgtctgacgatccggtatttaggaaggtgctaaagaacctgcatattgagtcgctggagtcagcactttttgtgctgaaagaaccataccgtctgcgtgaaaagcgccgtcgaggcaaatttgaccagcaggaactgaacgagggcgacccgcgcttttggtatgcacgcggcaatgtggtgagcgaattccttgataaattgtggcaagtggcttgggctccgattgagcaagaggcgaccaaacagatcgatttccgtggccgtaccgaaaaacagaagcagctgtacctgttcgtgccaaatcaggaaaaactgaaacaacttggcgaactgatcggcagtaccgacagcttcttccgctatgccgagggggcttacattggtgatctgatagacgaagtgcgcatcacggtgaagaagcgtgatgaacacggcggcaaggtaagcttcacacatctatcagaaggtgagctgcaaatgctcactgtgttgggcctgatgcgcatcacccgtgaagaccagtgcctgttcctgcttgatgaacctgatacccacctgaacccgatctggaaattgcgctacttcgacgatatagaaggtgtgctgagttccgatgatgcaacgatggtacaaagcgagtcgcaaataatcattaccactcatgaccctatgatggtgggcagcttgaagcgcgagcaagtatatatcctacgccgtgatggtaaccgtacgttggtcgatatcccggatgagcatccgcaagggatgggtgtcacagggctacttaagagcgaattgtttggtttatcatctacgttggatatcgaaaccgagcgacgcctattccggcgcaatgaactgttcgtcctgtcacctcgctcccccgaagagaatgaggaactgagccgcttgtcagccgagttggctgaccttggcttttcgaccgcagacttccgtgaccccgactacgcaatgtttgtgcgcaagatggcgcaacaccgccgtttccgcaaacctgtgctcacactcgaggaacaggccgaacaggacgccattgccgattcgatcattgatgagattttacgagaggaggacggcgagtga

SEQ ID NO: 233338 - DNA, 858 bp, Klebsiella pneumoniae
gtgattttcatcgatcttgaaaataagctccctactgatgcagaccttcctgctgatatccgctggtcacgagccgattgggatgcttggttgaaagagtctgaccgtcttgtaggtgaacttgccaagctcgttgctgcgggagcaattaaagagcggaatgatttgatcgacaaacacagcagccattggggaaaactgaaaccttggttactggcgttatctggggggaaatgctggttttcagaggtacgcgagctgtactcacattacgatgtggagcattttcggcccaagaaagaagcgaaggcgttggatacaaacctgcgtgatggttactggtggctagcatttgactacatgaatttccgcgtatgcggcaatgtcggcaaccgtaaaaaaggtgggtggtttccactcaaggaaggctcactttgttctacctacctcgaaccttgtgaggaatccgaaacgccttatctactcgatccaattgatgacgatgacgttgcgcttatcgccttcgacgaagaagggaaggtcatccctatgccaggttcctctgcttgggagcaggagcgagtcaatgagacggtaaagcgactcaaactcaatgaacatccccccttggcagaagctcgtcgcaaagtctggcagcaagtggataggctaatcgatgattttacaacagccaaagctcgctgcagaacaggcaataatccagtagccaaagcgaagttggccgaagttcgagctagagtgcgcgaaatgactagcacaacagctgaattatcagctgtagctcgttggtgtttgctgatgcgcaacgatccccagctttctaggttggttgggtga

SEQ ID NO: 233339 - DNA, 609 bp, Klebsiella pneumoniae
atgaaagttacatggactgtcacgcctgtggggtatcagcgcatcgcgaaacgctgtccttcatgcaacattaaacgggacttcacaccgtcaggtgcatttcgggttaattcgcaaaagaaggtgctggacgtgtggagtatctataaatgcacacactgtgattacacctggaatatctccctgttttctcgtctgcacgtcagcaaaattgaccgccagctttttcatcggctaatgacaaacgatgccgccacggtacagcactttgcaagtgatattgcgacgctgaagcggaacaacgcagagctatctggtcagcctgattttcacgttcaggagcgctggccggtaagcatcaccgcccaccagcgggttcgcgttagtgtcaggatctcccgttcatttcaggtaagtctgctgtcgattttgaagcaacagctcatgctgagcgctggtgaaattctgagagggttggagtcagggcagatcagcggcgttacgatgaagatgcttaaatcgagaaagctaaaggcagcggaatatgaattccagctgtctgcggaaacgttatatgccaggcgcaggattgttctgacacatcgttaa

SEQ ID NO: 233340 - DNA, 822 bp, Klebsiella pneumoniae
atgcgattagccagccgctttggccgtataaaccagatacgccgtgaccggcctctgacccacgaagagctgatgagccatgtccccagcgtgttcgggagtgacaagcatgaatctcgttcagaccgttacacctacatccctaccattaccattctcgaaagcctgcagcgtgaaggctttgagccgttctttgcctgccagacgaaggtccgtgacctgagcaagcgggagcacaccaaacacatgcttcgcctgcgtcgtgccagtcaactgaccgggcatcaggttccggaaatcattttgctcaacagtcatgacggctcctcgagctatcagatgcttccgggactgtttcgtggcgtctgtaccaacggcctggtctgcggtcagtcattcggagaagtgcgggtaccgcataaaggtaatgtcgtcgagaaggtgattgaaggggcttacgaagtgctcggggtctttgaccgggtggatgagaaacgcgatgcaatgcagtcgctggcgttaccagccccggcccgtcacgcgctggcaaatgccgcactgaagtatcgatttggtgaggagcaccagccggtcacggtatcgcagttgctgaccccacgtcgccgggaggactacagcgatgacctgtggaccgtataccagcgcgtgcaggagaacctgatgaaaggtggactgtcagggcgaaccgctcaggggaaaagaagctgcacccgtgccgttaccggtattgatggcgatgtgaagctcaaccgcgccctgtgggttatggcagaaaacatgctcgaatttttcgggcgttaa

SEQ ID NO: 233341 - DNA, 123 bp, Klebsiella pneumoniae
atgctgcgcttctacgtgaccggcggccaggtggataacgagcacaccgcgaaggtaaacggcacccaggaccagcagctggattcgctgaacgtcggcggaatgtttgaggcgtggttctga

SEQ ID NO: 233342 - DNA, 369 bp, Klebsiella pneumoniae
atggaagttgagatcctgaaagaagccgtggagtacggccagtcgcgaaaatggatagcgcacgcgcccttgtctcatcctgtcctggaaaagcaagctaaagagaataccctgtcagctattgttgataaggctatcgagcaggtttcaagcaagaatgtcaggtttacctacgacaacgtactgactaacgtgcttaaccagaccgaaattaagaaaggtgtgtaccaggaagcgcgccaggcgcttgatgccgcggtcgagaaggggagtcttatcgcagttgatacaaaacagaccctttttacctcggccatgcatgttcgtgacgaacaaagactatcccaaatttgccggccgtatggctga

SEQ ID NO: 233343 - DNA, 1005 bp, Klebsiella pneumoniae
atgttcgtgacgaacaaagactatcccaaatttgccggccgtatggctgaacaatccgctggacctacggcagatgtcaatgcccgggatatcacggcaaaaattgcagaccgtgatcgtgctctgacgctggtcgatgccaggggtgggggggaatttcagagcaatttattaagccgaatgaaagaactggcgcaaaacagcagtaaaacgccggtactgattgccggtaacgtcaaagataagaaccagtactcagaacaccattcagtgatggccataactgtaaaagaactggccacaaccgaattacctgaaaatacgatgcttatcattcctgaagccgaaaagctaaacgtcccggccatgtatgaagtcctcaaaacagcaaacgccgtcaatgctccgacagttgtcattgatacgcatacccgcagggcgacgggctttgccagtgaagttttgagaggtgcaggcgcaccggtactctcatcttcgccaggaatggaaaagagctccttaacgttagttcagaaagatacagttgacgatcgcctcaaggttgcagccaggtatgtcagccagcagaaggcggccggcattcacgtcgttgcgcaggcgggtaatgaacgggcaagaggacagttaacccgcgagatacgtaatgctcttcaggagaacgggatacttggtgagacggtggcaactatttcaacgctttcaccggtatggcttgatggtgccaaccggaaccttcggagtacatatcagaccggtatggtgcttgagcggtatgagggaaaggaactcaaggagacgttgaagatcaccggtatcaatgataaccataacactctgcgagtagtaaatgaacatggcgaaacgcaggggctcagattaaatgcgatcgacagtcagtatcgcctgtatacgggaatgacgatatcacgcttgcgctgcgtgaactccagaacaaccgtctggcccccagagaaagagccgtaa

SEQ ID NO: 233344 - DNA, 1749 bp, Klebsiella pneumoniae
atggatcgttcattatccccgcttgtcgcccaggccgaacttcagcgtctggagagccgtggtgaaataattgccctggatgccaaccagggacgcttcggtgattatgtgcagcgtgaaaactggcaaaacgaaaagactatcctgggaaatattctgaaaggaataaacgctgtcgatccgctgattgccgatgcccggcaggtaactgaaggtaagggactaactgatggccagcagaaagccgcaaagcttatcctggaatcacgagatcgttttgtcattgtgcaggggtatgccggcgtgggtaaaaccacacagtatcgggtagtggcagcagcagctaatcaggtggagggattagaattgcgcggcctggcacccactcaccgcgccgtgggtgaactgcaggccgccggcatttcgtcgcagaccgtcgccagttttctttcagagcatgcggagcgtcaggcaaacggccagacggcagattacagtcgaacgctgtttgtgattgatgaaagttccatgatcggaaaccgcgatttggcaacattgaccgatataattgaggctggtaatggcagagcggggattagtggggatgagacccagaagaagcctcttgagtccggtgttccgttttcactgacgttaacacgaagcgcagcggatgtagccattatgaaagaaattgttcgtcagacccctgaactgagacctgctattgaacacatcattgccgggcaggttcaggaagcactgaatgtggctgatttggttagcccttccgttgtaccacgggacaaagatgcgccggttccggagaagagcatcattgatctaaagggcagtggaaaaattgcagcctatgagatcgctactgatttcaccagccgaaccagtgaagcacgggataagaccctgattgttgctgaactgaacagggaccgcatggaaatcaataaaagtgtgcatgacatgctgcaggcgaaagaggagctgggtgacagtgtaacggtaaatcaccttgtccgtgtcagtaactcaatggctgatttaaacctaccgggattctggaaggaaaattataagaataccgttcgtatcggggagcaatatctgactattggacaggttgatccgaaaagcaaccttgtagagcttaaccatccggagacagggagcaaccggtggatctctccgcttgaactccgtgcgtctaacgtagcagtcttcgaaaaaaaagaaatagaggtttctgtcggtgaacgtattcgtttcacggccacagaccatgacagaaaggtgaagtcgaatgacttagccgttgttaccgaaattgataagggaggtaaaatcacgctcgatgccggcggtcgtaaagtcgtcctcaatccccgggagcagcaaaaagaccagcatatcgattatggctatgctgtgactacctatagctctcagggggcatctgtaccctatattattgggctggttggcgttgacggtgccagagagcagatggctaccctggacaccacgtatgttcagatgtcgcgtgccgtcgaacatatacagctatacgcagatgacctcagcaagtgggttaagacggtgaaggagcgttctggagagcgtgaaacggtccatgatgtgatgttgcgtggtgaagatctaaaggccactaacgaacttaatttatggaaacgtagccaacctgtttctgcgacccggctcgctgcaaaataa

SEQ ID NO: 233345 - DNA, 357 bp, Klebsiella pneumoniae
atgttaagaaaactttggggaaaaaagggaatacctaactcttcgcgtattgaagatgttcttatcgaacaaaatagagagttaagtaatgttttaaatatgcttgtgaaaaatagtggtccaggaaggtcaattatagaacttcgcgatatagagcgtgcaattaaaaaccctgagatagaatcaagagagctaaccataaagagaatactatatattgaaaagtatctaacagacctgttttatgaggtgtataaagtgcttgtggttaacgcaaagaccttcacgtcgcagaagctgccagatacgccggtaaccaaaacggcagcgttcaagtgccagctctgtgatgcgtag

SEQ ID NO: 233346 - DNA, 255 bp, Klebsiella pneumoniae
atgaagaagcgtttttccgacgaacagatcatatgtattctccgcgaggccgaagccggcgtttctgcccgtgagctctgccgtaagcacgccatttccgacgccaccttttacacatggcgtaagaagtatggcggtatggaggtgcctgaggttaagcgcctgatgtcgcttgaggaagagaacgccagactcaagaatgaagccatgctggataaggaggcgcttcaggtggctcttgggcgaaagtactga

SEQ ID NO: 233347 - DNA, 360 bp, Klebsiella pneumoniae
atgcgacgtaactcacaaaaatggataccatttggattcgatacagtttcaaataaaattgttgatatcgccagcgttgagaatggcctttcttgcaactgtatctgcctcatttgtggaacatccttgattgcaaaacaaggtaaaaaccaaaaatggcattttagccacagcacagaagtaaaaggggtttgtagtgagctcacactacaacatataaaaaaatacataaaggttaaaatacaggaaaaaaataccttgctcttcctcatcttctgcaaggtaaggagaaagggatcgttaacctcaaaaatctcgctggtggtgggattgtttgtggccttaatgctgacctcatag

SEQ ID NO: 233348 - DNA, 1137 bp, Klebsiella pneumoniae
atgacagataaaactaagctggttgcgattgcacgaaccgatgacatgagcgccctggaagcactcaagctgttacggtttcgccgttacaatacggcaagaagtcagttaagggtcacgagtgtctggtctgcatggtgcgccaggcacggcctgacccccttccccgtcacagcagttgatgtcgagcgctatattaatgggctgaatggatccgttaaaatggcgaccatctctcattttattgcatgcctttcaagcgtaaacagcagcctgggttttccagacttccgcaacgttctgataaaagcactggttcaggtatggcgggcgcgggagaatgagaaaaaaatcgtcaccggtcaggcccttccatttctaatatccgatctcaatattcttcgccggtcactgcataaaagcgacgacctgagagacatacgggaccttgcaatgatatgggttgggtttgaaaccctgctgcgtaacgtggaaattcgaaggattaaaaccggcgacctgaaatggcaaaatgacacgtcctgttaccttctggacgtcatgcggaccaagacaaacctttcaagtaacctgacatttcagctctcaccacaatgcagtcagcatatcagacagttgattgagactgtggaatacaccgatactgaaaacttcgggcaccgttttctttttcagcctgtgaacatccatacaaaccgatatttcccacccaccagcagtaagctatcacggggtaaatccatagacaggatgctggtcaaagcaggattcagtcaggggttactgacgcagctacaaaatgaatcaaaggtatcacgggaagatgttggtatgctgtcctctaattcactgaaccaagcatttgcacgcctctgggggattgccgggaaggtcggcgacaataaccgacagtccgggcggtaccggacatggacaggacacagtgtgcgtgtggggggagccatagagctgtttaaagccgggtactccctagaaaagattaccgagatggggaactggtctgatccaaagatggtcttccgttatatccgtggatatcttgccagtgaaaaagccatggtaagctttatgcgtaatcatctggacgatatatag

SEQ ID NO: 233349 - DNA, 681 bp, Klebsiella pneumoniae
atgggtaaacagtataaagtagttagtattaacgatgttttagaaaacgcagcattacaaacaaaagaatataacagcaagcaagaatattatgatgatgataaaacctattttcaaatattccatgataacgctgaaagtataataaaatccactccatccacatctaaatacacttctgatgaaactacaggtgatttagttcttgatcttggcaataaaaagattgatatatctaactatacagaggaagattacaaggctttatcagatgatttatcacatgaacttgccgcaaaagaaatcttggacacaatcaaaaatgaccctgatttttctgatttaaatagaagattagaaagtggagagatttcacttgatacagatagagtatatgcttctataagctacattggtaataacgatggtaatgaaattcttcctgttggtgatcttattttttcaattgaaccaaaggaagattgccaagcttcattaaattctgatgggtttaattatgtagcaacatcttcaactacaaatgagggtgtttattatgaaagcttaaaagacggtttagaaagcacacagtcttatctacgaactcttgaatatgaagccgaagcaacattagaaatagatgaaccagaacaaaaatcaagatcttcatacagagcataa

SEQ ID NO: 233350 - DNA, 759 bp, Klebsiella pneumoniae
atgggaaagaaatatgagttagttaacaatgatacagttgtagattatgtaataaaatatactgataaagaaaatgaaagacgttgcaatgattatgataatgaacatgcgccggataaagcaagtagttatggagacatgttcttatatttaggtagtaaaaagtttataaatgaagcaaaaggtttagataaatattcaagtgataacatgatgaatgatcgtgttattgatgtagattcagataaaatatttcatgagttagttaaaaaggatataatcaaagaaattaacagcacttataatacctatgaaagtaatgatgtatggtgtaaaaatggatcatcacatgacaatcatccatacataaaagaacaactacaaaatggcaagctgaaaattgatcatgataatgagtataatacgattgtgaagctaaatgatgagaatggcgatatacctttaatggtagttccttcttacaataatgatggggattatttaaatcatcatttcgcaactttagatactactcaatctttagataaggatcttggactttcagatttatcacaagactttaatgaagaaattaccttagcgggtgaaaatcttggttcaggtaaagtaaaaggtttggagtttgcttcctacggtcaacatatgaatttgggtgtatattacatggataaagtaatcgaaagtatcgaagaaaaacaatcttacgaaaaggatattaagaaagggttaaaaatataa

SEQ ID NO: 233351 - DNA, 1896 bp, Klebsiella pneumoniae
atgacagacaatacagaaaacttgttcgatgagaacggaaatattcaggatgtgttcaaggaaaaaacagtagaagagctggaagcactcttcccctcgatggatgaagaaccggctttaccagtagaagctaacccggctgatgagcttatcgagaaccgccttgttctacaggaacgtatcaccaagattaatgagcttatcgctaacaaagatacgcatggcttcaatgacgctgttatcagtgcgttcaatgatgagttatcagaactggaaggttcacttaaagagataaacagcgtgttaagtagtgatccggtggctgacgttgaaacgcataatctcgcaaacaagcaaacacaacttatggaacagtttgataaagatatagatgatttatacgctttggattttaaagacatgactaccgaagagttagaagagtattttgaaaagcaaaaagcactaaatgaacaagagataaggaattgcgattgggtcattcataaccactatgattttgatgtaagtgatgttatagaggcaacacaaaaacgtgatcactacatgaataagttcgatattatttctcaaagagttaatgatgagttaaacgtccgaaaagaaaacgatgaaaatgatttatttaatattttaactaataatcaggctccgcaaacaactaccaagaatgaaatagattatactgatttagatcgttttactgaacaacatcgcaaccctaaagatgcggataaacttattgaagaaagaaataagttagaagcgagtgtagaaaatttctccaacctaatagagaacaaggatacattaaattttgatgatgcatttataaaatctatcatagaaaacaaaaatgatgcgtctaataaacttgaagaagcgaacaaatctataaaaagcatacttaacaataaagatcttcctgatatgacacataatgaacttaaagaatggagtgatattaaaagggatgcttacatgtttgttaacagtaaaatttcagatgagcttatgacaacagagaatcatattataactaacaggcttattaatgaaagaaatgaaaatgaaaaatggtataaagaggtaagtgaaaagataaaagaagaagagcttaaaagagaacgtgattataataattttatgcaaagcatacatcatgaaattgataaagaaaatagccaaaaagaaacgctcactgatgaagataaattgacaagagaaatatacaacaatgttggtattgaagagacaatgactcttaaaaagtcttcaaaccttaaaaataaactatctcaaacaagagaaagaatagctaccaacaaaaaagtcgattatgaagaggaacatcaaacgccgtggtataagaaattaggtgatgttgtagattactttgctgatggtttaaaaggtagttccaatgcaaaaccagtatttttaagcgaggataaaatctatgatacctttggtgatgagattgataaaatcataaacagatctaaaacacgtattattcactttaaagataaaacatctgttcttgaaagtgctcaggaaataagagctaaaggcaaaaactataatacagtatcagaaaaaatgtctaaactcgccatagctaaaggctggaagtctataacgtttgaaggtagtgatgtgttcttgggtgtagcttatgagaaggcaacccgcttagggcttgttgtagagcctcagaacgctgaacaagaagagttgttcaaaggtatccataaagccaaaggtcttgatgagatcatgccattcagcggtatgaagagagaagaggttaacaataaagagattgatgttccagaggtaagagccacacaaggccagaggatgagaatgtaa

SEQ ID NO: 233352 - DNA, 630 bp, Klebsiella pneumoniae
atgttgactatcagtgtgtggaatcgtaagggtggtgttgggaaaacaaattcagccatccagatagctggatggtttgcggctcagggacgtaaaacaagtcttgtagatcttgaccctcaaggcggttcacttatctttgccggatatgccaaacagaacggtaaagagcttccttttcacgttggccgtaaacctgcagccgattctgaatacatcatttttgaccacagccccggtgtgaatagcggtggtgctttgggtagctttgtgatcgtgccgactatcctcgatgcttccagcttttcaattacgctcaaaagcattgatgagctgaagaacgaaatgaagaagccttatctgttgcttcctaaccgtgttgagatccagaacaaagagcaaggcgaactgttagagcgcatccaagagaaagcacgcgctcatggctatgaacaacctttcatcagaaaacgtgttgcctaccctcgcgcttacggcatgggtataacagtattcgaaccaaaatcaggtttgccatcagctaacgatgctcaggccgagttcgaacatctgttatctgttatgggtagcaagattaagcaacttgcatccggtggtagtgaagcctga

SEQ ID NO: 233353 - DNA, 366 bp, Klebsiella pneumoniae
atgactgataagaaagtagaaaagaagaaaaaagcagcaagttggttagatgatatggagtcgtttgaaaaaacctctcttgaaacggcctttgctaaccagtatgcggaaacctactggaactatgagtatatagatcttggtgatattcctccgggaaccacgccatacgtgcgttgcaccttcaagattacccgtgaaaaagataacttccgtatggcagctatccgtattcctcaagcgctggaagagaaaattaaatctctttccgatgaaccttattccaacgttattttagctcttgccgatttgaaagccgatgagttaataaaagaaaataaaaaaatcatcgtttcagaaaaataa

SEQ ID NO: 233354 - DNA, 1968 bp, Klebsiella pneumoniae
atgatgaaaatacttggtgaaaaatcaaaaaaaggggtaataagtgatttaaggcattctgagagtttcaaagaggcttctcacgatggtgctttactttatgatccagtatcaaagacatttattactgctgaaaacagtaaagaacttattgataaatacatcggctatcgtaataccgaaacaggagagtatattgatggtttgattaaaccagaagactttccaagcgatgagttatttataaaattacaggacagaccgggatataacacgaaaagaagaataggtgatggtgaatctgatgtagagtttactcacttgttaattcaaatccctgaaggaactccggtagaaaaatggcctgacttcaaaaaagaagttattgaagctttcgcacaccctaatgagtggtataagaaaggtaaaggtggtggtcgttatacgccaactgttcatattggtgattgttttgtagctgcttctggcactcatgttagccaagacggtaaaagtgctcatttccatatgattgttggttcacgaactttaaataacaagaactactatggaatagaccataatgatcagccaatcatcctaccaaataatccagactggagaagtattacaagacgctctttacttggctcagaagctgaatggcgagaactaaaaagaaaacgcattaacgatgcacttgaagcgcttggacttccaaaaactcattggttaaataaagatgagaagatggatgaaagtaaagctaaagctaaagatgctttacaggatgctattaaagatgaagagcaagaagaattaaattcagaattagaaaatcttaaaatatctaaagagcttgctgtaaaagagttctcagataaagatattcaggatgctgaacttcataaaagtatcattagtgggcaaaaattacttgctgatatttctaaacgtgccgaagaaaaacttgccgaggcttacagggaaatagagcttgttaacattacacgttcttctgttgaaaatgctattgccttagccaccataaaacagaaacttacctctactgaacagcttttagaaactacagaagcaacattaaaagctgaagcagaatcaagagaagcttttgagaaacaactcaatgatacaaatgttgttcttgaaaaattaaaagaagaacatgaaaacctcaaaaccaattatactgaaattactactcaatatgatgagttagatactctttattccactacagtagcaaaacatgaggttgagatcactaacctcacgactaagcatactactgaaataacagctaaaaatagagagattgaagagcttaagtctactcatgaaagagagcttcaggaacaagaattgttctatgaaggtgcgttagaaaatcagcaaaaaacgtttgacaatcttttagctgataaagaagaagaaataaaacagcttaaaactactcatggtaatgagcttaaagaacttaacgctattattgttagcaaagataccaatattgcagatcttgaaagaaaaaatacagaactggaaaataatcttgctacactgaaaacagagaaagataaacagcgtaaagatttcgatgatttaattgaaaaacttaaacaaggtcatttggaagctatcgaagcgctcaaagcttcaaataaatcattaaccgatgaaataactaaacaagttgctgatgtaagtaaactgaaaaaagagaaggagcaacttcaaactgaaaacaacggtttgaatgaacaactcaaatctgttcaaaaagaaattgaagaacttaaatccgacaaagcgaaattagaagttgataataaagacctgaatgacgctctaaaggtttatgaagatgataataaacaacgcttagaacaagctaaagatagcaagaaagataataatcctgaccctaagaaacctaaaaacaaataa

SEQ ID NO: 233355 - DNA, 579 bp, Klebsiella pneumoniae
atgatgaatagaacagaacaagcgaggatggctatacaatccagaaaagaagcagaagcacaggaaccacagccagaagttgaaataaccgctacaacctcaaatgttgaggttgattatggttcattgcttggatatgtctggaagaacagaactgacttatcaaggaaagaaaaaattattttcagacactcattaccatttaatgacaataaaacacttattgttgaagaaggtataaacagttattcactatatggcgacgaaaattttacttgtcagcaggtaaatatgttcattgattatttcggttcaaaactaaaaaaatgggattgtttcaagccggaatcatataatgatgagtttttatatttcttctttaaggagtgtattctaagaaatctacctgtagcagtatcaatattcaatgttgaccagaaaaaacagcttgaagtaataaaggatgttttaaacgatattcaaaatgagtatggtaatacagccccaaacaatctttctaaaatctatatagaaaactacgtttataactggaagcgaaatttaaaggcgattgcttaa

SEQ ID NO: 233356 - DNA, 2127 bp, Klebsiella pneumoniae
atgaatatgagaacaatcaaaagtgaactatcaactgatatagtttaccatgaagaagaacaatataccgagaagcaactaatagagacttcttattttgctgctcgtgattatatcattcacgaaacaggtatatataaattagcaaagagcaatccagccaaagacaaaaaagctaattactactggattaaaattacagactattatatttatcctgttcagattctatccacagtggatttagaaggcgataacaatgatgctaacaaagatattaatagcatgtatgttaatgtagcttttaaaaacatccgtaatgaaaagaaaattctttctattccactcgaccaattttctgatctcaaatcatctaagctaaaaaaggccgggtatcttttaccttacagcgataatcagcagttaaaagagatacagaaagcagtgagcaccgttcttgctactgctcagagtccttataaacgtttggatggtaaaatcattgatgatgaaaaccagctcattgattgtttacctgcttacacaaagcgaggctggattgttgatagcctgatacacataagagaaagccatccacaattcgtaggtgtgtccaagaccagaactaaacgtgttggtaatgcttctatacagatcaccgtattccaagaactgattaagtcctcacgccttgcaagcatatttatctctgttgcttttgcttcctatacaaaggggctgatacgtaaaacagccaacttctcacctatctacaacattttcggtgagaagggtaaagggaagtctacattagaggccatgatagccagtattgagggagcgcctaaccgtgagtatggtcttatcagagacagtaagaccacgttccccggactcgaagaactcttggcatcttacaccaatggctttttcgtcattgatgagattgatgatatgttccgtggtagcgccagtgatgcgatctctaagctcatgactattgctaacaatggtgggcgttccaagtatgataaagatacagaagtttcagaaggtaaaatgtggaacagtatctttttcactaccagtaataaatccctttatgaactaacaagaggggatatgaagcaaagcgccattgactcacgtatctttgagtttgacgtagaagatccagagataaacatctttggtattaacttagaagaagggcgtggtgatgttgttgaatggtggctaaaccagcttgaccagaattttggtcatttatacccccttattattgattatatcgttaagcatgtagatgagttgagaactaatatttatgcttatgagggtgagttaataaatgaccctaactataaaatcattcatgatgaaagaagaaccattcagacaatagcactttcaaaaattggtgctgatattgtgggggctattcttggtgaagaatatggcatgatttgccatgaagccattgatatacacaaatcaagattctcaaataaggacattcctcaatttgatgtaaatgagaaacattgggataatatggacattctcaaactcatgattaacgccaataaagcttcttttgtttgggaaacttacgcttattctgatgatgattcctctaacagagtagcggctcaaaaatcagaagcgaagcgttattctgatatggctcagtcaaaaggtaatgttttaggtattattcatttgaatagccctatggaaacaccaaatgattttgatggttatgttattttaaatacgatgggtgatgaacacctaagacgttcattcaaactcgaaattacagagcttgtagcttctgctaagaaacttgaactctatgatactaagcgagtaaggggagcaaaacaattgcttcttggttcaacttctacccgcgaaaaaacatttattcttaagaacagacctgtcgtgattgaaacagaaagcgaagaggccaaaaatgcgcttcttgacgaagcttttattaacaactctattgatagtaaagctgatcttgaggaaatcattaagtatgcgcacagcaatgttgatacagtagtagatggagaaccattagagttagacgatgattttgtgcctttttga

SEQ ID NO: 233357 - DNA, 507 bp, Klebsiella pneumoniae
atgaaagatttaaatttgattgaagaatacaattacgatctctttttggtaaacacctatgaagaagttgtagatttaataaaaaagggcgcagatgttaactttgtgaactacaaggggtttactccgctttcagtggcgcgtaatgttgatgtagctaaggctcttgtagaacttggtgctgatgttaactttataaataaagaaggtgaaacacctatatttcacaatagtaatattgatgtaatcaggtatcttgttagctgtggcgctaaaatcaaccacagaaacaacaaaggccagacagtgctttttaaaaccaacaagcttttgaatgttgcccgattgattaacatgggctgtaatccattcctgaaaagtgctgatggtcattatcactatgaaaacatgacaatggcagacagaaaaaactacagtcagtttatagaggtatttaaaaataacgtaagaaaaaagaatgaagaaagaatgttattgagcgcttaa

SEQ ID NO: 233358 - DNA, 414 bp, Klebsiella pneumoniae
atggaaaacttcccaaaagaactatttacttcaaaagatgttgccgggtttgaaaaatatattatagataatggcattggtaaggatgattggcttacaacaaatcatcacaccttattattatacacgctactttataaaaaatataaagattatgaaatgtccaaaatgcttgttaaatattttgatataaacaatcaggacagagaaggtaaaacagttctatttcacgctgttatcatgggtaatgttccagcagttaagttttttattgtcaatggtggcgatgttttaataaaagataacgccggaagaaaagccgctgattatgctgcgatgttagacatagagaacagtcaggcaatatctcgcatgttgttatcagaagaaaataaggctaagaaaaaggcttaa

SEQ ID NO: 233359 - DNA, 423 bp, Klebsiella pneumoniae
atggatataaaagaagcgttaattacagcaataaaacagaatcgaggtgatattatctatgatcacttcatgtttcaaacattagaagttaaacttaatgcccttatttacttaatcagggtattgaaagaagacgaacagggtaatcactttattaatatcatgatccagttgatagcaaagcctgaatacctgaacacggttgtagatactttaacgcctcttcaggaggctgttatacaggataaactttcattctttaacttccttttaatgaacggcgcttcacttgaaaaacgtaataaacaaggattaagcggatatgatctcatattgaaaattggtaatgaccgttttttagattttatcattaagtatgaaaatgttctgacagaagtttataagtccagaagatacaaatag

SEQ ID NO: 233360 - DNA, 177 bp, Klebsiella pneumoniae
atggtctcctggatcatctcggtgaccggcatcttcatgcccgacagcgacggcacggtacagggcgccagcgggatgtcgtcgaagccgatgacctataccgcctccggcaccgccacgccgcgctccgccagccgcttcatcgcgccgatggcgctggatcgctgtgcacaatga

SEQ ID NO: 233361 - DNA, 243 bp, Klebsiella pneumoniae
atggacgaaagacagttacaggctctggctaacgaactggccaaaaacctcaaaacccctgaagacctcagtcagtttgatcggctgctgaaaaagctcagcgttgaagccgctctcaatgcagagatgacacaccatcttgggtatgagaaaaatcagtccagaccaggagctaactcccgcaacggttattccacaaagtcaggcaattacacaaatctatgtacaggctccattgtttaa

SEQ ID NO: 233362 - DNA, 273 bp, Klebsiella pneumoniae
atgtcacacaacctggagcaccagaaagtccacaccagaatggtgaaagaggttctgaaagccgtcgccagagccaataatcccccttatcagtccgtatttgcagactttatcaccggtcatccctcctgcacggtctgtttctgggaaaccttccacaaaatgtacccggattcaccgtacgaatacgtcacgttctgccatacctgccgtcgttttgatttatacgaaacagaagcggagatgaaggctgatgacccgaagtggtggtga

SEQ ID NO: 233363 - DNA, 246 bp, Klebsiella pneumoniae
gtgctggacgcgaaagagtggaagtccggcgtcgtgccgacaccgtcacagcataacgggttctacgtcgaaaaaacggcgctgaatgccgcttttgcccaggacggtcgccatctgcactccgtcacgtttcgggtggtcggtgacgccgaccggtttatgcatgtgttggccgagtacggtctgtgtacgcgccggcagggcagcacgtcagcctgccacaccatcgcgcttgaaccggcgtaa

SEQ ID NO: 233364 - DNA, 234 bp, Klebsiella pneumoniae; identical to SEQ ID NO: 112216

SEQ ID NO: 233365 - DNA, 300 bp, Klebsiella pneumoniae
gtggtggcctaccaggatcggctgtcccagcgggacagccgatgccagcgaatcaacatgcgcaagcgcctgctccgattcaaccgcccgccggtcactgtagtcactgaaccgcccggcgcgctgctcctggcgatcaaacagggtgctgtcctcgtcctcgatatcaccggcgagggaaagcaggacatcctcccgccccggcgtccaggctggcgccacaaagagttcctgtttgggcgcccagcgaaagcctgctttgttgatcagggaatacgtttcttcatcgagtcgcaatga

SEQ ID NO: 233366 - DNA, 207 bp, Klebsiella pneumoniae
atgatccccaagacttaccagcaatggtaccggtgcatcacagaagaatgtggaattcccctgacgcaggcatttattgcatcccgtctggcagtccttgagtcccaagatcatcaggaaaccagacgttttgtctcgctatatgggcaacaacatctgaatagtgttgtacagtggttcaaaaaagctggggaagaattgttgtaa

SEQ ID NO: 233367 - DNA, 1650 bp, Klebsiella pneumoniae
atgcaatcattcgttttaatgggattagaaagtgcaggaaaatctaccctgtttaatatcctgacggaaagtgctgccagtgatgagcgtaatttcaggggatcgaccgttgtatgtcgggaaggtctcattaatgatgcagggatctgcctggttgatacgccaggcatacgttttcagagcgacagtgaaaccacaaaactcgcccttgatgcgctaaatcagcatgatggcattctggtggttctgcgggccacgcacgctcagcaggagtggcaaacgctctgtcacctcataccgccacaggcaaaacacgttgttatactcctgacctttgctgataagatcagaaagggccttctggaagtgactgaatacctgagtgaaacatcaggcgcgccggtactggcagtcaatgcccgggaagctggcagcaatgttcgccagggaatagtgcagttgctgttgcaggataaacctgcaccctccgctgtctctttaccccgtcaaaagataccggtaattaatctgctggctgaatttcctcaacaaacgatatttgaacatcgttggtgtggaaaagttgctgcaatagtatgccttttcctgctgtttgccgttccggtatggggggcatggctgctgtcagattttattcagcctgtcattgacagtgcggttattcagccgcttaagaatataacgacgagctggcccgacgttctgaagacactatttgtcggcaattacggtctttttagtctgggactttattcgtttgtatgggcatttcctgtggtggtactgatagggttgtctctttcgctgactgacgacagtggacttaaggaaagaattacagcgacgctggatccctggttgagaaaactcggcctcagcggtcaggaccttattcctgtattaagcagtttcggctgtaatgtcgtggcggtttttcagagccgttcgtgttcgcgatgcacccggcatgcttgtataagtatgattagctttggggccgcttgcagctatcagacgggggcgacgctttctctttttaatgccgcccatcaaccatggctctttatcccctatctcagtctgctgtttttcacaggcgcaatacatacgcgcctctggaacgggtcgttgaagcctggccaaaaccagcgtctgacagagctcacctggctacaatggccacgctggcgaaatgtgacatggatgctgaaaaatatcctccgtcagttcattacgcaagccatgccgttattcctgattatctgtattgttgcggggatgcttgattacgcagggatcactcgctggctgagtgaaacgacggcacctttacttcatctttttaaactgccagcagaactgatgcccgggatcattttttcactgctaaggaaagatggtttgatggtactcaatcaggatggcggcagcttaatacagtctctcagcacatctcagttactgctacttgtctggctcgcctctacgttgatggcctgccttgtcacggtatttaccatcgcccgggaaataaactggcggtttgcagcagcagtggcgggaaaacaggtattaagttctctggtggtggctctggtgatatcccagttatttattcatgaggcataa

SEQ ID NO: 233368 - DNA, 606 bp, Klebsiella pneumoniae
atgtgtatgaatcctttcccgcagcaaaacaaaagctatcaattctattacgatgaatctaataacgttcgtaaactatatctttccaaacaaattgatggttataacattgaccatgatccagacaagcacaacagcgtaaacttcgtgttagccggtgttgctcatactggttcctcatcgagtgccgactttgatgatttacgccagcgcatacagctacaggccaacgctaaagagttcaagctgaaacacttagctaaaggcgacttcctgactatgctcacctctaagaagctcacagcgttctttgagtggcttctctatggtgatctatacctacactacttccacctgaatatggagtattggggatacgtggacatcattgatgattgtatcctgttcggacgtgagaagggcttcatcccggaaatgagtgatgaacagctctatggctacatgttggcaaacaaggacgctctacacacctacgttaaagctaacaaggttcagttcatccagttcctcaagtcctatgacttcccatacatcgaggggcgggagaaggatttcatacaagggctatcaagccagatctcctag

SEQ ID NO: 233369 - DNA, 294 bp, Klebsiella pneumoniae
atgttatgggaaatcactgaatggtatatcgaaacgactaaaactttagcaaacatgttttatgctataccgcttttaatgtttcagattgctttgaccttagcttttattttcggtgtaattcttccgattagtaaaatcaaaggattgaagaatcttgattcaagcgctgctgcaccattcatggcagtcttaggtttacctgctttaggattgatatttttaacattcggaatgacgggggtagcgtttttaactgtcatatctaaaatattcaatctgaatatcttataa

SEQ ID NO: 233370 - DNA, 567 bp, Klebsiella pneumoniae
atgaaaaaaaatgaaataaacatacccaatggtttaaaaacaggtcttaaagtagctgcgtttccaattattggtttttttaaactctttatcattccatttcttatcccatttttattggcaaaaaaaatatttaacaaagttagatatgccagaggcttaccgggacatgaagttaatagttttgatgtttggtatgaaattaaaaatctaaatgaggcaaagcttaattacatgtataaacgctgtgcgtcgatggcgtggatgtctttattattttttattttattcatgtctatcaccatctttatggcttgtaatggtactaaattactttttgtttcatcttctttaagtcttacaattttagtgtttactcagtattttcactttgttgtttttgcttactgtttcaagatacgctcctttgattacaagcttgatacttttaaatctcttgaagatattctacccaatcccttcaatgatattgctatggcaaaaaaagatggaaaagaaattccagttcagttctacccaaagggtagaaatattttaaaaaaataa

SEQ ID NO: 233371 - DNA, 2217 bp, Klebsiella pneumoniae
atgaagaagaaaaatctttttattctaagcttattcttaagcttattcataacctcacctgcccatgcattgaatctctttggtttagtgacgggaagtgaggatgctgtaggaaacaatatagacaaatggtttaacccgtttcaatcaaacatcacaggagccgttcttgatgtttacttgcctattataatgcagttaggtgggattatagccgcatacacgcttattgccggaacaatgtcaacagctcatgacggtgagatgttaggtaaaaaatggtcttcaatgtgggttcctataagaaccgccttggttccgggtttacttttcccgatctccaatggttattctgctctacacatgattatattgtggttagtgttagttggtaatcagtggggtaatgatgtttggaataagcttgcaccacgcctaatcacagataatacatatatatcagttgataacaaagcagcaatacgacaagtagtaatgaatacattatattcagcagcttgtgttaatatctacaatgaaaatgctaagaaagttaatgcaaattcgaaatgggggcctgcttatcgttatatggatacaactccgattaaaaatgacaaagttgtaggttataatttcggtttacccgctgcacctaacagttcatatggaaatggtatagacctttgcggtagcactaagttaaaactcctagacaaggatttaaaatcgggttctactttgattgatacaactaaaatcagtaaagccgttcaagaagcccaaataaaagctaatgaagctttggttaagggagctactgcttatgcaggttatctttcatcaatgccaaatgataacgctgaacaattaaataagattatcgatactttagttaatgcttatagccaattcatacaagcttccgctgaaagcgttatgaaagagtcattaacacaatctgaaattgataagctaacagagaaaggatggacttatagttatactttctattcaagaattgctgattcaatatcagaagctaatgcagcggttaacaggtatcctacggcttcaatgaattttcaacaaaatgataatgctaactattatggttttagtagtggaaatcaactttatgaagtatatccaaaattagaaagacttcaaaaacttttgagtgatgcaaataaagtagactcatctatgttagattctaataaaggtgatgatggttggtatcaaaagattatatcaactttaggcggaaacttatcatggacaaacaactatgaagcatctaaagcatcaagtttaatgcctctttctgtatccgttaatttgggttcaagaatgatagttagtgctgaaacatcatatatacttttagcgggtggtgctgtggcaggtggtagtattccgtttgttggtaatggtatacaaacagcagcaatctttgtatctccactctttaatagtatactaaaaaacactattttaggtgggaatttgttagcattcgtaattccaatgatgccttatataataggtttcttctgtgttgctggatattacatattaatatttgaagcaatgtttggagcgccacttttagttttggctatgttattaccagatcaagatggtattgtaggtaagcaagggcaaggatacatgcttgttttaaatattggtttaagaccaccattaaacatggctgggtatgctggttccttcgttttgacaactatacttttcgatatgatgaattctaccttctttacagcaggaagtaatactgaaggtggcttattagccataaataaaggcttaactatgctcctactatatggttcattaatgctaactgtagagttaatgtgtttaaaacttatgcatgttattcctgataatctttttaaatggatcggtggggcaacatcctctgtgttaggcatggtttcaggacaagctgaatcatcaacagctaaaaccgcagcggcggcagcggcaggtgctggaatgatttctaatatgatgtctccgcagtttaccaagcctaaaactgaacctaaagaaacaacaccgggcggtaatgatcctaaagcaaccgaaggtagtaatacggtatttgatgatgtaaaaactgagcctgtagttaaaggtgatagtggacaagatatcaaagactttgatgaagatgaaaataataaataa

SEQ ID NO: 233372 - DNA, 555 bp, Klebsiella pneumoniae
atgaaatattatatgctaaaaccatttcgaataggaatcttagagaacgatataactgttaaagaatcagaacaatatgtgattattgatataattagcggagaggaaatactttattgtgatgataattgttatttaattactccaactttattgaaatctcttaaagatagcaatcttacaggtgttaatgttgtaaagcctaaaaatatgaaattcagtattgaacacaacatgaaacatcctaataaaagtttaagggaatggtatagactaataccatttaagtatgatagcggtaagaatcaggaaatatttcttgatcaatacgacaatctaatcataaatgaacgcataaaaaatataatatataataaggatgttcatagggtaaagagagcttttataacagaatatgagattgataaagtagagcatcatgatgaagaaataatcgagcaacctgtttttaagaaggaaaataaaaccacttttaaagattggtgtgttttcatgtttattcttataactatcatttatttgttttttaaataa

SEQ ID NO: 233373 - DNA, 483 bp, Klebsiella pneumoniae
atgaatatcaaaatcaatgatggtattacaggcgagatcttagtgttaaatcaaacaacgtttaacaatgatgtggatactatacagttaagaatgacaccagagtttttagcccttatcaaaagacattgttccggtgctattgatgtgtctatatcagctttattagattatggaatcaaaaaaatattagatgaaaacatttcaatctcaatacaacaagttgagaaagaaatcgtaattgaatcagtaaagcgtgatagtagcattattccatttactacagttaactatagagcatcaagaaaagacacacgccccgtattcgtgagattgtgtaaagatctaaaatataggttaaaagaaatatctccgactaaatatacactttccgcaattggtataataaagtattcgattgataccttgcttaaaaacaatcagtgcctgataataaaaagtgaggttatttatgaaaaataa

SEQ ID NO: 233374 - DNA, 489 bp, Klebsiella pneumoniae
atgaaaaataaaaacattgaatttatgcttaatgctattctttttgctaagtttcttttatatcaggatgagttcacaaatgaagagcttgaacgtggtgaagatgttcgaaacataaaagagcttttcgtatttaaaaataaagaatggattaatgatattaatacaataagattaaaggatattaaccaagatattcatatatcatcaacatacatcatgtcattagatggagtgggttattatgctttttctaataagtcagaagatgagttataccaatatttagttaatgacctttgcgatcattatatcgctgtaagtgaaatgtcattggaagacatagagggagctttagaggcaatcgaagaagatttgtttgatatataccgaagtaatctatctttagccaacaaaatgattttagatgtttcaaacagatttaaaataaaacctgatttgaaaagaccattactcaccatcgtttaa

SEQ ID NO: 233375 - DNA, 447 bp, Klebsiella pneumoniae
atgagcgcattagggcattttaataacattcgcactatcagaaaagaagcccatgagatgggctatgacaccttccttgagttcgctgaaaaggttcaaaccgttaaggatgagttcctaaaagaagcagaagaggaaaaagcgaaacaggcactggtagaagaaaagcttaaggctactactgaacttctccagtccgagggctttgaagtaagccttgaggccgtcagagcgcttctacttggtcaaattgatgctcctacccctactggcaagggtaaaggtggtaaaggcgtaaaacgtggttctgttgagcctaagtatgcgttcactgtagaaggtgaagaacagacgtggacaggccgtggacgtatgccgttagcactgaaagaactgattgagaagggcgaagagctggaaagcttcctgatcaagaaagaagactaa

SEQ ID NO: 233376 - DNA, 540 bp, Klebsiella pneumoniae
atgattaaaacattaaacagaacaaaaggattctcattattagaaatgttattagtatttgggattatatcagcgttgatagtgggtgttttcatgatttacccaaaaatcagcgcaggacaaaaaatagataatgacataaagattttaggaactcttaacgcagggattaaaaacctatacgcaggatcagcaaactacaccgggctttcagtagatgctgttatcaaggctaagttagtgccggaagacttagtagacgaaggccagatatgggatagctggaacgctaacgttctcatagaaccctattatgacggtagcttttacatagggtttgagaacgtgtctgtagatgcctgtgccaagttcgtcactcaggctggttcaagcttctttaagataattgtagcgtctacagaagtgaagaacactgataacggtatggatctcaacatggcaacacttacagcggcctgtatcaacaatgatgatggttatggcggcagacccgtcacaatttacttttacgaaaaataa

SEQ ID NO: 233377 - DNA, 558 bp, Klebsiella pneumoniae
atgataaatagttttagattattaaaagacagaaagagcaagaaaggattttcattattagagctattattggtgttaggtgttatagcagcattgataatagcagcatttatgatatttccaaaagttcaggcttcacaaagactcgatagagaaagcagaaacttaacagctatccaagcaggtgttaaatcgctttatggtggaagggctaaaatatcgaatttgaatactgatagtttcatagcttccaagaacgcccctgataacatgatccaagatggtaaactcatcaatgagtggaaagggaatgtatcagtagagtattcaggtaatcatggtaaatataatattatctatgacgcggttccggcttctgactgttctaaactcatagcagcagtatcaggaaacttcgttattatagatgtttataatggcaatggttcaacgcaagttaaaaatctggaggaaggtaaaaacatagatataaccgctacatcagcagcatgtttttcagaagataactctacgattatattttcttcaatcatataa

SEQ ID NO: 233378 - DNA, 204 bp, Klebsiella pneumoniae
atgattacatatggttctttcagtgttttatttggtggttttttgggtttcgatttcaatacagacgtaattgctaagatgactgtaattacaggagttggaggtgttgtatttcttatgggtttgtttattacgtttatatttaaaaaagatggcagtatctatgatggtaaaaccatcaaacaaaacaacaaaggagaatga

SEQ ID NO: 233379 - DNA, 123 bp, Klebsiella pneumoniae
atgggaacagagacaagagaaaaggaagctgaaacatgggctgagtttataaaagagtttttgaatgatggcggtatcatttacaaacagatagaaaataacaatcaaacaagtagaggttaa

SEQ ID NO: 233380 - DNA, 294 bp, Klebsiella pneumoniae
atgaaaaaagacataacaagagagttaaagaagttgggtttacataatggtaatgagtttatagcaaaagcggcgttaattgaaggagagagagcagaaagtatcttagccctgatagaacgcttaggtagacgcaaaatcattcctgaaggcgttaaacacggtttcaatcagattaaggcaacatacaggttatccggctacatcaatcaggccatagctgttatagcgtttaaagcctatgtgagcgagccagcagagaattttaaggcagatatacactggaatatttaa

SEQ ID NO: 233381 - DNA, 210 bp, Klebsiella pneumoniae
atgaaaaaagctaagtttgttttcaatatagtaggaatgatgatttttaatatatgtgctgttattggttttctaagcatgttgaaggttgaaaacactcttagctactggatagcttctattgtggttggactattaacgatagtcgcatataggaatgaaatatcaaatgagtttggaaccaatcaaaatataagaggtaaattatga

SEQ ID NO: 233382 - DNA, 258 bp, Klebsiella pneumoniae
atgatgagcggaataaaggaaaatttaatatatatggtgttggggttgtgtttgatggcttttggcgtcattaccgctttaagtttaagcgatgatttttggaagaatcatagttttataggctctataacattagcaccatttaaaatgtttggatgtgtactggcaacaacaaattctttaattttggtgattaaattggttgtaaagttattaaatattgaatctatgaaatcaaataagaaatggagttggtaa

SEQ ID NO: 233383 - DNA, 2595 bp, Klebsiella pneumoniae
atgcatcttatttctaatttcgggaagccttcttccgggaagcttttccgttactccccggtggcaggttttttattggtttgtattaacccagcctgggccggtgattattttgatccgggatttcttggtaattccggcgataatacggctgtcgacctttccgcattttctgaggccgggggagttcagccggggaaatatacggtatgggtatttgttaaccagcgcaatgcagggcagtacaccctggattttcagaaaaatacgcagggcaaaattgcgccggttctcacgccatctgaactggaaacgtttggagtgaatgtcaggcaactgccggacctgaaagatttgcctgctacggctgagatagacaatattggcgcgcttatccctcaggcgaccaccatgctggatctggcgcgcctgcgtctggatatcagcgtacctcaggccgcgatgcagcctgaagtacgtggtgcggttgacccgtcgcaatgggaagagggaatttccgccctgatggcgaactatagcctcagcgccggtcgtaccacgaattccggccagaaccagacctcacataataacaacctctttgcaaccgtgcgcgccggggcaaacacggggccgtggcgcctgcgcagcaccatgacccatacccgggtggagaataacggcggtaataatgccctgacgaccacccagacacgcttttcgaatacctaccttgcccgcgatattcggggctggcgctcgaacttactcatgggtgagagtagcaccggaagtgacgtttttgacggtatccctttccgtggggtgaagctcagctctaatgaacagatgctcccgagccagcttcgtggctatgcgccggccatcagcggcgtggcgaacagtaatgcccgagtgactgtgcgtcaaaacggcaatgtagtgtacgagacctatgtggcgccagggccgttttacatcaatgatatccagcaggccggcctgtcaggggactatgatgtcaaagtcacggaagcggacggcaccgagcgccagttcatcgtgccctactcttccctgccggtcatgttgcgtcccggtggctggaagtatgagctgacggcgggacagtatgacggcaatctgacagatggttcccgccgggctgattttatgctggggaccgtggtatacggactgcccggtgatgtcacgctgttcggcggtattctcgccgcaaaagactaccaggcgttcaacatcggtaccggggtatccctgggatacgtcggtgcgctctcggctgatatcacgaattcatcggcgaagtttgataacgaatccaccctgataggccagtcttatcgcgttcgttattccaaaagtctgctgtccacgggcacctctgttgatttaaccgcgctgcggtattcaaccgaggattattacagtttcagtgaattcaacagtcagggacaccagttgcaggagggagtcagcccgtggtccctgcagcgccgtcgtaacagcttccagacgcagctcagccagcaactcggggactggggaaccatgtatttccgggccagccgggatgactactggggaggcgaacgtacgctgaccggcatgtcgctgggttacagcaacagcctgaaaggcgtcagttacggtgtcaactacaacattgatcggacaaaggatgcgaacggtaactggccggaaaatcgccagatttcgtttaacgtcagtgtgccgttcagcatctttggctattcacgtaacctgcaatcaatgtatgccaccacgacgctcactcatgataacaccgggcggaccctgagtcagaccgggctcagtggtaacactctggacgggaaactgtcctacagtgcttcgcaaagctggggtaaccagggacagatcagtaacaccaacttaaataccggttaccagggaagcaagggaagtatcagcggcggatacagctacagcagcgatatgcaggctatcaacatgagcgcaagtggcggggtgatggtgcatagtggcgggataacgctgtcacgtgccatgggcgattcggtggcgctggtgagtgccccgggggcggctggcgtgagtgtcaacggtggtacggcggtcaccgactggcgcggatatgcggtagtgccttacctgacggattacacccgcaacagcgtgggtgttgaccccagcaccttaccggaaaatgtcgacctcacacagaccaacctcaatgtatacccgaccaaaggcgctgtcgtcaaagcaaactttacgacccgggtgggttatcaggtgctgatgacgcttaaactcgacaatggcgtggtgccgtttggagcagttgccacgttactgaatgcggggatggcagaggtgaatagcagcatcgtgggtgatgacggacaggtttatctgaccggattgccggagcggggggagttactggttaagtggggcgagacagcagcacgtcagtgccgtgtcagttttgacatctccggtttatcgacgtcgccggataaaccggtccgtcaggtgacctatacctgtcagggcgggaaatga

SEQ ID NO: 233384 - DNA, 345 bp, Klebsiella pneumoniae
atgttcaatccactgattggcttcagcaaccgagctgatgttctgcaggcgcatctctttaatcaggcgatcctggagcgttttatttacccgttccacgcgaccttttgcctggctgctgttggcacaaatcaattcgatcgccagttcccggagagcccgtccgaactgggttgtgccggtacgtcggctttccggtccgctgaccctgaacaccgcatgcttgtcgctgtaaaatgcgacagggtgagagccatcgatctgaaccagttcgccgagacagtcgcgacgatagcgtggctggtaaacccgggttcgccggcgggaatgaggacgctgtgctga

SEQ ID NO: 233385 - DNA, 498 bp, Klebsiella pneumoniae
atgatggatggccgcatcggacatatcagacaggcatttgaaacgaatggcctgctgactattcagatcatggcatattcagcgaaatacgcgtcaaactattacggtccttttcgcgaagccactcaatctgccatggcgctgggcaaacgggacaaaaaaaactatcagatggacccggcaaatgcgatggaagcgttgcatgaaattgcccaggatttgcaggagggggcagacatggtgatggttaagccgggcatgccatatctggatattatcagggaagccaggaaaacttttgcagtacccgtttttgcctaccaggtttccggtgagtatgcgatgcatatggccgcgttccggcatggctggctcgacgaagagcaaacggtgcttgagtcacttatatgcttcaaacgcgccggggcagacggcatattgacttactttgccagctcggtagctcagtggcttaatcaacatcaacgggaatattga

SEQ ID NO: 233386 - DNA, 303 bp, Klebsiella pneumoniae
atgtcatggaccgaagcctgtgggacatttccggtcactgggacaactatcgtgatcatatgtttacaacgcaaactctacacctttgaacatactgcccgtccaggccattttagcgtagcattacgtgatgagcttgaacgctttttccctgtcatggaaaaagagcgggttgatggctgtgaatgtgaggatggcatcatctttaaccattttgattcgtcatttgaatcctggttgttttcagacaggcgcttacgcacgctgaagcgggtgcagatattgtcgcgccaagcgacatga

SEQ ID NO: 233387 - DNA, 1107 bp, Klebsiella pneumoniae
atggatatgcaaaaagaaacgcttttttcagaagtagaaacagctaacagcaagcagcttgctgtattaaaggctaacttcccacagtgttttgataaaaacggggcgttcattcaggataagctacttgagatcgtcaaatcctcggatgttgaactctctaaagaatcatacagcttaaactggctgggtaagtcctatgcccggctgttggctaacctaccaccgaagacgttgctcaccgaagataaagaccataaccaacgtgaagagaacaagaacagccagaatctgttgatcaaaggggataacctcgaagtattgaagcatatggttaatgcttattctgaaaagattaaaatgatttatattgacccaccatataacacgggttcggatgggttcgcttataacgatgatcgcaagttcacgcctgaacagctttctgaacttgcaggtatcgagcttgatgaagctacacgtatcctcgattttactgtaaaaggttcaagtagccatagtgcatggctgacattcatttacccccgtctttatattgctcgtgagcttctccgcgaagatggcgttatctttatttcgattgacgacaatgaaattagtcaactaaaaataatttgtgatgaaatttttggtgaggctaactcgttgggtattataattcataataaacttaactccaaaagcgacactctaaatatacaaaaaaaccatgattttttactttgctacagaaaatccataacccctgatgcatctttaatcaactattccgtcagtgagcgagaggtatttcaggataatggtaggttttatattcttaaagattcaatcacaacaagaggtgatggtggtacattaaataaaaggaagaatttaggctatactgtatattaccatccagaaacaacagactttattggcgtaattgattacgatatagagttggcatcaagctcaaatagtgaggaggaaatatatagtgacaatgaggaactcatagctaatggatatgtgaaaatacgtcctccaaaagtgagaggtaaacttggagtatggacaaaaaacaaacaatgggtatcaagttag

SEQ ID NO: 233388 - DNA, 522 bp, Klebsiella pneumoniae
gtgggtaatctgaaaggcgtgggccgtatctaccagcagacgttcgtggatacgtactcgaaagtggcacactgcaagctgtatacgagtaaaacgccgatcaccgccgccgacctgctcaatgctcgtgtactgccgttctacgaggctcagggactgccgatgctgagaatactgaccgacaggggtactgagtactgcgggaaagtggaacagcatgactatcagctgtacctggccatcaacgatatcgaccatacgaaaacgaaagcgatgtctccgcaaacgaacgggatctgtgagcgcttccataaaactattttgcaggatttttatcaggttgcgttccgtaagaagttatacgcagacctggaaagcctgcaaacggatctggacagctggctgtggcattacaataatgagcgaactcatcagggaaaaatgtgctgcgggcgtacgccaatggcaacattacttgatggaaaacgggtctgggcagaaaagaatctgaaccagatttaa

SEQ ID NO: 233389 - DNA, 300 bp, Klebsiella pneumoniae
atggtgctctatctcgataaccagcaccgtttactggagagtgaaacgctatttgccggttcggttaaccatgtccaggtccatccccgtgaggtggtgaagtcagcgcttcgcttcaatgctgctgctgttgtgctggcgcataaccatccatccggtgctccggagcccagccaatgtgaccgcaacattacgggcaggcttaaagaagcgctggcactggttgatgtgaatactctcgatcatctggttatcggttcagatggaattgtgtcgtttgcagagcgaggctggatatga

SEQ ID NO: 233390 - DNA, 1104 bp, Klebsiella pneumoniae
gtgcagcagtacggcaatcttaatggtactgaaggcaatctctcgcaactggttggcgtctcgctgctgagcacgattaatgtgtcgctgttgtctggcagtagcttccgcttcaacgtggacaacaacacaacagaggatatgacggttgatgtcagcggcgtgtctctgctttcaacggctgggctgttaacgtcgatagtcaatctgctgggggctggaaatacgctgacagccgatctgtcggtgattgatatcgcgactggacgcgtagttgctatcgacgcgggaagcgtgagtattagcgcaacgttgcttggtgggttggtctatagcggaacagcttcctttgagaatctgcctgctggtagctatgcgctggcgatatcctcaccaaattccgatggagttctggtgagcctgatcaacacgctcgcaggtgcaggagtagccacctttgtacaagcaacggtaaccgattcgctcggttatagcggaagtaccgttacaggcaatgtgctggagggatcggataacggcgatatggccgatagcggtaccgaccttacggtaacgtcggtaacggccaccactgctgcaggtgagactttctcagtgaatggcggcaccatatcggtaacgggtgcttacggcgtactgactattaacgctgacggcagctatagctaccaggcatcaggtaaggccgggtcggcaggtaatgcggatgtatttacctataccattacggatggtaatgggctgcaatcaaccaccaccctgactatcaatatcggtcaggaggtcgagaccgcccaggctaatccggatacgcaggcttattacgtcggcaacgtcgaagataatcttgatatccaggggggcaatgtcgttcaggtggcgggcctgtcgctactgaataccgtgaatgtcgcgcttccgaccaatggctttaagtttgtcgtggctgaagggactgaacaggatgtgacgttaggcgtttcggggtccactgcccttagcatcgcgctaggcgccgttaccctggatctcattctgatcaataccgacactaaccagatagtcggtagactggccccctga

SEQ ID NO: 233391 - DNA, 513 bp, Klebsiella pneumoniae
ttggtatcaggtattgcctcaacggaatccgaatcactgtccgaatccgagtcgctgtccgagtcagaatcgctgtccgagtcggaatcggaatcactgtcagaatccgagtcgctgtcagagtcagagtcgctgtccgagtcagagtcgctgtcagaatccgagtcgctgtcagagtccgaatcgctgtcggaatccgaatcactgtcagagtccgagtcgctgtcggaatccgagtcgctgtcggagtcagagtcgctgtccgaatcggagtcactgtcagagtccgaatcgctgtcagagtccgagtcactgtccgaatcggaatcgctgtccgagtcgctatccgaatcggagtcactgtcagagtcagaatcgctgtcagaatccgagtcgctgtcggaatcagagtcgctgtcggagtcagagtcgctgtcggaatcggagtcgctgtcagaatccgaatcgctgtcagaatcggagtcgctgtcggaatctagactggccccctga

SEQ ID NO: 233392 - DNA, 1578 bp, Klebsiella pneumoniae
atggccggggcggctttgcttggtataggggcgatgattgcaggatcttccgataaagatcattcgtcgcattctccgaacgatgatactgattctgatgcggacagtgattcggatagtgattcggatacagatccagggggcgaccctctctccgccgctaaaaacattacagtaacagacgatgttgagctacataccggtagtatacctaatggcggcctgaccaatgatgctactccgacaataagcggaaccgcgcaggctggcacgacagtgaccatatacgatggcacgactgtattgggtaaggtagtcgttggtgctgacggaaaatggagttttacgctcccaaaactaagtgatggtgaacattcacttagcaccaccgtatctgatacgaaaggtcataccagcggccactcgccggactttgtgctcacggtggacaccaccgtggcgccggtcagcgatctgcaggtgacggatgatgtggcgcagcacaccgggccgctgaccagcggcgggctgaccaatgatgcgacgccggccctgagcgggacggcggaagccggggcgacggtcactatttacgacggcagcacggtgctgggcaccgcggtggcggatgaggatgggcactggcgcttcactccggatccgcttggcgagggggagcaccgcctcagcaccacggtgaccgatgtggcagggaacaccagcggccactcgccggactttgtgctcacggtggacaccaccgtggcgccggtcagcgacctgcaggtgacggataacgtcggtgaggagcaaggggtagttagtaatggcggaataacagacgatacaactcctaccctgagtggtactgcggaaccaggatctacggtaactatttttgataaagggattcaaataggtacagcgttagttgctgaaaatgggaattggagttttacaacctcagcgttgcctaaaggcgagcattccttcacaacagttgtcactgatgaagctggtaatacaagtgattcatctcctccctttgttgtcactattgaactgatcgacgactccgatgcggatgcagactccgacagcgactctgactctgacagcgactcagactctgacagtgactcggattctgacagcgactccgattcggacagtgattccgactctgacagcgattcggactccgacagtgattcggactccgactccgactctgacagcgactcggattctgacagcgattcggattctgacagcgactctgactcggacagcgactccgactccgacagtgactccgattcggacagcgattccgacagcgacagtgactcggattccgacagcgactctgactcggacagtgattccgactccgacagcgattcggattccgacagcgattcggactctgacagtgactcggattctgacagcgattccgactccgacagtgattcggactctgacagcgactccgattcggacagcgactctgactcggacagtgattccgactctgacagcgattcggactctggattcagggggccagtctag

SEQ ID NO: 233393 - DNA, 696 bp, Klebsiella pneumoniae
atgaaaaaaaaagatgaattacttaaaaagaaactgattaaacagattcaggctatcagtgataacacacacaaaagcttttcagcctttgcttttgcggcagccaccgctgcaagggatacaacccgactctttgcctctgagatcgaaacaggagatttcttggtaaggccggatgtatacgcaagaacacgctacagcaagatctgtgatgccatagagacatacatagagctggtatcagtctctgagccgtatacagacctgttaagcgatgtattccatcaactacagcttgattacgcaccacaggccaagagaacaggacagttccatacaccacgttcgttagctaatggcgttgcgagatttgtgggtaatacgttctacaaagcagaacttgatttgtgttgcggtatgggaacgttagctctggcaaggggaagatacgctctggaacaaggcaagagtatttgtgtaatgaaaggagtagatatcgatccaacttctatagcagcgtgttttgctcagttggcatacaacaatctaaaaaatccggtttttcatttgatagatttaaagtgcatgaacgctgttatgtattatggcgatgaatgggatattcactatcgaattaaactttatgataaagaagtagataataacgataagtgcttagatatggcgataggttga

SEQ ID NO: 233394 - DNA, 462 bp, Klebsiella pneumoniae
atgaaaaaaacagatattattttaaaaaatgagcaaagcctcgctcttaaaatagcaaccataacaactaatatgttggcaaaatacatttatgaaggaataaaaaaacttgatggtgagagtttggctaaatatgaagacttagctgggtttcaatctcatgaggaagatatagatgtttatgaagttttagaggatatagaagcatatcaaaatgacgttatagattcattagaaacagatattttttgtgaaaatataataactaacttttatgggaaaaatcatgaatatgaagcagtccattttgacacagaagaagagttaaacgagtttcttttagaagaagatctatttatcattaatgactctttaattattaatgatgtttccgatgatttagatgcttgctcacaagttttggaaatgcttgaagctgataaaaacgataacgatgaataa

SEQ ID NO: 233395 - DNA, 459 bp, Klebsiella pneumoniae
atggttaacagaacattgaatgttataagtattcagaaaaccaaaagaaatgaatccattttgaaagactggattaccgattatgacggcatagagttatttctattagatcatggactattgattgaaagaagagaagacactgaaagcaatcattttatactggtaaaaagaaagcggaaggaatggcttgatttttattttattagcaataatgaaaaccatcatgatgcagaggatgttttacttgatattaccagtatgtttgatagttgtgccgctataacttcaataacaagctggggtgaaggtagctacaaaagctgtgaaacatcatgtttatttgaatgtggtgagttgttttattcttataaacatatttcaggagaaagaagctttaaatggcctcgttatgtttcgagtgcttttaacgaatggttaaatcttgacgctatttag

SEQ ID NO: 233396 - DNA, 414 bp, Klebsiella pneumoniae
atgaaagaagatattttgaacgcgattgaaagtaaagttagtcccttgataaaagtttggatgaatgatggaaaatcatcattaaacataaataaagagagatacataaaagacagcattgatagtaaagaagatgttgatataaaacttctcgctgttaagtatcttttacttgagtatgttaatgaatatgctcctgatgattacattgaagaaatgacagaaaggttaaatcgcatgtttgatgatgtaaaccctatgtgttctcttttttatggtgtttttgatatcagaatggttagctattcattcgaatattatctttctcatttctattacatgctgatggttattagcggtgatagtgaagatgtagattatgtgatgaatcttattaaaaacaaagaggcgtaa

SEQ ID NO: 233397 - DNA, 912 bp, Klebsiella pneumoniae
atgactgtatctatcaaaaacaccccatcattaagcttaaagcctctctacatgtgggctggcggcaaatctaagctacttaaaagctaccagacctatctaccagacctgaacagcgtaagcgcatacgtagagccattctttggtgctggcgctctctttgcgtccgttaagtctacctacagccatatcccggcaatcatcaatgacgtaaacccggagcttatcgctctgctgaacactatcaagcatgatcctgatgagctgattatccagctgcaggagctggaagcggcctatcttggttatcgttctctggaggtgaggaactaccacttttaccgtgtccgggaacaatactggaaagcacagatcggaaccgtacgggcatctgctttgctcttctttttgctcagaaccggcttcaatggaatctggcaggtttcacgcaaaacaggccgctacggaacggctgcaggactgcttaaccatacaacaagcctctttgattactctctactgaaagagtggcataccgccctgcaggaaacatctatccagtgtggctcttatgctgatctcgatgtgccggaaggggcttttatctactgtgatccaccttaccgggcgagctacgccgattatggccatgcattcactgatgaagaccatcaacaactgatctcatggtgtcgtaagcaacaggaacggggctgtagcgtctggttagctaatcgtgaggctaatgatggtttctttgaagaacacgcctctgatgcctctgtagtgcgttttgacattacctatacggctggaagacgtaagaaaacagcgaatggatatgaagctgttaaagctactgatttgctcctgatctggagtaggcacgaacacacccaaaaagcagcgtaa

SEQ ID NO: 233398 - DNA, 963 bp, Klebsiella pneumoniae
atggataaacatcagctcagtgagcgagatatctgcacaaaattcattactccagctattcaacaagctggctggcagcagcatcagttccgagaggaagtcaacctcaccgatggtcgtgtcatggtacgcggtaagatggcctctcgagtaaaaaatcctgaagctaaaggaggtcctaaacgtgctgattatgtgctatatgcaagaccaaatgtgccgatcgcagttttagaagccaaacaggcgaagttctccattgggcatggtatgcaacaagctctagcctatgccgaaatgctagacgcgccgtttgccatcagtagtaatggtgatggttttctcctgcatgaccgaaccggcctctccctacctgtcgaacgagaacttcagcttacccaattcccgaccttgtccgatttgtggacggtatatcaacaatggaaagggctagttgcacctgaagctgtaacgctgattgaacagccgttttataccgatggcagcggccgcgaaccacgttactatcagcgtgtggcaatcaaccgtgccattgaagctgtagccagaaggcaaacacgaatattgctagtcatggccactggtacagggaaaacgtatacagcttttcagattatttggcgcttatggaaagcaaaatccaagaaacgcattctgtttttggccgaccgcaatattctcgtcgaccagaccatgcagcaggatttcgcccctttcggtgaggtgatgcataaggtcactaaccgtgaagtcaaaaagaactatgagatctaccttgccctctaccaagcggtaacgggaaaggaagaatggaagcaaatctatcgccagtttccacgggatttcttcgacttagtcgtgattgatgaatgtcatcgtggcagcgccgcggaagactcagcatggcgcgacatcctggattatttcactacagtagactag

SEQ ID NO: 233399 - DNA, 276 bp, Klebsiella pneumoniae
atgaccacaaggacgattgaatactcaggccagttccagaaagatgtgaagaaggctcagaagcgtcataaagacatgagcaagcttaaagcccttatgacgctgttaatcaatgatgccttgccattgcctcaagtctacaaagatcaccctctacaggggaactacaaaggctatagggatgctcacatagaaccagactggctactcatctacaagataactgatgaagtcctacgctttgagcgaaccggaacacattcagacctgttttga

SEQ ID NO: 233400 - DNA, 261 bp, Klebsiella pneumoniae
atggccgcaaatgcatttgttcgtgctcgtatagatgaaacactgaaaaatgaagctgcagtagtgcttgccggaatgggcttaaccgtttccgatctggttcgtatcactctgactaaagtagccaaagaaaaggctctgccgttcgatatgcgtgttcctaacgagcttactgctaataccatcgctaacagtgagaaaggcgtagacgttcatacagctaaagatgctgatgatctgtttaatcagcttggtatctga

SEQ ID NO: 233401 - DNA, 258 bp, Klebsiella pneumoniae
atgaaactgattaccttgctggctaaacacttcgacgttgaaatagctgattttgagatggaagatgaaaccctgccagaagcaatctggatttatgaaaaggggcaagactctgaaccagttgtgatcctgaaaccaaccgaacagccgggaaactggaaagttggaaacatctactctgcccttcctcatgatgccatcctttcagaacaacagctaaaggaactggtaaaggccgggaaggtgctgaagggctaa

SEQ ID NO: 233402 - DNA, 258 bp, Klebsiella pneumoniae; identical to SEQ ID NO: 233401

SEQ ID NO: 233403 - DNA, 597 bp, Klebsiella pneumoniae
atgaatatgctggttgacgcttacatgcggagtaaaggatttatgccacataacggccatggctacgtcagaacggccaatgtagatagttctgtagtaagtcaggattacagtttcgtatatcatgaacacgtgtacggatatgccgatcatgatttgcatggttttggcgttaatgctgtatcttccctgcgtggacatgtcattacgaacacatcgagtcgtcagaagtatattacttcagtacttgaaaaaaatactgttccatcgactattagccagcatcccagaattctggatgaaatgaaaccattaattcttcgactgccctatcatggtgtaatagaaaaatctaaagtgagtatgttacaaataccatttgcgctacaggaaaaactttcccaactgaaagagcatcaacttgtcacggaggacgctgaaaaattataccttactaaactgggctggtactggtataccaatattatgtactggctcatgccagaggccgatcagatcgctatgaaacggttcattactgaacagttggaaattcctgggaaattcatcgctaaaaaagagcttctgtatgtctga

SEQ ID NO: 233404 - DNA, 273 bp, Klebsiella pneumoniae
atggaaaagaaaactgttcgctgtcctttttgtgatcacgaaacaaaacacggcttaggtgtgtgtttaccttgcggagcaaacataacatacggtaaagcaccgttatggtttggtcaaattggcgctttattatctgtcgtattaagctttgtggtgctgattttttcagagaatatgtttattggtttagcttctctatttgtgtttttgatcttaactgtggttctttctaaaaccatctattcagaaagagtagtattctcaagataa

SEQ ID NO: 233405 - DNA, 291 bp, Klebsiella pneumoniae
atgaaaaagtttatggcggttgcggttatcggtatggcttcacttctggcaggttgtaatgacggtatttatggcgaatacatcagtaagcagtatggggtaaggcttgatattcaaaaggacgtaatcaagtttaaagacagcacctttaatgttaagtcatgggatgaaagccaaaaacctgtatacattgctaaaacacaaaacaaagacattggatcttttactttcaaaattgagaaagtaaaacaaggtgtagtttatcaaggcgtagtttttgagaaggattaa

SEQ ID NO: 233406 - DNA, 519 bp, Klebsiella pneumoniae
atgaaaggacgtagaaaaggatttatcctgattgagttgttattagtgctggtagttgctactggcatcgccggagcaacgttttacgggtatagcaagctgcaggaagggttcagaacaagcaacgctatacgcgatctggctactatcagtaaagccatgaacgctataacagcttctaagcccactatagccgaagctaatagtatgctcatcagttcaaagagtcttccttctacgctggtagacaccagaactaacacgcttgtgaatgcctatggcggtaagctcactataacggctcacaacggcttggacgactcttatgatgtgtctttctacaatgttccactaagcgcctgttctacgcttgtaagcagcggtagggtggtttatagaaacataagcaacaccacatcaggatctaagattgcggccacacccagcatggcagacataactgctttctgttccagctttaacaccagttcagtgcttgtttttaccaacgccgactaa

SEQ ID NO: 233407 - DNA, 627 bp, Klebsiella pneumoniae
atgttgcggtacccgcagggccagtgcgcggacaaatgcctgcgcatccgccgattcaccggcctggataatatagtgtatcagcgaaatcaccagtggcgaagacagatagccggccagcagaatggcggacagcctgtcggtcagttcggccaggtcgcgctggcgaatatgtttctgcagcagggtcagagcggccatgctgtggtgacccataatctcttcgtcgggaatgaccgtcacatcaaccagcggaaaatcgccggtgtacagtttcccggccagcgtcggatcatcaaactcctgcagccagttggtcgagtaagggtacgggctgcgtttgccggtgtagaacagtaccggaatgaccagcggcagctttttgtggccggcgtcgaggtgacgctgcatggcggcgacggcatagcgaatgaggcgaaacgccatgtgcttatccgggctggactggtgctcgataagcacgtgcacgtaaccgtcagcgccgtcgttggttttcaggctgtagagcacgtcgctgaaatactggcgcaggtcatcttcgacaaaggagccggactccagcttcagcgtgctgaggtcacagatggcccgcagttcggccggtaa

SEQ ID NO: 233408 - DNA, 585 bp, Klebsiella pneumoniae
atggaaaaacaatttattagctttcaacaaatcgtgaaggagataaaagagcttgagttaaaaaaaaatgaaactatgtattttaatgagttcttaaacatactttatagagaagagttattgtcttatgacgttgaacagcatgaagcatttatcaagagcaatagagattacattgaatccttaaaaaacaagaggaggagatatcaatcaaggtttattattgttgtatatttaagagatatgtataacgagcttaagaagctgaacagatctttaggcttgacaacaagcaataaaaatattgagcttattgaagaatatgagtctatcagcggtcaggaaaaagaattagataatggtaaaaaggctgtgttcttggttgatatgaagtataaaaataaaaaagagatcataatcagcatcatggacgttaacaagaaccctgctgattacagcccctatgaagacaggacagtatacagggaagtgattaatacgttcaggaggccagtagcttaccttaaggctctacagcgtggtttagaggctttcgaccagacaaaaacaagtagtatatactga

SEQ ID NO: 233409 - DNA, 453 bp, Klebsiella pneumoniae
atgacaacaccagtagccaaaacgtatgactggaagcaaacgttgcgcacacatggtttgcgggcaacgccatccacccttgcaacgctgcagtgccttgaacatgccagccaggccatgagtcatgacgatttaactcagcaactgggcgagcaggctcccgatcgtgtgaccctttaccgaattctggagcggctaatgcaggccagtattgtccagcgttataccgactcggcaagaactcagcgtttcgctctgacccaacgggctgccgtaggactttttgaatgcgataactgccatcatgttattcctattgagcgggatccagccctggaagcggccattgaactggtaaaatcacatctcactgggcatggtatgaccgaacgggaaattaccctttccagccatggaatctgtccgaactgtaatcgaaccatctccaaataa

SEQ ID NO: 233410 - DNA, 279 bp, Klebsiella pneumoniae
atgattaatgatttgaatgaaagtgattccactatgtataaaaaagaatgcaatcaattgaaggatgagaaagaagctttaacgttaagaatagaaactctggaagaggaaaagaataaagcagatgagaattatgattacattgttctcgaaaacatgactcttcaaagtgaaataataggtttagaaagaaagattgaagaattaaaaaaagagcatgatgaaaagattaatagtctatatggcgagttagagtatcttataaaaaagaagaaataa

SEQ ID NO: 233411 - DNA, 255 bp, Klebsiella pneumoniae
atgaaaaaagattatgagcacttagagttatcggaagaagacgatgagatcttacttacttgtgaggatgatgattgtgaaaatgaatccagtaaggaaatgatctttgatgatttcattaataaacagtttgattatatggcggctttcagttttggtttattattggtattggcattcattatttacttgcctttcttattactatcaacaaccgggtttgctttttacaagatgttcaaaaaagtattctaa

SEQ ID NO: 233412 - DNA, 174 bp, Klebsiella pneumoniae
atgattgatgtcttagggccggagaaacgcagacggcgtactacacaggaaaagatcgctatcgttcagcagagctttgaaccgggaatgacggtctcccttgttgcccggcaacatggtgtggcagccagccagctatttctctggcgtaagcaataccagcaactgtcttga

SEQ ID NO: 233413 - DNA, 1095 bp, Klebsiella pneumoniae
atgctcataccatgtatagaaggtggtgatgctgtgaaaaatgtattatttgtactccctttcttagggtatactggggcagatagggttatttttactcttttaaataacttggatagaacaaaaataaagccttttttactagtgcactcagataaagaagaaaaaagtggtctgattaaatatctaaaggatgacgtaacagtaatatctcttgggattaacgggaggattagccggaacctccatagaataatatatggtatgagaaaaaatattaaactttacaacatagacacagtccttattagtgatggaacatcaaacgcgagcatttcgccttttttatttttatttggtgatgctaaaataattgcaagagaatcaaatcttcctagtctgtttgagacgaaaaaggtagttagatttctatataaaaatttttatagtaattatgatagaataattgtccaaagtaacgacatgtacgatgaccttacgaagcagatgaatatctcaagagacaaaattgtcaaaataaataaccccttagattatgattttattatatcaaaatcacaagagaaatccgcatatgagatgccgagtaataaaataaatttacttgcaattggtaggttaacatatcaaaagggatttgatttgttactcgaaggtatatccaagttaaaaaatgacaaatatcatctcactctagtaggacaaggtgaggatgatatgaaactaagagacatttgtaaaagactagatattataacaaaagtcacttttattgataaaacagataacccatatgcattaatgaaacaagccgatgtatttatttcaagctcaagatgggaaggatatcctaatgttgttattgaggctttagcatgcggattacctgttgttgccaatgattatcccgggggtataaacgaaataatcaatgatagtaatggctatatatgtgatataagaaatgatctagaagaaaatcttgaaagtgcactaaaattaagaaatgtatcttatgataagaaaaagatagatgtcatctttagagcatatgaagatactattatttcctaa

SEQ ID NO: 233414 - DNA, 987 bp, Klebsiella pneumoniae
atgggaaaaaagaaaatattatttgatactcgttggataggtgagcatggtataggtagatttgctaaggaagttagagactcaaaattaactatacaggacttaaaactaccatggaaacctacaaatccgcttgatacaatattattgactatttatttaatttttaaaaaagatatctatttttcacctggatacaacgcgcctttttttttccttaaacgatctataatcacgattcatgatcttaatcatatagatattccttataacagttcctttcttaaaagaatttattataagtttgtgcttaaaagagcttgcagaaaagcgttatgtatactaaccgtatctgaattttctaagaagaggatttgtgaatggtcgggtcgaaacgcggatgaagtttttgtagtaggaaatggagtgtccaaagagtttcttataaatcacccaacacccaagaaagaacaaatattaatggttggtaacaggaaaaaacataaaaatgaattgaatgcactaatagctttttataagtcaaatataccctcatcggttaagctagtttttacaggttctattaccaatgaattagatataattatcgatcgtaacaggcttagggatagggtatcttttcttggtacagtatcaaatactaaacttgccgagttatatagagaatccttatttttgctatttccttcgttatatgaaggtttcggtctcccgatagtggagtcaatggcttgcggaactccagttataatctctaatagcacatctttacctgaagttgctggaggggctgctattattgtaaacccagatgatgtagaggatataaaagataaaattgaaaaattatatcatgatgcagaacttcaaaataaacttatcgaaaagggtcttttaaatattgaaagatatacctgggaaatgactcgcaataaatttgaaacaataatgaatagatatatttaa

SEQ ID NO: 233415 - DNA, 345 bp, Klebsiella pneumoniae
ttggcagacaaacgcagcaaaatgctcacgatgtgggtaacggaagatgagcaccgccgtctgctggagcgctgcgacggtaaacagctcgcggcctggatgcggcagacttgcctggatgagaagccggctcgtgccggtaaacttccgtcgatttcgccggcgctgcttcgccagctcgccggcatgggtaacaaccttaatcaaattgcccggcaggttaacgccggtggcagtaccgggcacgatcgcgtgcaggttgtcgccgcgctgatggccatcgatgccggaattgagcggctgcggcaagccgtgctggaaaagggagaggatgatgatcgttaa

SEQ ID NO: 233416 - DNA, 1485 bp, Klebsiella pneumoniae; identical to SEQ ID NO: 218039

SEQ ID NO: 233417 - DNA, 810 bp, Klebsiella pneumoniae
atgagaaaattaatcgtagttgcttctgttgccgccagtttactgctcgggtgcgaccagaagagtactgacaagcgtgaaaccttgtctgaaacgcttgttgctaagtcgctttctaacatggttcccgttaagggcggcgagttcttaatgggggatttcggcccattagtcggtgaaaaactgcctttcagcataaaccaggatgataaggtattacataaggttgtattaagcgatttttcgatatcaaagtttaaagttaccaacgatgattataataaatatctgcagataacaggaataaaaaaacctcccattaatattctggtaaaagagtacccatccttgcaaaaaggtgattactctgttggtgttacctggcaacaggcaaaagactattgtcagtggctaggtaaggagtccgatagaaatattgatttaccgacagaagcacaatgggaatatgcggcaaggtccagagggcaatacattccgtttgcaacgaataatggtgagttcctgcccggtaaaaacatccccagccaggatgagctgagtgaatatactgatggagcaggtattcctatttatccagtggggaaatatcccccaaaccccctgggtctgtatgacatgggacttagtggctctgaatggaccaatgactggtatgcgtcagattattactctcattctccggtaaacgatcctcagggacccgtaaaggggaccgaaaaagtcctgcgcgggaatgttggcggtgacagacaatacgcggctttgttgaataaatcgaacttttgctga

SEQ ID NO: 233418 - DNA, 924 bp, Klebsiella pneumoniae
gtggcaaagcaaaagttcaaaatcaccaactggcccacctacaataaagccctcatcaaccgtggctccataactttctggctggatgatgaagctattcaggcctggtatgagtcggcaacgccttcatcacggggaagacctcagcgctattctgatctcgccatcaccaccgttctggtcattaaacgcgtgttcaggttgaccctgcgggctgcacagggttttattgattccatttttacactgatgaatgttccgttgcgctgcccggattacaccagtgtcagcaagcgcgcaaagtcggttaatgtcagtttcaaaacgttcacccggggtgaaatcgcgcatctggtgattgattccaccgggctgaaggtctttggtgaaggcgaatggaaagtcaaaaaacacggcaaagaacgccgtcgtatatggcgaaagttgcatctggcagttgacagcaacacacatgaaatcatctgtgcagacctgtcgctgaacaatgtgacggactcagaagccttcccgggtcttatccggcagactcacagaaaaatcagggcagcatcggcagacggcgcttacgacacccggctctgtcacgatgaactgcggcgtaagaaaatcagcgcgcttatcccaccccgaaaaggcgcgggttactggcccggtgaatatgcagaccgtaaccgtgcagtggctaatcagcgaatgaccgggagtaatgcgcggtggaaatggacaacagattacaaccgtcgctcgatagcggaaacggcgatgtaccgggtaaaacagctgttcgggggttcactgacgctgcgtgactacgatggtcaggttgcggaggctatggccctggtacgagcgctgaacaaaatgacgaaagcaggtatgcctgaaagcgtgcgtattgcctga

SEQ ID NO: 233419 - DNA, 141 bp, Klebsiella pneumoniae; identical to SEQ ID NO: 218064

SEQ ID NO: 233420 - DNA, 1221 bp, Klebsiella pneumoniae
atggctagcactcttttaacagacagcaaaatcaggggcctgaagcctaaaaattcagcctattatacctggcaagcagccgcaacccgcggcactggcagactcggtgtaaagacttacccatcaggaagaaaaacattcgtctatcggtatttcatcagcggaaaagagaagtttatcggtctgggcgacttccctacccttactctttccgatgcaaccgagaaagccagagccgctgcggccagcatatccgatcccgctaaggcccaggtagaacatgcatcacttaaaaagctgtttgatgattatattgcagaccaaaaggccagaggcaagcgatcttacgacaaaacacaaaaccgaattaatcaggttctggcaagcccgcatatcaccccagagatgccagcaaaagatgtaaccccggaccatatcaaacgcatactttcagaatttattgcgagggatgcgcgcgccggcgcaaacaaagtacgttcgaatctgcatgccatttttaactttggcctgtttgcagataacgaccctgcgaatatcgataagaaaacagtttatggtctggatcgcaacccggtggccgcggtcccatcgcagcgcggagcagataaagcccttgaccgatttttatcatgggatgaattatctgcgctgctggcagtcctttcccgcccagcagaagcaatcccaatgcatcccgatttcgttcagctgctgttgtgttgtttacacacagcagggcagcgcccgtgggagctaatgacaaacacaaaagataactgggataagaaagaaaaaacgttgacggtgccgccgcacatatctaaaacgggtgattatcatgtcattccgttgagtgattcagcgacgcagatcctgcatgtgatggaaaaacgctatcccaaatccgattttcttttccccgcggatacggctgaagggcatcttctttcagctgagttcgggaagcaggtaagaaaattttgtgaacgggagccatttaataaattcacgccgagggacgttcggcgcacatttaaaacgctcgccggcgcgatgggtgtaagcaccgaaatgcgcgacagattgcagaaccataaaagagccggcgtatcagccaagcactatgaccgatacgactacattaaggaaaaacgcgaaattatatcgcaatgggaagaaaagttactttcactctgttga

SEQ ID NO: 233421 - DNA, 324 bp, Klebsiella pneumoniae
gtgggctttccatcgccagcagcagactatgtagaagggcgtctgaccgtcgataaactctgtggtaccggccccaatactcggatcgtgcaaacagaaactggttatgccgtagttgatttctccgttaaaccaaagcagcaggacacggtattgatccagtactccggcggtacagattttgcgaaagtttttgggaaggcgtttattactcgtgatggtgaggcgctggaaggcgaggcattggacgacgtcgtagtgttaggaatagtgacattcgttatcaaccggatagggaaggatgaagataaatgcccaatttga

SEQ ID NO: 233422 - DNA, 240 bp, Klebsiella pneumoniae
atgccgcgtttatacgaaatcgagacggcctgccgtaacgcaatagatatcctgcctaacggaaagcgcatcctcaccacaaggcgatttctgcaggaactggagagatataactggcactggtcaccgcgccaggctaaccagtggatagagcactacgtgacaacattccgcgacgtctcaactcaggaaggtgacgatcgcactttccagctttacaacccgaatggagggctgtaa

SEQ ID NO: 233423 - DNA, 2595 bp, Klebsiella pneumoniae
atgacggtctcaaccgaagtcgaccataacgactacacagggaacggcgttaccacatctttcccgtacacgttccgcatcttcaagaagtcagatctcaccgtccaggttgccgacctcaacgaaaatattacggtgctgactctggataccgattactccgttaccggggcgggtacctattctggcgggaatgttgtgctgatgtccccgctggccaacggatggcaaatctctatctcacgtgatctgccagttacccaggagactgacctgcgcaaccaggggaagttcttcgcagaggtccatgaggatgcgttcgacaagctgaccatgcttatccagcagtgcttcagctttctccgactggcgctgcgcaagccgtcgttcatcgctaactattacgacgcactcaacaaccgcattcgtaacctgcgtgacccgtcacaggcgcaggatgctgccacgaagaattatgttgatgggcagatcgttgacaacaccaatgcctggaaagctggtgatgctgttcttgaccaaaaaatagatgctaattttaaaaagtcgctacggataccagagtcatacattggtgcattgccatcggttgaaatgcgtaaaaacaaaattatagctatggataataatggcaatcctttgatggtattgcctgaaagtggaagcgcagcagatgtaatgatcgaatatgctaaaccctctggaagcgggaacattggagttctaaccggaggtactgttgaggatgcaataaaatacgtcactccggaaatgatgagggttaatggtgagcgatatattcacggcgtaacatctgacgcaactaaatttttacaggcagcgatagattacggcaaagctaatagcttgcctgtatatttatcaaaaatgtatccgtgcatatcttcaccaatagagtttaatctgccattcgatgatgggactgtatatcctggatggatagggaatggcgattccaacatcgcgcctgaaacaccagttaaggctaaagcttccctgcgcgtctacgatgattcaatcattgttggtgaaaaccaacacacttgtggaattattggaaatttttcaaaaactgcgggcccttggaatcatacatctgccatgggtctctacgttgcaggtgatagcggacctgatcaatacattaagtatcacttttctgatttcaggataagcggattctttattggccaatgggttgatggtaccgtaaaccgttgtgtagagaataatatgatgtactcaggatgtgccattcctgcgtgttatcaaggttctgactctttggcacaaactgggctaacgttgtattggtataatattacaggtccagtgttcggaggacgttggttaacaagaaatcacgcgtatgcatctcagtaccttccgccgtacccggcatcagatattcatcgtgcaggatggaatgattcgtatcatgtagagaaatttcattattatggtgatactgggatgaactggacgcatccagcatatgccgctcttgactcttggtttgatacatatgtttttaagtctgcaaactgcttgcctacagccagtggtggcaggctctcaaataatcaacagcctggtgtatatcctgtagatacctataaaggtgtttctggtagagccagaacaatattttctcttcctggaagagaaatacttcattgcaacatccatgaggctaaagtgctatggtctccaagaactccatttcatcagtctgcacaatttgttgccggttttaagtcatatgtgggtaacagcaaaattaagacagcaattattgaacgagtaggcattataaactattcagctggtgatgttcctggaaatagattcaatgtggataacgtagatccttatgattcttcacaaacaactttcccagcaatggttacgcgcggtaatatttttgctatggatgtcgtaaaaggtggggcggttcaaactgcgcctgtaaatgagtttacagggacaagaattggagcaggtgagaacatagtttctcaaaggaagcttggggatacagcgaactatcgtctatttggtttgcaagagcttaacggcacaaatctgtcagataagtatgtatttaatcgcaatgatgcttacatgcctccgatatcattcccaggcggtaacgctgctcaattcaaatatctctatgggtcatttaccccaaccatcacaataggaggatcaagtgtaactccatcatcaattactggtgtttacaggcgatttggcgatgtggtgcgttgcgacatacgagtcagatcaacctcgttacttataagtactgcgggtgctattgttataagtggacttccatttgtcgccgcttccatacaggaaggaagctcaaagggaagcgtgatattaagcacggcaacaagtgttttcgtaatgccgctagttactgctggaactaatcaagttacaattattaaatcttctgctcaggagttatattcacaagcagcagggacatttgatttcacacttcagtgtacatttgattatgtcgttccatttaattcatga

SEQ ID NO: 233424 - DNA, 324 bp, Klebsiella pneumoniae
atgactcagatccaaaaacagcgcgtagtccgtttcgatggcaataagcagatcgttgaagttcccgatccggcgccggcggtaattggcgcgcccacgaccactgactacggcggcgtaaagctcggagcctccattgccgccgctgcggcagctaccgcaaccgcagataccgcatccagtgcaagcgatgtggctggtctccttgttgatcacaacgacctggtgacgaagtacaacgcgcttctcaatgatgccgcggctcttcgtgccacgctgaatgctgtccttgcgcagctgaaagccaaaacaattcctgtttaa

SEQ ID NO: 233425 - DNA, 759 bp, Klebsiella pneumoniae
atgttagaatcacttaaagaattcacgacgtcgacattcaacacagcaatgaatcgcgttaagaaccctgcattcggtgctttcgcaatttcatggtgcgcatttaactggaagcaaatactttatttgttttttgctgataacgggatttattacaaaatagaatatatttctcaaaatagcagttggtggaacgtaattatcttaccagtaatttcatcacttgttttatgcattggcttgccatggattaataatgccattacgaaattgcaaagcaaacctcttgacaacgcagactcattagagaactacaaacaggctaggatgattcgccgctctacgcgattgcagcgtttgaaggccaagcatgatgtaacttacgacagagttaaaacaggtgatgaaaaagatattcaaaccatgaaggaagaaattacaaagtcacaagatagaatgggtgagcttactaaagaaaaagatgaactacaaaaaaaacacgataaagtcatcaatgattataatcaatcattatcgaccaactctgagctaggcgtaaggttagagaagatatcaaccgaactaagaaaattacaagatgaaaacaaagacataaaattaatatgcgagtattataaacttgcaagcaataacacccaactaccatcaattttagaagagcaattgcctgaggctttcagcaggcaagccgaaagagagaaatcattagctttaaatggagatagattattattttaa

SEQ ID NO: 233426 - DNA, 132 bp, Klebsiella pneumoniae
atggattttgagaactatagcggcagaactcttcgtgtttatgcgctgacgctcaactttgtcgtggtaatcgctgtgattgcactgtcggcgtttggtatctggctgattaatgaatgggtagcggcatga

SEQ ID NO: 233427 - DNA, 663 bp, Klebsiella pneumoniae
atgaaaatttatcagcgtataaatggcgaagaatggcgccgggttttggtatgcggtgacctgcacggctgctacaccaacctgatgaaccggctgggcgcggtcgggttcgacccagcacaggatctgctggtttcggttggcgacctcatcgaccgcggcaccgagaacgtcgaatgcctcgacctgattaatcagccatggttccgcgcggtgcgcggcaaccatgagcagatgatgctggatgctgcgatgggtgccggaagtatcctgcactggatgcagaacggtggtagttggttctacaacctcgatgccgatcagcagatccttgcgaagtcactggtcagcaaggcggcagcacttccgctcatcatcgaggtggagaagggcggcaagaagtttgtcatctgccatgcagactatcctcacgacgaatatgagtacggtaagccggtagattcacagcaagctatctggagtcgtgagcgaatcagtttatccattgatggctttagctccaatatttctggcgcagacttattcattttcggccacactccagcgcttcagccaatgcgtatcaaaaaccagctctacatcgatactggtgctgtttttaacggtaatttgaccctttatgaattatccgggggtgaataa

SEQ ID NO: 233428 - DNA, 285 bp, Klebsiella pneumoniae
atgagcaaacaaacaggtggaccagccttcccggttgccgatggtgccgcgcatcggatagcaatgcaggtggccggtgacaatgaagctaaatacattgccgaatcagcaaaagcactcgccggaatgacgcttcgcgattacttcgcggcaaaggcgatgcagggctggttatctagctatccagagagcgatatgcatcctgtggtcactcatcatgaaaacatggttgctgaactttcgtacctgatggccgatgcaatgctgaaggctcgggaggagtga

SEQ ID NO: 233429 - DNA, 183 bp, Klebsiella pneumoniae
atgacaaccatactctcaaacttcctgtgcggtgcagcgctgatgtggctgggataccttgttgttctgttcatcctttgggagcggcctacacgtacttatacggccttttttggccggttatcgatacttttcggcgttgtgtgcgcgctagctatggcgctcaaggacggtgctgcatga

SEQ ID NO: 233430 - DNA, 693 bp, Klebsiella pneumoniae; identical to SEQ ID NO: 11600

SEQ ID NO: 233431 - DNA, 276 bp, Klebsiella pneumoniae; identical to SEQ ID NO: 11599

SEQ ID NO: 233432 - DNA, 183 bp, Klebsiella pneumoniae; identical to SEQ ID NO: 11598

SEQ ID NO: 233433 - DNA, 1053 bp, Klebsiella pneumoniae; identical to SEQ ID NO: 11597

SEQ ID NO: 233434 - DNA, 1365 bp, Klebsiella pneumoniae
atgatctcattggtaaagtatggcctgttgttgtggctgtggttggcgctgggcttgccattcgtattttcaaaaaattctcttcaaaagcggtttgaatttcactcaggggcactcgttgcccctttattaaagcgggttactatgaaaaggaaaatattaattctttccgctgtcctcatttctcctttttcacatgctgagtcatgggaaagcattactaaatccacttatcaaagctctgcctacgctgaaagtaagcaaataaccaatcaggatggctctaagtcaacggtttactatattgatgctgctatgcaggcctccgcttgtcagggtgctaaatccagtgctcagagtgtatttactcaggttaaaccaacttatgagggtatctggcctgattctgaattccgtcttgtttttactggtgattgtacttacagcgattcaccagggcagaaggataaatattggtctttaacggcttatattgttggtgatattcagcgttctgttcctgatgaaaaacctactgacccgacaccagaagaaatttgtgaagcgaagccgccagaagaaggtgtatttaataatgttgattcatatgatggtggtcgttatatctactataacggctgtgaatatgaggctactggtgtcattgtttgtcagggtgatggtactgtttgcgctgcaacatggaagcctacaggtactgtagctgacccctctgataaaccctcaaccccccaaaatggtggtggtgagtctggcggtggtgagtctggcggtggtgagtccggtggcggtagttctggcggtggctttagtggttccagtctttctaaaggtgatattcagtctgctatcgaaggtgcttcacccaaaatagccagcgatattcatgataaattaacggagaaagacacttcatcagatgataaaaaaaatgccgatgaacaaactaggaataatataaatcgtcttgacgattccattaacaatcttacgcggggggctggccgttttgctgacccttcaggtggtgattctcgttatggaaagggcgactctgaattagatggcgcttctactttggctgattctgaattgggaattgaaaaggattctcacggtgctttatgggaagcatttttaaataaaggtgctatgctgcctaatttacccaatggtaacggctgctctgattttattatttttcccggagaggtttatcagattgatattggttgcgataaattactgactattaaagatgttctttcatgggttttttattgccttacgttctggtatgtctttacttctttaacttcattgcttcgcaaagggggtgagtga

SEQ ID NO: 233435 - DNA, 1095 bp, Klebsiella pneumoniae; identical to SEQ ID NO: 11592

SEQ ID NO: 233436 - DNA, 1266 bp, Klebsiella pneumoniae; identical to SEQ ID NO: 11591

SEQ ID NO: 233437 - DNA, 234 bp, Klebsiella pneumoniae; identical to SEQ ID NO: 11589

SEQ ID NO: 233438 - DNA, 681 bp, Klebsiella pneumoniae
atgccaaaccgccgcgtcgttaccaaaaagcgtagcacagcccttattcgccaacaaatcgaatgggccgtttacgacatggcagacgttacccctttaccttactgtgcaaaaagcagacaaagcctcatcatattttccgctatgctcagactccgacgcggaagaaagccacctgtcgacgacagcgttgctgtttaccccttcgcgcgtcggcgcaatttcatgcatttcgccagccatgacagaattttcacaattggctttcttctaccatcatcagcttcttcccgctggttttacagcgaaatcctgcacaacccgacttttctgtacaagctatcacttaataaaatcattataaatcaaagaattaaaacacaaacaaaaaaaataaaccgttacgttgtacatatagcaatgaaaaaagttgtacatagtgaaatcagcgtctatagttttggagtgttaactgcttgttgcgcaacaaagcggggaagcttgacgattgcgcagcgagtcggacggtggttcctggttatacatttcctgttcgtgacttggcgcgtatcaacggtacgctgcgacttttattgtctgtttgctttatacgtgggagagttcgagctatgcatattaaaaataccattccagcagagtttgtcttcaattcggccctga

SEQ ID NO: 233439 - DNA, 984 bp, Klebsiella pneumoniae
atgagtattgactcacgatttgaaaaattcatgctttcattaccttcaatagaaagcatagattcaatagaattgagtgaggaactcagaaaagagaaaaaggctgattatttgggaatgggaaggaagatcatttttgaacaaaaatgtataacacaagagcaatctcaaaaaatcgaacttgagttagagcaatatgtcaatgacgaaaactatcctgttttctatggtgaaagggatttcaatttagtcataaaagatcttcctaatagtgaagatatcaaaaacagagtatttgttcgaattacaaaattacttgagtcatatttgagtcaggcatgtaaacaaatagaatcatctaaaaatatttttaatttagataattcagttggtgtgcttgtcattttaaatgagaaaataaaaatattatcaccagatttagttgtttaccgattacaacaaagaatgaaagaaaaaaaagatggagagtatagatttaactctattgactatataatatttatatctgaaacacatgagataaacggtaatccagttgtgattattttagaaggttctaatgcggctaagaaccctgcagaaattaatgaatatttgaattatattgctaatgggtggtctcaatttaatggtcgtaatactatgaaaattgacaatgccagagatttattcattaatttagaagagaaagaagagcctaaatcaaatagtttaactcgcactgatgaaagaaaactatggtatcgtaaaaaccgatatatgaaagattggtcagatgataaagttttaaaggcggcggttgatcatatgaacaaaataatgccatttattttgaaaaatggaccaaaattaccagtggataagttaggtgagctaatgttggcatttggtgattttattgaagagtccaacatgcgtggcttagatctaaaaggacttaataaccttttcacggataagtga

SEQ ID NO: 233440 - DNA, 2166 bp, Klebsiella pneumoniae
atgtcatcagttataaataaatctacatctaaagatgatgaagggcttgatttaggacgtttacttggagaagttattgaccataggaagctaatagtgtcagtaacgtctctctttactttacttgctttactttatgctattttcgcaacgccaatttatcaggccgatgcacttatacaagttgagcaaaaacaagcaaatgcgatactcagcaatttaagtcagatgctacccaacagtcagcctcagtcagcaccagaaattacactgttgggctcaagaatgattttaggtaaaacagtcgatgatttaaaccttcaaataagagcaaaacaagattactttccagtctttggtcgtggtttagcaagattgttaggagaaaaaccaaataacatctctatttcaaggctctacataaaaaatattgaaggtgatgaggttccagaaataaaattaaccgtattagatgaacgtaactacaagcttgatgtcggcgatttggttttaaaaggaaaaactggtagttttctggaaaaagatggtattgcattattagttgataaaatcgaagccactccagggacatctttttctataaaatatgtcagtcggcttaaagcgatatctgatctacaagaagcattagaagttgcagatcaaggtaaagatactggtatgttaggaatttcattaacaggtgataatccagtattaatagagaagatcgttgatagcataagtaataattatttagctcagaatattgctagacaagcagcacaagatgcgaaaagtttagattttttaaatgaacaattgccgcaagtacgaagcgatttggatcttgctgaagataagcttaataaataccgacaacaaaatgattctgttgatctatctcttgaagcaaaatctgtactggatcagattgttaatgtagataatcaattaaatgaattaacatttcgtgagtctgaaatttcacaattatatactaaagagcatccaacatataaagcattgctagaaaaaaggaaaacgttacaggacgaaaaagcgaaattaaataaacgcgtagctaatatgccagaaacacaacaagaaatattacgtcttagccgtgatgttgaatctggccgcgcagtatatatgcaattacttaataggcaacaagagttaagtatttctaaatcaagcgctattggcaacgtccgtataattgacaatgctgtaacagaaattaaaccagttaagccgaagaaaatactaatagttctgattggtatagtgtttggtggaatagtatctattgggctagttttattacgtgtattcttgcgtaaaggtatcgaaagcccagaacaattagaagaagttggatgtaacgtgtatgcaagcataccagttgctgaagcttacactaaaatcactgagcaatcaaagaaatggtctcgcaaagaaaacaaaataaatcaagggtttttagccgttgataatccagctgacttggccattgaagcaatcagaggattaagaaccagccttcattttgcaatgatggaatcgagaaataacgttcttatgatctcaggtgcgagtccgaatgcaggtaaaacctttgttagttcaaatttatctgctgttattgcacagacaggaaagaaagttatctttattgatactgatatgaggaaaggatatacgcacaaattatttaatgtcagtaatgataatggattgtctgatatactttcaggtaaaatctcaatagagaaaagtattaaaaaaatatcttcagctggatttgactatattagtcgaggcatggctcctcctaatccagctgagcttttaatgcataagagatttgcggaactaataaattgggcaagcgaaaactatgacattgtagttttggatactccaccgattctcgcagtaacagatcctgctgtaattggacactatgcaggtacaactttacttgttgcccgttttgaactgaatacagttaaagaaatagaggtaagtattaagagatttgaaaatactggcattcaagtaaaaggttgcatattgaacggtgttgtgaagaaagctagcagttattatggctatggctatagtcattatggatactcatataaagataataactaa

SEQ ID NO: 233441 - DNA, 828 bp, Klebsiella pneumoniae; identical to SEQ ID NO: 209012

SEQ ID NO: 233442 - DNA, 1482 bp, Klebsiella pneumoniae; identical to SEQ ID NO: 209013

SEQ ID NO: 233443 - DNA, 2340 bp, Klebsiella pneumoniae; identical to SEQ ID NO: 214773

SEQ ID NO: 233444 - DNA, 3660 bp, Klebsiella pneumoniae
atggaaacttatctcaccggaaacttcctcaatcaatatgaggatattaatactctaaatgaatatgatagagaaaatggcaaaccatgcttattagaggctgcgcaaaatgccaagcgagtgctaataaaattttggcctaaagatgaatcaaaaaacaacgatataattgaagatttgtggcgatatgaaataagacaactccataggctgaaaggcttgcccggtctaggagactatatatcttctatagttgactcaggaaaagatgaaaggggattttacttagtattggatgccgacttcagagttcctctgtcatatatatttaaagaaaaaaagacactaagtttaaataaagaatggatcaggaatagtagaagaattgagaatagaatcaaactttggcataattttataagaattattaaagccatcgaactattgcattcccaaggtctgcttcataggcatctggataaagattctatactaactgatcctagatcacttgactttgacttccaattaaccggcttcgaatggtcactacgcgtccacgctgtttcagataaacataacgaatatacatctagagatttgaagattaataagcagtattcttttttatctgattgggctgatttaggttttctaatagccgaattacttaacataagctcagatagattaataaatcttcaagtcacaattaatgatttagtagatgaaaccgatctaattcttgatgaattaattttaattcgcggattgattggtgttatgaaattagaaaccaacttatcgagggaggccataaatggctctataataatagaaaaagcaaacactatattgaagtcattagaatctctaatttcaaaagaaaattcaactaggcatattgaatttcttttttcggcaaaagcaaactcggaagtaacaccagacaaaataacatctgtttttaatgccatacaatataccataaatagagatcatggaatcacaatttcagataaagatattgatgaatgcttagactttataacaagggatctatcagggaaaatatacctatctataaataaaaatagaagtaataaagaagaaatacttctttacggagaaaaactcacttatgtactagagaaaaaacgcaacggtaaaacagaggactctgattggaacattgcattctgccatgctgcttatgttgagcctccaagacaaataaaattcaaagctaaaagaatagctttagaaagagacgtattaaaatgtattcagtttaaatctaacaatcgttatcaaggtatatataactcttgggatgatctaatccttgaacttgaacgagatgataataatattcttcccaatagagttattgtcgaagggtttgctatatatcacctaacagaaatagctttcgcaaaatcagaaatttaccctgtaacattaattagttatgataaggacaaaacagagtcaaagttttttacagtaagaatacaatgcagacaagatgatgaccatatatcgacatcattaggtattaaaccacctgcgattcgattacatgacaacttagagaatgatagaattaattcaataagctggattcttacagaaaacaacaacttctatgatggtgataatgaagtaacattggattttataaagacagaaagaaaccatgaaggggtttacgaatacatattcacaacaaatacactaaacccaggtttcaaaaaatgcttccttataccttcatcagtgcagggaactattaagcaattaagtagaagagcatcatctatagatgaattaagtaaccacgcagagctaaggagtatgttagatgatccttacaataacactattatatctgaaataaataacaaccttcatagttctttttattcattggatgaatctaaaaaagatgcatttgaaaaaataaataagactttgcctatattcttagtccaaggacctcctggtgttgggaaaacatatctgataacgactcttgtaaatcaaatattctctaatgaaagtgagagtcgaatagttctaacggcacaaagtcattctactgtccagcatttataccaagaagtgacttcatccttagatataacgaactccaaaccattaattgttagttgtataaaaaaagattcggatgatgatagcgatgacatatcaataaaccaattagactcccttgcgctagaatatattaaaagatttattgatagtgatatttttgatgaatgtacatcaactataagtaaaaattcaattatatcagccagtcgtaaatcatccaaatcagacagatattctcttatcaaacagatattgaaatctgcaaatatggtttttgctacaactaactccagacaagtagaagaattaattagtgagaaatcacaatttgactggtcaataatggaagaaacaggaaaagtcacaggcgtagaacttcttagcccgatgttactttcatatagaagactgatgataggtgatcataagcagttacccccttatgcaacagaaaaaatgagagagatcctcactgacattaataaattgaagaacgcaataattattgcaactgatataaataatcaacaaataaaaggtgattggataaaagagcgttttactgaaaattttatctcaacaattgatagcgaaacacttgaaaaattgagttctagtgcagtcaggcttcatctcttatttgaaagtcttgtgcttgaagaaaaagtgaaatcacaaaaatatatagatcgttacggtgatgatagaaagcatagaaaaattgcgagcatgcttaatttccaacatcgtatgcatccagatatcgcaaacttgatctctagcgtattttacgataaaaagcttaaaacagaaccttcaaaagaaaaattctatagagatgcaaatactattaccccttttacatttaaacctaactcaccattacttaactccccggcaattatatggattgatacccccgatgttcaacaaactaaaaacaattatgctgcagaatctcttcctatttggacaaataacttagaaaaaaatactcttttatccgttcttgaacatttgagagtgaattcaaaagcagaaaaaacaccaaaactagcaatcatgtcaccttatgcaaagcaggtagatttaattaagagaagtctggataaaaaactgcataaagaaccaaattcgttacaaatagaatattttcaaaaaccagatgatcattcttcattttgtagcactgttgatggttttcaaggggctgaggctgacatagttattgtatctatggttagaaataatcatcattcttatgttagagcatctctaggatttctccttgatagtaggcgcatgaatgtcctactaagtagagcaaaatataagatgataattattggttcattcgaattccttaaatattggtctgatttaatcgacaaaaaagaaattaaaaaaggtgatttaagcaatcaatttttagtcgatcttgtcaataaactcatcgaatatgagcgtgaaggattattaaagaagattgactctagagaattcaaacacgtaaaacaagataagaataagaaaaggacataa

SEQ ID NO: 233445 - DNA, 369 bp, Klebsiella pneumoniae
atgaatgctgtattaagtgttcagggtactgctgtctctgaagaaaccaaaccgtcttttctgtctcgcgttttcaataaaaagaaagccctgaaagtcgctaaagttgcgctgccggttgctgctgtggcggcgttcttcccggatgctgcgatggccaccaccacggcaaccgacctgatgaagtccggggatgcgaccgttaaaggcacgtttggtaagtcttccagcgtcgtcaaatgggtggttctggcagaagttgtcgccggcggcatcatgtacatgatgaccaaaaacgtgaagttcctgttcggcttcgcgattatttccacctttatcaccatcggtatgtcggtcgccggttactga

SEQ ID NO: 233446 - DNA, 249 bp, Klebsiella pneumoniae; identical to SEQ ID NO: 209381

SEQ ID NO: 233447 - DNA, 2058 bp, Klebsiella pneumoniae
atgtctgcaacagagtctaaggtaaaaactgcaccgaaaaccagcaaaaaaacgcttaagtctgccgaagctgaggcgcttaaagtggctctcgatgccgcacaggtcgagtatgtcccggtgacggcactggtgaagtctcccctgaacgtcaggaccattccctatccggcggagaaagtctgttcaatggcagattccattgaagccattggcctgttgcagaatctggtcgtgcataacctcccggatggtcgctgtggtgtggctgccggtggtcgtcgcctgaaagcgctgcagctcctgcagagtgaaaaccgtatcgatgccggatatcaggtgatggtgaaaaaggtacctgatgaactggctgttgcggcatcaatggcagaaaacgaacagcagatggcaatgcatccgtctgaacagatcgctgggttccgcacactggcagagcaggggaaaacccccgcgcagattggcgatttgctggggttcggtacgcgtcatgttcagcgcatgttgaaactgaccgaactggctcccgaaattctggcggcgctggcgaaggatgaaatcaccaccgaacactgccaggcactggcgctcgaaagcgatcagaaacgccaggtggaagtgctggaatccgcccgcaaacggtcctggaataatgaagtatcagtttcctcgatccgtagcctcattacctcagaagaggtttccacaaacggcgacaaattccgctttgtgggagaggccgcattcagtccggatgaaatccgggttgatctcttcagcagcgaaaacggcggctatgtcaaaagtgcatcgctcgataccgccctgctggaaaaactgcagaacatcgcggagcacctccgcgaagcggaaggctggtcatggtgtgatggtcgtcttgacccgatttcacactacgggaaggacactaaaatctggcgcctgcatgctgtcccacctgtggaatataccgaagccgaatcagaacgtcttgcggaactggaagctctggaagctaagtatgaagacgagaaccccggcgtgaatgatgacgtcttggccggggctctggaagctgtctgggaagaacagcagaccatcgcgcaccgggcaaaacaccgggcatggacggatgaaatgaagcaatctgccggagtggtggtttcctggactggccaggaggtgaaagtacagcgcggtgtggtgctgtgcgccgatgaaaaaatggaggagaaggatgcatccaccgatcaggcccctgaaaaagtcgatccgctggacgccgtcagtgtcccgttgctgacccgcctttcttctgaacgcacactggcggttcaggcggccctgttgcagcagccgcagaaagccgtcgcgctgatggtctggaaaatgtgtaactcggttttccataccacaacgtccgtcaaagagccgttctgcattagcgtgagtgtgtcgcattacgcgctgacccgtgaagcacctgacggtgaaaacagcgttgcgtttcaggccatccagtcagaaaaagaacgtcttgaagccctgctgccggaaaactggcgaaaggatatgaccaccttctttacgctcgatggcgcaaccctgatggcactgatggctttctgcaccgcctgttccatagatggtgtacagggcaaggatgaatttggtcgtaaacaccagagttcgctggatggggtggaaaacgccattcagtttgaccttcgtgactggtggaaaccgacggctgataaccttttctcgcacatgaagctgccacacattgtacaggcactctctcagaccggactggctggcgcagcacaggacgccgcgaagatgaagaaaaaggatgccgctgaacatgcagagcacttcctctcaaaaatccgttgggttccggaatggatgaccagtgctgacaaccagaaacagcttgccgcaaagtctgaactcagtctggcaacaagtcagaacgataccgacgttgatgccggcgacgtcaccgaccataacaacccggcctgcgccgcctga

SEQ ID NO: 233448 - DNA, 864 bp, Klebsiella pneumoniae; identical to SEQ ID NO: 217112

SEQ ID NO: 233449 - DNA, 2013 bp, Klebsiella pneumoniae
atgaacgccctgcgcagcgggatccagagttatgcagcccgcagcggtgataccgccagtctggtcaatatcgctaacacctcatctcttgaaaagcagcggctggcacaggccacaatggggcaccaggcgcttcgcacacttccgctgatgcaaaccgttatcatggggataatgattgggatgttcccgatcatggtgatggccgccatgtttaatatgatgacgctgcaggtgttaaaggggtatgtgtttgcgcttatctggctgcagacgtggccattactgttcgccatcctgaacagcgcaatggcctactatgcgaagcaaaatggcgtcccggtcgttctctcggagttgtcgcaggttcagctcaaaaactcggatattgcaaccaccgcgggttatattgccgtgatgataccgcctttgtcgtgggggatcgtgaagagcatgggagccgccttctccagtgcctacagccatttttcttcttccgggcttggtgcaacatcgcaggcggcatccggcgtggtggacgggaattactcgtttgccaacatgcagatggagaacgtcagcggctacagctggggtaccaacagcacaacgagtttcggacagatgtcgcggcagctggggaatggggcgatgagtacccagacccgggatggttcaacggtcctggacagtagtggcgcaatgtcaaaactgccggtggatatcaacgtcagtcgtcagatagccagtgcgcagcaacagatggcccgtgaggctgatgtccaggccgaaagcgcgctgcatggctataacagcagcgtgacaagtgcctggaatagtctgcagcaatttggtaccaataaagggaacagcgcctcaacaacgaccggggccgatactaccgagtcttcgcaggattcgatggccagaagcaagatgtggaatgcggttgttgctaatgcgaaagccaacaacatcagtaatgaggagtctttccagcagttgatggatgagtctaggaagggaacggtatcaggtgagatgtatggtaatgctaaatggagtagtggcgaccaattggtcgggaagctgggtaaatgggctacaggactcactgctgaagggggggctaaaattagtgctggagtgaatgcatcaagtggctctactgactcgacaaccgaatctggaagggaatctcatgacagtaggcacgataccagcagccaggcggcgaaagactttaaggaagcatccgattactttaccagccgcaaaaccaccacatcgggtaatattaccgataataatgccagctcgcgtgttgaccagtttgccgcgtcactctccagtgccaaaaacagctacgaccagtatacaaccagccggacacgcagccatgagtacagtgagatggcgtcacgcacagagagcatgactggccagatgagcgagaatctcactcagcagtttgctaactttgttcagcgtcgcgctccacaggatgccgaggctattctgaccaataccagttctcctgaaatttcggcgcagcgtgaagcactggcgcgtgaattcgtcaaagagcaggttgaacccagggttgatgccgcgtatcaacaggggcgtgaaagcatcggacagaatatggctggggtgtcaggtggtggggacaatggttcggtaatggctgactatggacaaaattctggtcgtatcgatgccatgacgcaagacgctggtattatggataatgtgggtcagaaagtggatgggatgattgcagagaataaacaacagcatcaggaaacccgtgaaaacatacaacagcaaggcgttgaagtgaaaaaagagaatgctgaactggaaaatgaccacaaaacaaaaggaaatgatttcaaaaattcttataatgataagaaagagcatcaaaccagactgcctggcgcggattcaaccaaagaactactggataaggcaacaaaattagaaaacgagaaaccaaagggatag

SEQ ID NO: 233450 - DNA, 1269 bp, Klebsiella pneumoniae
atgaagttattattggttggtaatcatacttgtggcaaccgcggcgatgctgcaattcttcgaggtttgttgaattgcttgcgacaaattgataataagatagagattgatattatcagtcgctattctattagctcatcatacttgttaaatgaaatggttgaacaagatattttatattctaaaggtcatgccaataaaccaggtttttatgccaaggtaaaagctaaaataaataattatatgatgccaaaagttttaatggctcactacaagaatgaaggtgtttttaaatacaaaaaattaccaccgcatatcattgagtttactaataaagttagaaattatgatgctgttatccaagtcggcggttcattttttgtagacttgtatggctctgcacaatttgaacacatattttgttctttgcttgcaaaaaaaccaatttatttggtaggacacagcgtcggaccattcaaaaatagtgacttcaaacgcattgcaatgtttgcattcaaatattgcaatgaattgatacttagagaaaatgtcagcaagcaactccttgtttctgaaaattttcagatggataatgtaactgatggcgtagatacggcatttcttgtagacaataatgtcacatctgataacgattatataattgatcactggaatgaaatcatttcgcataataaaacggtagcactgactgttcgcaagttagctccctttgataaacgtctcggggtaacccaagaagaatatgaattagctattgctggaataatcgaacatatccttagtcttggatatcaggtagtaattttctctacatgtactggtattgaaagttacaacaatgatgaccgtatcgttgctctttctgttaaaaataaggttaagaatacagaatctgttcatgttgtaatggatgagattaatgatatccagttaggaatactgctaaataaatgtagtttcacaatcggaactcggctgcattctgcaattatctctatgaactttggtactccggcaatagctataaattatgagcataaatccaaagggataatgaactctctaaatgttgataacttatctattgatgttaaaaacctatttgataatgttattatagaaagagttgattatcttcacaataatctagacgaagtgaaaaataaaatagaacaaggcgtttcaaaagttaagaatgatggccgtttgatgttggaaaatatcattaataaaattggtgtgaaatga

SEQ ID NO: 233451 - DNA, 1242 bp, Klebsiella pneumoniae
atgaaaaaagaacttttatatatagttacaatgttaactataccgctttctgtttcggcaattagtgaagaattaaaatttaattatctcggtaagccagtttcgtcctctaacggatattcaccaatgtatttgcaaggtatctatgcatcaagagataccttcggaatgagacaatcggcagtagttgcttcatttaaagctaattcaaagaatccctttagcttcccagtattagggattaactcgttatatggattagttgattataaagatcgtgactctgtcgcactttatgctgataacacggctccagattataacggatgggaaatattatctgcagataaaataacgcctacatcaatactttcaaatagtattgatccaactttaatcaagccgggaatgataattgaaacaaaaacaaatcctaagtggacaacatatgttatttcagtaactaaaggtaaaattatcacaagtggttgggttaatatgcaaacgaggcatatgggatatcctaaagcacaaactctcttgatcaatccagtaactaaaatttgggctgcaaactttaatattacaattccagaaaactcaagagctgttaaaggcgttgtgcaagaaaatggcattgtcaataataaaatcaataatggcataattaacggtatagatactgtcattttaccttattctaaatatggtggtagttcagcatatgtagcccgttccgctaatacggggttaaaccaacaatgggagaatggttttttatcgcttggtaacaaatttgggtttgtaagtttaagcaaagaggtcaaccatgttaatgtcagttttctagatgcatctaatgcagatattggagttaaatttttaggaagcaataaaaaacattcaattgaatggtccgatggacaaaaagtaactgcatcaatttcccctagtggtgaagtagaaaaaataaattataaaacaaaagttattaagaatagcgacgaattaactgactctttttcacaatatatattcatgacaaaaaatgatatcacagttcaattgcctgctagtaaagtactcactgatggttatacattaaagctcttatcaatcggtgatgggaaatgcaatatcacttttacatcagatgttaagatcattggtgaagtcgagtataaaaactttaattggcataaagagatagtttttctagatcataaatggtatttaatttaa

SEQ ID NO: 233452 - DNA, 222 bp, Klebsiella pneumoniae; identical to SEQ ID NO: 223009

SEQ ID NO: 233453 - DNA, 597 bp, Klebsiella pneumoniae
atggcagaagaaaaacgccctgtactgagcctgaaacgaaaaccggcggagaacagcacggcccccgcagaggcaacccctgctcctggtgtggtgcgccgaaagaaggtcgtggtggtctcgtccccgccggcctggaaggcaaagaaagcgaaacttgagaaggctaaacaagcggccgaagccgacgcgcgcaacgctgcgccggcgccggataaagcggtaaagacgccacctccggtgcgttatcttcgcctgctgccgccggaacaggccatcatgaccctgaaggcattctggccacagctgttcgacggaaactcaccccgtctgctggcgacgggaatgcgcgagcagctgtttgccgacattgtgaaccgcgacctgccgctgtcgcataaacaggtcattaagtgcctgaagagtctgacccggtctgcgggctatctgtcccggatgaaggtgggggcctcccgctatgatctgcaggggaatgccgttgcgaccgtcactgcagaggaagcgcagtacgccagtgagcgcatgatgaaagaactcctgcgaactgagcgtatgcggagccagtctgctgagtaa

SEQ ID NO: 233454 - DNA, 726 bp, Klebsiella pneumoniae
atgagagcacaacacacatttccaggcgcgacagacagctggcttcagcgcctgctgacctggacaccgggacaaacggatatgattaaaacggtcgcactggtactgatggtgactgaccacaccggcttactgctggccggaaacaatgaagtgatgcgcctgctgggacgtggttgttttccgctgttcggtctggcatggggaatgaatctggcacggcacgcggaaatacgccagtctcaactgaacaacctgtggggctgggcgctggtcgcccaggtggcgtttatgctcatcgggtacccgtggtataccgggaatattctgtttgcctttgccgttacgggccaggtcctgcggtgggtcagccagccgtcctggtattacaccctcctggcggctggactgctggtcacctggatacccctgtcaaccggcagctacggcatggcaggagtgggcatgctcaccgccagctggctgctttgtcgcgcacagcatgcaccggaacggctgggatacggggtgttgtgggccctcatggtgttgctgatgaatatgcatgacgtgagtgaatcagtggccgggctggcgattgcgctgctgacgctgatggtgtgctcatctgccggagaacgtgtgaaacgcttctggccgcggcagttcttcgtgatgttctatgccgtgcacctggcggtactgggtattgtcgtctcaatgtga

SEQ ID NO: 233455 - DNA, 228 bp, Klebsiella pneumoniae
atgaaacagcccgccatcaccgtcaaagacctcgaatgcctggagcacctgcgtaacgtcggccagttcgtcggcgagctgatgcaggtgcaggactgtacttccctgcgtcgtgacccggcccagcagttacagctcacctccgtgatttacctgatgaccgcccagctcgacggcgtggtcgagcgctgcaaccaccgctggttcaccggggagggcaacgtatga

SEQ ID NO: 233456 - DNA, 837 bp, Klebsiella pneumoniae
atgaattgtttagtgataattgtcacccataatagccaaaagcatatacaatggtgtattgatggtctggaatcgtccaagtcgctattaaaaataaaagttattgattcaggctcaactaatataagttacctagacaatatttcgtcaaaacatagattggaaatcataaaagaaaataatataggttttgttaaaggaaataacttagctctccagagtgatgagaactttgactgggttctattgttaaaccctgatgcccgcatcgaaggtgatagactcgatgaacttctaaaagtagcaactgacgtcaataattctaatgttggtatcttctctgtacctttagttcgtttttctatcgacgagatgcaagatatgcaagtctacgattcgcttggcatcgatgcaactcgatatggtcgctggtttgatattggctcaggggaagaaaccaaagttcttactaaagaactaattgatgtaccagctgtatgtggtgctcttatgcttataaggaccaaagccttagaactgtgtttagataaatcagcaaagaaaggtttcgaaagtagttattatatgtacaaggaggatatagaattatgtttaaggattaaaaaaaatgattggagagttgttttagtcaatagccttcaagcattccattgcagaggttggaataaaccaagaaaagaaattagtcattgggctaaatatcattctgcgaagaacgacatagatattgcattaagatatagaaggcagtttttgccttatgctttatgtaagtacttatgggtaaacgtatttgaacgctttggtttaatgtaa

SEQ ID NO: 233457 - DNA, 597 bp, Klebsiella pneumoniae; identical to SEQ ID NO: 181257

SEQ ID NO: 233458 - DNA, 771 bp, Klebsiella pneumoniae
atgcttatcgagggggcagatgccaacgcgtctgttaccgggaatgaatccactgtaccgatgcagttgcgtatcaccggtcgcgtggaaatgccaaacagcaaaacctacgacctgacagggtgttttgtggggcttgaagcctggggcgacgtatcgagtgagcgcgccattgtccggacccgcaatatcagctgtatcaaaggtgataaaaccatcgatcagcccattaacggccacgtgtcatttatggggaaaaacggggttaagggagaggtggtgatgcgtaacggaaaaatcctcggctgggcatggggggccggttttgttgacgggattggtcagggcatggaacgggcttcacagccggcagttggcctgggggcaaccgcatctgttggcgccggtgatgttctgaaaatgggcgtaggcggtggtgcatctaaagctgcgcagacgctgagcgagtactacatcaaaagggccgagcagtatcacccggtcattccgattggtgccggtaacgaagtgaccgtcgtgttccaggatggattccagctgaaaacgattgatgaactggaagcggaaaagaacgggcaacagcaggctcagaatcaggaggcggagccggcaccgcaggctgatgcacatcgtcagtcaggcggcggtatgaacggattcaatactgacgagatgctgaagaagctgggcaaacttgatccgcgtgagttctctccgggcgcagcgccgcagggggaaaataatggctaa

SEQ ID NO: 233459 - DNA, 315 bp, Klebsiella pneumoniae; identical to SEQ ID NO: 39349

SEQ ID NO: 233460 - DNA, 567 bp, Klebsiella pneumoniae
atggaacatggtgccagacaaaataccacccgcgttatcgctgtgggatttatcagtctggggacactcctgaccctcagtcttgcgaccaatattatccagggcataaataattaccgtcttcagacagaacagaaagtagctgtgacaccgatgttattcagtgctccctttgcggtgtctcagaaccaggctgacgcctcttatattgagcagctgggcctgtcctttattgccctgcgtctgaatgtcacgccggaaacggttgatgcccagcatcagcagctactccggtatgtattacccgcctcgcagaacagcctcaaggtccagctggctgaagatgcgaaacgcattaaagacaataacgttaatgccaccttttatatgacgtcgatccgtgcctggccggcagagaaccgcgtggatatccggggtgaactgaaaacgtggattggggattccaaaccctacagtgaaattaaaagttatgtcattcagttcagtcgtgtcgatggtgtcagctggctggcgcgttttggagaaataaataatgaaaaaaattaa

SEQ ID NO: 233461 - DNA, 240 bp, Klebsiella pneumoniae
atgcgaaagattcgttttccggatttagatatcaccgggatgtgggtgctggccgtgggcgtgtttttccacctgatagcccggcttgtcagaaagcagcctgagctggccgtccaggccggggaaatcttcgggctgggaatggtggtgttcgggggataccgcattcttaacgccctgattgctgaagccgaaaaagaggagaaagcttgtgaaaagcagcctgaagaacatcgctaa

SEQ ID NO: 233462 - DNA, 492 bp, Klebsiella pneumoniae
gtggcccgccgggagctggcgcaggaatgtgacaacctgaccgaagtgctggcctttgaacgtgaccagttgaaagccacctgcaacagcaccgcgcgtgcattccgccaggcgcatcatgctgtgctgagtaaatacgctgaggaagagcttaaccgcgcgctgaatgacaccctcgggccactggtccgggcgatggtgctgaaagcggatgtgatggcaaacccgctcgccaacaccatcggccatcaggggtacaccgagccggagaaagaggtcatgcatcaggtggtgaccttcctgaccgggaaagtgagcgccttctccgtcacgccagccgatgagccggtgctttccctgaccggcttcccggccgtcgcgcttgcgcacatggaccacgacgccgccagcacgcccggcgagcgtaaggtctggcaggagaaaatgcgtcagcgcgaggctgacctgaaagcgcgggggctgctgccatga

SEQ ID NO: 233463 - DNA, 459 bp, Klebsiella pneumoniae
gtgctggagcagggcggggacgccccggtgtacgggccgaacctgcgcgcctcctgccggcgcatggaagccgcgggctggctgcgcaccctgcgcgccccgaacctgcagctggccgtcgagctgacggaggccggtcgctgcactgcagaaccgctcttccaggaagcacgcgaggctgaaacggcacgaaaacgactgacagacgtccggcgtctgccgttacgccagacggctgccggtgacgcggtggagctgcagctggatgacggccattacacgatcagggaagcggcctacgtgatccgtctggacggtaccacctgcctgcagctgacggatgccggcggcatacgccggataaaagagggcgatcccctgcaggtggccagctggtatcaggcctgttttgatgcaggcctgccggtcaccgtccaggtgaatgagagccgggactga

SEQ ID NO: 233464 - DNA, 213 bp, Klebsiella pneumoniae; identical to SEQ ID NO: 230494

SEQ ID NO: 233465 - DNA, 1410 bp, Klebsiella pneumoniae
gtggagcgaaggagcggggccaagggaaacgcggaacagccacacatgcgccggacgcagagccgggaaagtatgtcacagaggctgtcacgcgtgcgggaagctgcgaagcagcggaagaaagaacggtttaccgcattgttccacctcctgacagcagaggcactggagaacgcattcctctccctgagcaggaaagcggctgccggagttgatggtgtcaggtggaaggactacgccgaaaacctgaaggtcaacatagcagatctgcaccggaggcttcatcagggtagttacagggctcagcccggcaggcggcactacatcccgaaagcggatggaaaacagcgcccgctcggcatcgcctcactggaggacaaaatcgtccagtatgcgctggttaagatcctgaatgcagtctacgaaaatgactttatggggttttcatacgggttcagacccgggcgaagccagcacaatgcgctggacgcactggccacagggctggttcggaccaatgtaaactgggtactggatgccgatattagtcagttcttcgacaaggtaagccatgaatggctaatcaggttcatagaacacagaatcggcgaccagagggtaatcaggctcatacgaaagtggctcacagccgggacctcagaggaaggagaatggcgggcatcggaggaaggcaccccacagggtgcggttatctcgccgctgctggcaaacatctacctccactatgtcttcgatctgtgggcgcatcagtggcgacgccgccatgccacaggcaatgtggtcatggtcagatacgcagatgacatagtcatcgggttcgacaagcgaatcgacgctcaatgctttcgtatagccatgcagcgcagactgaaggagttcggactcacggtacatccgaagaaaacccgactgatggagttcggccgcttcgcagccgaaaaccgcgccagcaggggaaaaggtaaaccagaaacgttcaacttcctcgggttcacgcatatcagtgggaaagaccgtagtggcaggttcatgctgatacgaaagacacgccgggacaggatgacggcgacactgaaagcgatcaaggacggactacgaaagcgctggcattactcaatccccgaacagggaaaatggctcaggagagtggttcagggatacctgaactaccactcagtcccgggcaactatcccatgatgcggaagttcaggatatacgtaacagacctctggcgacgggcgctgaggcgcaggagccagcaggatgatacgacatggacgaaagcaaacagactggcagccgtatggctgccgaaggttcgggttctgcatccatggcctgtggagcggttcaccgccagacacccaaggcaggagcccggtgcgtga

SEQ ID NO: 233466 - DNA, 570 bp, Klebsiella pneumoniae
atggcaaagctcaccgacaaacaagagctgtttgcccgtgagtacctgaaagatttaaatgctactcaggcggctatcagggcgggctatagcgaaaagaccgcccgctcccaggctaatcgcctattgacaaatgttgacatcgaaaatcgcatagctgagctgaaggctgttcgcaatgaagccgttggcatagatgcatcctacgtactgaagcgcctggtcgagatagaccagatggatgtgctcgacatcatgactgatgacatgagtctgaagccggtctcagaatggcctgcgtcatggcggcgctatctcagtgggtttgaccttgcagagatgttcgaaggccgtggtgatgaccgtgaaatggtcggcatcctgaagaagataaagtggcctgacaaggtgaaaaaccttgaattgctaggcaagcacgtcgatgttcaggcattcaaagaaagcgtgaagacagagcagaccggcacattgcaggttgtcagctattcacctggcgactacgcagcagctcaaaaggcgcttgaggaaaaactaaccgacctggactaa

SEQ ID NO: 233467 - DNA, 216 bp, Klebsiella pneumoniae
atggctaagagtttgattgatcactacgtcgtgaatatctatccggtgtcagatggctcgcaacccctctgtatttccattaccacccccgttaagccgataattgaagatgggttcattcattgtcactttgacgacgatggagtggataagcgagagggattcaacctcaaaggaatctctcgttacaccatcgttacagtaatggcggaataa

SEQ ID NO: 233468 - DNA, 471 bp, Klebsiella pneumoniae
atgaacatcgaaacagtaaacgaactcatcacctccctggagagtggaggagagctgtcaatcagagagcagaagttcctgaagctggcgaaagcgtttaagcagctggcgtcggagaatgtggcgctgaagtcgtttggcgacaagctgaatgatatgcataacgcactgaatggagaagggacaggtattcaagggcgtgcagaagtagcttgccagcaggtcgcactggaagcagcaatggaagagttcgacgctattgaaacccccgccaccgacgcggtgctaactaaattacgcaatgaggctggtgctcgtgcagtagagctatttgcgaaaactcttggtagcccctataggtttcgagatgagcaatgttatgaagacggattcacaagagccattgaaattgtccggtttgctcaggctccgctgttcgccaggcagctgcgcgaggggaccgacaaatga

SEQ ID NO: 233469 - DNA, 423 bp, Klebsiella pneumoniae; identical to SEQ ID NO: 25058

SEQ ID NO: 233470 - DNA, 1110 bp, Klebsiella pneumoniae
atgatcaatttcaagcctaaaattccggcgatgcttggggctctggcggttcttaccgctggtgctgctcatgcagagctgctggaatacacctttaaggctccagatggtacgcaacggtctctgactccgaatgccaactatgccaacccaacgggcaatatctcgtttgccttgagtgccggtatcgaccgaaaggtaaagatttcggtgcttcggtcggatggaacagtggtttcgacagcgaccagccaccttcttggggctactgatcgcatcacagtgggtggaaaatcctactatggtgcggaacttcaactaccagctccagttggtggggcatacactatcagggcggaaattcttgcctctgatggttctacagtacagacggatgaataccctcttactgtcgatgtgacgccgccaacctactcttcgcttgccccggtttatagtaactatgggcaggttactagcggtgatgtttggaaactgggtctaggtggctctgaggataatgcctttttgctgtcaggaatctctgatgagtcacccatcaaaggcgtcaaagcaaagctgtatcgtcaagacggttcactctacaaagatgtatccgtgaactacgatgacgctaacggacaagctagacagtctttccaatctggctttttcccagcctctgacttggatgaagtgtttacacttcagtttgagataagcgatagcgctggaaatagctatctttcacctcgtcaaaaagtgatgtttgatagcataaccaatgctccgtctgcaccttttggtgtttatgacccttcaagtacaaacaacttaggccctggattaaccggatttgttgcttacactgagggcatgacagttaaaactaacccaatcaagttagcttggcgtgttccgcgtgataactggcatgagtatagagaaggtgggataaatatgaccaatgccttgggagagatgtccaaggtaggagaagatgccagctatgtttatctcgtcacaaccgcaccttatggcaataccgacggcaattattggcgttgggtgaacttcggccagtggggggggaggcggtattgcttataa

SEQ ID NO: 233471 - DNA, 627 bp, Klebsiella pneumoniae
atgaaagttggtggatgggacattaatcatgagaatatacttaaaataattaagtctattccatatgttggtgcaatttttatcattgccaacttttatgctaattctggagttttatcagacaggaagcgaattgcaaatttcaaaaattgggtgcggagggtgctttctggtgttttatttacttttgttttaagtttgttgattgtgacatttttcagagatgggctttacaatcccaattcaaacactgcaggtctcgacgcaacccttgttgctttatccatatttccgagcatattaggttttggcattggtgtgtttgttgttgtttttgcccttccgaatcaattcattgagaaaataaatcttatcaaacataacggtaaaaataaaacttttggcgcatcgttaatggttgtcgatatggcttatcctctaatggtatatgctgttgtcctgatgggtgagttttttttgaaactattccaggttgggtttattacacatgtattgagtatctttttattattatatggaatgctgatgacttttgatttaatatctatgattttcatgacagcgtatgcgcttttagctacgcaagcatcaagaaaccctaaatag

SEQ ID NO: 233472 - DNA, 936 bp, Klebsiella pneumoniae
atggctacttacaaatattataatatacagatgctacctctaaccaatagtaaaaaaaatattggtaaagagggttatattaaattattccagcatctgggagacaaacttcgcaaagttttgtcatcggaaggtgatttaagaaatatcgctattccattgaggaatgatttcttttttgctccgtatgaaataaatgctagagaggacatggtttatggtcgttttttaaagtttgacaaggtagatgttgttagaaaaactattagcagagttcagacttatgcggctggttttggcgagtctagtaagatttatgagtataggtttgtatttgatcctgtattgcatatccttgctatcgaagatagcccttcattacctagcgcaagtgttttatataaggtgcttaatgaggtgtttaaagatgcgcgcaggaaattatatccatcctttcgcatgagtgttgatgaattaacatcttctgctagtctagataatgttttaaaagagtctaaaggatattattcctttaaaacagaaataactttctctaactctaatgattttattgaaggactagaagaattgctagagggggttgaggctgaaatgaaagataaagggattgataagctggagcataaagagtcatcagacaaagactcaataatgactgacgttagtacaatcgcgttggtttatgcaggtttatcatgcaagtttgggaatactgaaatatcttataaagacaaaagcaataagaaaaaagttttcaaaatggccgattatcctgtaagaaaacgtgtgtctgagtctatgaaaaaaagggcatcaattttagactattattatgatgtgaaaaacacaattaatgcagctaataatgagtccagaacaggaagtggattgctaaagaaaattagaaaaggatag

SEQ ID NO: 233473 - DNA, 135 bp, Klebsiella pneumoniae
atgaattttgaacctgagaattacagcaaatacacccagcgtcggttcgcagccttgttcgatgtgatctgctgggtgctgattgccgtagtaaccgttggtatctgcatgtttattgaatgggtgacagcatga

SEQ ID NO: 233474 - DNA, 225 bp, Klebsiella pneumoniae
atggaacacgtgaaaggaaaaatccagcagggggcagggaacgcctattttgcagggatgcagtggcgcggtattacacttggacacgccgatgctgcagcgcttaaccagtttgatatcgatatcagcaaagctcaggcacccgaagcacgcacctggttgcttcagaacaaagcagaattcatcgctctgatcctgggcattgaagtcgtaaaggtcgggtag

SEQ ID NO: 233475 - DNA, 252 bp, Klebsiella pneumoniae
atgcccaacattattctgagtgacacaagcgcgagcatcagcgaacttaaaaaaaacccgatggcgacggtcagtgccggcgacggcttcccggttgctattctgaaccgtaaccagcccgctttttactgtatcccggcagagctttacgagaagatgctcgatgccctagatgaccaggaactggcaaagctggttttagaacgcagtaaccagcagctgcttgacgtggacctggacacttatctatga

SEQ ID NO: 233476 - DNA, 276 bp, Klebsiella pneumoniae
atggaaattctggtaaccctgaccatcatctccgtaccggtgatctacattttatgggatagatattttcgaatatacccactctcctacttcggcatcgaaaacgttcagcgtgttgccaaatgggaaagtcctgaatggcgcgagcaggttttttctagaggcggtatgacaagccgcgagtggataaaaatcaatacccgtcagctagaggcgattatagccgagctgcaacgcagaaaaaaaataaatattcaccatcagataaaaatataa

SEQ ID NO: 233477 - DNA, 177 bp, Klebsiella pneumoniae
atgaaggttagaaagcacaaaaccccggttagtaggccggggttttgcaatctgtcgatactgtttggtggtcagcttcggcaaggtggtgaactgtcccttcttcatttatatttttatctgatggtgaatatttattttttttctgcgttgcagctcggctataatcgcctctag

SEQ ID NO: 233478 - DNA, 1068 bp, Klebsiella pneumoniae
atgacagatttaattaataagacttcaaatcaacactatatatctcaagtggaatttagatggaatagtataaaccctaaagccgaaaatgacctgatgaaagtatataggtttaagttgattaatgaaggttttttaaaactaagatgccccgaaaagaaacgaataaaatatctttcatgcggggacgatcttttctctctagctgtatttgatgatgacactcgccttaacatggagaaatattttggatactttgaagcagaatacaatgatagggtctcaaaattcctttcagatattgcaaccaaaatacaaaattctggagaaggactatataaagtagatggtagtgagtttatttctgatattaaattcttccagaagattaaattcttaaattttatcagaaaccctcataatataagaagggctttaaaattattcgattttgctagagattatattgttcatgggactggtggggattttcaattaattttaaatgccctcattaaaaacaaaaaaactcatcgtgattatgtttgtaggacatatggagtaacttcaagtgaatttgatagctggattaaactaattctattattcgtttattttgatgataatatgatgaaccctactttagatggtatgatggatgagttttttaaagcaaaagaattacatacagcggtgattattgcatattaccctgaggaaacacgaaagtcacctttaattcctgatgtgggatctgtagtaaatgatgatatgacatatgcttttaatatatctaggagttgctttattgtattggaacatactttattggaaagtgaatacagtagaaataatgctaagaaggtagcggatcttatgggtgtaccatttactgatgatttttttgaagtatacaaaaaacatctgcaaggagaaaaattaatttcaatttacattgatgatgacgaattactcagtggatataacagcaaatgtattgaggtgtcaaaagagttcgtttattccagctcggcagtggttcatggtgctgatgtcatcagagcgtga

SEQ ID NO: 233479 - DNA, 393 bp, Klebsiella pneumoniae
atgcacgacggcgaagaaaggaaaaaactttcactgtaccttcacccggaggattctgccgatcgtcttgctctggctgaaatcgaaactatcccccggaaaaaccggggggagttatatcgacaagctttgataaccggcctgattatgcatcaactcgatgagagaattcctgcgatcttaacagcattgttcaccagaaagctgaatacagatgaggtcattagtcagatcgcgcagattacaggctggaaaccttctgttgctgatttaaaagacgtactggcggcattggaagggaatcaggagacgtcttctttcaagcccactggggatgacgtggaacaggcatgcctgaaagctgctcgggctaagatgaaaaatctgatgtga

SEQ ID NO: 233480 - DNA, 1023 bp, Klebsiella pneumoniae
atggacgctcaggactatgggaaacaggtcaacttcgcggacggcccggactatgggaaacaggtcaacttcgcggatggccgggagtgtgggaaacgggtcaactccgcggacggcccggactatgggaaacaggtcaactttgcagacgaccgggactgtgggaaacaggtcaactccgcggacggcccggactatgggaaacaggtcaactttgcagacgaccgggactgtgggaaacaggtcaactccgcggacggccaagactgtgggaaacaggtcaactttgcagatgaccgggactgtgggaaacaggtcaactccgcggacggccaagactgtgggaaacaggtcaactttgcagatgaccgggactgtgggaaacaggtcaactccgcggacggccaagactgtgggaaacaggtcaactttgcagacggccgggactgcgggaaacaggtcaactttgcagacgaccgggactgtgggaaacaggtcaactccgcggacggcccggactatgggaaacaggtcaacattgcagacgaccgggactgtgggaaacaggtcaacttcgcggacggcccggactatgggaaacaggtcaactccgcggacggcgcgtactgtgggaaacaggtcaactttgcagacgtccgggactgtgggaaacaggtcaactacgcggacagccgggattgcgggaaacaggtcaagttaggcaagcactatgggaaatacagcaagtttagtatccccccatatgtcagcaacaaactaaggggggaggaaataataaatacaggttattgttttttatcaagaaaattaaacagcaagcgaccatcttcttcagtggtatatgttacctttaatggcgtcttctcattaattttcttcagcgcaggttccaggaaggtacgcttcatttcagcaatattgtttttctgcgaggcagggagcataaacctttcacataaccagtcatgtgtggtgatccagacaccagtactccggaactga

SEQ ID NO: 233481 - DNA, 711 bp, Klebsiella pneumoniae
atggctgactggtttattgcgaccgaaggcgtgaaggtggtgaaagacagcgccagtctgtggccgcagatatttactgccggtgctgcattcggtggtgtgtggttcgggcaatggctgataacgcagcgggaagcaaaagcgaccgcaggtaaacgtgatgaagagtgtctatatatttccacggagctggtttttttgctggagcagtttgccgaaggttgtgcaaggatagcgacagacactgggcataccgatgcgcagggttttacccgctcgaatgaaagcactcctgaaattgacctctcggtggtatccggggactggcgggttctgcctccacgtctgatgtatgccattcgtgaaataccgatgctgcagaaaggagctgacagactgatactggctactgaagagcacgatgatccacctgattacttcaggacattcggagaacgcaggtatcagtacacccggctggggctcagggcgataattcaggcgcgtcgtctgagaaaaaatgctggttttcctgcaacccgcctcgatgccactgaatggtctgcccagcccgtgctctggagtgtgtggcggctggagcgtaacagacgttcggttcaggcaaggctgcggcttcagaccattgcacagatgaatattgctcttcagcagagtattaaaaataacggtcagtccgggggaagtcagtga

SEQ ID NO: 233482 - DNA, 321 bp, Klebsiella pneumoniae
atgctaattgatgacattctagccaacctggttagccataatataaccagtttctggttgttccagacaaatgatccttatggcacagggatgtttgttctgctggactcaaatggagctgaactggcatggcggtggctaccagatggccccaaagggtggcgtactgaagaatcgttgctcgatgaattttctaaactacctgaagatacaatcgaatttgatttcacagatgggctagaccatgtgctagctacatttggcgcggtggacgcgtcgaatggagtccctcctccacctcgaccgccgtggttaagctaa

SEQ ID NO: 233483 - DNA, 780 bp, Klebsiella pneumoniae
gtgatcgccgaagtatcgactcaactatcagaggtagttggcgtcatcgagcgccatctcgaaccgacgttgctggccgtacatttgtacggctccgcagtggatggcggcctgaagccacacagtgatattgatttgctggttacggtgaccgtaaggcttgatgaaacaacgcggcgagctttgatcaacgaccttttggaaacttcggcttcccctggagagagcgagattctccgcgctgtagaagtcaccattgttgtgcacgacgacatcattccgtggcgttatccagctaagcgcgaactgcaatttggagaatggcagcgcaatgacattcttgcaggtatcttcgagccagccacgatcgacattgatctggctatcttgctgacaaaagcaagagaacatagcgttgccttggtaggtccagcggcggaggaactctttgatccggttcctgaacaggatctatttgaggcgctaaatgaaaccttaacgctatggaactcgccgcccgactgggctggcgatgagcgaaatgtagtgcttacgttgtcccgcatttggtacagcgcaataaccggcaaaatcgcgccgaaggatgtcgctgccgactgggcaataaaacgcctacctgcccagtatcagcccgtcttacttgaagctaagcaagcttatctgggacaaaaagaagatcacttggcctcacgcgcagatcacttggaagaatttattcgctttgtgaaaggcgagatcatcaagtcagttggtaaatga

SEQ ID NO: 233484 - DNA, 501 bp, Klebsiella pneumoniae; identical to SEQ ID NO: 83644

SEQ ID NO: 233485 - DNA, 1095 bp, Klebsiella pneumoniae
atgataagtttatcaccaccgactatttgcaacagtgccaaacagaattacctccgggcagaaacgctggtcagcgccaatgcccgcctggttgattttcagtccacactggagcttgctggccgctggggtggtggcgaagtggcttcagctgatggcatgcgctttgtcacgccggtgaaaaccgtcaattcaggacctaacagaaaatattttggttccggacgtggcatcacctggtacaacttcgtctctgatcagtactctggattccacggcatcgttgtccccggcacattacgagattccatttttgtgctggaaggccttctggagcagcagacagggctgaatccggttgggatcatgacagacacagccggtaccagcgatattatttttggcctcatctggctgctgggataccagttttccccccggcttgccgatgccggtgaagcggtattctggcgagtggataaatcggcaaattacggtgcactggacgaactggcacgtggttgtgccgatctgtcgaaagccgaggatcagtgggatgagatgatgcgaaccgccggttcgctgaaactgggcaccattcatgcttcagaactcattcgctctttgctgaaaagctcgcgcccatcagggctggcacaggcgatcatggaagtggggcgcgtcaacaagacgctgtatcttcttaattatattgatgatgaggattatcgtcggcggatcctgacgcagctaaaccggggggaaggccgccatgctgtggcgagggcgatctgctacgggcagcgcggtgagatcagaaagcgctatcgtgaaggtcaggaagatcagctgggggcactgggcctggtcactaacgcagtggtactgcggaacacactttatatgcaggaagccctgagctggatacgcagtaatggagaagaaatcggggttgaagatatcgcccggttgtccccactgatgcacgggcatatcaatatgctggggcattatacgtttacgctaccggaggatattttgaagggggaactgagagaactaaatttcaatttaaacaatgaattaacttcttag

SEQ ID NO: 233486 - DNA, 477 bp, Klebsiella pneumoniae; identical to SEQ ID NO: 83457

SEQ ID NO: 233487 - DNA, 351 bp, Klebsiella pneumoniae; identical to SEQ ID NO: 188812

SEQ ID NO: 233488 - DNA, 312 bp, Klebsiella pneumoniae
atgaaaatagtgattgttggtggtgttgccggcggggcatccgctgcagccagagctcgtcggttatcagaggatgtcagtattgttgtgtttgaacggggaagcgatgtctctttcgccaactgtggattaccttatcatataggcggaaaaattcctttaaggcagtcactgattctgaaaaccccggaggattttaaattctacgtaggatcaatgagttacatagcagtgcattgcgaaactttgctgacgttgaatggtcgtctttgcaaccactggcagaaaatggatagccgtagattgcgttga

SEQ ID NO: 233489 - DNA, 213 bp, Klebsiella pneumoniae; identical to SEQ ID NO: 183404

SEQ ID NO: 233490 - DNA, 267 bp, Klebsiella pneumoniae; identical to SEQ ID NO: 215497

SEQ ID NO: 233491 - DNA, 294 bp, Klebsiella pneumoniae
atgtttgaagcttaccttggcaatccgaagcgaaacattaaaaacgctcatatcctcgaaaaatatcaagcagacattgacgcgttatccacaatgttttctgaggatgatttgcttagtctgatgactcaggctggccctggaaatgcagtgtttatgaaatccgcgcgtggggtactttatgttcttccctcaagtggtgttaattctaatcaaatcaatttcttccaggacacttcgcattggtataaatggcgggaattgcaacagcaggagttccacagggctgggtaa

SEQ ID NO: 233492 - DNA, 510 bp, Klebsiella pneumoniae
atgtttttcaaaattgttagaaactttaaagccaagattggaccgttcttattaaccctgtttttggctccaggttatgttcatgccaatacgtgggaaataaatgtcacaagaaaagatagtaatttatatcaaattactgggaaggattcttttgttaatactaaatattgttatgtttatgcttattctgaagacgcatatctcagggttgatggctatgataaaaaaataatttttacagatagcaaggattcatgtgatgtagataatgtatttagcatggttaatattgactcaggaaagtatgaggtagaggtttctaaaaaagaagataactggtatgaggtttatggtacagataatatgataaaaacatcaatgtgccttagtctggctctcaatgaaaaggctattttatccatggatggttatagtgcaggagagttgatttttgatgacggagatagctgtaatgtagaaggggtctactctcctgttcgtttgtga

SEQ ID NO: 233493 - DNA, 282 bp, Klebsiella pneumoniae
atgcaccagttccgcagcaggcatattacgaagagcattaatcagccggatggcatcctgtggggaaccccaggcgagaataccgataccgaccagcatcactgccggcgtatacaacagcccccggctgataacccgtccggtcaggcctgtaagctcccacctttgctggcgaaacacctcatcgtcccggaagatttcccattccagccgggccttttcatggcgcggcacctcggccaccacctgattaccgtcgcgaaggcactgttgcaaagttag

SEQ ID NO: 233494 - DNA, 1449 bp, Klebsiella pneumoniae; identical to SEQ ID NO: 110160

SEQ ID NO: 233495 - DNA, 1032 bp, Klebsiella pneumoniae
atgactgacgaaacgactggatatgtatatatattagaggtttctgatattgacttacctgtatgtaaaattggaatgacgaccagagatccaacctcccgatgtgatgagataaataagagctcaacaggtgattttatttgggctatttctcactctatttttgttagtgattgtaaaaaactagaacgattaattcacgataagttaagtcccttgcggcaaaaaagaagagagttttttaatttacgcgcagatgatgcatacagagcagtaatgtcaatttttgaatctcaggatgagataaaaatgatgattgagttggagtcaaaatccttatcaataattaacccggaccataaagttaaaaagaataacagatatctctccaaacatggttctgatgagtatgcagagatattacagtctttttgcgaagttctgggtgtgaaaggaagggcttttggccagctcaataaaccattttttggtatgagcgatggaaatgaaggcgtccaatggaatatttctgtctgtacgcaaagtaataatatccgtatgggtgttaatcttgaaggtataaaatacaaagattggcctatagctaagcttattaaatcagagttggcagtccctgggttgctaagtgtaatacaaaaattagattctgaagacgaaattaacatgactttttatcgggatgcctggcaggtggtttctagacctgaaattagagagaaatatataggcggcaaggaatttaacctcaatgagctgactcatggggaatgggaacgtattttaaatgaagctttaaattgcttggataaagaacgtgattataaagggagaaatatgcaggatgttacgatggtaaacaaaaatggtagtgttcttgttcgtaccatgccagtttctcctcatttaacaatatggtctccattaataattaacgataatattgatgatgcaatccgaaataagtttaatcaattgattcatattcatcgttggatgatgcagttaagttga

SEQ ID NO: 233496 - DNA, 3009 bp, Klebsiella pneumoniae; identical to SEQ ID NO: 128917

SEQ ID NO: 233497 - DNA, 570 bp, Klebsiella pneumoniae
atggcattattaggatatgcaagagtatcaaccagccatcagaaactgacgagccagattactgaactcaaaacagcgggagtgagggatgatcgtgtatttactgacatgatgtcaggagcaactgatgagcgtgcagggctacagagactccttgccagagcggagaaagatgacatcatcctctgtactaaaatggatcgtctaggacgtaataccgctgatatgattcgtattgtggatacttgctataaaaaaggcatcgctatccgatttctagagaatggtcttagtactgaaggcacaatgggaaaaatggttatccagatactagcagctgttgccgaggcggaacgagaaaggatcttggagcgaactaacgatgggcggaagaccgctatgattaagggggtcaaattcggaagaaagcctcacaagaaggctgaattagctaatgaattgattaataaggacgtacaagttaaggaagtaatggaaaaaacgggtatatcaagggcgacctattttaggctgaaaagaaaaacagctattaactctaacgaaggatga

SEQ ID NO: 233498 - DNA, 1392 bp, Klebsiella pneumoniae
gtgagtcaatacttaaagcttggagatgaccagtctccggttcagttggatccacacagcgaagttggtgcatttaaagttgttggacactgctcatgggcaaaaccaggagataaaatcactcctgattttttgcgtttaagaatagaaccttggttaactgctctttttcagtctgaacacctaaatatacttattggcgcgggacttagttcagcaatccaagagtcagcgacaggcacgaaacctcaaggcatgggatggattaatgatctcaaagtttgcaaggctgaaatagatagttatgtagctaaaacagctgaagcctcaggaagaggaagaggtaatattgaagaccaaatccgttcaattaatgagttaattaaaggattagagattttaactgcgcaaaatctcccacttccagaaccgcctcctggtgctctcccatatcgaaatttaaaaagtgagttagttgagttaaataatgagctaacaagatgtttgaaattattctcagattcagttagtaatggggaaaagttaattcgcgatgcaaaaaacgatttaaaaacacaaacgtttaattatttagtaagttttttgatgagtttttcaagtcgaacagcgacaagggatcgattacatattttcacgacgaattacgacaggataattgaagcaggagctgaaatagcaggtattcgactaattgacagatttgttggtactatagcgcctattttcagatcttcgcgactagaagtcgactatcattataatccaccgggtattcgtggtgaaccaagatatttggaaggtgtggcgcgctttactaaattacatggctcattggactggtatactaccgaaggagccataaggcgatttggattaccttttggtgcgagttcggtggaaccctttttacaagtggaggctgctggagcagcgaactatcatcaattaatgatttatccaaactcggttaaagaccgagaaacatcagaatacccttatgttgaactattcagagacttagcatctgcaacatgtcgtcctaatagtactttggtaacatatggttatagttttggagatgaacatctaaaccgtgttattattgacatgctgacaataccctcaacgcatatagtaataattgcctacggcgatccactcggtagaattatgcgctttgtaaacgaaagtggaagaaaagctcaaatatctttattacttggtgaccactttggagatatcaagaatttagtggatttttatcttcctaaagcagcgatagacagatcatcaattcgtatggcagaactattgaaatcaaggggtttatatcgtacaacaatttcaaataatagcgaggatgctgaatga

SEQ ID NO: 233499 - DNA, 2067 bp, Klebsiella pneumoniae; identical to SEQ ID NO: 128927

SEQ ID NO: 233500 - DNA, 621 bp, Klebsiella pneumoniae
atgcgtcagaatgcgctgctgcttgagcgtaaaccggcaatatcgccatcgaagcaggcgcatacagggaaagaggccgctggagaaagtaaccagcggtggtgctctgacggcttcgggttcagctgtgataatggcgaaaaactgcaggtcacgttcgccctggactgctgcgatcgtgaagcactgtacagggtggaaagtaatggtggatatgacagcgaaaccgtacagggcgtgatgctgggtgcggtggaacgacgcttcggcagcagcctgccgtcatcccccgttgagtggctgacgaataacggttcggcctaccggtctcacctgacgcgtcagttcgccagaatggtaggactagagcctggacatacggcgttacgtagcccggaaagcaacgggatggcagagagcttcgtcaaaactatgaaacgcgactacatcagtatcatgccgaaacccgatgggttaacagcggtagagaaccttgcagaatccttcgagcattataacgaatggcatccgcatagtgcaccgtggtatcgttcgccacgggaatacctgatgcggcaaaccagtaatgggttaagtgataaaaagtgtatggaaatatag

SEQ ID NO: 233501 - DNA, 1329 bp, Klebsiella pneumoniae
atgagtcactacaaaccgtatccagcctacaaggattccggcgttgagtggattgggctggtgccggagcattggaaggttgcgcagatcaagcgtatttccgccttgaatcccaagaaatcgaccctaagcaaggaaaaggattctctttgcacatttctcccaatggagaagctgagaaccaatgctataacacttgatgaaactcgtcctattcatgaggtgtatgacggatatagctatttctgcgatgacgatattctgatcgccaaggtaacgccttgcttcgagaatggaaacatagcggtagccaatggtctggttaacggcattgggtttggctctacagaaatcaatgtccttcgggtaaatggaaagggacataaccgatttctttactaccgtctgcaagaagagcagttcagaacaattgccaaatctgagatgagaggcactggaggcttaaagcgagttccaacggagctgtttgagtcatttactttcgggcttcccgacactgacgaacaagtcaccattgccgccaccctcgaccgcgaaaccgcccgtattgatgcgcttgtcgagaagaaaacccgctttatcgagctactgaaggaaaagcgccaggcgctgattacccatgctgtcaccaagggactagaccgcaacgccaagatgaaggactccggcattgagtggattgggcaggtgccagaggagtggttaaataggaaggtttttcatgctttccaagccattgggagtggaacaacgccaccggcaaaggagcatgaatggtatcagggaggaaccattccgtggataacaacaagtgagcttagagaaaacaccgtcgttaaaacaaagaagtgtgttacctcagatgccatgcagaaattctcagccttgaaaatttttcccgctggttcattagctattgccatgtatggtgcaacaattggtcgcctagggtttcttggaatcccagcaacaaccaaccaagcttgctgtgtgctgtctggtgaacgcgatttgaatatccagtttttgtattactggttgatggcattcagagccgatatcgtggctttcttctctgagggcgggggccagccgaatatcaaccaagaggtgatagccagccttagggtgccatccccagcccctgatgaacaagccaccattgtcgccaccctcgaccgcgaaaccgcccgcattgatgcactgattagcaaggcggaacaaagtatcaccctgctcaaagaacgccgcgccgcctttatcaccgccgctgtcaccggccagattgatttgcgaggaaaacaataa

SEQ ID NO: 233502 - DNA, 213 bp, Klebsiella pneumoniae
atgaacaagcgtggcaactgccaggataatgcggtggccgaattgttcttcagttcactgaaaaaagaacgcattagtaagagaatatacaaaaaccgggatctggcccgggcggatgtcttcgattacattaaagtgttctacaatcgggcccggcgccacagtcaccccggcggcgtcagtccggaggccttcgaacaggcctcgtcgtga

SEQ ID NO: 233503 - DNA, 780 bp, Klebsiella pneumoniae; identical to SEQ ID NO: 190413

SEQ ID NO: 233504 - DNA, 894 bp, Klebsiella pneumoniae
ttgaataacgcagtactcgaacttttcaacgaccgcttaccgcacaagccgtacttctcggatgatttacactttggtgtacgcattgcagggaaagaacgcgccattttggcgaaatacatccagttcaatcagcctcacgccatgttctggctgggattcgacgtcgatcgcgccggtgccgccatcgactggagcgatcgcaacgcgcccgcgcccacgctgaccatcaccaacccggaaaacggacacgcgcacctgctgtacgcgctggaaacctcgatacgcaccgcacctgacgggaaaatgaagccgctgcgctacgctgccgccgtggagaacgcgctgcgtaaaaaattagaggctgacgcggggtattcggggttaatctgcaaaaatccgaaccacggccactggaaaattgcggtgtggcagccagaactctacacactggactggctggctgactttctcgacctgaacgctgcgaacgacaaagaaatcgttgccgactacggcttaggccgtaactgcacgttgttcgacaaaacccgcaagtgggcataccgcgccatccgtcagggctggcctgagtatgagcagtggctgcaagcctgctatgagcgtgccagcgcctacaatctgcaatttgctgtgcctttggatgataaagaggtcaatgatattgcaaagagtatcgccaaatggactcttaaaagactcgacgagtctacttttaagcagtatgtattagatactcattcccctgagattcaatcagtaaggggaaagaggtcgaaaagaggcgcatcattatgttctgaaagaactttagagccttgggttgagcttggtattagtcgtagaaaatactactacgacaagaaaaaatga

SEQ ID NO: 233505 - DNA, 663 bp, Klebsiella pneumoniae
atggtggtcacagaccccccgtatgaatcgttagagaaacacaggaagataggtactacaacaaggcttaaggtgagtaaatcatctagcaatgaatggttcagtattttcccaaacgataggtttgaatcgttgctttctgaaattcatagggtgcttaaaaataataggcatttttatatattttgtgaccaagaaacaatgtttcttttaaaacccattggagagaaagtaggatttaaattttggaagcctatagtttgggataaaaaggctatcgggatgggctatcactacagagcgaagtatgagtttattctattttttgaaaagggtaaaagaaagctaaataatttagggataccagatatattagaaagtaaaagaattagaaatgggtacccaacggagaaacctgtcgagttgctggagctattgatacagcaaagtacagagcgtggagagcttgtgatagaccctttctttgggtccggctcagcactaaaagcagctctcaatcaggggcgtctttgcgctggtaatgatatatcagcatcggcacacgcttactttagagatacccatctccctgacgatctaaaatcagcagcactcactccagcgcttcccgttgagcaggctgcgagaatttgcaccaaataa

SEQ ID NO: 233506 - DNA, 486 bp, Klebsiella pneumoniae; identical to SEQ ID NO: 188300

SEQ ID NO: 233507 - DNA, 627 bp, Klebsiella pneumoniae
atggctgcaatatccaccggcaccattaccgacgcatactcggtgaagcccagtccaaagaagtctgcagaaacgatgttaaccaggttggacacgataagcggcaggctggctgtatcggcaataaacccggcagccatgacgaatgccagtgtcgtgcctttgctgaaccctaatgccagcagcatggcgatgactatcggcgtcagaataagtgccgcaccatcgttggcaaacagtgccgccaccgctgcaccaagcagaacgatatacgtaaagagcaaacggccacgaccgttaccccagcgcgaaacatgcaatgccgcccattcgaaaaagccggactcatcaagcagcaggctgataataatcacggcaataaaggtcgccgtcgcgttccagacgatattccacaccaccggaatatcgcccacatgcacaacgccagatatcagagccagtcccgcgcccagcattgcactccagccgatccctaatccctttggttgccagataaccaaaacaatggtcaggacaaaaatagcgcctgccagtaacataaaacctcctgacagggcgactttgtcgccctgtagatgtcaaaaaattaactcatcaactctctga

SEQ ID NO: 233508 - DNA, 486 bp, Klebsiella pneumoniae
atggacgcgctggccaccggtcgcaggatcaagtgcctgaccagtgtggacgacttcacgaaggagtgtctgacaatgaccatcgcattcgggatttcaggcgttcaggtcacgcgtattctggacagcattgcactgttccgaggctatccggcgacgataagaactgaccaggggccggagttcacttgccgcgcactggatcaatgggcttttgagcatggtgttgagttgcgcttaattcagccgggtaagccaacgcagaacggatttattgagagctttaacggacgatttcgcgatgaatgcctgaatgagcactggttcagcgatatcgttcacgcaaggaaaatcattaatgactggcggcaggattataacgagtgtcgtccacattcagcactgaattatcagacgccatcagagtttgcagcacggtggcgaaatggaaaatgtgaaggtaaacaaaccgaccttactaactga

SEQ ID NO: 233509 - DNA, 237 bp, Klebsiella pneumoniae; identical to SEQ ID NO: 25156

SEQ ID NO: 233510 - DNA, 492 bp, Klebsiella pneumoniae; identical to SEQ ID NO: 98250

SEQ ID NO: 233511 - DNA, 723 bp, Klebsiella pneumoniae
atggcaaaaatcgctaagaagctcactgacactgaaatcaaaagcacgaagccagccgataaagaaatcaacttgtttgacggtgatggtttgatcctgcgaatcgctcctctcacaaaaggagggaagaagaattggtatttcagatatgcggtcccagtgagtaagaaaagaaccaaaatgagccttgggacctatcctcaccttacactggcaagagccagaaccttacgagatgaatacctttccttgcttgccaatggcattgatccccaagtccataacagcaataaagctaatgccttaaagaatgctactgaacacactctccaagccgtggcaaggaaatggttagatgagaaggtaaagacctcaggtatctcacaagaccatgcagaagatatctggcgaagcctggagagaaatatctttccaggattgggtaatgttcctgtcaatgagatccgacccaaactcttaaagcaacaccttgaccctattgagcaacggggagtcctcgaaaccttacggcgaatcatttcccgattaaatgaaattttccgctatgcagcaacagaagaactcatagaattcaatcctgctgacaaccttggtcaacggttcagtaggcctaaaaaacagaatatgccagcattacccccttccgaactcccccgcttcctggttgctctaatcaatgctttgacctgcccccaggattag

SEQ ID NO: 233512 - DNA, 174 bp, Klebsiella pneumoniae; identical to SEQ ID NO: 121643

SEQ ID NO: 233513 - DNA, 498 bp, Klebsiella pneumoniae; identical to SEQ ID NO: 119724

SEQ ID NO: 233514 - DNA, 339 bp, Klebsiella pneumoniae
atggctaatactttcactaaccctgataagccgtgtattcattgcggctcacttatccgttatgtgtcgtccggtagctgtgtggactgttcaaagacacgtagacagccgcctaagcctaaaccacagattgcacgtgtaaccgcttcagcagccgttgcaccgtttcactctgaaggtggggataaccgaaataacatcattgtgaagctgtctgacaaggctcttagccgtcttgatgagattggttactcgttagttcagaaataccgtttggcaggttacacacaagaacgaatccgaatgattgccctgtcccatctgcttgaagccgcttaa

SEQ ID NO: 233515 - DNA, 144 bp, Klebsiella pneumoniae
atgtcgggtaagaaagaacgttcagtaatgaatttgttggataagacgcttgaccttcttaatcagctaagtgaaaaatatgatttgccacgtcagcagaccttagcggtattgcttaacaagaaaatgaaggaaatgaaataa

SEQ ID NO: 233516 - DNA, 138 bp, Klebsiella pneumoniae
atgaaacgcagaggtacagtagtacacattgcaccagcactaatgaaaaagctggaagaattatcagagatgtacggtttgagccgtcagaaaaccttagaaattatcctgaaagaggagttaaacaatgtcgggtaa

SEQ ID NO: 233517 - DNA, 1203 bp, Klebsiella pneumoniae
atgaaaagattcacacccgcatggcttgcggtttgtctggcatgcagtttctccacctcttctctggccgcggacgcgcttgcaacccgcgcgtttcagggcatgccggcggactttatcaaaggcgcggatatctccacgctgctggacgccgaaaagcacggggcgacgttctacgatcagaataatcagcgcaaggatccgatcgctattctgaaagagaacggcgtcaactatgtccgcctccgtctgtgggtggatccgcaatcggcgagcggcgaggactatggcggtgggaacaatgatctggccaccaccctggcgctggcgaaacgggcgaaagcccaggggatgaagctgttgcttgattttcactacagcgatttctggaccgatcccggcaagcagttcaagccgaaagcctgggaaaagctggattacccgcagctgaaaacggcgattcatgactatacccgcgataccatcgcccgctttaagcaggcgggcgtgctgccggatatggtgcagatcggcaacgaaatcaacggcggcatcctgtggccggaagggaaaagctgggggcagggcggcggagagttcgaccggctggctggcctgctgaacgcggctatcgctggcctgaaggagaacctgcgccagggcgagcaggtgaaaatcatgctgcatctggccgaagggaccaagaacgataccttccgctggtggtttgatgagatcgacaagcgccatgtaccgtatgacgtgattggtctgtcgatgtacacctactggaatggcccgatcagcgccctgaaggccaatatggatgacatcagcaaacgctataacaaagacgtcatcgtcgtcgaggcggcctatgcctataccttggccaactgcgataacgcggaaaatagtttccaggcgaaagaggaaaaggatgggggatatcccgccagcgtacaggggcaatataactatattcacgatttaatgcaggcggtggttgatgtgccagaccagcgtggcaaaggtattttctattgggagcctacatggattgccgtgccgggaaatacctgggccaccccggcggggatgaaatatatccacgacgagtggaaagagggtaatgcacgtgaaaatcaggcgctatttgattgccagggaaaagtattgccgtcggtaaaagtttttaattaa

SEQ ID NO: 233518 - DNA, 1308 bp, Klebsiella pneumoniae
gtgagcatccattccagcgaaaattttagcgacgcacgcgggcccgggcgccatgcatggtgcggcctgctgctggcaatcgtgccgggtttcggtcagttttatcatcgccagtggctgaaagggctggtcttcctggtgctgctgagcagctttctggggattttttatgatttcctgcgtgaggggttgtgggggttatataccctgggtgaagaggtaccgcgggataactctatcttcctgttagccgaggggattatcagcgtgctgatcgtcgctttcggcgtgctgatctattttctctcgctgcgggatgcgtggctcaacggcaaaaaacgcgatgaggggatcgccctcaacagcgtgcgtaagcagtaccagatgctgctgagcgacggctttccgtacctgatgatcaccccgggctttattctgctggtgtttgtggtgatctttccgattctgttcggtttcgccatcgccttcaccaactacaacctgtaccacaccccgccggcgaagctggtggactgggtggggctgaaaaactttattaatattttcaccctctccatctggcgctccactttcctggatgtgctgcagtggaccgtggtgtggacgctgctggcgaccaccctgcagtgtacggtgggcgtgctgctggcgattctggtgaaccaaaaagatctgcgctttaagccgctgatccgcaccatctttattttgccgtgggcggtgccggggtttgtcaccattctcgtttttgccggcatgttcaacgactccttcggggtcatcaacaacgcgatcctgtccttttttggcatcagtccgaaggcatggctcaccgatccgttctggaccaaaacggcgctgatcatgatgcagacctggcttggcttcccgtttgtctttgccatgaccaccggcgtgttgcaggcgatcccggacgatctgtatgaagcggcgacgatggacggcgccagcgcctttacccgtctgcgcaccatcaccctgccgctggtgctgtatgcgatcgcgccgatcatcatcacccagtacaccttcaactttaataacttcaatatcatttacctgttcaacaacggcggccctgcggtggcaggctctaacgccggcgggacggatattctggtgtcgtggatctataagctgacgatgtcttcgtcgcagtacgccatcgcggcgaccatcacgatcctgctgtcgatctttgtcgtcggcctggcgctgtggcagttccgcgccaccaaatccttcaaaaatgacgacatggcgtaa

SEQ ID NO: 233519 - DNA, 1029 bp, Klebsiella pneumoniae
atgaatggttcttttgaattactaaaaatgttaccctcatttcacgcaggaatcttggcaattatttcagctgtaattatctcttggtttttctatgcatatcctaaactcttagaatccaaaagaaatttatatgagctattatctacatcaaagaatgacttcttacctgaaatcaaaaaagacaatacttcagagccaattacagaactgacatttgatgatatttataatgcattaaattaccagaatttcatcccagaaaaccgtggaaactacggagagtctttaattaataactctcatagatacttgactttcatggccaacatcactaacaaaccaccatttatttcctggtggactgaaacaaaagaatcagaaaaatcaaacaattatgatttacaccatgacattacaaaccaaaaaatctctgtacttctggacgcatgtgatttaattttaagaacttatgaccacaaaggtgatgaactaaaaaagttattttcaaaggcagaagaagcacacaaagaaatcagaattaaacctttaattgaggctcataatgcgttattaaaaagattgaatgaggcagagaccaatctaaaagatgatttacctcagttttataaaatgagagatatgcagattgcatatagccttgaggacattaaaagagccgatagtgatgaggcaggattaaatcttatccctctttatgaaaccatagttcaaaggttttataacctaaaaaacaatactatccctaaaattgtcaattaccaagcagaaataaattatttagaagatattttaaaacaaaaaggaaatataaaaaacgcactgcaagtaatgttttttaatcttattgcaggggttgttttacctttttacctaatagcaatacaatcggaaaaaatacaatggaacaacacaatagtttgctggtttatttacatactaacaactattactgttgcaccgtacttagccgtatgctggaaagcaattaattttattaaaaaataa

SEQ ID NO: 233520 - DNA, 921 bp, Klebsiella pneumoniae
atgcacacccaacctttggtgaaaagaatgtttaaaatcgatggcgaaataaaagttcaaaatattcatcaaaaagaacctacacccacacgtacacttctcacactgaatatcgatagcattagcaagacattgctaaaatttgaattaaggaaaaatggtgatgttgcgatgtataaccaacatgccaaattttatagggagtctggaagcaagccaacagaatataatgaaataaaacaacaaagatactcctttcacatgagtaaagagagtaacaaaagaattaacttttttaagcaaacacttgaagttagcaatgataaaataatcaatacttacattgttacgcctgaaatcaaaaaaaaatctggattagttcatattctaagttgccgctcaccggatatgtcatcagacagatataatacaagaataaaaggaaaatgtagaactttaagtttgggtgaatgtgactcaaagagctcaaccttattttattcattatttatcggttcttctgatatgctgataccaaggaaaacagtatctgccaacacactgaattttgtcgtcgggaaatttattttttttgttacatgggcatacctcccaattccctctcattatacaggaaataaaatacatagccgtacaataaaaactgatacaggggaagtcttaggccataaagaaggtttaaatacatatggcgccataaaattaagcttttgttacttcaatgatcttatcgatgaatatgatcaaacactacactttcatgagaactttcctttaaacgctgtgaccaatctttacaagtctactggtttactaaaagatggaagaagatcaagcattgaaagaagtaagatttataaacgcatgtatgctgacggtagcttaattaaatttatttaa

SEQ ID NO: 233521 - DNA, 339 bp, Klebsiella pneumoniae
atgccatgtaacgtggtccgctggcactgctccgtcagcggcaatctcggtggcttccttacttcctacatcctgcctcatccattcacgggtggcttcaggcgtcagtaccagcggccggcggtcatgaatatcgaccagcccttgatcggccgcagcggtcacaatcaaaaatccctctgcttcatctccgcgctcgaaagggacgctaccaatagtcgccaggaagatgggcttgccgtctttacggtgaatgaagttaggctgtttcttgtcgccttcctttttccattcaaaccagccgtctgcaaaacaaattgctctcccgtgttgccatag

SEQ ID NO: 233522 - DNA, 144 bp, Klebsiella pneumoniae
atgctcaacgaagcgcgggcggatatggtgatgtctccgcacgtggcgctctttccggcggtggcgattttcgtgaccgtgctggcgtttaatctgctgggagatggcctgcgcgatgcgctggatccgaagttaaaggggtag

SEQ ID NO: 233523 - DNA, 375 bp, Klebsiella pneumoniae; identical to SEQ ID NO: 147010

SEQ ID NO: 233524 - DNA, 312 bp, Klebsiella pneumoniae; identical to SEQ ID NO: 147011

SEQ ID NO: 233525 - DNA, 240 bp, Klebsiella pneumoniae; identical to SEQ ID NO: 147012

SEQ ID NO: 233526 - DNA, 570 bp, Klebsiella pneumoniae; identical to SEQ ID NO: 147013

SEQ ID NO: 233527 - DNA, 2157 bp, Klebsiella pneumoniae; identical to SEQ ID NO: 147014

SEQ ID NO: 233528 - DNA, 669 bp, Klebsiella pneumoniae; identical to SEQ ID NO: 147015

SEQ ID NO: 233529 - DNA, 228 bp, Klebsiella pneumoniae; identical to SEQ ID NO: 147016

SEQ ID NO: 233530 - DNA, 3435 bp, Klebsiella pneumoniae
atgttgttggtctcaggcgttgagctttcctgcaatcatagtaatctgttactaattgtatcaatcgaaggcaggttgcttgtgaaaactccagttaacccacttttgcgatggctcaatgcgttttttagcagtcgttcattacccggagctgatgggagggcgctgtatgcttaccgttgtcatgatgcagagtatgaaagtttggctgctcttcttcgtgcccatgttccacgtaactaccccaaaaccatattcatttcttacagtgatgttttgttcagcatatacgccgctgagtttatccgccgtaaccatactgcaggacatccaagatgggacgttattttagaatcgattggctggaaggtgccttacgcacatcggcaaaagctggtaaatgatgggattcgttactggaaaagaaaggtgagaagtctgggtcaagcatcgggttatctgcatactctggcttgcgaaggcggtttgcccatccggatgattgaaaatgaaagtggctatttaataacctatttcaaacgagtttatcaggcactacgtgggcaatcgtcaaggcgtcctgcggaaataatcgcacaagaactgggcgacactattcctgcgacaatgcaaaatgaactcgtctatgaaatagctggtgaattttgcgagacacttcatacgttactcaatgagcatcccactcatggtcaggaccccgtttcctcactacgcaaacaatatcctgactggcatcttcaacttccgttggtactcccggaagagaatgcctcagagattgtaagacgattactttctcaatcttcagagccccgtatatcaagcaatgtgctggttgaaaggatatgggttgatgttgatgacagttggtattgcgatgcccggtttcgatttccggccacaatgcgtactgaacagttaatatccctgtttgaaagcaatattcagccggaacagacacgactcatcatttctgcaaaatggagaaatggtggagcccggttggcaatgctaagccgttatgaacagcaagattggcgagtagagttattacccttcgctatgcaaaaactctctggggcagatgcgatggccgaaatatcgttgtcgctccatgaagggccgattctgctaggtcacgtaattcccaaagggggttatgagcttaccgaagatttaccatgggtttttgaagcgatgaatgagagcgagtcgcagttaaaacttgtcggcatgggctctgttagttccaggcaaaactctctttttatttcgctaccgacaaatagtcatttggatattagtggagaaggtgagtttgatatcccgaggttgctgaaaaatagtgaacgtagcttaactaaaataagcggagtattcagcgttgttttacatgatggcgcagtttgtacgattcgcacgcagcaactttatgattctgcgattgagtattatataaaaccgacagagatcgatctggtaaaatctgattatcctgtccatcgtgcctggccaaagatcggctggaaaaaggatatgcatcatggcattgtcccagagaacgaacttttttggcgatccattcgttcaggtaacaactcctggttttctgtcgcatcagtaatgccgaaagggcagatagaagtcaggcgaatagtcaatggtgaggttttatttagcggtaaagttgtgattttgccagcagatttcgatattcaaattattcccgagactgctcagaaaggagttgttgtactctctggtataacggatgcaagggttgataaatattcaaacaatgaaaaagtaacacttaaatcagattatttgcaaaacgagtgtgttattgattgtaattcatcacagatactagagagcaccatcaatttacgagtatcctggaaagatggttctaatcttaaattgttattacctaagcccgttagcggtggacggtttgtaagtaatgatggttctgttcattttgacggtgttgcatctatagcacatttgcatggcgtggacgctgagctgttaacaatatcttgtgccgggaaaggatatcttaatatcgagttgttggatgaaaacccgatgtctgaaaaatttcattatttacatgcggatattccattgttatctggccgtaatgaaaaattgcaacagatttcactttatgagaattataatctgctgaacgccatgcttgtatgtgcatggaaaaatgatagtacattacgtgttgatttttactctgacagatttggtaaggacaaaacaacactcaatattaaacgctacgatggccgttttattgagggtgatgaaagattgctggttgatataaaagattctattgtttttccttaccataaaatagacgacatggttgttgaagccatttctcttaatactcctgacttatgcacagtcctgctgaaaaaagatgagtctggttatgatttctcgacgttgaataatcaaggtggcccatggttaattgtgggtaaaattgatggtgcaattcgtattgcaccagtgattaaatggatgctacctacattacagacagatgatttatttctaaatgctatatgcaacgcatcgccagaacaacgcaaggaatattgtaatgcgctgtttttggaaatgaaaaataatcctttgcaaaactcttgttattttttggttgagtacattaaaaaatataagttgaataatagcttgcctttgcaggaactggatttatttagagaaatttcgagtaattattgcgtggttgttcagttgttaatatcatcatgtctttctggggatagtgatgctatttatgatatacaggaggaattacccttctcatggggatggattcctgtttcaatatggaaagatgtctttgaacagtgttggtattctctggaaaaacagattaatgataaggcatttgcattaaatatactacagccatttattgcatttataaatcatcaagcgcatatcgatcgtcgattagttcccatcgctaatatgttgcttacacatagtgagatattacctgcaggttgcactgtattgccatctgtaagccgcgagcagtttaatgatgccaaacagatgttattaagaaacccagatagttttggacgtgtcagcattttttctaaagagctttgggatagtgctattactccagaccttaaatctgtttttaataaattttggatcgaaaacacatatcacactcgttttgaaaaacgttttaatttgatgttagtcgcggcgctgctttcccaaagaaacaataaacttatgcatcagctaactgcactttttgaatttcactatcagcaagccccgcagcaattgggggttatctatcagtattattttgaacaagcaggagtatgtcattga

SEQ ID NO: 233531 - DNA, 888 bp, Klebsiella pneumoniae
atgcgtgatctgatccttcaactcagcaaaagttcgatttattcaacaaagccgctaaaaactctccaaaatgtgaaaggtccggttgagttagctgtgttactggaagggttacgtaaaagtgcaaaacttacagactctgaattcaccgctttagcagaagtaataaacgacttttcttatttagctaaatctgtcgatgccagcgggcaaaacgtcattgatactatgaacacgatggttaacagtggtctggcgcttaatagccaacagcagaaatctatcgataatctctcgcagatgtcgattgtattcgataacgccaggaattcattaggtgatcaatttgccgcttcattcagcaaagggcttgaagatcttggaattaacacacagaatctttcctctgaaatgggttcattggtgcctttggtgaaggatttaggaacgggaaccgctcagactgttaaaggttttaaagatcttcttgatgtattatccattatcacagaatggaagaatagacttttaggtgagaaaccagaagagcgaaatatctttcagcaaggtgcaacatttgttggagaatcactgttgccacctggtgttttagatatggcaagccggattaaaaatatagttagtcctggttctgattcttctgttgcatcacaggtgcaaaatggtggttggtataatcaaattatgccagcaacgccatctatgcagtaccaacccgtcattccggatttaaaggctgattttaacctcacagtgaatccatctccagaatttggaatgatggttgaggctgtagcaaataagcgcatagaatgggcttttgatgaccagaatttccaaattaatcaaagtattcttggtcaataa

SEQ ID NO: 233532 - DNA, 897 bp, Klebsiella pneumoniae
atgtcgcttaaaaacattgtatacattgattacgaaaaagtatattccttaagctctcaacttttcgaaggtattgttcaatctgccattgaacaacaagaatcgaccttatctaatgtcgatgctttagaagtaaagactgaaaaaaaatctagcagctcaagcgacacaagtaaattgtcaacagtagttaatccacatgattaccattaccttaaatttgagaaagagttgattcgactagatttacttagctcgatatcttcagatgatttttcagctgataaaattcaatcaggttcttttataaaaataactgccaacattgaaattatcgattttaataaattaaaagatacggcaaaagattttaccacgttagggtatgccatacattatgttaataaacatggagagattgagcaaatagaaaatcttcttcttgagaaaagtctcactcaaaataagaaaaaagatttaatgaatcttaaaaatgaaattttaaaaggaattgaaaaggattcagcgaaagagaaaaagaaattttttgataacttatcaaacgtattaagctacgcttatggtgatgaattagagatatctcaaacaattaataactacaaattcacatcgtttcttattcgtaatttcttcaagctttctccagaaatgcttgttaaattatactcacggaaaacaaagtccccatttactgtagttggcataattacgcaaagtcatactggtcaaaaaggcgaaacagaacgtgatgctatcgatataagaagcgctgcatggaatatgaatgatgctatggcaaatcttgagtcgactttttgcatgccgcatgaaaatgagtactttatagagccaatagctctttacaccgaaatttaa

SEQ ID NO: 233533 - DNA, 1983 bp, Klebsiella pneumoniae
gtgagagagagcgaaatcatcgttgataactttgccggcggcggcggggcgagtacgggcatcgagatggcgattgggcgcagcgttgatattgcgattaaccatgaccccaacgcagttgctatgcacacaacgaaccaccctgatacgttgcactattgcgaatctgtgtatgaggttcgccctaaggttgcgactgccggccgccgtgtcggactggcctggttctccccggattgccgccacttttccaaagcgaaaggggctaaaccagttgaaaaagcgattcgtgggcttgcttggattgttctacgttgggcgctggatgttggcccgcgggtaatgatgcttgagaacgttgaagagtttaaaacgtgggggccactactggcggcggaaatgcgtccagatcctgctcgcgctggcgaaacttttgaggcattcattggcatgcttaccacaggcatttcagcggatcatccggcgctggccgaatgctgcgaatttctgaatatttcgcttgatagtgaggatgcagcacggctggtaaaaggtttgggttacaccgttgagtatcgcgagatgcgcgcatgtgattatggtgcgccgaccatccgtaagcgattcttcatggtgatgcgttgcgatgggaagccgattgtatggccggaagccactcatggagatcctaaatcgcccgcggtgcaggcaggcaagctggcgccgtggcgcacagctgcagaatgcatcgactggtccatcccagccccgtcgatttttggccgcaaaaagccgctggcggaaaacacgctccggcgcattgcccggggaatccagcgctttgttatcgaaagcgcttcgccgttcatcgtgaagtgcaatcacaaaacgacacgcgggaattatgactgtttccgggggcaggaactggacgatccgctgcagacgattacgaaaacccacggctacgcaattgcggtacctcatctgacaaaattccgaactggagccaccgggcagccagtcaccgaaccggtaccgacggtgaccgctggcacgtcgaaacgccctggaggcaacggtcacgctttgggcatcgtagaagctgctctggctccgttcctggccggaaatggcggcagcgagtaccaggcgaaaccacggccgcttgataaacctgctcacaccatcttgaaagagtcccgctcctgcgttatcgctccggtcatcgcccggcagttcggtgccagcatcggccaccgcgccgatgaacccagcgcaactatcaccgcgggtggtggtggtaaatcgcaactggttgtaccgactctcattcaaatgggatacggagaacggctagggcaggcaccacgcgtacccggactggataagcctctgggaaccgttgttgctggtggcgggaaacatgctgtagttggtgcattcctagcaaaacactacggagggaattatcagggcgccggcgtggggctggatgagcctgcgcattcagtaacgactgtcgatcaccacgccttagtcgcttctcatctggtaaaactgcgcggcacctgtcgcgatggtcagcctacgagtgaaccaatgccgacagttacggccggcggtctgcatgtcggggaagtaaaaaccactctggcggttgacgactacgacgaacaccgcgcacagcaggcgctggcgtttctgcgtgaatactgcggcgaggaatgcaccgggatggtcgacatcgatgggataacgtaccgcatcatcgatatcggtatgcgcatgctgcagccacatgaactttaccgagctcagggtttcccggactggtacatcatcgaccgggactaccggggcgtgaagtattcgaaggacaagcaagttgcgcgatgcggaaatgccgttccgcccccgttcgctgaggcgctggttagggccaatctgccggaaatatgtcagacactggtagcagcttaa

SEQ ID NO: 233534 - DNA, 549 bp, Klebsiella pneumoniae; identical to SEQ ID NO: 207462

SEQ ID NO: 233535 - DNA, 141 bp, Klebsiella pneumoniae
atggcagttggcttgcactgctttgttgtgcgccagaatgtcgcgcttggtctgcatatccagcacgtcgatatcgtggtcggtcaagtagatgaccctcacccagttgcacgccgtatcaacgactaccggggcgggtga

SEQ ID NO: 233536 - DNA, 1467 bp, Klebsiella pneumoniae
atgaagggactgttgcggcatatcttcccgctgtcattacgggttcgcttcctgctggcgaccgccggggtggtgctggtgctctccctggcctacggcatggtggccctggtgggctatagcgttagcttcgataaaaccacctttcgcctgctgcgcggcgagagcaatctcttttatatgctggcgagatgggaaaacggcgctattgacgtcgatatcccggaaaacctgaatatggaaagcccgacggtgacccttatctacgatgagcagggcaaactgctgtgggcgcagcgtgatgttccctggctggcgaaacgcattcaaccggaatggctgaaacgcaatggcttccatgagattgaagccgatgtcgacagcagcagtatgctgttgcgcaataaccatgagattcaggaacagctggacgctatccgcgaacagggcgacgactctgagatgacccactcggtggcgatcaacctctacccggctaccagcaaaatgcctcagctcagcattgtggtggtcgacaccattccggtggagctcaagcgcagctatatggtgtggagctggtttgtctatgtgctggccgccaacctgctgctggtgatccccctgctgtgggtcgccgcctggtggagcctgcggcccattgagtcgctggccaaagaggtgcgcgaactggaggaacatcaccgcgaaaagctcaatcccaacaccactcgcgagctgacccggctggtcagcaacctcaaccgcctggttcgcagcgagcgcgaacgctatgacaaataccgcactaccctcaccgatctcactcacagtctgaaaacgccgctggcggtgatgcagagtacactgcgctcgctgcgcggcgagaagatcagcgtcgacgaggcggagccggtgatgctggagcagataagccgcatctcgcagcagattggttattacctgcatcgcgccagcatgcgcagcggcggcaccctcttgagccgggaattacacccgattgcccccctgcttgacagcctgacttccgctctcaacaaggtctatcagcgcaaaggggtcaatatctcgctcgacatctcgccggagatcacttttgtcggcgagcagaacgattttatggaagtgatgggtaacgttcttgataacgcctgtaagtattgcctggagttcgtggaagtttccgtgcgccagaccaccgacagccatctgcacatcctggtggaagacgatgggccggggatcccgcagagccagcgccgggccgttttcgaccgcggccagcgggctgataccctgcgtcccggccagggggtagggctctccgttgcgcgtgaaattgtcgaacaatatgatggagagatcatcgccggggaaagcctgctcggcggcgcctgcatggaggtggtgtttggccgccagcagatggaagataaacagagttaa

SEQ ID NO: 233537 - DNA, 1479 bp, Klebsiella pneumoniae
atggtcggctgcaacgggctcatcgccaccctggagcagctggaagagaagacctttctgcggcggatcccgctgcggacgctggcggacggccgcctggcgctgcgggtggtgcccggcacgctctgggatcgactgttgctgtctggagttcgcgctgagatatggatgcagccaggcgtcacccgggcccatctcgaccgctatgcggcgcgggcatacgacatcccgccggccgcgcggcagggcaagctggcgctggtgcttggcgccggcaatgtggcctcgattgcgccactggatgtgctacacaagctgtttattgaaaatcaggtctgcctgctgaagctcaacccggtgaatgattatctgcacgatctgctggcccaggccctggcgccgctgattgccatggatgcgctccgcatcgtcaccggcgacgcccgggcgggagcgtggctgactacccatcccgctgtcgatgagatccatatcactggctcccgcgacacccatgacgtcatcgtctggggcgagggtgagacggctcgccagcgtcgggccgccgggacgccgctgaacccgcgtcgggtgacctcggagctgggcggcgtcagccccaccattatcgtacccgggccgtggagcgaggcggacatcgcttttcaggcgcagcagctggcgacgcagaagatgaacaacggcgggtttaactgcgtggccagccaggtgctgatcctgcagcaaggctgggagcctgcgacggccttgctgaatcagctgtaccgactgatcgccgcgaatacccgcccggactactaccccggcgctgaaaaccggctgaccgactttcgcctgcgcgcccgtcagccgctggagatagcccgcggtgaggcgctgccgttgattgtggcgaataccgacgatgatcccgggttctgccagcacgaggtctttggcccggggctgtcggtcacccgtcttgaggccgatagtgcggaaagctttctgcgccaggcgatcggctatgccaatcagcggctgcagggcacgctgggggccaatattgtgatccacccgcgcacccgcaaagcgattggacgtaagcgttttaatgcgctgatcgccgagctgcgctacggcacggtggcgatcaactgctggagcggggtggccttcctgttagccccttgcccgtggggggcgtttcccggccacacgctcgacgatattcagagcgggcggggcaaggtgcataacagctttatgctggagaaaaccgagcgcacggtgattgaggcgccgtttcggccgtttccgcgtagtctttggcatggcgaactgacgctgatgcccctgccgccctggttcatcacccaccgggggcaggaagcggtggcgcagcggctggtggatttttaccatcggccgcgctggcgcaaattgccggcgctcctctggcgcgcgctgcggggctaa

SEQ ID NO: 233538 - DNA, 219 bp, Klebsiella pneumoniae
atgagccatgcgcgacccggtctgacgacctgctctcagtatgatgctgccctgtacgccttgtcggcggcgcgccagcgttgggcggaaacctcagtgaaccgtcgtctggcgctgctgcgccagatcaaggatgccctggctggtattgccccggcgtgggtggccgcggcggcggcggccaaagggctgccggcgggcgatccgctggcggggtag

SEQ ID NO: 233539 - DNA, 327 bp, Klebsiella pneumoniae
atgcaaaaagaacactttaaagcaaatactcaatataacgactacaaaggcactgttgcagcggacagggctgatcaagacagcttcagtgacttcctgagagctaaagggattctgaaagaaggtgagatagttaaaggcatttctttcttcagaactgggaatctctttgatgtagaggcatatataatggaacaaactggcgagttaagaagagaaaatgtccaaataactttggaagactttttcaatacattcaagcgcttttcaatcaaactctctcgtaatggagagtttgatgatcaagaaattgagttcaaagagtaa

SEQ ID NO: 233540 - DNA, 915 bp, Klebsiella pneumoniae
atgcttattcagaaaaaacgtattagaaatatcgataactacattaccgcatttgatggtagggatgtttttatcgcacatgcattacctggccagcagaagggagaatcgattgggtttactgcaaatcaatctctaggtgaagaagttctccctcgcatcgttggagctgtaactcgtttcaatgcgaatggtaaatcagtaccggataaaactttgcctaaagaaactgcttaccgccaagtttcctggacatggaaaaaatgggttggcaggggccaaactgaggaggtcactgaaacgagggaaatcgagtatcagcgttaccagagagttttcactccacctcctggcgtcgaattgaaaattgttgagaatctaaacggggagaagttagtaatatctcctaaattgactttgacagatgaaaaaaagaatcttgtaacacattgcgttaacttgtttttagagttatttggtctttgcgaagtggttgacgaggaactcaatactattgtcaccactcagtctataaaactgaactggagcctccttcctcaagggcaatatccttggagtacaataggccctcagataatgtcagcaatcaaacctcgaggaaaaggaaattctgctgtagtcgagggtagacttcaactcattaacagcaaacaacctgattttgtcgctgtaggaaaggctggctttcaaggttacgtgatttttggattccccaaccacaatacctatgtattagaaagttcacagtgtaacaatgcaacctacatttttgacaatgattggcaacatttatcgcaattaactaaagctgagattttagatggaaatttgcatcatgccagagtaattcaccgtagaaactggactgccgaaattctcagatacttaccttaa

SEQ ID NO: 233541 - DNA, 435 bp, Klebsiella pneumoniae
atgtttaaattcaaagggggacgccccactaaagcgcaagcagcagcgcgcgcgacaatcacccagatggaaaaaatcatcctcaatcctaaagccaaacctgctgacgtcctggaagcaaatcgtcttatcgagacactaaaaagcgttgcaggcgtaatcggggagtctgacagaccgtcacagaccggaacaacgccggatattgtatatagcgcccctgatgaattgagggcctcaccagtcccagggatgtactatccgccagagtgctataccccagcgcggctagttgtctctggagtttgttattgtgacgtctgccagcggtggcgggataaacacaatctcaagacctcacagatttttgaccctgactgttaccacgaaatcacctgcgaagacgaaggggaaattggtttgtatattggataa

SEQ ID NO: 233542 - DNA, 876 bp, Klebsiella pneumoniae
atgaaaatacttcccgttatctctcccaaaggtggagaaggcaaatccacgtttgctgcttaccttgccggttttcttgccgatgccggcctgaacacccttcttgtggatgcagactattcccagcccacagccagcagtatcttcgcgctggagcatgaatcccctttcggtctctatgaattgctgatgcagatggtcagtgaccatacgcaatgcatttcgcagaccgccataaaaaatctcgatgtcatctactctaacgacccggacgaactgttgccgaccgcgatgctccacgctgcagacggccgtctgcgcctgcgtaacatacttcagcattctttctttaaccgttatgacgtcattattgtggattcgaaaggcgcaacaggcgtcatgaccgagctttccctcctttcctctaccggtaatgtgatgggcgttgttaaacccatccttccggatgtccgtgaatttatccgcggctcccttcatatgcttacccgcctgaaaacctatgaaaattacggtattcgccttcctgatatttccattctcgtcaactgtatcgaaaacactctgcttgaccgtgaagcaatggacggtcttgccgccatcattaacgaaaaacattacgacgcctctgcgctgggcaaccgtgacgtttatcgtttactcgatacccgtatcgaggcgctggatattttcaaactggggcacgtcaagcagcagcccgtgcatcgtctggaatacaaaacacgccgcaaaggtccggccgcagccgtcaccatgcacgacctcgcgtctgaactgttccccgagtggcagagccatttcagtgacgttctgacccgggaggtgcgtcatgtctga

SEQ ID NO: 233543 - DNA, 1371 bp, Klebsiella pneumoniae
atgtctgagatgatgatgccctgctcttatgaggctgagcaggccgtactgggcggactgatgcttgataacgaccggtgggatgaggtgatactgcaaatctccccggaagatttgttttctcggccgcaccgtatggtctttcgcgtgatggctgagctggccggagaagggctaccgctcgatctcatcactattacggaacggctggagaacagaggcgaccttgaacagtgtggcggctttgcttatctggctgaaatgagtaaaaacacgccgtctgcagccaatatcctggcttacgccggggtggtggcggagaaaagccgcctgcggcagctgatgactgtgggtaacagtcttctttccgatgtgcaggccccgaaagccagctcggcgggcattcttgagtcggccgaaggtaagttgtttaacattgccgaacagggagccatgcagctcaacagtgagaccggcgttaacgaggcgctggataaactgctgacgcagctggaaagcatgtccgccagtgacggcctcaccgggacaccgacagggttcagtgaactggacgcgatgacctgtggtctccagcccggcgatctggccctgctggccgcccgtccttctatggggaaaacgtcgctggccatggccgcctgcacagcggccgtgagcgcaaaacctgacgataacgtctttgtgttcagtcttgaaatgccctcagagcagctgatgatgcgcctgctggcgatggaaggccgggtggaactgtcccggcttcgcagcggcaacatggatgatgaagactgggctcgcgtgtccgaggcaaccggtcgcattattgagtggaaaaaccgtctgatcattgatgataccagttaccagaccccggccacactgcgcgcccgcgcccgacgctatgtccgcaaatacggcagaccctctctcatcatgctggactatctgcagcttgtccgctcccccgagcaggaaaaccgcacgcaggaaatagcggaaatttcccgctcgcttaaggcgctcggtaaagagctgggctgtccggtactggcgctttcccagctcaaccgcctggtggagcagcgggccgataaacgccccaataatggtgacctgcgtgactccggtgcgctggagcaggatgcggacctcatcatgtttatttaccgggatgaggtttataaccccggcacccctgatgccggggtggctgagatcattgtcggcaagcagcggcaggggccaaccggcacggtaaaagtcaaatttgacgggcgttacaccctcttttcggagtttcaggaaggcagctatgacttcggttaccgcagcgggaggaaacaggcatga

SEQ ID NO: 233544 - DNA, 1701 bp, Klebsiella pneumoniae
atgagccgtaaaagttctaatgtgggggctgccatgctgcagcccggacgccagtcgcaggcggccggcaatatcagcgtcatgccggcggctgaaatgcccatggtcctgacgctcgaccagttaagcccgaatcctgataatccgcgaacatcacgcaatccgcgttatgacgatatcaaggcttccatccgttcgcgcgggctggacaccgtgcccaaagtcacccgtgacccggatggtgagcccgatatgtacatcttcagcgacgggggtaatacacgttatcagatcctgtcagaactgtggcaggaaaccggagaagaccggtttttccgcgtccatgtgttgttcaagccgtggccgggacggctgcagtgtgttattggccatctggcagagaatgaagtgcgcggggagctgagttttattgaaaaagcgcaggggatccacaaagcccgctctatatatgaagagcagatgggaaagacggtttcgttgcgtcagttgtcagagctactgacccatgaaggtttgccagtccattactcaacagtcagccgtatggaagatgcgctgaaatatctttatccgtggatcccagacctgcttgagtccgggcttggcaggccacaaataacgtcactgctggcgctccggcatgatgcggaacgcgtgtgggatgaattttgcctgatttcagacacaggcgacaaatccttcagcgacgtttttggccagtgttgtggccgtttcaactccccggaactgtggtctctggagatgtttcgcgatgaatttattggtgatttactgcaggcgttaccccatccggaactggactatgaccgctggatgatggaactcgatcctaaagaacgcaaccgcagacatcattttggcgagccggagacggttgcctttcccgccgcaaacaagcctgttaatgctgatcacgccctgcataccacaggctcagatgagagtgaaggcgtcccgctacctgtctccagttcacgtcctgaggtctcaggaggggctgtaacgcccgttccgggtaatgcgtcttctccttctgaaacaccgattaatgagcccccccggcatgaggttcagccagatatgtacggtgccgcgccggttatttcaggtgagagcggggatgttagcgggctggttaccctctccaatgggtacggagaagagaatggcggagaagaggacaatggggaggatggcctgctttctcttttaacaccagaacctgaagttgtcctgcaggatgacgcgccggtgactaatgacagcatctggcatgtgccggcccatcaggacgatatcgaacacctgcagaataccgcttttcgtctggcatgggagctgggtgaggtccttggctgcgaagatgaaattcttcctcaacgcgacaaggacacgtctgccggttacgtcggggcaggtgaggtgtgttctgaagccgccgcatttctgctgggcctgaccggcgaagcgcctgtgctgcatccggcggcaggggtgtgtggtctgccggagcttttcaccggcggcccgggtgagggggaagcacctgtcctgacagatgaagatgctctgaaactgctccgcctgatgcgcgttatgcgccgtctccgggagctgcaacgcggtctgaagtacggggaggataacagtgatgaataa

SEQ ID NO: 233545 - DNA, 711 bp, Klebsiella pneumoniae
atgaataactcacagcgacagttgcgactgctgaatcttgtcaggaaactgctgaagctgggccgcagcaacagtaatgcccatgaggcaggactggctctgcagcgtgcccagaagctgatggccagatacggtatcagcgagcttgacgccggccttacatccgtgcgcgaagcgtcttcccgcacggccccttcggatgctgaaaaagttccggaatggatggtgacccttgtccggggcgtctgtcatgcctttggctgccaggcttattactcatggcgtcagacctctgccgggtatcgccgttcggtaaccttttacggattcagtgaaaaacctgagatagcagcctatgcctttgatgtgctgacgcgccagctgaaagatgccacaaattcttatctcaaaacccagagtaagcggctgaaactggccacacgccgggcgagagcggagcagttccgtaacggctgggtatgtggggtgcgtgaggtgatatcggcaactgacatcagcagcgaggagcagcaggtgatgagccactggctggaaagccgcagtatgaaaacagtcacaacccgtgaactgaaagcctgccgcggggcggatacagcacgttatcaggggtatgaagccggacaaaatgcccgtcttcatcagggtgtcagcggccggggtccggcagccattggttaccgtcaggattaa

SEQ ID NO: 233546 - DNA, 591 bp, Klebsiella pneumoniae
atgatgaacagtttatctcaggctgcaaacggattattgatgcagctggttatggatctcagaagtggctatctccgccgctgcgaatcgctgggactgaaccgcgaggaaatgcagatgctgcaggggctctcgctcgaagagcttcactacctttccggcagtgaggtgtcgatcatcagtgtgggcatcaatcacggcaatctggtgcgcatgctgcagcaggcccggactgaacagaaacgactccagcgtatcgatcgggcgctggcgctgggcggctccattgaactgatggccaattacttcgggctctccagtacggacgtggcggcccgccgtcgtattgccggtatcgatgtccggccggggcgcggtaacgcactgggtgatgaggaaaacgccgccctgtggcgtcagtggcaaaagtccggcgttgaagatgcggaaagtgctgacgggctggacgtgatgatgctggctgcagaacagatgaacgtctcgctgacgtcggtctggcatgcggtccgtggctggcacaagacccggcagccttctccggcacgaacgccggtaaggaagacggcatga

SEQ ID NO: 233547 - DNA, 249 bp, Klebsiella pneumoniae; identical to SEQ ID NO: 186775

SEQ ID NO: 233548 - DNA, 1239 bp, Klebsiella pneumoniae
atgagtctgcctgcagaaagcctgattgcttatacgctggataaaatgaatgcccgccttgcggccagtccccggcgggatgatggcaggatacgtaacggcctgctgtttaccggaaatgtgcatgattccattccccgccggctgttgctcgacacgcggttgtcaccactggacaagatgggctggatgatgatccggctgtatgcacaaaataatgagggggcggttttccccagctatgacgaactgcagctgcagcttgcctcacccggaaaggggaacgcctcaagggaaacggtaagccgcgtcctgcttatgctgcgaataaccggctggctcagcctctgtaaacgcgtgcgggatgataaagggcgggtgcgggggaatatctatgctcagcacgatgagcccctgacgttcagcgatgcggaaatgctcgacccccgcttccttgatacggtagcggatgcctgcctgagtaaaaaccggactatcagccagaccgcccgcgaagtgctcgacgatataaaaaacgaccccaccatgcgccattatcgcagccatcttgcgctgatcgaatcgcgtctggaccgcccacagacgcccagccagatggcgaaacatcatcaccgaataccctgtcccgcaccgggttcggaaaccgaactcagtcataaacggccaggaatcgtcgctaaaaaacagggttcggataccgaactcagcccagaaagatacaacaattcactgagttcggaatccgtactgccagtaaaaacaggcagttatggccgggttcggaaaccgaaccattacgtacgtagtatcacacacagtgtgaataaaaatacgtacgtaccgggtaaacctgtgcttcccgacagtctgcatgaacttgttccggcagaagatattgccatgctgaccgcacagctgcaggcgttgcctgaggagcaggcacaacttgtgctgctcagcctgcaaaaggtgatggcacgccagcagctcagcaacccggtaggctggttgctggccgtgatgaagaaggcgcgtgagggcaggttatacgcgccccgtcagggtggcgatatatctgacagtgtcgggcaaaaaacagttcagcgtcccgaacagcaacgatggaaacccgaaccacgcgcctctgcccgcccggtatcggaggaaaatatcagggatctggtgaagaaaattcgggaaaaaatcataaattcatga

SEQ ID NO: 233549 - DNA, 726 bp, Klebsiella pneumoniae; identical to SEQ ID NO: 108039

SEQ ID NO: 233550 - DNA, 555 bp, Klebsiella pneumoniae
atgattcgccctgtgttcctcctcacctccttctttttactgagcggatgcgcaacaacggactgggctgcgattaataaacaggtcagtgacacagccgcaaacctgacaaaaacgttgggcggcaacagcagcggagaaagtggcgggatgccgctgatgagtccggcggggcaacaggccatgaagtccgtcgataaaacgttctccgtgccggtcgatgtggataccgcggcggcccgcctgaagcgccattacaaatttatatccacgcaggagcttgaggcactgcggcaggccgcaaatgacggggactggaaagcggcggctgaagatgatgcgcatcccgtctgggacgccatgccgggcagctactacaaaatgggctccgactggaacgaacgtgatcacctggatatcgaaatcgagaaaaacgggtccggcagcaggctctatgttgtctatcgctcatcatcatcacagcgtctggccgggtccggcgtcacgaagctgatgaatgatgtccgcgctgttgcggcgggtgaaaaacgctga

SEQ ID NO: 233551 - DNA, 2010 bp, Klebsiella pneumoniae
atgcaactctttctgtgtgaaaaaccatcacaggcaaaggatattgcccgcgtgctgggtatcagcaagcgtgagcagggatttatcagcggcggtaacatcgttgtgacctgggcggtcggccatttactcgaaactgccagccctgaagcctatggtgagcagtatggcaggccatggcgtgccgatgtcctgcctgtgctgcctgagacctgggaaatggtcgtcaaggagcagacaaaatcgcagttcactgttatcagtaagctgctcaaaaaggcctctgaggtggtcatcgccaccgatgccgaccgcgagggcgaggtgatcgcgcgtgagctgctggaatactgccgctacagtggcgcggtacgccggctctggttgtcagccctggatgaggccagtgtgaaggaagcactgggcaatattcttcccggagaaaaaacagccctgctgtacgatgccggcaagggccggagccaggctgactggctcatcggtatgaacctgacccgcctttatactctcaaagcccgtgactcaggggtgtcagaagtgctgtccgtcgggcgggtacagacgccgacgcttgccatggtggttaaccgggataatgaaattacgtccttcgtgccaaagccctggtggcaggtacatgcgcttattgaaaaagagggcgtccggttccgggctggctgggtgcccgttgagcagtactgtgatgaggaaaagcgttgcatcaatcctcaggctgcccgggcggtgggacagctgtgtcagcagcagggcagggctgcggtactggaggtgacacagaagcgggagaaaacggcggcacccctctgttttgacctgggcacccttcagcaggtctgttcccgaaaattcggcatgggcgcaaatgatgtgctcgccattgctcagtcactttacgaaacccacaaagcgaccacctacccccgtacagactgcggttttctgccaacttccatgcagcaggaaatatccgacgtgctggcggcagtggcgaaatccgatccggctgtggccccggtactgaatcagctggacaggcagtttgtctcgcgtgtctggaatgacaaaaaaatcaccgcgcaccatgccatcattcccacccgacaggcatttgatttgtcacgcctcagtgccgatgagctgaaggtctaccagctgattcgccagcattatttcgcccagttccttccgctgcaggaatctgacgtgacggaggcctctttcaatatcggtggacagctgttccgtacacgcgggaaagtcggtgtggtgacgggctggaagtcattgttccaggctgaaaaagatgacgatgaagaggacgtcgacggtgacagtatggcgctgccggcgctggcaaaaggggatatttgcgctgtcaccggttctgaggttaaggatatgaaaaccagtccgcccaaaccgttcacggaggggacgctgattgctgccatgaagaacgcggccagtttcgtcagtgacccgaagctgaagaaagtgctgcgtgataacgccggtctgggcacagaggcgacgcgtgcggctgtgcttgaaaccctcttcaaacgacactacctggagaaaaaagggaagcacatccactcaacgcagatggcccgggagctgattgcggccctgccggaaacgctgacgagcccgggcatgaccgcattatgggagcaggcactggatgatatttcgcaggggaaaatgtcgcttgcggtctttatgcaaaagcagctgcagtggacccgtcaccttgtcgaaaaaggccgccaggacagtgtgaaaattactgctcccgtcacgcctccctgcccgttatgcaaaggacccacgcgtaaacgtaaaggtaaaaatggtgatttttgggggtgcatacgctatccggactgtgagggaattatcagtacaggtaagaagaaagcagcgaagcgtaaaaaaacatcggttaaggctaaaacagaataa

SEQ ID NO: 233552 - DNA, 1290 bp, Klebsiella pneumoniae; identical to SEQ ID NO: 108038

SEQ ID NO: 233553 - DNA, 513 bp, Klebsiella pneumoniae; identical to SEQ ID NO: 108037

SEQ ID NO: 233554 - DNA, 897 bp, Klebsiella pneumoniae; identical to SEQ ID NO: 108036

SEQ ID NO: 233555 - DNA, 408 bp, Klebsiella pneumoniae; identical to SEQ ID NO: 108035

SEQ ID NO: 233556 - DNA, 471 bp, Klebsiella pneumoniae
atgtctgcaaacaatacttctgcatctgcaaaatctgagtacttcaacctgactattaaaggcatcgggtatctcagcaacatccgccaggttaaccatcagaatggctcgttcctcagctgcgtaatcaatgcactgagcggtccgactgacaatccggcctacgtccgttttgacatttctgtcgcaggtaaagaggctaccatccttatcgcccgctgccagaaagccgtcgatgaagacaaaaaagtcctgctgggctttaacctgagtaatccgtccacggacatatttacgctgaacaagggcgagcatgccggcgaacagcgtgtcagtctgaaagcccgcctgataaaggtggactggatcaaaataggccaggacatggtctacaagactgaaaaatctgactccgtgccgccgcagaatggctctgccgcacaacaaaactacgcagaaaactcattctga

SEQ ID NO: 233557 - DNA, 537 bp, Klebsiella pneumoniae
atgtcctcacgcggcgttaacaaggtgattcttgtcggtaatctcggccaggatcctgaagtgcgttatattcccaatggcagtgcagttgccaccctttctctggccacgtctgagagctggcgtgataagcagtccggtgaacagaaagaagtgaccgaatggcaccgggtggttattttcggcaagctggcagaaattgcgggtgaatatctgcgcaaaggctcccaggtttacatcgagggccagctgcgcacacgcaaatggaccgatcagtccggccaggagaaatacatcacagaggtggtggtaaacattggtggcaccatgcagatgcttggcggtcgccagtccggcagcggtcagaatacgtcttcccggaatgactggggccagcctcagcaaccttccggaccgactcacagtggccaggcttccggcagcagtgccggtgcgccaccgatggacttcgatgacgatataccgttcattggattcgggtatggagtaccaaaatcggcaatccatgcactctga

SEQ ID NO: 233558 - DNA, 243 bp, Klebsiella pneumoniae; identical to SEQ ID NO: 108034

SEQ ID NO: 233559 - DNA, 249 bp, Klebsiella pneumoniae; identical to SEQ ID NO: 81053

SEQ ID NO: 233560 - DNA, 666 bp, Klebsiella pneumoniae
atgaaacgtaacacctctcacaacatattttcaccaggcaggctggccactgttcttcccctgctgctccttgcgggctgtgtttcccagccgcaaaagttgcagcaacgcgcgcctgccgacccgacacccggcaccaccgtcacccgcaacgttcagccggtctctccggacgagtatgcgcggacgccggaagtggtgcgctacgatcgttatctgctggtcagtaccgatccgcaggcggcccagcgtgaccctctctcgcagattattgatatccgtatcccgtcatccctgcatcctaccgtggctgatgcgctgcgttatgccctgcgccagtccggttattccctgtgtgcgaccggctccgccaacggcgtgctttaccgccaggcattgccggcagtccagtaccagctgggcccgatgcgcctgcgtactgccctgcaggttatggccggtccggcctggcagctggaagtggacgatgtgcagcgggtggtctgccacagcctgcgcgacggctaccagctgccggtctcccagcttccgccgccggtcagcagctggtccacgcctgcgccgtccgccgtgtcacaaccggccatcagcgcccctcagtccgtccctgttaaacctgtcagcggagggtttctgagaaaatga

SEQ ID NO: 233561 - DNA, 759 bp, Klebsiella pneumoniae
atgagcgaacagcaaccattccatactgaccccgcgccggcccgtaaaagattcagctggcgtccccgccgccgcctcatctggggcgctgccagcggtgtggcgctggccggcattctggcgctgggctacaccgccttcagtctgggcatatcgaaccttgatgaacgccttgcacgccttgaatctcagggcagtacagcggccactgttgagacagtcgcggccctgcagtcagatgtgaccacgctcaaaaccggcctgcgggatacccggaaaaaacttggtgagatgcagcaggagctgagcgctgctgcgaaacaggccggcagcgacgacgccatgcgtcagtcattgcgaacccttcaggacgcccagcaggggctggaaacccgcctgagtgcgctgactgagcagctgacagcgctgaaatcacagccggcacccgcacccgccgcacctgtcgccgcaccggtcaaaaaaaacgcgcctgctgcaaaaaagccccgtcccgctgacacacgtcgtgctgctccgtcccttcgcgtggcccgcactgcgccttttgtgctgacgggcgtggagaagcggggggcagagtcctgggctgccatcgcgccccggggctacagcagcctgtcgcaggtggccctggtcggagagggcgaaaccgttgccggctggacgctggtcagtgccggttatggtgaggcgacgtttcgggttaacggccgcctgaccgtgctcagagcagaataa

SEQ ID NO: 233562 - DNA, 723 bp, Klebsiella pneumoniae
atgaaactgaaacatacctttttagccgccatgctgctgagtcccctgaccctggtcgcgaccacatcaggacagacggatgtcagccgacaggaatcaacacaacgggcggactccgcacagcaaaacctgcagcagcaggccggtcagtggggactcagtgccgacgattatcagcgttatcagcagctgatgaagggaccccggggtacccagtcgccgggtctcgatccgctttccaccctcggtatcgaggcgcagacgccggcagagcgccgtaagtttgctgaaaagtgggtgaaggaagagtttgcccgcacccagaaagagcttgatttccagcgtgaggtgaacgcggcttggcagcgcctgtatccgggcacactgccggtcaatatggggaacgcctccggcgtggcgcacgacagtggcggccggctggcgctgttcgtcaggtcaaaagactgcgccacctgcgacgcgaaactgtctgccgttctggctgacaaccggccggtggacatctatctggtcgacagccagggcagtgatgatgcgcttcgcagctgggcacgggaccatcacattcccgtggaaaaggtccgcaagcgccagatcacgcttaaccacgacggcggccggtggatgcgctttggtaacggcctgatgccggttttactgcagcaggcgggagacggtaaatgggcaatcgcagcattctga

SEQ ID NO: 233563 - DNA, 636 bp, Klebsiella pneumoniae
atgggcaatcgcagcattctgaccggcgcactggcgctgggcttactgatggcggccgtccctgacggccatgctgaccagacggtgccggagggttacgtccgcgtggccatggcgcacggcgtgccccccgaagcgctttactcggtatcactgagcgagtcttcgcgcaaacttccccgcggcgtgcggccatggccctggaccatcaatgtggcaggcaaagggtatcgctatgagacgcgcctgcaggcctggcaggcgctgcaggtctttatgaagcgtcacccgcttaagcgcatcgatgtcggtattgcccaggtcaatctgggctggaacggtcatcattttgcctcgacgtgggatgcgtttgacccttacaccaacctgaacgccgccgccaccattctgcgtgagtgctgggcgcgtaagccaggcagctggctggatgcggccggctgctaccaccatcccgcaggtggtcagcctgctgcacgttaccgcgccattgtgagagggcatctggtaaaaatcagccctgcaccccgcatttctgcgccggcagctgaagcgccccgctcggttgctgcgctcacccccgatccaggcttcgtctggactgaacccgggagataa

SEQ ID NO: 233564 - DNA, 534 bp, Klebsiella pneumoniae
atgaaaacgctgtccttactgctgtttaccctccttcccctgaccggccatgctgaactgaatgtgattgctgatctgggcggtgaagatgctgcgccgtattttgaggccgttaataaacagcccggcatgcccggcgtcagtgacgtacagccttcacgccagccggaccacggtgttccgctggctgacgggatggcgggtatgttacccgttaacacacctgaactgagcccggggaatacagcagaccggccgctgcagttgcccggcattggggcgttgtttctgatcggggatgatgctctgtcccgtgaatggctgaaagccaatgccggcgcgctggctgaacagcatgcggccgggatgatagtcaacgtcacagacatggataccgtgcgcgagctgcgcgaactggcacccggtgtcagcctggtcccggcttccggcagcgagctggcccgtcgcctgcagattgcgcattatccggtactcatcaccgataccggcctgacgcagcaggttaagccgtaa

SEQ ID NO: 233565 - DNA, 573 bp, Klebsiella pneumoniae
atgagcgcgccagatatcaacggtctgctgatggcacacccttacggggcggtcatactgatagtccttttcctggtggtgatggcctttctgaacctgcgctggcgtgagaaagccagcacccgccgtcaccggcgataccgggcaacggcggggcgggtactgaataaactgaccctcctgccgggagacgggcagcgtctgacctatctgcgcaaaatcagcccctatgtctttgaagagctgttgctgtctgcctttgaacgtcaggggctgaccgtggtgcgcaatgcctcctacagcggtgacggcggccttgatggccaggtcatcatcgacggcgagcactggcttatccaggccaaacggtacagtcgtgctgtttcccccgcacatgttgaggacttcgaccggcttctcctgcactccggccgccgggggctgtttatccacacgggccgtaccggaaaaatgagccgcacccttcatatggcgtcaccgcgcctgcgcatcatcagcgggcaacgcctgctggccattctcgccgggcaggacgtccggcagtatctctga

SEQ ID NO: 233566 - DNA, 489 bp, Klebsiella pneumoniae
atgcatatcatcgtgaacagcctgcgctacgctttgtggcttgtgttctgtttattccgtcatgccgttttcgtgcctgccgctttcggcggtgtctgcctgctcgcctggcttgttttcggccatccggtcagtgacctgaacgaccagttgcagaaggaggcaacggcatggcgcaccgcgccgcccggacattacatgtgggaggaatgcccggtgcctgataatgcggctccgcctgaggcaaagccggcagcctgtaccgtcactgccgtctccacagaaaccgcggcgaacaattacctgctgtcattgcgggccgtatggatcatttttttcatcctgtcgaatgttctgtatgtgctctggcgcttactggcggatgccctgcgttaccactccctttcctgcagggaagccggtgccgggagggtaacgtatatccgtatggccgacggtaaaattataaaggaggcagacgatgagtaa

SEQ ID NO: 233567 - DNA, 348 bp, Klebsiella pneumoniae
atgatgaagactgttctgaaggccacgttaatcactgcactgattaccggccctgttcttgcggccgacggtaatggcaaagtccaactttcagacctgcatttcgccacagcagcaaatggtttgcagcaaattgaaggcacgggaacaaacgtgtcaggtgggcctgtgaagactgtaattgtcaaattcaacttgcttcagaatggggcagtaataggaaatacggcagcgatggctgaaaatctggagccgggtcagcaatggaagctacaggccccctacgacagcataaccaacaagccagacagcttcaaagtgacagaactgacggtatttaataactga

SEQ ID NO: 233568 - DNA, 945 bp, Klebsiella pneumoniae; identical to SEQ ID NO: 108032

SEQ ID NO: 233569 - DNA, 1032 bp, Klebsiella pneumoniae; identical to SEQ ID NO: 108015

SEQ ID NO: 233570 - DNA, 1620 bp, Klebsiella pneumoniae; identical to SEQ ID NO: 108016

SEQ ID NO: 233571 - DNA, 1509 bp, Klebsiella pneumoniae
atgacctggaaaaacacagccgagcaaaacgccatcatcgagtggaagggcactcatctagtggtaaacgcatttgccggcacaggaaaaaccaccacgttagtcagctacgctgaatccaacccggaaagcaaaatgctttacctcgcctataaccgcgcggtgcgggatgaagctgagcgcaagttcccctataacgtagagtgtaaaacgtcccatcagctggcgtgggtccgcttcggtaaacatttcagtgaccggctgacaggcagtctgcgcattacggatgtggcccgcaaactcaacacccgccactggccgctggcaaggctggcgctcagcgggctgaacatgttcctctgcagcgccgaccccgagcctggactggtacatctgccggcagaggatgatcgccacggtcttgatgcaggtaagattctgggggcgattcaggttctctggtatgaaatgagccggaccgattctaccttccccgttacgcacgatacgtacctcaaactgttccagctttctcagcctgacctgtctaaacgctgggacaccatcctgtttgatgaggcgcaggatgccaacccggtgaccagtgcgtttgtgctgaatcagccctgccgggtcattctggtcggcgaccgttaccagcagatttaccggtttcgcggggcagataatgcactcagcgcccctcagctggcgcaggcggaccggttatggctgacggcgagttttcgtttcggccctgaggtcgcgcgtatggccaatatcctgctggagcgtgccggagaagaaaagcgggtgacggggaacggggggcaggacgccgtcgtcagcaacatcccggatgaggctgaacacgtagctgtactgagccggacggtgtccggcgtgatcggcagcgccttgacggcaagcctcatggagaaaaaagtcttctgggtcggagggattgaaggctataaaacggaggagctggaagacctgtactggttctccgccgatatgcctgaaaagatgcagtccccgcgcctgagccgggactaccgggattttgacgagtactgctcgatagccaaagccacgcaggacgtggagatgaaccaggctattcgcctgctcgatgactttttcccgctccctcaaaagctggccattatgcgccgtcaggtagtcactcatgaaaaagaggctcaggtcacggtttcaaccgcacaccgcagcaaggggctcgaatggccggtggtaatgctgagtgaggattttactgacattaccgacccgcttctttcgcaggatgagcggcaggatgagactaacctgctgtacgtggctgtcacccgggccagaagaacgcttgtgcttaacgaactgatgcgctggctgagcgatgaaggcgggaaaaaccgcgagacgacgcacgaaaccgtaccgtccggaaatggagagagcgccgacaggcacgaagaaacgggaaaaacttctgagagtgagtaa

SEQ ID NO: 233572 - DNA, 1779 bp, Klebsiella pneumoniae; identical to SEQ ID NO: 108017

SEQ ID NO: 233573 - DNA, 846 bp, Klebsiella pneumoniae
ttgacgctggcacgcctgcgcgagtgggtcagggatttgcaggtccgctacggtgccagtgagagacaggtctgttttgcgctgcgggtcagccatagctcgtttcgctatcgttctgtggccaccgacgacagcgcactgcggctgcgcatccgcgagatcaccgaaacccgggtgcattacggttaccgccgggtacacgtgatgctcaggcgggaaggctggcgcgataaccacaaaaggatttaccggctttacagcgaacaggggctgtcgctgcgcctcaaacggccacgccgcaataaatctgcacagcgccgccagccgcagcctcagggcctgtatccgaatcacgtctggggcatggattttgtctctgatgcgctgtttgacgggcgacgactgcgcctgctgacggttatcgacctgtatactcgcgaatgcctggggatctgcgtggggcagaatctgcgctcagcagaagtggcagaaatgctgaacagcatagcgctcagacgtcctttacctcagttgctgaaaaccgataatggttctgaatttgcagggaaaatgctggacaggtgggtatatgaacgagggatcaggatcgacttctcacgcccaggaacaccaacggataatgcgacggtggagtccttcaacggcaggctccggcaggagtgtctgaacgagagctggttcatgtctctggaggatgcacggtgcaaaatcgaggcctggcgcatacactataaccagagacgtccccattctgcgctgggctggatgacgccgtcagaatttgctgagaagtctgccggttgccaggatatacaaccaacatga

SEQ ID NO: 233574 - DNA, 267 bp, Klebsiella pneumoniae; identical to SEQ ID NO: 108019

SEQ ID NO: 233575 - DNA, 684 bp, Klebsiella pneumoniae; identical to SEQ ID NO: 121773

SEQ ID NO: 233576 - DNA, 933 bp, Klebsiella pneumoniae
atgtccgaatggtgtcataaccgcctggaaatcaccggtaaatccgtctgcatcgatgtcatgctgcagtggataaacggcactgacgtaccgcgtcaccgccacgccgtgcagcagagcatacagttgtttctggccggcgcggcggggatactcaagccggtgcgcacaacgtcgtatccgccctgtcagggtctggttcgtgcaggcacagggctttccactgcggccaatcaggcgtttgaaagctggctggcgctcctgcttaaggatgccgtcctcgatacggaaactatcagggccattgaccggctgtatcaccagtcaggtctgggcgcgctgaaatgggaaaacatacctgtctcagcccgtgacgttatggcggagctgattgccagacagtataccgactggtttggtctggtcagtaccggcgatgagtctgatgccgcaactgcctgggagcggctcagccagtatcctgaacgctcccagccctgcgatatgctggccgtcatacctacgcggctggcagcagagctgaacggttccggggggctgatgtcaggcgtgtcgaccacaaccagcctctactgccggcagtacggcatggagtggccggccgggcacaatgtcaactggcagcgccatacgccaaacagtcttacgctgcagatggatacgccctggttcccgccgtcaggtgaggttgtcggggaaatttctgcggtgtttgactgcgaggtgcgtcacagctacagcgagcccgtgagcgggctcagcggttacgactgctatgacggcggcgaacatgtcgacggacacaaaggtgcggccggcgcgtctcagcccggtcaggtgctttatctcgtcagcgatgagccagcgttacctgctcaggaagcagtatcttatcgtgaggtccgggggtaa

SEQ ID NO: 233577 - DNA, 987 bp, Klebsiella pneumoniae
atgaaaaaaacgacttcacgcaaggcggcccgccgcccggcaaaacagactgacctttatcgtcagatcactgaccgcattgttgtcgcgctggaaaacggcgtcgcgccctggcgtaagccgtggcgcgcggctgccggcagcggtctggccggtctgcccctgaatgccacaaccggacgtcactatagcggcgtgaatgtcctgcttctctggatgtcagcggaagagcagggttttcgcaataaccgctggatgacttaccggcaggcgcagcaggctggcgggcaggtgcgtaagggtgagaaagccaccctggcggtggtttataaggactggacgaagcaggcggaggatcgcgaaggcaaccgcctttatgacagtgacggtaaaccgctgatggaaaccgtgccgatgctcaaacccctgcagctgttcaacgctgagcagtgtgaggggttgccggcagaggttgcggcttcacctgagcaaccaccgacggtggatgaggacggcatactctgtccggacgtgatgaacagggtgatccggatgtttaacgccacaggggttaaacaccggatgctgcctcagaaccgggcttattaccgcccgctgacggatgaaattgtgatgccggtggctgagcagttttttacggaggcggactgctggtccacgctgttgcatgagctggtacacagtaccggtcatgcgaagcgacttaaccgggaggggataacctcctcatcccggcagttcggggacccggtgtatgcctttgaggagctcatcgccgaaatgggcagcgcgtttttgtgtgctcagctcggcgtgtccggtgaggttcagcacgacagctatgtggaccactggctgaaggtgctgaaatctgacaaaaaggccctgttccgcgcctgccggcatgcccgggaagcgtcggaatatctactggcactgcctgaaagtcaggctgtggcggcgtaa

SEQ ID NO: 233578 - DNA, 348 bp, Klebsiella pneumoniae
atgggactggatatttttctctacagccagcacaggcagatcgtcgcagtgccggcaccgtatcatccggtgtgtgaactgagccgcgatttttcactgattacctgggtggataagcacgtcggtgaggtggaaaacgcgacctgtctggaactgtcacgcgagcatattcagcaactgaaagagaggctggactgtgcgattgcgacatttacagaggggaatgaggataatccgcttcttcagcgccggctgcagtacgttttcaccctgcgtgacaggctggaaagcctgctcagtgattttgactttgaacatgaatacctgtggttttatgccgcatggtaa

SEQ ID NO: 233579 - DNA, 603 bp, Klebsiella pneumoniae
atgctttttttcgacaataaagacctgacgaacgtcctgctgaccgtccgcatgcagggaggccagcttcatctggcaaaggatgaaggtgtttatcttatgccggccaccggtgcctggcagggcaacgatccggtgccgcgtattgcgtatgccgcagggtgccaccctcagaaaaatgaggactggtacgacacggcgcgcctgcttgccggcggcgatgatttcattgaatcactgtcgataagcgacgcggtagccacctctgtactgtcttgcaggaaggacctgaggatcctgattaccgacacacagatacaggtgctcaccgcagcgactgaccgggtgaaagtggcgcagtatcgccagaaggccgatcagcttctggcgagcgcggtctgtcacttcagtgcctgtgtcgggcctgatgaactctgccgctggcgtgaaaacgccgtgcgtctgctgacccaggcggccttcatcagcagtaagcgggcgaaggctgaagatcatcaaacctttctgaacgcctgtggcaggctgcaggccagattatcgcaggtgaccccgcagggggcgctgcgaataaccggacgttaa

SEQ ID NO: 233580 - DNA, 648 bp, Klebsiella pneumoniae
atgaaagacctgtcttcttccccggcttccatgtcggttgtctataccattgagcacgtcagcacggttccgttgcgacactggcatgctttcgttctggccgtaacagaaaccttctggcaactgccggtgcgtctgcgtccgggaaatatgtatctgccgtcgcttaaccgcgcggctgacctgtttccggttgctgatgtcatggcgttctgtggcgattcaggcggctgtttctggccggtcaacatgaccattgagcgggagcgcagccacaatacgctgagtatccaggagctggattttcagcatcagccctgcgatttctttgcgcgtgttgtgatggtcctgctgcataacctgtgtccggacagcttccggatacattcttcagacgagggtcgcagctgggcgttaccgttacgctggattgaacaacacctcggcctgcctgagcaaccgacgctgaccgtgcctcagccggtactgaaaacaccggtaggcgagggcgcgtttgattccctgctgctgcaactgctctcaggtggtgagcgggtgctgagcaatgaggactggaatgccttcgtgctggcggaattccatctgtacgaactgaagcgggtcgcggaaaaatctgactcgttttaa

SEQ ID NO: 233581 - DNA, 366 bp, Klebsiella pneumoniae
atgtacgcagacgtttatacgcttaaaacaccactggacacactcagctggctttgcctgcttgagagtgaactcctgagcatcagggcattccagcgtctcgatcttcatacagaccgggatgaaccgaatgaactgacgtatctggaagatgccattattaacgccggcgcagcttatggctggtttgtctgttttctcagggacggtgatattccgccgctgcctgccactgccagacaacttctctgcacactggacagtctcggtaaagaaattaaccggcctttctgggagcaggctgtgacccgcgggcaggatgaggcttgtggtgacaaagctatcgcggtcctcgaaatgatgtaa

SEQ ID NO: 233582 - DNA, 2220 bp, Klebsiella pneumoniae; identical to SEQ ID NO: 113356

SEQ ID NO: 233583 - DNA, 237 bp, Klebsiella pneumoniae
atgcgcctgactgtatttgacgatgatcccggagagcgcatagttccgggacgtgaacgcatcacagtttttcttgatggtaatgaggttatgcacgtcttctcggctgatgatgataaaggcgaaatgattgccgccgtgcttgatagccggggttgcctcattgccaagaacggcgaggttaagcgacagacgctgttcggtcaggtgaggatcgtacgcccatccaagcaatag

SEQ ID NO: 233584 - DNA, 2088 bp, Klebsiella pneumoniae
atggcctttgatccgccacttgggagcacttcgcccgcggtgctgctcgataacgccactcgctttgacgaacttgttaacgggccagcggccaccgttcccgaccgtgccgggcaaccgctggacacctggcgccagatcgtgacgatgatgcttgctgctgtcactgatgcgcagaacagcattaccgctattgggctcccctttaatacgctctctgatgctcaggctgcagtagctgctggaaaaataccagaaggctccgtgacatgggtgagaactacggacagcgctgcccttgcggatgagtacaaaaacataaatggggttctgacggctaccggacgtcggatgccttctcaggatgccgtggacgcactttcgcgccagttgctggattcgattgttaccggagatgtaccagggttctggctggcactgaaagactctgcgggctggatttcatggggagtggatgatcaggggggatttggatcacgggctgcttacctcgggacagacaatattctggcgggaaatatcaaaatcttgtttaccgatgatgtcggattacggtttcaggaccccgagggattctatatcgatgtgctggataatttcggacgctatctgttgggagattccggcggcggttcttcacctgttgacgaagtcagcattctggatttgaaaaataaagcttacgcggcggaagtttcgcggcgcgtactgacacggctgaaatttccgactgaggcgtataaccattttttgatggagtgtcagagccttggtatggggtatatgagctggccggttgtcagcaaaacgcctaaatatgattcgctaatgctggggcagtctgttcgtccggcgagcacgacgaacaatgcgtttgttcccctgggcgtaaatgcgtggcaacctctgcgggcagttgtacagtcagtctctggcagcgccattctgtccgatgcggagcaactcgcgctggctcgaagcgcggttaatgaaggggagagtccgatcgttggcgcggtgaacggattcagacgacacttccttgaggcgcactgtctgagtgctgaccctggtcgactgtttgtcgcctccacggtcggcgtgtccggccagtcaattgccagcctgatggacgataccaaatattttaatcgtgtcgttgaatgcgtaacgaaggcaaaggccctggctgacagcgaagggaaaacctattcggttaccggggtcgatttcgttcagggacaacgcgactatgatgacggaacgcctaaagccacatataaatcgcaactggggcaactctacaacaaaatcaataataccattcgtgggatcaccggccagaaagacaatccagcctggtttatttctcagacgggatacacatacagtcctaatccggccacgcagccggtgaacgctgtcgagctttgggtgggaatggcgcaatgggaattttgtcaggaaactcccaactgtttcctcattgggccggactatcagttgccggataaaggtggccatctgatgaccaacggcagtcgctggctgggttgttattttgccaaagcaaaagatcgtgtactgaatcagcggcgtccattccagccactcgctcccatgggcattacctgttcaggttcagattttctgttgagttactacgtcgatcatccaccattaaaatttaccagcccgttcaggaacggaaccagaacgcccatcactaactgcggatttcgcgcctggcatatgattgatgccgatccgtccggcatagggacagaactgaatatcaccagcgttgccgttgcagccgacacggttattcgcctgacatgcgatacagagccgcaggggaaagtccgggtggcctatgcaacacgcccccagtatgggcagggtatggtaaccgattctgataaatacgtaccggatgaagtgtacgaatatgacccgcaattcacccaatggccggaagagaacattccggagctgatcggcaacccctatccgatggaaaactggtctattgccttttccatgaccttcactaaggatgaataa

SEQ ID NO: 233585 - DNA, 768 bp, Klebsiella pneumoniae
atgagcctggcaattcagaaagatgtcgatttttctgcggtggctaccggatatttacctccggtaactgcaggcgtggagtacttcaatttttttaacagcgaagactcgctgacacgcaacctgatccccaacaagccgactcctgcaaagaacgggagcccgctctttaacaccaacggacaaagcttcctcctgaccaacctgctgaatttcatcaataccgggataaaactgactgatgaaatgaccattattacagtggcagaaccaaccggcgcggatggtaatttcccgacctggtccactacaggttcgccgattacaaatggagggagtttcacgtcacaatcctttatgcgccagagcgccaccacgcgaaacccaacgctgtcgctgagttattccactgatggtttcatcacccgacagaacctgtcgtatggggtatcgtcgggtgttgataatatcaggctccgcgccatagcatcggcattcagtcagacagcaaaaacgtccagcctttacgatctgacgaataataaaaatgcccaggcgcctctgccagcaaatggtgtttatggaaagtcaggtaacatcctcctgggttcgcattacaacgccgcagagagttcgcagggtaatctatatgcggccgcgatttatagtcggatgctcactgctgcggaggtaggcgcagtgtatacagcgattaaagcgtattacatattgagagcggctttgttgaataaatcagatttcgggtaa

SEQ ID NO: 233586 - DNA, 285 bp, Klebsiella pneumoniae; identical to SEQ ID NO: 121747

SEQ ID NO: 233587 - DNA, 348 bp, Klebsiella pneumoniae; identical to SEQ ID NO: 121761

SEQ ID NO: 233588 - DNA, 639 bp, Klebsiella pneumoniae; identical to SEQ ID NO: 121762

SEQ ID NO: 233589 - DNA, 654 bp, Klebsiella pneumoniae; identical to SEQ ID NO: 121763

SEQ ID NO: 233590 - DNA, 1710 bp, Klebsiella pneumoniae; identical to SEQ ID NO: 121764

SEQ ID NO: 233591 - DNA, 276 bp, Klebsiella pneumoniae; identical to SEQ ID NO: 121765

SEQ ID NO: 233592 - DNA, 483 bp, Klebsiella pneumoniae; identical to SEQ ID NO: 183790

SEQ ID NO: 233593 - DNA, 267 bp, Klebsiella pneumoniae; identical to SEQ ID NO: 183791

SEQ ID NO: 233594 - DNA, 477 bp, Klebsiella pneumoniae
atgggtgtcagcgttggaggagataaacagccagccattgggtcggtcctcacggacaccgcgcatccagtcccggatagtgaacggctcgccgttcttctcaatgccctgcaggtagcgaatagccttgacgtagttggtcagcacggcacgaatggagatggccgttttctcaattttctcttcaaccaggttcgctgccggcgtgttctgcagataggcgcgcagcttgtcgattttaatggacagcatggtatcgaccagcttctcgtagctgcgatccttgtcttcacgcatcaggtacgcgccttcggcaaagatagtgcgaccggagccctgccagaacgggtcttctttggtacccatcgggataagggtgttggagatgttgtcgaagtccggcagcgtcaggcactctttccacaaatcccaggccgcgcagcgcgaatccagcgggttgaggattttatccagtga

SEQ ID NO: 233595 - DNA, 690 bp, Klebsiella pneumoniae; identical to SEQ ID NO: 92403

SEQ ID NO: 233596 - DNA, 390 bp, Klebsiella pneumoniae
atgaaaaacaacaccgaacaaccggtcagtacgacctctcatacctttcgccggatacctgtcatcgttgctctcgtgcttttcgccctggcaaccagcgcgtttctctcacgcgtggttctggagtactccacgccgcgggtggtggcttttgatatgaagaagacgctcgacagctttatggacagtgtgagtcagaagcagctgacagaggcgcagtccaaagcgctctctgatcggtttaacgacgcgctggagaagagtctggcggagtatcagcagcagcatcatgtggtcattctggtttcacctgccgtggttcagggcgcgcccgatgtgacccgcaacatccagcacgacattgcccgccggatgaaaggagaacagtaa

SEQ ID NO: 233597 - DNA, 549 bp, Klebsiella pneumoniae
gtgaggagtcttaccgccattttaataattcctgctcttgtcacagcctgtagcatgcaggaaatagcagatacaaataagaaaatcagtgatggtgcttcaggtataatgaactctttgaggggaaactctaacccatcaactgatgttacaacaccaatgcatttacctcagtcattaaaaaaagaatccaagtctaaaaattatactgtagctgttgatgtagatactgctgctgccagaataaaaagacattacaagtttatgtcaagtcaggagctggatagtttacggaatagctctaatgacggggcatggaaagcggtcgctgaagatgatgcacatccagtttgggaggcaatacctggtagctattataaaatgggatctgactggaatgataacgatcatttagatgtagaaattgaaaaaaacgggagtgggagtaaactctatataacatattcttcggcatctgcagaaaggctatcgggatctggcgtacagaagttgatgaaggaaattcattccgtggctataggtgagtga

SEQ ID NO: 233598 - DNA, 657 bp, Klebsiella pneumoniae
atggatattttaaaacaacgccttatgattctgactttcggattctataactttttattcttttatttattattaacctctattgatctaaatatattcttaatgactaggcttgatttctcaatattacatttgcagataattaagcctctgatgatgcttttaatttttttatccataactcacttattaaataacacctcactttaccaaggattaacctgggggaaacctaacaagcagtcatttgtttttttcttgctcataattattgcttacactgcttcatactaccttacgccgaaagaacccttcgttacagaatttactaaaggtttgtcacatggaatggcagctgtaaaaatcgcagccacaattattattttccctctactggaggaactggttttcagaggaattatcctgagttcttttttaaacgcccttggtgaaaaggcgggctatatcatcggtgggctgacagtttctgttttgtttgcagttatacacacacagtattcattgcccaccaaaatccaaatgttttcactttcattaattttctgtggagcaagatatcaaagcagagggcttcttttaccaattctactgcatgctttttgtatcgcgcttggcctatatattgagttaaaataa

SEQ ID NO: 233599 - DNA, 618 bp, Klebsiella pneumoniae; identical to SEQ ID NO: 121644

SEQ ID NO: 233600 - DNA, 1218 bp, Klebsiella pneumoniae; identical to SEQ ID NO: 108025

SEQ ID NO: 233601 - DNA, 237 bp, Klebsiella pneumoniae; identical to SEQ ID NO: 121649

SEQ ID NO: 233602 - DNA, 309 bp, Klebsiella pneumoniae; identical to SEQ ID NO: 150634

SEQ ID NO: 233603 - DNA, 1272 bp, Klebsiella pneumoniae; identical to SEQ ID NO: 186686

SEQ ID NO: 233604 - DNA, 516 bp, Klebsiella pneumoniae
atgccaattcctttagaacagacgatgtgttgggataaaagttcgcagaaaaattcagcaaacacaccggttttgatgatggcggctatctccagacttacaggtagcaatccatcactggcatgcgttccgttgtttgttgatggggtttcatgtggtttcccttctccagcacaggattatgtcgaaaaacgtctttccctcgatgacctttgcatccgctatccggaaagtacctatctggtgcgagcagagggggattcgatgcttaatgccgggattaaagacggtgatttactaatagtggagtgtattcgtgaggcaaagcacggtgacattgtcattgcagccgtagatggggagtttacctgtaagaggcttcagctattgccatcaccagctctggtcccggctaatccagcttattcttcaatcccccttactgaggatatagaaacagtggtctttggtgtggtacgtcatctcgttcactccttcaaattccgggatgcctga

SEQ ID NO: 233605 - DNA, 1524 bp, Klebsiella pneumoniae
atgacgacaaacagctatcttgagtattttctcacgctgctcggctgggtgatcaataacggtctgtggaatgtcctgctgagcaccggcctttttgtccttccgctggcgtttaaggtggtgggtatctggctcagggtccgtgaagagggggaggatgaaggcaacaaggggatgctgtcgctgccccgtatcgagaacgcgctgtatgccggcttcctggtgatgattgcctgctgcgtaccgctgattaatgtcagcctcagtacgatgcagtacgacacaacccgggcaaagagctgtggtgtgtggacgcccaaagcgccggatgaaagcggctatgccggcgtggtcaccagtctcaacgaccagacggctgcagcaccggtatggtgggtgctgattcataaactctcaaaaggggtaacccaggcggccgtggcgaccattccctgccgccctgacatgcgccagatccgctttgaagtgcagcatacgcgtatcgacaacaaagcgctggcgcaggagctgcaggacttcaccaacgactgctattcggttgcgttgtatctgtggaagcaacagggtcagggccagacaaaggacaaaaccacgctgcgtgatatcgaatggattggcagcagtacattcctgagccggtattatccttcgttgcagtccaaactgccccgggctgcgttcccatggtctgacagccgggacagcggtcgacccaataccggaagaggaggctatcccacctgcagcgaatggtggagcagtgcggataccggtctgaaagcccgcgtgaaggaccaggctgacccggatatgtggctgcgtatctcggccgccatgaaaatgtcaggctttaacgacagtgactatcaggaagctgtcatacggcgcctggtcagcccggagagcctgacggtctcacagagtggccatgtgtatgccggctatggcggcaacgccgattttaccctggataatgcagcggcacgcgtggcggctattggcgggacatctctcggcagtctggcggcattcccggcgttcgatgcgatgcgacaggcgctgccaatggtgcaggctatcctgctgatggcaatatatgtcatgctgccgctgattctggcgtttgcggcttacgagttcaagaccgttattacgctgacctttgtaatattcgccctgaacttcctgacgttctggtgggaactggcgcgctggctcgacagctggctgttaaccgcgttgtacagttcggatacacacagccgcttcaatatggcgggactgcagaacagctcagatgacctcattatgaatctggtgatgggagcgatgtttattgtactgcctgccgtttggctgggagctctttcgtgggcaggggccagcgtgggtgtcgctgttagcgctgcctttcaaaagggtactgaaactgctcagaatacaggcgggaaacttggagaagctgctggtaatgctatcggcagtaaagcaaccaaagggtag

SEQ ID NO: 233606 - DNA, 339 bp, Klebsiella pneumoniae
atgcgtaataaaacgactgtcaggaaagtcctgacccgtgccggcatcttcctcgcctgcatggcactgttcatggtggtctcactgatgatggctgacaccgccatgaaacatccgactgaagctgctgcattccggagctggatgcagtcgacgcgttacggctggctgatgtggcgactggcgctatatgcgctggttgcgtggggcctctggaaaatccggcatgcgccgggcttccgggaggcataccggcggccgctgctgcgcatcagcgtggtcagtgtgctttttatcgcgttgtgtgagtacgcgatgtttaccggtccgggagtctga

SEQ ID NO: 233607 - DNA, 1476 bp, Klebsiella pneumoniae
atgaggaaaaccgtgaaaaaaacaccttcattttcagccgttcgcgtaagcctgctgctgaccggctccctgctgaccgttctcccggccgcgcacgcggccgatgatgacaataccatcctgggcatgtccctgccgcaggtgaacaacagcgccatcggttacggcaagtccgtcgatggtgcggtgtcggacaaactgttctacaccctcgggggcgggtcggtcatttcccagccggccacgcgcggcaatatgcagaagctggggctgaatactggctggagcagtgacctgatgtgcggcaatttcgacctgaaaaccaccgtcggcaaccagctcaacggcgtcacatccggctttaaaaacctgatgggcgacgtgattcagggggccaccggcgcggtggccagtctgccggcgatggtcattcagcgggccaaccccggtctgtacgacatgctcaccaacggcgttcttcaggccaatgtgtcattcgacaaggcgcagcttaactgccagaacatggcgaaaaagatgatggacttcagcgacagcagtaactggacgcagcaggccatgatggatgaatacaagtctgttgtgaacagcggagatactgacgcggttcgtgcagatgaggcggggcggaaagtcaccggcacgtcgggcaacaactggattggtggtcagaaacgtgggggggcggggcagcccgccatccgtgtcacccatgaccttgtcgctgccggctacaacatgatgaacggtttacctgtcaccgctaattcgactgtcggcgaaagcagctgtaacggtggcgcatgctctaaattcggcagtgctgaagaggcggcggccatgaccgtgaaggtactgggcgatcgctcgatgcgcacctgtgccaacgcgagcgaatgtaccagcggtgatgcggatgaccagcccggtacgaccgttgccggcaccggctttgccccactgctggaagaggcaactaaagccaacgctgagcagctggtcaggctcgtcaacggtacggaaaagcccacggccgcgaatctggctaagctgaaaaccggcggactgccggtgacggccggcgtgattaaagccctgcagcgtgatccggataacgcggccctgaccgcccgtcttgccggcgagctggccatgtctgacacggtggaaacggcgctgctgatgcgtcgcatgatggttaccggtatgtcggagccgaatgccgctgcccagccaaaggccattgataccgccggtcagcgtatcgaggcgctggatcgggaaatcgcggcgctgaaaaacgagatggagatgaagcgtgaactgtcacgtaattcagtgctgaccattatcgacagggagaatcagcgcgtcgaaaccaacccgcagacccagtcagatgacaataccgacagtcgcttcaaccagatggcagcgccgcagtcggctgaatga

SEQ ID NO: 233608 - DNA, 993 bp, Klebsiella pneumoniae
gtgaatacaacaccttcccgcatcagaaccacggtgtgctcgctggcggttgccactttactgggtacggcaaccgcgccagctgctgttgcagcacttaacacggcgcagattattgccagcgccgtgtcgcaaaactgtatcagctggcgtgtcagtggcatctgttactggctgttctgcaccccctttggctgcaaggtgcgcacgtcggtcaaagtcacccactttattcctcaggcagtcgtttcaacctatgtcgcgccgggcggcaacccgtggcaggaaatggcgtttgtcagccagaccgccggcgggctggagagtgccgtgacccgcgggctttccggtgtttctgccggaggagccaatccggccgacatgaaaaatcccggccagcgcaagtccgccgtgcgtttcaagtatgccgatgcgattggccacccggccacctccctgattggcggcagtattccgggctattcctgtgataccgcagccaccccgttaatgccttacttcctgagtacgctggattcggcggcctggcgcacgggcgtaccggaatccctgtatccggaagcgcttgtacccggccagcgggaaatcggcagtcaggcagcagccaacatgtggggcaacatctatccccgttcggggtttatcagccagaccgatgatgacaaagcctctgccgtggtggcgcagcgtgtggcagacattatcacccgcgccgggcagccccatgtttatcaggtgctccggggcaaccgccatgacgggtactggccaccgggcgaggtcacggaaaacaccggcacgcgcaatcacaaatggcagcggctggctccccacatgacacagtcatgtgccgtattcccggacgggagctataccgccgcgagcgataacaacgaagcctttgcgctctggcagccctacagctgctgcaaaaagcgcgggcagaaatttctgggcagcacagatatctga

SEQ ID NO: 233609 - DNA, 399 bp, Klebsiella pneumoniae
atgaaactgacctctcttgttttcctgccggctctgctgccggcatccgtactggccggcacggccgtcttcaccgacagtcagcatctgccggcaaatctgccgccggacgtgccggtggttcttcttgatggtcctgaccggctgcaggccgacatgttcggggaattgcctgcagacccgcagcaggccgaggcacaggtcaggcaggctatgacgtctcctgcctggcaacaaaaacagctgcaactaaacgattcctatcgccaggtggtccgggcctgggaactgggcattaaaaaagtgccggccgtggtgtttgatgaccgcgatgtggtgtacggcaccacggatgtggccgtggccacatccctgcgtaaccggggaggtggtcagtga

SEQ ID NO: 233610 - DNA, 786 bp, Klebsiella pneumoniae
ttggaactatacacagccaactctctgaatgaactagagaatatactttccaagcatggtactgatgtcttattccgtggtcaaaatactagatacggagatccagggttgccttcggtcaaaacttcttttgaccgacatggatgtatacctagtgaaatgctcaagtggagtcgttacgcaaaaaatgttcttagcacgactatcgggcatcacgttaacgactttaaatttatacaggcactcctccaacattatggttggcgctctttttatattgattgctcgtcgaacgcagctgttggggcgtggttcgccagccatcagtatgatcaacagcatacattagaaatgagtgaagactttgcagagcgacccgtctggttacgaaagctaaaggcgcgatatactcatagcgagggtgtgggttatctttatatcctagataagaaagcagcagaacaggttggtttagtcgatttagcttctttaaagttagagggtttccatcccaggatggaggctcaggcggcatggttagtgggacctctacagcaaactgatctccctcaaaattgttttctctctgaaattaaatgcagtagtgagattttgcgtaagtactcttcaaagaatggctttgatacaacaagtgaccttttccctcctataacggacgatcctattctaaggatgttactcggattaccttggagagaattagctgacgtaaaagataaatcattcccggtaatccccccgaaaaaccagtgcatgcataagtag

SEQ ID NO: 233611 - DNA, 444 bp, Klebsiella pneumoniae
atggacacaaataaatttacacgccatgatttttctgaaactgcctttactctgatgcaaattattggagataacagccaaggtgaggctaagaatagagaagattattaccaatcagctacgttctctctgagtcaacttaattctttaatggtaattgataaagcaaagactatagcgaataagagaatagtattcactcttgcagatagtttatcttttaaccttgaacttaaaaatcattttaacaaaacagttataacgttaagttacattgatcaagatgaatatggcaaagagtttttaagcaaagataagagttactcgtttactatatatgaaaatgaacggctgagtgatgttgatggacatttgaaccgaagatactaccacgaacactttgcacatatctttaccttgcttgtagagaaaatcatcaattaa

SEQ ID NO: 233612 - DNA, 420 bp, Klebsiella pneumoniae
atgaacaaaaacgaaccaccatttctggcaattgattaccgcatcctggcattagatattaaagcagccatcaacgaaaaaaacattgatagcagcaccattctcaaactcaaattagtctattgttacctactcgggttatccaaaaaatgcagtgaagtttatccagaacaaacaaaaatgggtaaaacattgggtattggttcccgacaggttgttggaagatgcatatcgctgctcgaatctctgggatggatctcaaaaacatcgagaaacggaacatcaaatctataccaggtgaaaaccgtcgagcaaattttagaaggtatgccgcgagaggttaaagaagaggaaaaggaatttcatgattttaatacaggaatagtattaattgaagatgatgatgatttaccatggtaa

SEQ ID NO: 233613 - DNA, 147 bp, Klebsiella pneumoniae
atgaatacagagaatatcgaagaggcactttggataatattaaacgccagacaatgcaggaatggtttagagaaagaaacaaaatcaaaaaatattaaaaaatgtctctatttagagtctctatttattgacaaaataatgttttaa

SEQ ID NO: 233614 - DNA, 369 bp, Klebsiella pneumoniae
atgaatgctgtattaagtgttcagggctctgctgtctctgaaaaaaccaaaccgtcttttatgtcccgcgttttcaataaaaagaaagcactgaaagtcgctaaagttgcgctaccggttgctgctgtggcggcgttcttcccggatgctgcgatggccaccaccacggcaaccgacctgatgaagtccggggatgcgaccgttaaaggcacgtttggtaagcagtccagcgtcgtcaaatgggtggttctggcagaagttgtcgccggcggcatcatgtacatgatgaccaaaaacgtgaagttcctgtttggcttcgcgattatttccacctttataaccatcggtatgtcggtcgccggttactga

SEQ ID NO: 233615 - DNA, 306 bp, Klebsiella pneumoniae
atgacgggagacgaattaaagcgataccgtttcccggaaacactgactaaccagtcccgctggtttggcttatatctcgatgaacttatcccggccgtgatttgtctcggttggggtttctggaccagcaagttcatatttggcatagcttcagcggtactggttttctggggtatcaagaaactgaaaaaagggcggggcagttcctggctacgcgacctgatttactggtatctgccaacctcccttcttaaaggtttctttcatgatgttccggactcctgtttccggcagtggattaaataa

SEQ ID NO: 233616 - DNA, 294 bp, Klebsiella pneumoniae
atgatgtgcatcagcctgcggtgccggctccgcctcctgattctgagcctgctgttgcccgttcttttccgcttccagttcttcaatcgttttcagctggaatccatcctggaacacgacggtcacttcgttgccggcaccaatcggaatgatcgggtgatactgctcggcccttttgatgtagtactcgctcagcgtctgcgcagctttagatgcaccaccgccgacccccattttcagaacgtcaccggcgccaacagatgcggttgcccccaggccaacagccggctgtga

SEQ ID NO: 233617 - DNA, 561 bp, Klebsiella pneumoniae; identical to SEQ ID NO: 118686

SEQ ID NO: 233618 - DNA, 969 bp, Klebsiella pneumoniae; identical to SEQ ID NO: 121809

SEQ ID NO: 233619 - DNA, 612 bp, Klebsiella pneumoniae
gtggaattggagaggattcttaaattttcggttgaggatggaaaatcgctgacagacgatgaagttattgaagtatataaattgattgaggctaacattgaacatgttcgcttctcacataatgagttttttatttatctttcggatcgctacctagatctatcgatcgcaatagatgaaaaggatagggaaaaagaaaaaagtcgtaaaagtgttatcagaaattccttggtaattctggtcgtgatggctgcaatttatggtagtgccaagctagttatctatataacaaaacccagtgaactggatatacaacagtctcgggcctatgcttctttacgtattgatgccattaaccgcaaacaacaggcgttgcagtttttaaagagtgcgccagatgtatcgaaagaagatctctctttgattacgtctacgattacgaattctggtattagttttggggattcttttgttcttcaatgccaagagtatggagaaaaggttgcaataaatacattggctttatctccgaatttatcgagcgaaacaattaaagcattacagcaagccgttgatgcacaatgtgagttgtataatcttgataaacagtaa

SEQ ID NO: 233620 - DNA, 162 bp, Klebsiella pneumoniae; identical to SEQ ID NO: 92464

SEQ ID NO: 233621 - DNA, 381 bp, Klebsiella pneumoniae
atgtcggaacaccataaaacccaacaacacctaagaaaaatcaagttcttcgctgacttcatcaaggataatcagaagtctacagacgataacgtagagctattgacagctaaaaattcgcgatgggaagttaccctctttttaagagtaggtccaaagagatccgggaacaccgctggcggaacgatactggtggatgactggaaaaagccatcaaccactctgactaaagacgaaaggcacctgctactacgtgaatttgatgcaactggattaatcacggtattaacccaagagctactggcaaaaatgctcgatgtatcatccagcacaatccagaaggatcttgctgaactcaacgagaaaaaactttctttgtaa

SEQ ID NO: 233622 - DNA, 564 bp, Klebsiella pneumoniae
gtggctaaataccagattgactctatccagagctggccttcatttgaacatgatggttctatttattctctttcacatctcgatgctcatgagattacgtacaaggggaaaaagcaggactacaaatttgtggtgacttatggtcttcactgcttcgctaaagatgcaacgccttacaacatccctctggtttatgaagatgggcgagaacagataactatctgcatggagcgttacgaggcatcaaaacagctccgtagcattttggcgaacttgcccaatgttctcctgtatcacacagccgctgagaagtattttaccctgcacatgatgaacagcgcgacaggtcagatggagccgtacaaagtttgcattgccttctataaagagaagcgcttgctacgaatgcacatcctttccgcattcttcgtacgaactgggccaggtgcgcctgatgtgccgatcccaaacaaatctgtcagtctgtttaaagttgcgttagatacttcgcgaattcctcgcaacactccaggaccgaaagaagcgaacaaccagaagaagtag

SEQ ID NO: 233623 - DNA, 213 bp, Klebsiella pneumoniae
atggaaacttggttttactgtgtagaaatatccggcactagctcacagggctatccttatgtatacaaagaagatggaattatcacaccagataaccttaaatttccttcagtagaagatatcattaatcacatcaaagatagccataccccaaaaacagaaatggggaatgctatcggcactgtagtattgatagcgttcaacaagatctaa

SEQ ID NO: 233624 - DNA, 141 bp, Klebsiella pneumoniae; identical to SEQ ID NO: 102289

SEQ ID NO: 233625 - DNA, 960 bp, Klebsiella pneumoniae; identical to SEQ ID NO: 102287

SEQ ID NO: 233626 - DNA, 213 bp, Klebsiella pneumoniae; identical to SEQ ID NO: 102285

SEQ ID NO: 233627 - DNA, 441 bp, Klebsiella pneumoniae; identical to SEQ ID NO: 202153

SEQ ID NO: 233628 - DNA, 192 bp, Klebsiella pneumoniae; identical to SEQ ID NO: 202152

SEQ ID NO: 233629 - DNA, 402 bp, Klebsiella pneumoniae
atggccagagtgtctattagtgaggctgcccgactgacgggcaagagtaggacaacactgcacaggttaattaaaacaggtgacctgtccacctgtagtggtgagcgcaatgcaaaaatggtagatacttcagagcttttacgtgtctttggtccctttgagcaaccgaagggtgaacaccattctggacaggtctctgaacagcgtgatacagcctctgctgaccagagtgaacaggtgattcgtcatctgaaacaggagattgaacacctgaatatcttacttttgtccaaggattcgcacattgacagcctgaaacaggccatgctccttcttgaaaatcaccaggcaaaattaactgaatccccggcgccatggtggaaattctggaaaaaatcctga

SEQ ID NO: 233630 - DNA, 192 bp, Klebsiella pneumoniae
atgacgaaacaacagaaaacagcgctgaacatggctaaattcatccagaatcagtctctgctcctgctggagaagcttaacgagcttgatctcgatgtcgaggccgacctttgtgaggaactccacgatgatgcggagcatcttttccgtacactgtcctcgagactggatgcattacaggatggtaactga

SEQ ID NO: 233631 - DNA, 192 bp, Klebsiella pneumoniae
atgcagaatgctaacaggaatgaatgggttgattacgccaaaggttttgggatagtacttgtagtctatggacatatttcaagaggtttatataattccggaataataagcgatactaaatggtttcattttatcgattctttaattcctttcatatgccgttgttcttcttcctttctgggcttttcttaa

SEQ ID NO: 233632 - DNA, 2628 bp, Klebsiella pneumoniae; identical to SEQ ID NO: 233130

SEQ ID NO: 233633 - DNA, 1071 bp, Klebsiella pneumoniae
atgttgatgcagcatatcggtgtcggctattttgggtattaccgagcaactgcttatgcgatgaaacactctcttatgcccgagattgcgaagttaagaatgaaggctctgaacttctgggataagcacgggatccgtgccgcagctgatgcttttgacgtatcaacgcgaacactctactggtggcgccggttactgcgcaccggtggtccagaagcactaattccaagaagcaaagcccctctggttcgccgttcaaggcactggcatcctgatgtactcaaggagatcaggcgtctgagaactgagttacccaatctcggcaaagagcagatttttgtcaggctgaaaccatggtgtgaagcgcggcattttacctgtcccagcacgtcaaccattggaagaatcattgctggtgctcacgataaaatgcggatgatccccgtacgcctcagcgccaggggcaaagcccggttgataaaaaaacgctcagtgaagcccagaagaccaaaacaataccgcccggtaaaaacaggcgaactcatagggatggacgcgattgaactcaggatgggggacctacgccgctatatcattaccatgatcgacgagcacagcgactatgcgctggccctggcggtcccttcactcaacagcgatattaccagccatttcttcagcaaggccacaaagctctttcctgtcgctatcagacaagttgtcactgacaacggtaaggagttcctcggtaactttgataaaacgctacaggaagcctcgattaaacacatctggacctatccgtacacaccgaaaatgaatgcgacctgtgagcgatttaaccggacacttagagaacaatttattgaattcaatgaattgttgctttttgaggacctgaatttgtttaatcaaagaatggctgaatatctggtgctgtataacagcaaaaggccacataaatcactcgaactgatgacgccagtggactatattttacgtgagagtaaaaattgcaatatgtggtggacccatacaattgagcacggtaagaggccatactgttgttga

SEQ ID NO: 233634 - DNA, 1089 bp, Klebsiella pneumoniae
atgaaagcgctggttttcctaggattacgacacacaatattagctgatatatggcaaaaagagtaccaggaaggaaaaagaaatgatagtatgctttacggatatggaaatgcagtaacgcccggcatacaggttgattattgtagatttaataaatttgaacgacttttttttaaagataatataattggcaaattatatttgtactgcctcaagctcccattgctgcttttgaaatatgatattgtttggacgcatgttgatagagatgcgctttttattgctaagttaagaagattacctatcatcaataacttttttgcaaagcatatcgctaattttgtttggttaatagaccattcgcaaaattattcagatagacagcttaagaaaacacaaaaattattaaaaactattgataagatattgtatctatctacagctgaaaaagatgagtttataaataaatatcaatgtgaacaaagtcaactactctatacaagatatggtattaacttttcagcgtatgactataacgccctgtcagttaaacctattggattcgataaagaagattttattttgtccgttggaacagatcagcatcgagatctggaattattagatattattgcaaaaaacaatccagataaacaatttgtaatttgttctggaaaccctgagcatcataaacgaaatttttctagggataatgttactattatcagagcttcatataacgaaatggtatatttataccatgcatgtaaatttgtagtgatccctttaaagtttaattttcatgctagtggcatcacaactctattagaagcggctgcggctagaaaagcggttttattaaattacaccccaggtcttgaagattatggccaacatgataatacctgcctttttgcttcgttaggagacattgaatcgtttgataggaaccttaacaaactatgggatagtgaaaagttaagaaaccgtcttgctgaaaatgcatataaatatttacattctgatttcaacacacataaatactcacaaatatatattgaactgagtaaaaatatacttggcatataa

SEQ ID NO: 233635 - DNA, 2058 bp, Klebsiella pneumoniae
atgtctgcaacagagtctaaggtaaaaactgcaccgaaaaccagcaaaaaaacgcttaagtctgccgaagctgaggcgcttaaagtggctctcgatgccgcacaggtcgagtatgtcccggtgacggcactggtgaagtctcccctgaacgtcaggaccattccctatccggcggagaaagtctgttcaatggcagattccattgaagccattggcctgttgcagaatctggtcgtgcataacctcccggatggtcgctgtggtgtggctgccggtggtcgtcgcctgaaagcgctgcagctcctgcagagtgaaaaccgtatcgatgccggatatcaggtgatggtgaaaaaggtacctgatgaactggctgttgcggcatcaatggcagaaaacgaacagcagatggcaatgcatccgtctgaacagatcgccgggttccgcacactggcagagcaggggaaaacccccgcgcagattggcgatttgctggggttcggtacgcgtcatgttcagcgcatgttgaaactgaccgaactggctcccgaaattctggcggcgctggcgaaggatgaaatcaccaccgaacactgccaggcactggcgctcgaaagcgatcagaaacgccaggtggaagtgctggaatccgcccgcaaacggtcctggaataatgaagtatcagtttcctcgatccgtaacctcattacctcagaagaggtttccacaaacggcgacaaattccgctttgtgggagaggccgcattcagtccggatgaaatccgggttgatctcttcagcagcgaaaacggcggctatgtcaaaagtgcatcgctcgataccgccctgctggaaaaactgcagaacatcgcggagcacctccgcgaagcggaaggctggtcatggtgtgatggtcgtcttgacccgatttctcactacgggaaggacactaaaatctggcgcctgcatgctgtcccgcctgtggaatataccgaagccgaatcagaacgtcttgcagagctggaagctctggaagctaagtatgaagacgagaatcccggcgtgaatgatgacgtcttggccggggctctggaagctgtctgggaagaacagcagaccatcgcgcaccgggcaaaacaccgggcatggacggatgaaatgaagcaatctgccggggtggtggtttcctggactggccaggaggtgaaagtacagcgcggtgtggtgctgtgcgccgatgaaaaaatggaggagaaggatgcatccaccaatcaggcccctgaaaaagtcgatccgctggacgccgtcagtgtcccgttgctgacccgcctttcttctgagcgcacactggcggttcaggcggccctgttgcagcagccgcagaaagccgtcgcgctgatggtctggaaaatgtgtaactcggttttccataccacaacgtccgtcaaagagccgttctgcattagcgtgagtgtgtcgcattacgcgctgacccgtgaagcacctgacggtgaaaacagcgttgcgtttcaggccatccagtcagaaaaagaacgtcttgaagccctgctgccggaaaactggcgaaaggatatgaccaccttctttacgctcgatggcgcaaccctgatggcactgatggctttctgcaccgcctgctccatagatggtgtacagggcaaggatgaatttggtcgtaaacaccagagttcgctggatggggtggaaaacgccattcagtttgatcttcgtgactggtggaaaccgacggctgataaccttttctcgcacatgaagctgccacacattgtacaggcactctctcaggccggactggctggcgcagcacaggacgccgcgaagatgaagaaaaaggatgccgctgaacatgcagagcacttcctctcaaaaatccgttgggttccggaatggatgaccagtgctgacaatcagaaacagcttgccgcaaagtctgaactcagtctggcaacaagtcagaacgataccgacgctgatgccggcgacgtcaccgaccataacaacccggcctgcgccgcctga

SEQ ID NO: 233636 - DNA, 2001 bp, Klebsiella pneumoniae
atgtcagtgaccgagtctaaagcaaaagcgccggttaaaaccagcaaaaaatcggtgaaccctgccgaatccgccgccctgaaagccgcgcttgagactgctcaggttgagatggtgccgctgtcggcgctggtcaaatccccgctgaacgttcgcacgatcccctatccggctgacagtgtccgggagatggctgactccatcatggcggtcggcctgatccagaatctggtggttcactcgctgccggacggtatgtcaggggtggctgcaggtggccgccgtcttgccgccttgcaacagttgctcagcgagcagcgcatcgatgccgggtatctcgttgtcgtcaagcgtgtcagtgacgacctggcggtggtcgcctcgatggtcgagaacaaccagcgggtggccatgcatccggcagagcaaatcagcgggttccgcaccctgtcagaacaggggaaaaccccggctcaaatcggggacctgctgggctacagtgcccgtcacgttcagcggatgctgaagctggcaaacctcgccccggaattgatcaccctgctggcagaggacaaactcgacgtggagcagtgtcaggccctgagtctggagagcgacccggcacgtcaggtgcaggtgtatgaccaggtgaaaacctcatacggcagtactcccgctcacctgctgaagcgggccatcacggatacggaaatcgccgtaacccactcccgctttgtgtttatcggtcgtgaagcgtatgaggccgccgggggcgtggtgcgtgaggatctgttcagcgcccaggagggagacggaacggcggacggggtactggttgagcgtctggttcaggagaagctggcggcggctgcgctggccatcgaacaacaggaaggctggtcatggtcactggctcgtgagggatccgtcagaaactacggcgatgaccgggagcattatctggtgctgccggcgccggagggggaattcagcgctgaggagctgcagcgtcttgatgaactgtatgccacgctggaggcaacggaaacctttgaggatgaagccgcgattcaggtgctgattgatgagattgaaaatgcggcatcggttcgggcgtggacaccggagcagaaagcggcctgtggcgtggtggtcagtctgtatgacggtgagctttgcgtccagcgtggtgtccagaagaagatccagacggcggtctctgacgtcggggaacacggtggcgatcaggctgccgtacatgttgtcacccgcagtatcccggatgcggcagagggcatcagcgtgccgttgctgaaaaaaatgtcttcagaaaggactctggcggttcaggccgaactggttaagcagccacagaaagccgtggccctgatggtctggcggctgtgcagttgcgtgtttggctactgcaccaccacccgacatccgtttgtcctgcgccttgaggtgcatcacagcggcctgaccagtgaagccccgaccggagaggaaggtcaggcatggcggtatctgatgcaggagaaagcccgtctggaagccctgctgccggaggggtgggaggatgatttcaccaccttctttaccctcgacggacagaccctgatgtcgctgatggccttctgtactgcctgttccgtagacggtgtccagacccgtgaatgtggacatacccgccgcagtgacctcgatggcgtggaggcggcgctgggatttcatctgcgcgactggtggcagccgacagcggataacttcctcgggctgctcagcaaggcccagattgtggcggcgctgaaggaggccgggctgaccggagccgcctcggatgccgaaaaaatgaagaagggtgatgctgccagccatgctgaacaatggctctccggctcccgatgggtaccgggctggatgcagtccccggatgccgcaaagccggacgatgcacatgctgccccggacactgacgaaccgacttcacacgctgcctga

SEQ ID NO: 233637 - DNA, 543 bp, Klebsiella pneumoniae
atggcagcacgtggcgttaacaaagtcattctggttggacatctgggacaggatccggaagtgcgttacatgcccaacgggggcgcagtggccaatctgacgctggccacgtctgaaacatggcgtgacaagcagacgggagagatgcgcgaaaacaccgagtggcaccgtgttgtcatgttcggcaagctcgcggaagtggcgggcgaatacctgcgtaaaggcgcgcaggtctacattgagggccagctgcgcacccgcaactggcaggacgatgccggagtcacgcgctacgtcaccgaggtactggtcgggcagaacagcaccctgcagatgctcggcggccgccgtgaagccggtgtgcctgagagcgccacgcagtcgcagagtcctgccaccccggcacaacctgctcaggccgcgactaaatccccgaaagcaaagggcggtaagaaaggtcgtcaggacgccgccccgtctcagcaaccgcctcagccacacccggatgatttcccaccaatggatgatgaagcgcccttttaa

SEQ ID NO: 233638 - DNA, 1032 bp, Klebsiella pneumoniae
atgccgatcatagcaccaataccccgtggcgaacgacgcctgatgcagaaagctattcataaaacgcgcgataaaaatcatgcccgcagactcacggccatgctgatgcttcatcggggtgaacgggtcagcgatgttgccagaactctctgttgtgcccgttcatccgttggtcgctggattaactggtttacgcactcaggtattgaaggcctgaaatccttacccgcagggcgctcccgacgctggccttttgaacatatctgcaccctgttacgtgagctgataaagcattctcccggcgattttggttatcaacgttcacgctggagcaccgaattactggcaataaaaatcaatgagataaccggttgccagttacatgcaggaaccgttcgccgctggttgccatctgcggggcttgtatggcgcagggccgcgccaactctgcgcatccgtgacccacataaagatgaaaagatggcggtaatccacaaagcgctggatgaatgcaacgcagagcatccggtattttatgaagatgaagtggatattcaccttaatcctaaaatcggtgcgggctggcagttgcgcggacagcagaaacgggtagtgacgccggggcagaacgaaaaatactatctggccggcgcactgcacagtggcacgggtaaagtcagctacgtgggcggcaacagcaaaagttcagcgctgtttatcgctctgctgaagcacctgaaagccacttaccggcgggcgaaaacaatcacgctgatcgttgataactacattatccataaaagccgcgaaacacagcgctggttgaaagcaaatcccaagttcagggtaatttaccagccggtttactcgccgtgggtgaatcatgtggaacggctatggcaggcacttcatgacacgataacccgtaatcatcagtgccgctcaatgtggcagttactgaaaaaggtccgccattttatggaaaccgccagcccattccccggaggaaaacatggtcaggcaaaagtgtag

SEQ ID NO: 233639 - DNA, 645 bp, Klebsiella pneumoniae
atgtcgaaaagagtagctgcatttgttggtataagtgaatatatgatgcagcttcatcaaaaaaatggttttgcaaagcatggaatccatacaactatatataatactgtttctaaacaggaagttaaaagaaaatctgatgaacaagttataattggcttttttgggaggctaacagtagaaaaaggctttgatactttttgtaaaatagcacaccagcatcaaaataatcaaaaaaaaataaagtttattgctgctggtcccacagactcgttaaccgaagaattaaaagcaatggctggtgacgctggagtggatttaacgggctttatgactcttagcgattttttatccactactgatttgattattcttcctactaaatggaatgagccttttggtaggagtgttgtggaattggcattagctggtaagcctgtatttacaaatttgacaggcggaactaaagaaatcgctgcactatttccaaatattttccctctagaggatttttctgtctcaaaaatatatgagaatcagcaatttaaaataggtgaaggtgtggttgaaaaattctctagtgaaagaatttgtaatcaatatgaatcactctacaagagagttcttaataatggaaaaaactaa

SEQ ID NO: 233640 - DNA, 261 bp, Klebsiella pneumoniae
atgcatatgtcaaagtggaatatcgcctctttttcaaaggaggagcaggataaagttgccgtcgataaggtggccgctgctgtcgcctggcaggaaaggatgagcaagcccgtcgtgccggaacttgttgagcgggaacagcctgagcacctgcgcgagtatttccgtgaacggctccgcgtacatcggctgaacagtctgcagctgccgcgcgcaaatgcgcccgaatataataaacccggagatgagcagcagaagtga

SEQ ID NO: 233641 - DNA, 435 bp, Klebsiella pneumoniae; identical to SEQ ID NO: 10324

SEQ ID NO: 233642 - DNA, 393 bp, Klebsiella pneumoniae
atgatgctgtttcttcgaaagtatggatttttgtttacccctccagtctactggctcatctatctgggagccagactgacttacaatggactggcaggagacttttctgctgatttccttcagggtattcgacatgaaggcgtctatattatctgtagtttgtgtgtattttattttttctgcttagaggtggaagttggtgatggcgaattctcagcgaacattctgttcctgattgttttctttcatgtggttttattatttatcactctgcttatttgtttgtggcaaggggaggtgttgttggattcgatctttatgggtcagattatcgcctccatgtgtttattgtttttcattcctgtgctttccattataaggaggagtttctag

SEQ ID NO: 233643 - DNA, 219 bp, Klebsiella pneumoniae; identical to SEQ ID NO: 216545

SEQ ID NO: 233644 - DNA, 294 bp, Klebsiella pneumoniae
gtgacgcttttaaccggtattaacctgttttttattccgtttcagcctgttccggctctgtggggggctatcctggccgttgcttttgttctgattaatgtcgtggcggataagctgcgcctctggagtggcattgcgtggattatcgttgccggcatcatcataacgctgatgctgaaggggaaagagccgggtgacgaattacgcgggttgatcaccgtttttgctttcctggcttcggcctggtactgcgttgtacagtacagaaaagagcagggcgaatctcaattctga

SEQ ID NO: 233645 - DNA, 285 bp, Klebsiella pneumoniae
atgggcttaaattctctggaggctgatgcagctattcaggaaactctaaaacgaactggttttaatatgagctatgaaaagatttctgatatttctaaagacgtacaggataaaattggtcagctaagtcttggcgagtggaaaacagataagaaaacaggacaatcaacatattcaggcggtggagaaatgggagattggctccagatgatggttagtcgtggaggctatacccagcagggagcgctaaaaacggctttgttgaataaatcagatttcgggtaa

SEQ ID NO: 233646 - DNA, 162 bp, Klebsiella pneumoniae
atggtcaggcaaaagtgtagcggtattaggcgcagctatttagcccgatctgatgtcagccagattaagcgtgtttactatgaaatgagtccggatgaaggggataaatttgttcgggcgattaaggaaaatacccaaatcaggatgaacctgaagaaataa

SEQ ID NO: 233647 - DNA, 528 bp, Klebsiella pneumoniae
atgcgtaccgtcgtttataccgctgagattgatgaccgctttggcgccggaaaagtcagttcacgtatcgggctctcctcgccggcccgattgtataatccacagacctcgttatttgacgatattgcggcggagcaccagctaaagccgattcactgcgtgctggtggatgaaagccagtttctgacgcgtgaacaggttcatgagctgtccgaagttgtcgatacgctggatattccggtgctttgctatgggttgcggacggactttcgtggtgagctctttaccggcagccagtatttactggcctggtcagataagctggttgagctgaaaacgatctgcttctgcggccgcaaggccagcatggtattgcgcctcgatcaggaggggcgtccttataatgagggtgagcaggtcgtcatcggcggtaatgagcggtacgtatcggtctgccgtaagcattataaagaggcgctgagcgtcggttcgttaaccaaggtacaaaaccagcaccgtccctgctga

SEQ ID NO: 233648 - DNA, 2676 bp, Klebsiella pneumoniae
atggctgttactaatatcgctgaactgaacgcgcttgttgagcgtgtcaagaaagcccagcgtgaatatgccagtttcactcaagaacaagtcgacaaaatcttccgcgccgccgctctggccgctgcagatgctcgaatccctctcgccaaaatggccgtagccgaatccggcatgggcatcgttgaagacaaagtgatcaaaaaccactttgcttccgaatacatttacaacgcttataaagacgaaaaaacctgtggcgttctgtcagaagacgacacctttggcaccatcactattgctgagcctatcggcatcatctgcggtatcgtaccgaccactaacccgacttcaacagccattttcaaatcgctcatcagtctgaaaacgcgtaacgccatcattttctctccgcacccgcgtgcaaaagaagccaccaacaaagcggctgatatcgtgctgcaggctgccatcgcggccggcgcgccgaaggacctgattggctggatcgatcagccgtctgtagaactgtctaacgcgctgatgcatcacccggacatcaacctgatcctggcgaccggtggtccaggcatggtgaaagcagcatacagctccggtaaacctgctatcggcgtcggcgccggtaacaccccggtagtcattgatgaaaccgccgacatcaaacgtgccgtagcgtccgtactgatgtctaaaaccttcgataacggcgtgatctgtgcttctgagcagtccgttgtggtggttgattcagtctatgacgcggttcgcgaacgtttcgccagccacggcggctacctgctgcagggtaaagagctgaaagccgttcaggacattatcctgaaaaatggcgcgctgaacgcggctatcgttggtcagccagcggccaaaatcgctgaactggcaggcttcaccgtgccggccaccaccaaaattctgattggtgaagtgaccaacgttgacgagagcgagccgtttgctcacgaaaaactgtctccgacgctggctatgtatcgtgcaaaagatttcgaagacgcggtagccaaagcagaaaaactggtcgccatgggcggtatcggtcacacctcttgcctgtacaccgaccaggacaaccagccggctcgcgtggcttacttcggccaaatgatgaaaaccgcgcgtatcctgatcaacaccccggcttctcagggtggtatcggtgacctgtacaacttcaaactcgcgccttccctgactctgggttgtggttcctggggtggtaactccatctctgaaaacgttggtccgaaacacctgatcaacaagaaaaccgttgctaagcgagctgaaaacatgttgtggcacaaacttccgaaatctatctacttccgtcgtggctccctgccaatcgcactggatgaagtgattaccgatggtcacaaacgcgcgctgatcgtgactgaccgcttcctgttcaacaacggctatgccgatcagatcacttccgtactgaaagcagcgggtgttgagacggaagtcttcttcgaagttgaagctgacccgacgctgaccatcgtacgtaaaggtgccgacctggcgaactcctttaaaccagacgtgatcatcgccctgggcggcggttccccgatggatgcggcgaaaatcatgtgggtcatgtacgaacatccggaaacccacttcgaagaactggcgctgcgctttatggatatccgtaaacgtatctacaagttcccgaaaatgggcgtcaaagccaagatggtggcgatcactaccacttccggtaccggttctgaagtgacgccgttcgccgtggtgaccgatgacgcgaccggtcagaaatacccgctggcagactacgcgctgaccccggatatggccattgtcgatgccaacctggtgatggatatgccgaaatcgctgtgtgcgttcggtggtctggatgcggtgactcacgccctggaagcttacgtttccgtactggcttctgagttctctgacggccaggcgctgcaggcgctgaaactgctgaaagagtacctgccggcttcctatcacgaaggttccaagaacccggttgcccgtgagcgcgtacacagtgccgcgactatcgccggtatcgcgttcgctaacgccttcctcggcgtgtgtcactcgatggcgcacaaactgggctcccagttccatattccgcacggtctggccaacgccctgctgatctgcaacgttatccgctataacgcgaatgacaacccgaccaagcagaccgcgttcagccagtacgaccgtccgcaggctcgtcgtcgttacgctgaaatcgccgatcacctgggcctctccgcaccaggcgaccgcaccgcagcgaaaatcgagaaactgctggcatggctggaaagcattaaagctgagctgggtattccgaaatctatccgcgaagctggcgttcaggaagctgacttcctggcccacgttgataaactgtctgaagatgcattcgatgaccagtgcaccggcgctaacccgcgctacccgctgatctccgaactgaaacagatcctgctggatacctactacggccgcgaattcgtcgaaggcgaagccggtgcgaaagccgaagttgctccggtaaaggctgagaaaaaagcgaaaaaatccgcttaa

SEQ ID NO: 233649 - DNA, 270 bp, Klebsiella pneumoniae; identical to SEQ ID NO: 217394

SEQ ID NO: 233650 - DNA, 1149 bp, Klebsiella pneumoniae
atgtgggtttccgccctgctcggcatggccagcagctttgctgaatgttcccttgctcagctgtataaagaacgcgatagccgcggacagtttcgcggcggcccggcctggtacatggcgcgcgggctcggcatgcgttggatgggcgtcctgttttcgatcctcctcctgctggcctatggttttatcttcaataccgtgcaggctaactccgtggcccatgccttgcgctatgcgttcgatctgccggcggcggtcagcggcggcgtgctggccgttgtcgttttgctggcgatcctccgtggtttacgcggcgtggcgcgtctgatgcaatggatcgttccctttatggcgctgttgtggatcgccaccagcctgctcatcggcctgtggcacatcaccgccctgccgacgattttcgccaccatctttcgctgcgccttcggctggcaggaggccgccgccggcgcggtgggctacaccatcagccaggcgctgaccagcggcttccagcgcggcatgttctccaatgaagcagggatgggctcttcgcctaacgccgccgcggccgccgcctcctggccgccgcacccggcggcgcaggggatcgtgcagatgattggcgtgtttatcgatactatcgtgatctgtaccgcaagcgcgattatcgtcatgctggcgccgcggcccgacaatgaatatacgctcaacggtattcaggacttgcaacacgcgatgagcgtgctggtcggcggctggggagcgggttttatcgccctcatcgtgctgctgttcgcctttagctctatcgtagccaattacgtgtacgcggaaaataatctggtcttcctgcgcctggataagccccgctatatctgggggctgcgaatactcaccgtcctgatggtgctgttggggaccatggttagcctgcctgtcgtctggcagagcgcggatatcatcatggcgctgatggcgatgaccaacctgacggccattctgctgctctccccgacggtgcggattatcgccagcgattatctgcgtcagcggcggctgggtatccagccgactttcgatgccactcgttacccggatattgaccaacagctggccccgggcgcctggaatgaattgccgcgcgaatag

SEQ ID NO: 233651 - DNA, 594 bp, Klebsiella pneumoniae
atgccaaatcttcctttttatgatcgtcaggtgacgactcaggggctcggtgctagccccgtcaatctacccactacctcctccgatcagcagtttttaggggcggggactgaggcagcagcaagagcagcagagacaattactcgccaggagaatgacaccgcaatgcaaggtgcagcttttggtctggatgctattaagtatgggttattcaaacaggtaagagaaaaacaaggggcagcagcccttgattcttcaaatcaggcattgcagcaattcgatcaggaggctgagaagctaaaccaaaatattcctactagtcgaagggatgaatgggaacgcttaaaaatggctacccggctccagctacagtcctcagctgacgcacatgagtttgacgaaatgaagcgttatcaccaaggacaatttgaagggcgattggatcttggtattgctgatgctcagacctattggaaagagccaattctatataacactgcggttgaaaaagtagataacgcgatcgatacatattcagctgcaaatggttggtctgcagaacagactgccgccatgaagggctttgttgaataa

SEQ ID NO: 233652 - DNA, 270 bp, Klebsiella pneumoniae
atgaatcagctgaccaaaaccaaacctatccttttaacctacgcacaacgcgaagcactggaaattatccagagtgaagagcgggcgcgttctccctacggcgcagcgccatcaatccccgagctggtgcgtagcctgcttgatatagcgctgaaggatgtctacgcagatattgaaaataaaaaacaactggaggaattattaaaaccgactccaatcgctgatacagcgaataaagatttttcgaaagcccatttagaggaggagtaa

SEQ ID NO: 233653 - DNA, 1224 bp, Klebsiella pneumoniae
atgataaaatggtatcgcttcaaaaacttccactcgttcaaagacgagcagctcgtagatctcactcttaaggcaaactcttcagagtcgtcactggacaaacaatgggtggatacgaggataactaaagtattagccgtaatgggtgctaatggttctggcaaatcaaatatgcttaaaccactggcttttttaagctggttttgcagtgaatcatttaaatcaatggataattccgaatcactgcctatgtatccacacatttgcaatatggatgaaccttctgaaattgagatttgctttgttgatagcaggctcattgatggcgaaatgaatcatgtcgaatttaaatattttttgaaactcgacaaaaaaacggtattacatgaagagctaaaatacaaatcaagccgtttattctcatctattttttatagaaaatatgatgcaaccacaaatgaatataaagtaaaaagtaacacaaatgacttccctgtatcagaactaagaactgtgcctaaaaatgcatcagctatatcatacttcagaaggaaagatgataatataatagccggtgcaatgcattacattttctatagcattgagaataatttaaatgtatttggaaaatcaaactttaattatggtaaggtcttgagtgcagcagaatattaccaccatgagcctgagttatttgaaaaggcaaaaaaatacttaacaagaatggattttggtctaaaagatataataataaaagaagatgaaatcatggataaaaagacaggagagttagagcagaagtttatgccctatggcgtacatgagcataatggtgaaacatttaaaatccctttcatcatggagtccactggaactcaagcatgcttctattttatttataaattaatatctgcattacattttggtggagttgctgttattgacgaactagatagcgacctccatccttatatgattcgcgaattacttgatatgttcgcaaatgagggtatcaaccagcattcttcacaactaatatttagctgccacactgcagaaatacttaaatacgtaaataaacataacatttacttggttgaaaaaaatgatagcgttagtgaagcttggagacttgatgaaattcaaggcttgagaagtcaagacaatctttactctaaatacattactggcgcattaggcggcgtaccaaacattgaaatttaa

SEQ ID NO: 233654 - DNA, 525 bp, Klebsiella pneumoniae
atggcaaaaaggaaagtggtacgccgaagcgtcactaaaaccctattacttgtaggagagggtcatgctgaaaaagcattcctctctcacttaaaatcattattttccaatggttcatttaaagtatccatagtcacagctggtgggaaaggccccgaacacgttatgtctcatgccatatcttgtaagcgttgcgatggctatgactttgttattgtgctattggatactgatatcgtttggcccaaagcaaatatcaagaaagctttaagcgcaggaataaaccttgttggttcagaaccttgcttagaggggttgcttttagatgtgctaggtaagaagaaaggtacaacaaatcaaagttgtaaagctctgcttcacccattacttaatgggccatgcacagacagggatagctatgccactttatttactgcagatgttttagactcccctaattgtaaaaaaatacaattaatagttgatatgcttagaggcaaagaagaaaaatctgttatgatctaa

SEQ ID NO: 233655 - DNA, 306 bp, Klebsiella pneumoniae; identical to SEQ ID NO: 112250

SEQ ID NO: 233656 - DNA, 153 bp, Klebsiella pneumoniae; identical to SEQ ID NO: 112251

SEQ ID NO: 233657 - DNA, 213 bp, Klebsiella pneumoniae; identical to SEQ ID NO: 112252

SEQ ID NO: 233658 - DNA, 177 bp, Klebsiella pneumoniae; identical to SEQ ID NO: 86002

SEQ ID NO: 233659 - DNA, 477 bp, Klebsiella pneumoniae
atgtccacaagaacagatttgtcgaaaatcccgtctatctccggaaacaacggttattcgctgcgctgtccggaagtgaagatcaacggccatgaggcccattgcagctatacagtctgccagcacaccatcctcgcctacaaagagaagcgcctcccggcgacatcgttccagtcctgcgctgcggccattgctgctggcaaatgccaggcgctgaagatgatggtcgaagagatccgcaaaggcgaacagctctacttcatcgatatggctgcgcttatcaaagaagtggaagagcaaaacgaccacgccagaacgctaacccggaagcgcaacaccatgacgattaacagtctggttaaacgcacgaagaaaacagaaccagccaaacccgaaaccacgtccaccgattcactggcgcccgtcactgacgtgtacgcggcactcattgaagaagcaaccaaagaaaacacatga

SEQ ID NO: 233660 - DNA, 795 bp, Klebsiella pneumoniae; identical to SEQ ID NO: 112256

SEQ ID NO: 233661 - DNA, 726 bp, Klebsiella pneumoniae; identical to SEQ ID NO: 112259

SEQ ID NO: 233662 - DNA, 702 bp, Klebsiella pneumoniae
atgccgctctctatgggcggctatactattttagagacctttcatttcgcgacaccagaaggcgatgttgttcgtctggtggagatgcgtgccgataaaggcgagttcgacaactttctcgttgtgtatcttttgccctcctataactcagattatcaatttgacgaaatcacgcgggttatggatgacgaggggatgagtgcgtttgaggctgccgaacacatcatcaaaattgagatcgtggatgcgactcttagcccagaagagctgaaggttgtgggtcggtttgcctataacgatttttcgtttattggcgtcgatgggaatgaatacctcggtaagcaaatcaaaggcgcttatctcgaaccgccttttgactcagcccgcataggctctacagcatatcgcttcatactggacaaataccgccacctcgtttgcgacaatttgcaaaccattctgggtgcgtccatgtggtcaggtactatgcggagatatggcgaggttatgatctacgataccgtgaaaaaatgttgtcttgaccagctcggcgacaaggcaaagggttctaccaccggcttcctgccgtgggatattggcagtttgcctttaagtcgcgtaacagacgagtggggagaccgcgagctgcgacttgataaaggctcttgtacgcacatcgtcaacatcatctctctcccataa

SEQ ID NO: 233663 - DNA, 423 bp, Klebsiella pneumoniae; identical to SEQ ID NO: 112263

SEQ ID NO: 233664 - DNA, 243 bp, Klebsiella pneumoniae; identical to SEQ ID NO: 112264

SEQ ID NO: 233665 - DNA, 693 bp, Klebsiella pneumoniae; identical to SEQ ID NO: 112265

SEQ ID NO: 233666 - DNA, 609 bp, Klebsiella pneumoniae; identical to SEQ ID NO: 112268

SEQ ID NO: 233667 - DNA, 255 bp, Klebsiella pneumoniae; identical to SEQ ID NO: 112269

SEQ ID NO: 233668 - DNA, 537 bp, Klebsiella pneumoniae; identical to SEQ ID NO: 112270

SEQ ID NO: 233669 - DNA, 3555 bp, Klebsiella pneumoniae; identical to SEQ ID NO: 112271

SEQ ID NO: 233670 - DNA, 4158 bp, Klebsiella pneumoniae; identical to SEQ ID NO: 112272

SEQ ID NO: 233671 - DNA, 591 bp, Klebsiella pneumoniae; identical to SEQ ID NO: 112273

SEQ ID NO: 233672 - DNA, 798 bp, Klebsiella pneumoniae; identical to SEQ ID NO: 112274

SEQ ID NO: 233673 - DNA, 699 bp, Klebsiella pneumoniae; identical to SEQ ID NO: 112275

SEQ ID NO: 233674 - DNA, 336 bp, Klebsiella pneumoniae; identical to SEQ ID NO: 112276

SEQ ID NO: 233675 - DNA, 4572 bp, Klebsiella pneumoniae; identical to SEQ ID NO: 112277

SEQ ID NO: 233676 - DNA, 747 bp, Klebsiella pneumoniae; identical to SEQ ID NO: 112280

SEQ ID NO: 233677 - DNA, 384 bp, Klebsiella pneumoniae; identical to SEQ ID NO: 112281

SEQ ID NO: 233678 - DNA, 834 bp, Klebsiella pneumoniae; identical to SEQ ID NO: 112284

SEQ ID NO: 233679 - DNA, 396 bp, Klebsiella pneumoniae; identical to SEQ ID NO: 112285

SEQ ID NO: 233680 - DNA, 186 bp, Klebsiella pneumoniae; identical to SEQ ID NO: 112286

SEQ ID NO: 233681 - DNA, 1575 bp, Klebsiella pneumoniae; identical to SEQ ID NO: 112289

SEQ ID NO: 233682 - DNA, 642 bp, Klebsiella pneumoniae; identical to SEQ ID NO: 112291

SEQ ID NO: 233683 - DNA, 681 bp, Klebsiella pneumoniae; identical to SEQ ID NO: 112297

SEQ ID NO: 233684 - DNA, 279 bp, Klebsiella pneumoniae; identical to SEQ ID NO: 86047

SEQ ID NO: 233685 - DNA, 258 bp, Klebsiella pneumoniae; identical to SEQ ID NO: 112300

SEQ ID NO: 233686 - DNA, 528 bp, Klebsiella pneumoniae; identical to SEQ ID NO: 112301

SEQ ID NO: 233687 - DNA, 651 bp, Klebsiella pneumoniae; identical to SEQ ID NO: 112302

SEQ ID NO: 233688 - DNA, 483 bp, Klebsiella pneumoniae; identical to SEQ ID NO: 112304

SEQ ID NO: 233689 - DNA, 282 bp, Klebsiella pneumoniae; identical to SEQ ID NO: 112305

SEQ ID NO: 233690 - DNA, 396 bp, Klebsiella pneumoniae; identical to SEQ ID NO: 112306

SEQ ID NO: 233691 - DNA, 312 bp, Klebsiella pneumoniae; identical to SEQ ID NO: 112307

SEQ ID NO: 233692 - DNA, 300 bp, Klebsiella pneumoniae
atgaccattttcatttgccagcactgtggccgcgagtatgaaggcgctacagtttgcgcctctgacgattgcccggggaatgaaattaagatgcctgtgctggtggaggtatggagtgtggattcgctggccgaatgtctggatgctgtagggccggaactgcaccgcaagctatggtcgttcgtcccggcagaaggggaatcgcccaaagggaaggatatctggcacctgctcagtgaagatgaacagcgggagctggtggacgcggtacacattgagttcccggacgacgaagattaa

SEQ ID NO: 233693 - DNA, 243 bp, Klebsiella pneumoniae; identical to SEQ ID NO: 112309

SEQ ID NO: 233694 - DNA, 519 bp, Klebsiella pneumoniae; identical to SEQ ID NO: 112310

SEQ ID NO: 233695 - DNA, 837 bp, Klebsiella pneumoniae; identical to SEQ ID NO: 112311

SEQ ID NO: 233696 - DNA, 318 bp, Klebsiella pneumoniae; identical to SEQ ID NO: 112312

SEQ ID NO: 233697 - DNA, 267 bp, Klebsiella pneumoniae; identical to SEQ ID NO: 112313

SEQ ID NO: 233698 - DNA, 204 bp, Klebsiella pneumoniae; identical to SEQ ID NO: 112314

SEQ ID NO: 233699 - DNA, 699 bp, Klebsiella pneumoniae
atgaaaaatatcctactggcatcattgttggtggcatcgccggactcatttgcagccagctttgactgccaaaaggcttcgacagaaatcgaacacaaaatctgtgacaacgaacgcctgtcaaaattagacgaacaacttagcgcaacctattccagcgcgctcaaggctaacccagaaaatgcagataccctaaagacggttcaacgacagtgggtaaatatgcgtggaaaactcactgatgataaggctctggagctggcttatcttatccaaattaatggtctcaatggcttaggtgttccggccgctacagcagcggtcaatgagacaccgaagccgacgcagaaacagcctgaagttcaggaaaagacaagcaaggcagacgcaaagccggccaagaaaggtaatgagctaactctggaatcattccgggctaagtatattgaggtcaatggtgagtactacagtacgacatctcttcccagagggagttcgtttttgttcacctgcgccagtcgcattgctgacgaccaggtaaatgtctggaagaagcacgcagcaaaagagggcaagatcgaccttttctttgagcttgagaatcgcatacacaccgcgatgttgaatgccaattttcagcagctgaatagtgatttaactaaaacaggcatttgcgatctgattaccgctgtgccataa

SEQ ID NO: 233700 - DNA, 825 bp, Klebsiella pneumoniae; identical to SEQ ID NO: 112316

SEQ ID NO: 233701 - DNA, 573 bp, Klebsiella pneumoniae; identical to SEQ ID NO: 112318

SEQ ID NO: 233702 - DNA, 843 bp, Klebsiella pneumoniae; identical to SEQ ID NO: 112319

SEQ ID NO: 233703 - DNA, 189 bp, Klebsiella pneumoniae; identical to SEQ ID NO: 112320

SEQ ID NO: 233704 - DNA, 231 bp, Klebsiella pneumoniae; identical to SEQ ID NO: 112323

SEQ ID NO: 233705 - DNA, 414 bp, Klebsiella pneumoniae
atggccagagggatgtatgtgttgtgtgaaattgaaggtgtgctggcgagagccagccatcgcaaagcagtgtctgatgcggatgcaggcgctctcattgccggtgatgaactcatctttcccaccagccgcatgttgcgtggttttgctcgctccggtgctgaagtggtgcttatcagtagtcgtccggaagcgctcgaaggcccaaccaaacgctggctgaaggacttcggcattgattatgactggctccaccttgttccgcgcggtgtcagttttgaaacccatatcaagcgcacgctggcagagcacaaaggcgacttacttatcgccgcactggttcatgatccgcgtctgcgttctgcgctggcagattctcaccagcgaccaaccatctatgaggtaagccaatga

SEQ ID NO: 233706 - DNA, 1104 bp, Klebsiella pneumoniae; identical to SEQ ID NO: 112331

SEQ ID NO: 233707 - DNA, 870 bp, Klebsiella pneumoniae; identical to SEQ ID NO: 112332

SEQ ID NO: 233708 - DNA, 570 bp, Klebsiella pneumoniae; identical to SEQ ID NO: 112335

SEQ ID NO: 233709 - DNA, 747 bp, Klebsiella pneumoniae; identical to SEQ ID NO: 112336

SEQ ID NO: 233710 - DNA, 162 bp, Klebsiella pneumoniae; identical to SEQ ID NO: 112338

SEQ ID NO: 233711 - DNA, 1086 bp, Klebsiella pneumoniae; identical to SEQ ID NO: 112339

SEQ ID NO: 233712 - DNA, 495 bp, Klebsiella pneumoniae; identical to SEQ ID NO: 112340

SEQ ID NO: 233713 - DNA, 645 bp, Klebsiella pneumoniae; identical to SEQ ID NO: 112341

SEQ ID NO: 233714 - DNA, 1065 bp, Klebsiella pneumoniae; identical to SEQ ID NO: 112342

SEQ ID NO: 233715 - DNA, 213 bp, Klebsiella pneumoniae; identical to SEQ ID NO: 112343

SEQ ID NO: 233716 - DNA, 336 bp, Klebsiella pneumoniae; identical to SEQ ID NO: 112344

SEQ ID NO: 233717 - DNA, 180 bp, Klebsiella pneumoniae; identical to SEQ ID NO: 112345

SEQ ID NO: 233718 - DNA, 276 bp, Klebsiella pneumoniae; identical to SEQ ID NO: 112346

SEQ ID NO: 233719 - DNA, 411 bp, Klebsiella pneumoniae; identical to SEQ ID NO: 112347

SEQ ID NO: 233720 - DNA, 372 bp, Klebsiella pneumoniae; identical to SEQ ID NO: 112348

SEQ ID NO: 233721 - DNA, 2343 bp, Klebsiella pneumoniae; identical to SEQ ID NO: 112349

SEQ ID NO: 233722 - DNA, 267 bp, Klebsiella pneumoniae; identical to SEQ ID NO: 112350

SEQ ID NO: 233723 - DNA, 1029 bp, Klebsiella pneumoniae; identical to SEQ ID NO: 112352

SEQ ID NO: 233724 - DNA, 558 bp, Klebsiella pneumoniae; identical to SEQ ID NO: 112354

SEQ ID NO: 233725 - DNA, 645 bp, Klebsiella pneumoniae; identical to SEQ ID NO: 112355

SEQ ID NO: 233726 - DNA, 1170 bp, Klebsiella pneumoniae; identical to SEQ ID NO: 112357

SEQ ID NO: 233727 - DNA, 1236 bp, Klebsiella pneumoniae; identical to SEQ ID NO: 112360

SEQ ID NO: 233728 - DNA, 2373 bp, Klebsiella pneumoniae; identical to SEQ ID NO: 112361

SEQ ID NO: 233729 - DNA, 213 bp, Klebsiella pneumoniae; identical to SEQ ID NO: 112362

SEQ ID NO: 233730 - DNA, 387 bp, Klebsiella pneumoniae; identical to SEQ ID NO: 112363

SEQ ID NO: 233731 - DNA, 891 bp, Klebsiella pneumoniae
atgccgcatatctctgaagtaaaggtaagtgatataagtagggtcttggtcaaccaactggtgaacccactgatactggaaggcaagatcgtccagggcagacgcgtattctccctaatgaaacagttcctgagctggtgcgcttttcaggggctgattgatacatcaccgttgaatgatatgtcgctcaatagagttgccggtggcgcaaagccagtgccgcgcgaacgtaagctgacggacgccgaggtctgggtattctggaacgtctgggattacttcaatgtgtgcgaaggcacaaagtgggcggccaggctctgtcttgtcgccgccagacgacccgatgaagtgctccgggccagaaaggatgagttcaaccttcaacgtgatgtatggaatcaaggtacgcgaaacaaatcggccagacagcacgcgctgccgttaagcccattgatgcgccaatgcgtagaagggttgtttgagtacgggaaaggcagccagtggctcgttccttcgaataagaagaagggcgtggatacgccaatgtctaaggtggccattgcccaggcactgagaaggatactggaacgacctgagttgatggaggttgagtcattcaccccacgcgatctgagacgtacagcgcgtagttatttccctgctctggggattaatcaggaggtggcccgtaagattatgaaccacagtcttgaagggatagatcgcgtctatgatcgccacgattatatggatgagatgcgagacgccttgaataacttctcaacgtacatcgcatctatcgtgaatcaaacagacttagacgagatagaccacaaattcaagggagatcgtctagccaccgagcttattcgtgtaaatttctcacagtga

SEQ ID NO: 233732 - DNA, 219 bp, Klebsiella pneumoniae; identical to SEQ ID NO: 145631

SEQ ID NO: 233733 - DNA, 417 bp, Klebsiella pneumoniae; identical to SEQ ID NO: 86116

SEQ ID NO: 233734 - DNA, 525 bp, Klebsiella pneumoniae; identical to SEQ ID NO: 86117

SEQ ID NO: 233735 - DNA, 246 bp, Klebsiella pneumoniae; identical to SEQ ID NO: 86118

SEQ ID NO: 233736 - DNA, 366 bp, Klebsiella pneumoniae; identical to SEQ ID NO: 86119

SEQ ID NO: 233737 - DNA, 204 bp, Klebsiella pneumoniae; identical to SEQ ID NO: 86120

SEQ ID NO: 233738 - DNA, 1176 bp, Klebsiella pneumoniae
atggctaaaggcatgcgggtcaaactgaattatcacgtcagccacgatccggataccggggcggaagtcacccgcttaacccccccggaggtcacctgtcatcgcaactacttctatcagaagtgcttttttaacgatggcagccatttactgttcgccggcgagtttgacggccactggaactactatctgctgaatatcgccagcgccgaggccgtccagctaaccgaaggcgccggggataacaccttcggcggcttcctctccccggacgataagtcgctttattacgtgaaaaatgaccgtatcctgctggaagtcaacctgaccaccctcgccgagcgcgaagtttatcgcgttagcgatgactgggtagggtatggcacctgggtggcaaacagcgattgcagcaaactggtgggcattgagattgccaaaagcgactggacgccactcaacgactggcagattttccatgatttcttccataaaggaccgcactgccgcctgctgcgcgtcgacctgcgcagcggtgagagccaggtgatccatgaggaaaaaatctggctgggacacccgatctatcgtcccttcgatgaccataccgtcgccttctgccatgaagggccgcacgatctggtggacgcccgcatgtggctggtcaacgaggatggcagccatgttcgcaaagtcaaagcgcatgctccaggcgaaagctgtactcatgaattttgggtgccggacggttcggcgctgatctacgtctcctatctgaaaggccagcaggggcggacgatctatcgctttgatcccgaaagcggcgtcaacgaggccctgatgacgatgccggcctgctcgcatctgatgagcaatttcgatggcacgctgctggtaggcgatggctcaggtacaccggtggatgtcaaggataccggcggctactccattgataacgatccctggctgtatgtctttaacgtggcggaaaagcgctacttccgcgtcgcgcgccatgatacctcgtgggcgacggtggccaacagccgccaggtaacgcacccgcacccctcatttaccccggacgatagcgccattctgttcagctccgataaagacggtaaaccggccatctatatcgcgaaattacccgcgcacccgtcaatgctgagcgcctga

SEQ ID NO: 233739 - DNA, 2433 bp, Klebsiella pneumoniae
atgagtgtgattgcgcaggcaggggcgaagggtcgtcagctgcacaaatttggtgggagtagtttagcggatgcgaaatgttacctgcgcgtcgcggggatcatgaaggagtattcgcaggcgggggatatgatggtcgtctccgccgctggcagcaccaccaaccagctgatcagctggcttaagcttagccagagcgatcgccttgctgcgcatcaggttcagcagtcgcttcgccgctatcacaccgagctgattggcggtctgctggagcctgcggcggcggatacgttgatagccgcctttatccacgaccttgagcgtctggctggtctgctggacggcggggtttccgaagcggtctatgcggaagtagtcggccatggggaagtttggtccgcgcgcctgatggcggcggttctcaaccagctgggtatggaagccgcctggctggacgcgcgcgcgttcctgcgcgcggaacacgccgcgcagccgcaggtggatgaaggattatcctatccgctgctgcagcagctgatggcgcagcatcctaacaaacgtctggtggtgaccggctttatctcccgcaaccaggccggtgaaaccgtcctgctgggccgtaacgggtctgactactctgccacccagatcggcgcgctggcgggcgcctcccgggtcactatctggagcgacgttgccggggtgtacagcgcggatccgcgcaaggtgaaagacgcctgcctgctgccgctgctgcgtctggacgaagccagcgagctggcgcgcctggccgcgccggtgctccatgcccgcacgctacagccggtttccgccagtgatatcgatctgcagttacgctgcagctacacgccggaacagggttccacgcgcattgagcgcgtgctggcctccggtaccggcgcacggattgtcaccagccatgacgacgtctgcctggtggagttccaggtgccggccggtcacgatttcaaactggcgcataaagagctggacgctctgctcaaacgcgcccagctgcgcccgttagccgttggcgtccatgccgaccgtaagctgctgcagttctgctatacctccgaggtggccgacagcgcgctgaaattgctcgatgaagccggtctgccgggcgagctgcgtctgcgtcagaagctggcgctggtggcgatggtgggcgcgggagtcacccgtaacccgctgcactgccaccgtttctggcagcagctcaaagggcagccggtggagttcacctggcagtctgaagaggggatcagcctggtggcggtgctacgcgccgggccgacggaaagcctgatccaggggctgcatcagtccttgtttcgcgccgaaaagcgtattggcctgatgctgttcggcaaagggaacattggttcacgctggctggagcttttcgcccgtgaacaaactacgctctcggcgcgtaccggtttcgagtttattctcgctggcgtagtcgacagtaaacgcagcctgctgaattacgacgggctggatgccagccgggcgctggctttcttcaacgatgaagcggtggagcaggatgaagagtcgctgttcctgtggatgcgcgcgcacccgtatgatgatttagtggtgctggacgtcaccgccagcgaacagctggccgaccagtatcttgatttcgccagccatggcttccacgtcattagcgccaacaagctggcgggcgccagcagcagtgataaatatcgtcagatccacgacgcgtttgagaagacggggcgccactggttgtataacgccaccgtgggcgccggcttgccggtgaaccatacggtgcgcgacctgattgacagcggcgatactattctcggcctgagcggtatcttctcgggaacgctctcctggctgttcctgcagtttgatggcaccgtgccgttcaccgacctggtggatcaggcgtggcagcaggggctgaccgagccggatccgcgcgtcgatctgtccggtaaggatgtgatgcgtaagctggtgatcctcgcgcgggaagcgggctatgacatcgaaccggatcaggtgcgtgtggaatcactggtgccggcgcactgtgaagaggggtcggtcgatcacttctttgagaatggcgaagagttgaacgagcagatgctgcagcgtctggaagcggcccgcgagatggggctggtgctccgctacgtggcgcgctttgatgccaacggcaaagcacgcgtcggtgtggaagcggtacgcgaagagcacccgctggcggcgctgctgccttgcgataacgtgtttgccatcgaaagccgctggtatcgcgataacccgctggtgatccgcgggcccggcgccgggcgcgatgtgaccgccggggcgatccagtcggatattaaccgcctggcgcagctgctgtaa

SEQ ID NO: 233740 - DNA, 819 bp, Klebsiella pneumoniae
atgtttgatttcatcataagcagaaagtcacaagaaaaaaaatgtgtattttggtgggaacctaaagacggtagttttaatgcaggagatcatttatctaagatcgttgtacaacagatgttagctttaaaagatcttgaacttactcaaaaaattaatgttaaaaataaattaatggcaattggttccgttatgcacttcgctaacgaaaatgactgcgtatgggggacggggatcaatggaaaaattagtctagatgctttaaaattcaagaaccttgatgttagagctgttcgagggccaaaaacgcgaaaactattattagatatgggtcttaaagttcctgaaatttatggcgatcctggtttattattaccattttttttctcacgtgatacgttattaataaataatgaacaaaaaaaagattttatcgtaatcccacatatgaatgaggatttttcgttatataaaaaatataataataacatttgttctccaaaacaaggtgctatatcatttacacgccaaattgttaatagtgagtttgttatttcaagttcattacatggggtaattatagcagaggcttatggtatacctgctgtgttacttgaaaatagtagcggagaatcatcatttaagtatgatgattattatttaggtactggacgtgacacgtaccctattgtgcacagtatcgaagacgcatttaaggttaagcctgcatgttcaattaacgttcaccatatagctttgcctttatttaatgcttttccatatgacttatgggaaaacaaaaaaaacagtgatatttaa

SEQ ID NO: 233741 - DNA, 588 bp, Klebsiella pneumoniae
atgaataccttacgaatcggcttagtttccatttccgatcgcgcctccagcggcgtctatcaggataaaggcatcccggcactggaagagtggctggcacgcgccctgaccacccctttcgagctgcaaacgcgtctgattccggatgagcaggccatcattgagcaaacgctgtgcgaactggttgacgaaatggggtgccatctggtgctgaccaccggcggaaccggccctgcgcgtcgcgatgtgacgcccgacgcaacgctggcgatcgccgatcgcgagatgccgggcttcggcgagcaaatgcgccaggttagcctacactttgtgccgacggctatcctttcccggcaggtcggtgtgatccgcaagcaggcgctgatcctcaaccttcccgggcaaccgaaagcaattcaggagactctggaaggggtgaaagatgctgacggcaacgtgctggtgcacggtattttcgcaagtgtaccttattgtgtacagttgcttgaagggccttatgtggaaaccgatggccgtgtagtagaagcttttcgtcccaagagcgccagacgcgaaactttatcctga

SEQ ID NO: 233742 - DNA, 2967 bp, Klebsiella pneumoniae; identical to SEQ ID NO: 59353

SEQ ID NO: 233743 - DNA, 519 bp, Klebsiella pneumoniae
gtgccgaacccggaacggcaactggaaggcgtcaaggttgatcgcgcttttagcgacaaggcatccggcaaggatgtcaagcgtccgcaactggaagcgctgataagcttcgcccgcaccggcgacaccgtggtggtgcatagcatggatcgcctggcgcgcaatctcgatgatttgcgccggatcgtgcaaacgctgacacaacgcggcgtgcatatcgaattcgtcaaggaacacctcagttttactggcgaagactctccgatggcgaacctgatgctctcggtgatgggcgcgttcgccgagttcgagcgcgccctgatccgcgagcgtcagcgcgagggtattgcgctcgccaagcaacgcggggcttaccgtggcaggaagaaatccctgtcgtctgagcgtattgccgaactgcgccaacgtgtcgaggctggcgagcaaaagaccaagcttgctcgtgaattcggaatcagtcgcgaaaccctgtatcaatacttgagaacggatcagtaa

SEQ ID NO: 233744 - DNA, 1524 bp, Klebsiella pneumoniae
ttgataatcagcgaaatgcaacgcaagcttgccacatgggcagtcaccgatccgtccctacggattcaacggctgctgcgtctgataacacaaccagaatggctggctgaagcggcgcggatcacgctttcatcaaagggggcccatacccccggcgttgatggcgtgaacaaaacaatgctacaggccagactggctgttgagctgcaaatcctcagggatgaattactctcaggccactaccagcccttgcccgccagacgggtttacatccctaaaagcaacggcaaactgcgaccactgggtatccccgcgttgcgggatcgtattgttcagcgggccatgctgatggcgatggagccgatatgggagagtgattttcatacgctctcatatggcttccggcctgagcgcagtgtccaccacgcgatccgcacggtgaaattacagctcacagactgtggtgaaacccggggacgctgggtgattgaaggcgacctgtccagttacttcgacaccgtacatcatcgactgctgatgaaggctgtacgccgcaggatcagtgacgcacgtttcatgactctgctgtggaaaaccatcaaggcgggacatatcgatgtcggtctctttcgggcggccagtgaaggtgtgccacagggcggtgttatatcgccgctattatcgaacatcatgctgaatgagttcgatcaatacctgcatgagcgctacctgagcgggaaagccagaaaagatcggtggtactggaataacagtatccaacggggccgaagtacggcggtcagagaaaactggcagtggaaacccgcggtggcgtactgccgctatgccgatgattttgtcctcatcgtcaaaggcaccaaagcacaggcggaagccatcagggaggagtgtcggggtgtgctcgaaggcagtctgaaactcaggctgaacatggataagactaaaatcacccatgttaatgacggctttatctttctggggcacaggatcattcgcaaacgcagtcgttatggcgagatgcgagtggtctcaacgatcccgcaggagaaagccagaaacttcgccgcatcgctgacagcactgttatcaggcaactacagtgaaagcaaagtcgatatggctgaacaactcaaccgaaaactgaaaggctgggccatgttctatcagttcgttgattttaaggccaaagtcttcagttatatcgaccgtgtcgtgttctggaagctggctcactggctggcccgcaaataccgtacaggtatcgcttccctgatgaggtggtggtgtaaatcaccgaaaccgggtcagagcaaaacgtgggttttatttggtaaaaccaatcacggcaagctcagcggcgaaatactgtaccggttggtggggcaaggcaagaagctgttccgctggcggctacccgaaggtaatccctatctgaggacggagaccagaaacacgtatacatcgcgctttacagaagtggcaatggcgttcgccagcatttaa

SEQ ID NO: 233745 - DNA, 150 bp, Klebsiella pneumoniae; identical to SEQ ID NO: 23314

SEQ ID NO: 233746 - DNA, 246 bp, Klebsiella pneumoniae; identical to SEQ ID NO: 23313

SEQ ID NO: 233747 - DNA, 1218 bp, Klebsiella pneumoniae
atgagactctttattgctgaaaaaccatctttagctaaagccattttcgaaggattaggtggcaaccctgctactgaaaagaaaaatggttgttatgaacatggaactgatgttgtcacgtggtgttttggtcatatgcttgagctttatgatcctcaagactatgacgtgaaatacgccgcctggcgttttgatgacctgccgatcaaaacgccctggccgcccaagtacaaaatcagagccgatgcacagcagcaaactaacatcatcttttctctcatcgagaaagcgaccagtatcgttcatgccggagacccggacgatgaaggctgcctgttggttgatgaaattttagattacgcaaaaaatacaaaacccgttcagcgccttctcgttgcagatctcaacctcgctcccgttcagaaggctctcgccaatatgcagcctaacgagaaattcaggggcatgacaaatagcgctctggcacgctctctatgcgatcagggattcggctacaaccttacgcgcggctgtacccttaaagggcaggagaaaggctttcatggcgtcctgaatgttggtcgtgtgcaaagcgctgttcttgggctggttaaccagagaactctggctaaccagaaccacacagaaagcttttattatgatgttcaagcggcattgtcgatgaacgggcatctcttaaaggccaaatatcaagtcgctgaaggtgatgaaaaggatgaaaaaaatcgtctgatctctgaggctcaggcgaaggcggttgttgagcatgtcacgggtaaaaaagctgttatttctgaaacggccaccaaacccgaacacactaaaccgcctatgccgctgaacctttcgacactgcaacaaatctgcgcaagacgtttcggttataaggcaaaagaaacgctcgatatcatgcaaggtctttacgaaactcataagcttttgacctatccgcgaacagataaccgctatctgtctgacgagcatttcactcaggctggcgatattgccgacgctatcggcgcgacgttaccagagctggcgaccgcgaccgctggcatggataaaacgcaaaaacataaagcttttaacgcaagcaaaattgaggctcaccacgctattatcccgaccactaaaagcgggaaaggcgttcagcttaatgaggggagcccgcagaattcggaaaaaatcgtacgctaa

SEQ ID NO: 233748 - DNA, 198 bp, Klebsiella pneumoniae
atggattatattggttttgatacaattgtcatctggtatactggggtaggtttctttttatggactttcgcccaggtgaccagggcggacggaacacagggggtattcaataacatcgccttcctgctgctgtttgttatcgcatggcctaagatagcatgggtaatctgttgtcacattacagaagatattttttga

SEQ ID NO: 233749 - DNA, 2418 bp, Klebsiella pneumoniae
atggtcgagaacgacacttcatcggttgagtatcagctatcaaccagcactggcccttttagcatccctttctacttcattgaaaacgggcatattgtcgcggaactgtatacacagaacggtgacgactttaacaaaactacgctgactattgatgttgattattatctgaacggcgccggcgataagaatggcggtcagctgactttgctctccgcacacagtggcgctacgctactgatttatcgtgatcccgatgcgacccagttaaccagttatcttgcgaccggtaagtttcctgcgacaagccatgaacgcgcgcttgataagctgactatgcttatccaaaaattcggttggtggtgggactctttggctctgaaaaagccaaatatcttcgctaactattatgacgcgctcaataaccgtattcgtaacctgcgtgatccttcactggcgcaggatgccgcaacaaaaagctacgtcgatagtagtgatatcgatctgcagcagcagataaccagcaactttaatcgttcactgcgtgtccctgactcctatataagccagctaccatcggcccaagatcgcgcctggaaggggctgggttttgacggtgctggtcagcctaaattgcaggaccctgcagggacggggctatggggatacgttccggccataggttcgtttgagcagggatcgctactcactcaacgttttgaggttcttctgtgggaatccacggacgaatactggcgctgggatggcgtaatgcctaaggtcgttttacctggtagcacgccggcgacggctggcggtacaggaaagggtaagtggatcgacgttaccgatgcgactcttcgctcaaacctgggttcagacgaagctgatttaggcggtgctttggtgagcatcgataacgccaccgtgagggagttagcagagaataacatcttcaggaaaatgacccgtgcggatattaacacgatgctcaacacccctggtgccgaggtcgatgttgaatacgctttacaggttcttatcgatgagggtcacaaatcaatactctttccgcatgacgtaaagggcatttatattcttgctggaaacgtcactgtacccgcccctgtaacgttgatttcattttctccttgcgttaagccatacacaattacggacgattcgtcttttctgaataaaggcgctgtcattcgaaaagcagcaggtgctgattatatttttgggccgggaaccgtccctcgcttctacggcctgcttctcgatggcagagacagcagcagaccgctgtttaatcaggagaatcagcagcgcggaggtatactgtttaactgcggtatttatcgttttctgtacggcattggtagttattcctatacctctgttcaggtgggaatgtcttccatatgcgccaaccaggacggagtttataacctgattgattctcgcctgattaactgcaccattaacgcgaatacccggcatggtgtttatctccgcaatggtgctaataacaaccttttccagaatatccgaaatgaatggaatggaggggtgggatatttatctgatggctccgtcggcaacattattaatggtgagctggttgaccgtaatggctcggcaaatttcgcggtgcttaatggcggaggttttctcattggggatgtattctcccagcgacctggccgaacctcggcggctggttcctcctataatacccatttttacatggagggcgctggcagctatatcatgctcagcaatgtcgtgacacgaaccggcgttgatgatgatggccagggaacactgacgccagaaagggtactgacaaccggtggcggctccacggacatgacttttatggccaatggttgtgatttgtccgggtataccatttctgcgcttcggcagattaccactgccgagaaaatgatcctcaggggaaataaaggcatacctgacctgataactactggcctttatcagttccagaacggtcgggggaatgtgggaggtgcgaagagcaatcaggttctgacgtccggcgttggttctgtgttagccctcagttttcaggaaacgggattagccgatcccgcgacagcccaggcaacgctccctttgtgcagaacgctcctgattgaatcgctaacatcaggcggggtatcaggaaaattcaaactaccgtttcagataaggcgcgtggtacaggccgctaatgttgacctgtacacctctgaagcccgttcatctccagcgggagcctacgctgtcactggcgcgacaggtgtcaatgtatcactggcagttaatgctgatgccacactgacaaccgtcacgctcaccagcgttgacggcatcgggcggttcctgcgcgtgacaattctggacaactaa

SEQ ID NO: 233750 - DNA, 216 bp, Klebsiella pneumoniae
atgaaaatgacacacagagtttccgaggtgatcgccttaggaacatcaacgactagtgcgacattctggtttacacgtctgcttgattcatacactcccgggcagtgggccgccattggcgttattggcagtcttgtgttcacggctttgaccctatttgtaaacatctactttaagtggctagcgtaccgccgcgacaagttctcggaagaataa

SEQ ID NO: 233751 - DNA, 1251 bp, Klebsiella pneumoniae
atgacagcagaaatcattgtaaaaaatcctgtggcttgtgcgttagctgcagactcagcaatgacaatgacaggtggaaatagcggcacagttaaaatatttaacaacgcagaaaaaatatatcagctatcaaagcactacccagtaggtttaatggtttataacaatgcagacttttgcggaaccccttgggaactttctattagaagctttagaaaactacatggacatgaagagcatagtacaataagagattatttaaactcattcctaagcttcttgaactctacttataacattacttcgattgctaaaagagaagctaagctaaaagaaatattcaggagatacctaaaattaaactatgatgatctaagtcaaaaaacacttcatgttgctttacctgaatcagatgaagaagcacttaatattatccatcaaagattagctaacttttacgcttctgaaaatgagtttttagaaagaaaccctttttttgaagggtttgatgaatcagatgttattaatgccagagagtttgtcattaataactatctacaaatagcgttagatattttccccaataatggggacctgccagaacatcttaaaacacagctcataaatttcttcactttcataatctgcaaagagaatgtcacatcattatatagtggtcttgtttttgctggcttcggttctgatgaatactatgcatctatcattacaatacaaatttatggaagctttaacaataaagtaatgtataaaataattcatggtaaatgctcaaaatcagaccctgacaactcagtaataataccatttgcatcagaagatgaagtgttcaccttcgttagaggttttaacaattcaattattaatttcatgggtaatacagtatctcaattatcgaatgtaatacttgaaaatttgagggaaagaggcgtaaatgatgaaatatcagagcaaaaattaatatcattaaaagatgatatcatagacagagtgcaacgatattgtgatgaaaattttacacaaaaagtaacaaacatgctaacttctttatcaaaaaaagatctttcttacatggctgaatcgcttgtgaacctcagcgcatttaagttaaagatttcagactcttacgagaccgtcgggggtccaattgatgttgcaataatttcaaaaaccgacggttttgtatggataaaaagaaagctttactttgataaaaatcttaacaataattaa

SEQ ID NO: 233752 - DNA, 2718 bp, Klebsiella pneumoniae
atgaaacaacaatgtattgatgccattacccgcgccatcggtcgcaagcctctcgctgacgaaattcgcaacattgagcagggcatcaatgatgccgtgcgtactattcgggttaagaatgctcaatccggaacggtaatgccggattctcaggtatacgcagaagctgcaaaacttgccggtcaacgcgccgtccacagtatttataaaaagcgccagcgcattgcgcaggatgctattgcacgggccaaccttatcaacgagctgaagaatcaggttcctgagagtgagttaactccagagtatctggctcaggctattttcatggggcgtacccgtagctcgaagaacttagacattgtctcggcggaagagatatcgcttggcgcactgcaggactggacacgccagcttagcagcagtctggaaaaagctgggccggaagtgaaagcgttttttgatgcaatgactaattcgcagcgtggcaatctgagcgaagccctgcagctaatgctgttgaaagagattcgtggcgaggataccggcagcgtggcagcgaaaaagtttgctgaggtctggcgtaaaagtgcggatcaggcgaaacgcgaactcaatgacaacggcgctgatattgccactcgcgacgactggggtctgccaaattatgattcacgcgaacttatatcccgcgccggccgtgatgaatggctcgccactttgccagctggcgaacgcgccactgcaacgttattacgccgtcagccgccgatagaatgggcgagggatcggtgggtatctgatacgataaaatccgtcgatcgcaacgccttcgttgatgaccgtggaatgccactggacgatgcagctctgcgtgacgtgctcaacgatgtgttcaccaccaaatccaccgatggcgctaataaaattgagcctggggaacaaggtggtggtggcgggattaaaaaccgtggcgccaactcccaccgtgtcctcgtcttcaaggatgccgagagccagtttgcttatatgcagaaatattcggataagagcatcgctgaagtcatgatggatcaccttcaatattcagcccgccagttgggtatattgaaaactttcggccccagcgcggaaaataatttccgttacattctgggtagcatttataagaacgcaactgaaaaaggccacaatctggataagatgacaaagcagcgagatacggccaccgcaatgtttaactatcaggctggattgggacaaaacagctcatcgttcgttccggttatgcagcgcattcgaaacctgatgacgtcggccatgttgggatcgtcggtaatcaatgctggctttaccgatcagttcatcatgcgggccatgtcctctgcgctaaaactggacaacgccggcgccgggattaattcccttaaaaatctcataagcaaggatcgtaagcaggctatcgagcagcttgggttgatgtcggacattcacgcttccgtaacttcccgccttggtggtaacgatgtaggccgcgatgtgaccggatggtttgcggaaaaaacactgaagtggtcaggccttatcgcgttggataaagcaaacaaggcgtcgttcggcatgaatatgctgtacaccatcggcaaccttacacggaagtttgattcactccaggcgttgaaggcatccgattatgacctgctttcggccaagggctggactgaacgagactggcaaataatgcgtgccgctgaccttggcaacattaccgagaagcaccttggtatgacgccggatagcatctatgctgtgccggatgcgaaaatcgctgagatactcaaaccggaaattgaagcacttcaaaagagcgctgatgatgctgtttccgcgatggggaaaatgacgccagaacgcgaaaagaaaatccgtcaggcgtacgccgatgaagtcggtgccaataccgcaaggatgatccgcaatgcgcgtgctgagtcggtgtataagttgctcggtatcactcattcagagatgatgcaggcaatcacttccgctaccaacatcaaccggtttaaggcggcaacggaaggtgagttttatcgtagtgcgatgctcttcaaaaccacgccattcgctggcgtggcaaacatggttcgtcgaacgcaagatctgaacggtatgaataaagctacattcctggcccggtatatcgcaggaactacgctcggcggtgctttggcgcttcaggttaaccaccttatttcaggtgaagatcctgacgacatgacaaagggtagtttttggttacgcgctctagtgaaaggcggttcgtttggcatatacggcgattttatgcttgccgatcagacaaagtatggttcttccattgccgccacacttggcgggcctgcgctaggattggctgaggccgtaggtaaactggcagtcgtaaatacgcagaagttggtaaaaggggaagacacatcatacgcagcagatgcgataaaggtgggtaagatggttacgccattcgccaacttatggtatacaaaagctgtgttcaaccatctgattctccagcaggcgcaggaaatggctagcccgggctataacgctaaacttcgccagaacatggagcgcaactacgacaccaaatactggtggaagcctggcgcaacagagcctcgcagagggccagatcttgaaaggatggtagggaaatga

SEQ ID NO: 233753 - DNA, 1842 bp, Klebsiella pneumoniae
atgaatttatctaacctcgatcagcaggatgcaaacttcgtcggccagtcgggatttacggaagcgacccaggcagactatcaaccggggatattggatggttctggcgaagcgctaatgagcggtattgagtcaggcgcctctatcgcaactcaaagtggcctaaagggtgtcatcgcctccaatatgcagcagttcacgatgttacatccagaagagtctgaggctattcaaaagccggtaaatcaggctatcgatacatcgtttaccagtttcagaaagggtatagcaccggatgttgaaacaaccgggaaagcggggcagattcttttcgggctaggccagtactttcccgcactggccggcgcagtggttaacccggttcttggtgctggtgtggcgcaacagatctcccaaacagccacaactgaagaactgacgggtaagggagtgtcccagcaggatgcggaagatatcgcgttgcctaagtcgtttgttgatgctgccggctttcttcttcccgcagcggtcggcggtcgcctcatgacgagaatcgccagcggtgcgggtatcaatatggctgcaggtgcagcttcgcgggaagttactaacctgatgctgcaggataagaactacgccgctgttgccgaacagtataaagcctgggatggtgaggcgatggttgtcgatggcattcttggcgccgctttcggcggtatccaccacctgacatcaagagtcagtgatgcgaccacagatacggctgatcccataccgatggaaagcgagcaaaccagacagagcggtattgattctgttcagcaaacaactgctggatcaggtgtggatacagcgcgggaagtatctggaccggccgcaccgggcgatgctccgcttgttgtagatgaaaccagcggtgcttacagaacctggttagatggtgtgcgtagtgatgccagccagctcatcagccgaggcgatcgaaaactcctggctggagaaattcatcgggccgaatatgcattatctcagatatcggaacagcgtcaggcattacgtgatcaaagagtgggaaacagcagtagtcgacgaattcgaaacagagatatcgcttcactggatcgacaggcgcaggaaataaataaccgtattgaaccgctccgccaggcactggctgataacagccctgggggccgattttatgatgcacgggcaaatttatcccgcatagagcagggaataatacctgatggtgccccagtcaggcagagcgacatagatgcagctctggctatgaacgaagctcataaccacgatgtagctgcttcacctgttctgcatggtacaccagaaagcatggatgcccactaccgggcgatgggtgatgcggcggagtctatcgcccgcggcgatcctgttgacgtattggcgcacgttgattctttcgatggatatatccggccggaagcgttcaacgatagtgcccgtccagaaatggaatcggcattgcatgaaaacgatatcggcaccgcagcgcctgtgcgtaaccgccagccgcaaccatctactgaagaaggcgaaactcagtttgcgcagtttctggctgatgaggggagtatcgatccggataccggcgttaatttgggcaatagttatgagctggcgaccgccagccgtttagcggaagaaataccggatttaaccgttgagcacccggataccgggcagcaggtcaagctttcggatctgatggatgagttcaacgacaaaatcgcaaccagccaggattcagcaaacgtcttcccgtttgtcgcgtcctgcatgctaaggaatcctgaataa

SEQ ID NO: 233754 - DNA, 1827 bp, Klebsiella pneumoniae
atgatgaatgccgatggaacgttgaatgcctatgacgggacgatcgatcctgaccaactggcaacagcagcgttttatcaggaaagccgcctgagccagtttgatgccagtggccagccactcacctctaaaaagggcgctgtaggaatcgctcaggtgatgaaagataccggacctgaggcggctcgggctgctggattaccatgggatgaagagcgctggcgcaacgaccccgcatataatttggcattaggcaaagcgtacctcaataagcaacttaaagcatttgggggaaataatgttctggctttggctgcttataatgctggccccgggaaggttaatgaatggatatcaaaatatggtgatccgagaacaggggccatcacgaacgaagactttattcggtcaattccattccaggaaacgcagagttacgttacaaaaataatggactcagtgccatcagtacccaaaacagcaacgatggcagccattactgataccccatattttcaccaattatcaccgcaggctcagtccagcgcattatcaggtatggctgagatactgaataagcagcgtcaggcaagccgggttgttcttgatggcgttgtgaatgacgccagcgccgctctgcgtaacggccaacaacctcaggttatgccatcacgaaaccagctgatatccacttatggacttgtacagggtggacagctatacacgcaattacagaatgatgaggcatttggtaataacgtcaagctggtgaaaaatatccctccggcacaacagcaacaattactggaacaggcgaaaccagaaactggtcccaattatgcggagcggctcaaaaattatgaacaattgcaatccgctattagtgctgtaaatagtgccaggaatgctgatcctgttgcgtttggtataaaagaaggggcagtagggcagattgacttcacagacttgaatagtctgcaaagttcaatgcaggcacgagctgtgcaggcgggaagaatatcgcaacagtatggtactccgccgacactactaacaaaagctgaggcaaaacagttttctactatgctatcgcagtcagcaccaggcgatgcgcttactcttctacaggcagttgggcgatccctcccgccgcagggtgtatcgatgttccagtcccagttgggagagaataacccgacttatggggcattagcaggaatactggctgcgccagataattatttaaacacaagaagcgggattggttcctatgttgattatccactaacggttgataaatatattgcatcagaaaggatccttcaggggtacagagccctatccccaagcgcccaggataaaaaatctggagtaactccaatcacgataccttcagatcaaaaaatgcaggagtcatttaatgatttggccggagatgcattccccatgtcatcacaagaaagacagagggcatatggattattcaagtccgcatatgcaggcgaactgctaaataaccctgatttagacagcggggatcgtgctgacgcggcgaaaagtgtcgacgataaaattgcaggaaaagcaattttgtacgcaactggtggtgtattgaaatatcgcggtacagatgtcgtggcaccttatggtatgggtgaggatgatttcacgtcaaaaatggataacgcaagggccgaagcatttaaggggcttggctccccgtctaatttcgcccctgtaaaactcccatctggtcgatacggtttccgcatcggcaataggttagccacaaaagatggtcaggttatcaccgtggagattaactga

SEQ ID NO: 233755 - DNA, 435 bp, Klebsiella pneumoniae; identical to SEQ ID NO: 10324

SEQ ID NO: 233756 - DNA, 357 bp, Klebsiella pneumoniae; identical to SEQ ID NO: 139216

SEQ ID NO: 233757 - DNA, 231 bp, Klebsiella pneumoniae
atgtctacattaattacatatcgctccactaaaactgttcaggcaatgttgattaacagtattgtcatcaaccaggattatacggctaccataacagatgcgaatggtagtgatctggttgtttcatcagattatgtgttacgggagaagccaaggccaggcgggtactacatgctgaatggggaggggtttgaaagctttattgataaggatattggctttgttgaataa

SEQ ID NO: 233758 - DNA, 1620 bp, Klebsiella pneumoniae
atgtctgcccagaaaataaatctatgggagtataaaaacctttgcgtgtcaaaggttggcgacccgacaacattggactggggtccagcattactaaaagcattaaaggatggagctagaaatagaaaagtagtatatgcgccaggccttgatggagggtattacatatcaaagcttggagagatactaacaaatttagatacgtcaggtgcagaatcattaatgagtgtatatgcactggttggggatggagctaaccagacacgattttattctgatacggatgacgttccggtaatggaattccgcacttgccgtattatgtggaaagggtggtcactttcaggccctggtttaaatgcctatatgggtataaaactcggagagtccacgacaatcagcgcggtgaggctgtcttacgtcgaggatgtgaaagtaggttggtttagtaacccattcgtagtaggtcatgcgtgggattcaacatttttgaacttacatgttcagaattgggggcgaaactctgtctatatccaggagcgtacaaatgataacaccaacaacctgacattcattcaccttcatcaggaaccgactgaatataatggcggagatacctgccgtggttttgtttgtatgggcggtactactgcaaacaataaacatcatagcattcgtttaattcagcctcatattgaaccaagaaactggaattgccagcatttctatatcagtaactgcgttggagttacggtcgatgcgcctagcgtaaaccgcaataacagcctcgttgatgagaatgggaattcgcttgtggcaaatgccaatattgcgccggcgattcatatcatttccagcgttggcgtccatttcaatggcggacaaataacgcacattgggccaagagcggatgatatagctccgattatcaagattgagggcattgtaaaagatatcagattcaatggttacattgatacagggagagcgtcggttgcgaattttgcgggtggcattgacttaagcaacagccccaacgcatcacgtgaagtatatttcgatggtgccccggttggttcgtttacatctttctcaagcgtccgaaacatgatgcgcctgtctgtaatggctaacatacaaagaactgtttcagccttggctgaacagtactctatagctgggactactgataccggtactgtactgaagttcttaatgggaaacactgcagacccgtcaaccgcaccaacagaaataatgcgattgtatagcgaagggtatctttataataaaggatatgtatcaccaacggtgacaatagctgccggggcgacatatacgcatatcgtcggcgccggagtaaacaaccgtcgaggcgagtacaaaattactgggctcgaagatgataatacgcttttcggctctttctttaacgtgcctaacaaagcgccaaagcccacaggaattattggtgatggggttaacctttctcaggcgcagcctgactcatcagtaacaaacaaactctgtatttaccagagtgggcagtatatcgttttagaaaaccgtcgcagcgcatcagttacgctggctatacgttttgattcaggtatcagctga

SEQ ID NO: 233759 - DNA, 1407 bp, Klebsiella pneumoniae; identical to SEQ ID NO: 180771

SEQ ID NO: 233760 - DNA, 498 bp, Klebsiella pneumoniae; identical to SEQ ID NO: 112249

SEQ ID NO: 233761 - DNA, 432 bp, Klebsiella pneumoniae
atgccggcgaagcgacgccttgcagaacgtcagcaaaaagctaaaccgcggctgaaatccctggaaagctggctgcgtgaaaaggtgaaaacgctgtcgcgacactcagaactggcgaaagcgttcacgtacgtactgaaccagtggccggcgctggcttactatactgacgacggctgggccgaggcagataacaacatagctgagaatgcgctacggatggtcagcctgggccgcaaaaactacctgttcttcggttcggatcatggaggagagcggggagcgctgctgtacagcctgatcgggacatgcaaactgaacggcgtggagccagaaagctacctccgttatgtccttgacgtcattgctgactggccgataaaccgggtcagcgaactactcccctggcgcgtagcactgccaactgaataa

SEQ ID NO: 233762 - DNA, 243 bp, Klebsiella pneumoniae; identical to SEQ ID NO: 220800

SEQ ID NO: 233763 - DNA, 192 bp, Klebsiella pneumoniae
atgaacaaagcctctcccgttgatttaaggaaatgccttgaggccgcacatggcctcgctcatatcggcatccgttttgtgccgatcccggtagcgacagaggaagagttccaggcactgtctgccgagctttcacgaaagcttgagcagatggcggttgaagcggaaaaaagcgaaggcggtgcagcatga

SEQ ID NO: 233764 - DNA, 210 bp, Klebsiella pneumoniae
atggattacgaagagattgcgcaactacgctatcaggaaatgtgccgcattgtcggggatgtcgtgtttgcgatggttgccgaaggccatgaaaccaaacgggtggctatagctgacgtgataagaatggagatttcaaaggggctggataagtgggatttagaccagattcaggtgatggaactggctgtaaagctgctggaagagtaa

SEQ ID NO: 233765 - DNA, 402 bp, Klebsiella pneumoniae
atgatgaaagcgatagaaatttcaatgtaccgactgagtagactcctgaaagaaactggatggagccaggcggaacttgcccgtaggattggagtaacacagcaaaccgtgcagcagtgggttaatgggaaatccacacccaagcccaccagcattgataagttagtggaggtaactggatatcctccttactggttcatgctgccgcctgacgacggtgatcagatggtgaccccggatgcaatgaagttaggccctatgcagttggacctgcttaagaccttcaatgcattcccggaagaagaccagcaagagatgctctacgagatgaaagagcgaaaggagagtatggataagaccgttgcccggtggcttgcagcccagaaaggcaataaagcctaa

SEQ ID NO: 233766 - DNA, 942 bp, Klebsiella pneumoniae
atgaatactttttctctgcctaaaacacagcatctggtagttttccaggaagtgatccgcagcgggtcaatcggggccggagcaaaagcgttaggactcactcagccggcggtcagtaaaattattggcgacatggagagttattttggtagcgaattaatcgtccggcgaaataccggcgtctcgctcaccgaggccgggcaggtatttctcaactggtcagaagcgatcacccgtgaaatgaaaaatatggtcaatgaaatgaatgctctgaccaacagcgcggtggtggatgtctcctttggtttcccttcgctggtcgggtttacctttatgtcggagatggtgcatcagtttaaaatgactttccccaaggcgcgggtctcgatgtatgaggcgcagctctccgcctttttgccggcaatccgcgacgggcgcctcgacttcgccatcgggacgctgagcgatgagatgaaactgcaggacctgcacgtcgagccgctgtttgagtctgagtttgtgctggtggcgaaccgggcgcggatcggcaacggcaccgtccgcctggcctcgctccagcacgagcagtgggtgctgccggagaccaatatgggctactacagcgaactgctgaccaccctgcagcgcagcggtatccgccgtgaaaatatcgttaataccgattcggtggtgacgatctataacctggtgctcaatgccgattttctgacggtgatcccctgcgacatgaccacgccgtttggctcgagccagtttgtcaccatccccattaaagaggccttgccggtggcgcgctatgcggcggtatggtcgaaaaattaccggttaaaaaccgccgcggcgtcgctggtggagatggcgaaacactattcctcggggcagggcaaccgccactggcagccattacaaattattgcgtaa

SEQ ID NO: 233767 - DNA, 726 bp, Klebsiella pneumoniae; identical to SEQ ID NO: 25060

SEQ ID NO: 233768 - DNA, 843 bp, Klebsiella pneumoniae; identical to SEQ ID NO: 142281

SEQ ID NO: 233769 - DNA, 1038 bp, Klebsiella pneumoniae; identical to SEQ ID NO: 142280

SEQ ID NO: 233770 - DNA, 1689 bp, Klebsiella pneumoniae; identical to SEQ ID NO: 142279

SEQ ID NO: 233771 - DNA, 603 bp, Klebsiella pneumoniae
atgtcggtacgtaaaggtgaaattgcctgtctgctgggtgcctcaggctgcggaaaaaccacggtactacgcgcagttgccggatttgaacgcctgcaaaacggagagatctatgtgtcacagcgacgtgttgccggtcccggcgttcatctgccaccggaaaaacgtcatgtcggcatggtcttccaggagtatgcgttattcccccatctgaccgcgcagcaaaatgtggcctttggattgcgtcgcatgccgcgtgaggaacaacaggccagagtgactgagctgttgaaaatggtggagttacacagccatgccaaccgctatccgcatgagctttccggcgggcaacaacagcgtatcgcccttgcgcgcgcgttggcgccacatccggaaatcctgttgctggatgaacccttctccagcctggataagcgcacacgtgagcgtcttggcaacgaggtacgggatattttgcgcgccgccgggcaaacggcgctgttggttacccacagtgaacacgaagcccaactaatggctgaccatattggcgtggtaaaaatggggcagtatcaaattaaaaaagcgacccatccgacctga

SEQ ID NO: 233772 - DNA, 309 bp, Klebsiella pneumoniae
atgacaagccttcagcagcgtgcagagctacaccgtcaaatctgggccatagccaatgatgtcaggggctcagtggatggatgggattttaaacagtatgtactcggtgcacttttctatcgcttcatcagtgagaatttttccagctacatggaagcaggggatgagagcatacattatgctgcacttgatgacagcatcattaccgatgacatcaaagacgatgccatcaggactaaaggctatttcatctacccgagccagctgtctgcaacgttgccgctaaagctaacaccaacgacaggctga

SEQ ID NO: 233773 - DNA, 270 bp, Klebsiella pneumoniae
atgcgacagctttttcagctggtcttcgacggcggcgacaatctgcggatgcaggtggccggtattgagcaccgcgataccgccggcaaaatcgagatattcccggccttccacgtcccacacccggcagttctccgcgcgttcggcgaagatagggtggatctggccgacgccgcgcgggaccgcgtcgctgcgacgcgccatcattgctttattgctgttcatccgtcgctcctgttaaaggccaatgcacatatatttgatttctaa

SEQ ID NO: 233774 - DNA, 369 bp, Klebsiella pneumoniae
atgaaaaatctacctgctacaatttcgcaggcggcgaagccctgtctgtcgcccgttgcagtctggcaaatgttacttactcatctgcttgagcagcactatggcctaatgctaagcgacacaccttttagtgatgaagccgttatacaggaacatattgatgccggtatcactctggctaatgctgttaactttctggtggagaagtatgagttagtccgtatcgatcgctgtggattttcctcacaggtacaagcaccatatttgactgcgacagacattcttcatgccaggaaagcgtgcgggctgatgagccggtattcttacagggaggtaagtaatattgttcttagccgatcacggatatga

SEQ ID NO: 233775 - DNA, 186 bp, Klebsiella pneumoniae
atggataataatgcatgggcagttattgatagtgctggaattgtcgtaaatattattgtctgggatggggctgaggaatggatgccgccagaggggatgaccgtaataaaatgtggtgataagccatttagcataggaggctcatataaaaatggcattttcacgcctccagcattaagtcaataa

SEQ ID NO: 233776 - DNA, 906 bp, Klebsiella pneumoniae
atgcctaccaatgattttaaagcttttgcaactggaaacagcgcaaacgtaatttctcaggctgattatttagcccttgctgcgttagtaagcggattttcatctggtaaagcttcttccgcgcaggtgaataaagctctcaggcaggccactgtaatggctaatgtacttgctcagtttatcgcggattcagcaaatgtagatgtgctagatgacggtaatacagcagcaattctttctaaccttaaaaatagtatgcctggccgccttttgggtgtgcaagttgtcaccagtagcgcgctgattactaaatcagccggtgcaaaaaaatggcgcatcagagctctgggtgcgggggctggaagttctgctgctccggctaccgccgctgggcaggtttcgataagtaatggcggcggagctggcgcatatgctgagggcatctacgatgtatcagcattatcatcggccacggtgacgattggtagcggcggcgtggggggtacagcaatttcaccatacggaggggatggcgggaccacatctgtaggtactcttatctcagcacctggcggcaaggcgggattgccagcaggaccggctatccctccattccagcccgtggcaaatacaaactcaaatggcccgacagggtggaatattataggtacttctggatctggttctgaggcagctgtagctgtatccaccagttacgctgccggatctcgaggtgcaaatagccagttaggggttggtggttctatcccggcgattaatacgcctgcaaatactggtggcggttatggttctggtgcatctggctgttctaatggcgtatcgcaatctttgaaacctggagcatcaggtcgtgatgggattgttattattgaggagtatgcataa

SEQ ID NO: 233777 - DNA, 777 bp, Klebsiella pneumoniae
atgagtaaatacactgacaggataacgaactatcacgcagggaaacctaagttttttgcacacattgacctctcaacgcgaccgttaatcgacgtttcagccgcaatgacaggcatgattcaggatttcgaaattgataccgccatcggccagcagctggatattctgggtgaatggataggccgcaagcgcagggtcaggacgcctatctctggcgtgtatttctcgtgggatacagagaaacttggctgggaccagggcgtctggcagggacctttcgatcctgatgatgggtttcttgacctgagtgacgaagtttatcgactggtgctaaaagtcaaaattgctataaataactggaacgggcagaacgacacattgcctgagattctcgacaatgccctgaaaggatcgggtattcgtatggcaattgtcgataatcaggatatgtccatttctatatggatacttcctgaccctacggttgttatcagtgaaattgacaggatgattctcgatagtgcagttaataaggggccattcatcgcattacctcccggttacgttccatctcgttatgacctgaatcccatcgatcaggttaatgctgaattatggtgggctatacaaaacggatatatgactgttaaagctgcgggtgtaaaggtgagggaaatacagatgccgtcaaatggtggctattctttttttggttttgatgtggataacgaatatatatccggatttgactctggtaactggggagaagatttataa

SEQ ID NO: 233778 - DNA, 198 bp, Klebsiella pneumoniae
atgaaaaaagcaatttatttcctcaagcagcaggttggcgatatcgaaaagataaccgcctcctacgacggtatttcagcaacattccagcgtgcaggtgataaacgtcgatgcagtatcactggccgcggaaatgttcgccagattaaacatctgctgcgggaattcattaaatcaacgcaggcggtagatggatga

SEQ ID NO: 233779 - DNA, 318 bp, Klebsiella pneumoniae
atgcaaaagagcagatcgcactggacgcatcgggagcctcggctgatatccgggttgctgttgcgaatgatgattgcactaatcgccctgtgcctgctggcgcagttaagcggctgcagcaatacgcgaacggtctacgtcaaagtgccggtggtcccgttaccggccaacctgacggctgacaccccgcaaccggaaatccctgacagcctgacgtggggccagagcctggatttaaacgtcagtctgctatcagcgctcgggcagtgcaaccgtgataaggctgacatcaggcaagcagaatcaaaacgtcagtag

SEQ ID NO: 233780 - DNA, 270 bp, Klebsiella pneumoniae
atgacaaaaatgagcaccatttacagcagactttcatacggcaccgggaccgcactgacgggatgcggtgtctcagcaaaggcgtatgccggggcagttaaggcagaggtatggattttggccgacaaaatagcggggatgaccctgagtgactgggcaattattgtcggtatcgcctgcaccattaccacctgtggggtgaactggtactaccggcggaaagaacgtgaggatcggctcaatggctatgacaccaaaactgaggaatag

SEQ ID NO: 233781 - DNA, 273 bp, Klebsiella pneumoniae
atgcaagaacaacacttctcacacgaaaacgagttgttagcaatggcgccgcttaacgctgatggtgataaccagcttttcaaaaagcaacgtgttcaccttactgatgcgggatacgtgcagtgggatttcatccttcctgatggcattgactggcacttccaccaggaaagcatctaccttagaagcgatattcaactgaaggaatttaaagaatttatccgcgatgagctgaggcaaatcattgcacgtagaatcgaacaagcccgctaa

SEQ ID NO: 233782 - DNA, 459 bp, Klebsiella pneumoniae
atgcaattaaacaccagacaggaaagagtatacaccctggctaacatactgggctcagggaagcctgtatcggcgcaatccatcaccgcgacgctggcctgttctgagccgactctaagccgggcgcttaaagagctgagggaaacctacgctgctgaaattaaatacagtaaggctggccactcctatcagatggtaaactccggattactggataagaaaacactcaagagaatgagtgaggcgctggaccttaatactgatttaaaaacacatgaccaggggtcacgggtgatattggataaggatataaaaacttccgtttccctgtcgattagacgccgtattctccggaaaatagataaactggcagagttgagcggaacatcaagaagcgaagcagttgaaaaactggtcgaaatgaagatagatgaaattataaaggtcttgaaaaaataa

SEQ ID NO: 233783 - DNA, 507 bp, Klebsiella pneumoniae
atgggttcatgtgcagctccatcagtaaaaggggatgataagtttatcaccaccgactatttgcaacagtgccctgtggagcacgatcaggatggcagaggagaagctgagttcttattaccggaaatcgattattccccggtatctggtaactggcgctcccttccttctggcctgatgtataggctcagcgaactctctgttctcagctacgaagctgtcgtgtgtgtagataatgtgtttgttgaagatactccttatggtggagcgggtgaatatagtttgcataaaaacgcagctatgttgggagtaaaagcactgcggttatcacgagaactgagaatgttatgtggcctccctctgcacggcctttccgatacactatcgccaacgaggttggtattgttgaaagccagaggtaaaacactccaaaaggagtacgaaatggtaaagaagtctaaaaagaccgagcaagagattgaggatttcataaaggggacatcatga

SEQ ID NO: 233784 - DNA, 276 bp, Klebsiella pneumoniae; identical to SEQ ID NO: 5935

SEQ ID NO: 233785 - DNA, 645 bp, Klebsiella pneumoniae
atgattactgtagttggtgggaacaaaggtggttcagggaaaactaccattgcatcaaacctggctattgctctcgcaaataaaggaagggaagtctgcctgttaaacggagatctacaacgaacagccgcaaaacatcatgcggaacgagaagctgcaggactgttaccagcaataacccttgttgagaaatttgataacctgacacaaacactacaggctctgaatgaaaagttcgatgatgtaatagtggatgtcgcaggaagaaactcaaaggaattcataacgagtggagttgtcgcacatcaaataattgcgccactacagtgttctcaaccagatctggatactcttacagaactagaacaacagatagacgcaatgcgtaaccttaacccggaacttaaggtttattgtttacaaagtatggcaacaaccaatccggttttgaggggaaatgagagaaaagaattccttgaatatcttgaagaattcccaacaattcaagtcctggattcagttatttgtttcagaaaagtctatcgcgattgcatgagcaacggcaccggtgtagtagaaacgaacaatacagcagccagagcagaaattgaacatttaatgaatgaggtatttggcccatggtga

SEQ ID NO: 233786 - DNA, 972 bp, Klebsiella pneumoniae
atgaacgtatactgcgatgatggttcaacaacaatcaagttggcatggaatgacaatgggaaaatctgtaagtcgttgtcgcaaaactcatttcgtcatggatggaaggttgacgggttagggattcgccagacatttaactatgaactggatggtaaaaaatacacgtatgatgaagttagcaaccaatctattcttacgactcatattgagtatcaatatacggatgttaacctgttagctgtgcatcacgctttactgaatagtggattagcgcctcagcctgtatcattgactgtgactttgcctatcagtgagttctacacgaaagagtgtcaaaaaaatgaactcaacattcagcgtaaaattgagaatttaatgaggccgattcgtcttaataaaggcgatgttttcaccattgaacacgttgatgtgatgcctgaatcattgccagctgtgttttctcgtctggtcatggataaagttggtcagttcgaaaaatcgctggtagttgatattggcggcactacgcttgatgttggtgttatcgttggtcaatttgactctgtaagtgccattcatggtaattctggcattggtgtgtcttcagttacgaaagctgcaatgagtgcattgcgcatggcatccagtgataccagtttcctcgttgcagatgaattgattaaacgtcgtaatgacccggactttgttcggcaggttataaatgacgaaacaaaaactgatctggtccttaataccattgagggggctattgccagtctgggggagcaagtagtcaatgagctcggtgattttcatcatgtgaatcgtgtttatgttgtcggtggtggggccccgttgatctatgattcgataaaaacggcatggcaccatcttgggcaaaaagtagtgatgatggagtcgccacagacagcactggttgaagctatcgcggctttcaaagaggagtaa

SEQ ID NO: 233787 - DNA, 1272 bp, Klebsiella pneumoniae
atgtttgcactggctgatatcaacagtttctacgcctcatgtgaaaaagttttccgcccggaccttcgcaacgaaccggtcatcgtactcagcaataacgatggctgtgtgatcgcgcgcagcccggaggcaaaagcccttggcatcagaatggggcagccctggtttcaggtgagacagatgcgcctggagaagaaaatacatgtattttccagcaattatgcgctgtaccacagcatgagccaacgggtcatggctgttctggagtcgctttctcccgcagttgagccctactcaattgatgaaatgttcattgatttgcgggggataaatcattgcatctctccggaggtttttggtcatcagctcagggaacaggtaaagagctggacaggactcaccatgggggtgggcattgcgcctacaaaaacgctggctaaaagtgcacagtgggcaacaaagcaatggccacagttttccggtgtggtcgcgctggaggcagaaaaccgtaatcggatcttgaagctactggggctgcagccagttggtgaggtctggggagtaggacgcagactgacggaaaagctgaatgcgctgggtattaacacagcactgcagctggcgcaggctaacacggcattcatccggaaaaacttcagcgtcattcttgagcgtacggtacgcgaactcaacggcgagtcctgcatatccctggaagaagcaccaccggcaaaacagcagattgtctgtagtcgcagttttggtgaacgaatcacagacaaagatgccatgcaccaggctgttgttcagtatgcagagcgggccgcagagaaactacgtggggagcgtcagtattgccggcaggtgacgacatttgtacggacatccccctttgcagtaaaagaaccctgttacagcaatgccgctgtggaaaagcttccattacccacacaggacagccgggacattattgccgcagcatgcagagcgttaaaccatgtctggcgtgaagggtaccgctatatgaaggcaggagtcatgctggctgatttcacaccatcgggtatagcgcagccgggattatttgatgagatccagccccgtaaaaacagcgaaaagttaatgaaaacactcgatgaactgaaccagtctggaaaagggaaagtgtggtttgcggggcgaggaaccgcccctgaatggcaaatgaaacgggaaatgctctcgccttcgtatacaacacaatggactgagatccccattgcttcattctga

SEQ ID NO: 233788 - DNA, 438 bp, Klebsiella pneumoniae
atgagtaccgtttatcaccgtccggctgacccttcaggcgatgacagttacgtgcgaccgttgtttgccgatcgttgccaggccggttttccttcgcctgccactgattatgctgagcaggaactggatctgaacagctattgcatcagcagacctgcagccaccttatttctgcgcgccagcggtgaatcgatgaaccaggctggcgtgcagaatggtgatctgctggtagtggacagggccgagaaaccacaacacggggacatcgttatcgctgagatcgacggtgagttcaccgtcaaacgactgctgttgcgcccacgcccggcactggagccggtttcagacagccgggaattccgcacactgtatccggaaaacatctgtatttttggtgttgtcactcacgtgatacacaggacgcgggagttacgctga

SEQ ID NO: 233789 - DNA, 249 bp, Klebsiella pneumoniae
atgatccgcattgaaattcttttcgaccgccagagcacaaaaaacctcaaatcaggcatacttcaggcgctacagaatgaaatcgaacaacgtctgaaaccacactccccggaaatctggctgcgtatagaccagggcagcgccccgtctgtatctgtcacaggagcccgcaacgacaaggataaagaacgtatcatgtctctgctggaagaaatctggcaggacgacagctggctgcctgcagcatga

SEQ ID NO: 233790 - DNA, 258 bp, Klebsiella pneumoniae
atgtcgcagacagaaaatgcagtgacttcctcatctggcgcaaaacgagcatacagaaagggtaaacctttgagtgaagcagaacgacagagagcagcttctgcgcgcaaacgatctgtatgtaaagagatcaaggttttcgtcagaccagaactgaaaaactaccttaccagtctgtgtgcagaggaaggggtaactcaggcagagttgatagaaaggcttatcgagaaagaggcctgtcaccggaacatgatgtga

SEQ ID NO: 233791 - DNA, 1122 bp, Klebsiella pneumoniae
atggcgcacggtctcattgcggctgtgtcggtcctgattattgcctgtccctgcgcgctgggactggccacgccgatgtcgataatggtgggggtgggcaaaggcgcccaggccggggtgttaatcaagaatgccgaagcccttgagcgtcttgaaaaagtggacacgctggttgtcgacaaaacaggcacgctcacggaaggttcgcctacggtgacagggattatcagtctcagtccgggtggggaaatatctcttttacgtgtaacagctgcagtggaaaaaggttcgcagcatccgttgggtatggctgttgtcagagccgcgcatgaaaaggggatcgtgatacctgccgtcagtaatttcaatgccccgtcggggaaaggtgtctcaggcgatgtcgaaggtcaacgggttgttattggtaatgaactggctatgcaggaaaacagtatcgttattgataatcaaaaggccgttgcggatacgttgcggatggaaggcgctaccgttatctatgtggccacagacgggaaccttgcaggcctgatagctatctcggatcccgtgaaagcaaccacgccggatgcgcttaaagctttgcgtcaggcggggatccgcattgttatgctcaccggggataaccagcttactgctgaagcagtcgcacggaaactgggaatagatgaggttgaagccgggattctgccggatggcaaaaaagcagtgataacccgactgaaagcgtctggccatgtggttgcgatggccggagacggtgtgaatgatgccccggcgctggcagcggctgacgtgggtatagccatgggaacgggtacagatgtggcaatagaaagtgctggcgttacccttctcaaaggcgatttgatgatactcaacagggcccgtcatctgtcagaaatcaccatgaaaaatatccggcagaatctgttttttgcgtttatctacaatgctcttggggtgcctgtagctgcaggtctgctttatcctgtgtatggaatactgctgtcgccagttattgcggcggcggccatggccctttcctccgttagcgtcattgcaaatgcgttgcgtctgaaaagtgtcaggctcgggaaataa

SEQ ID NO: 233792 - DNA, 408 bp, Klebsiella pneumoniae; identical to SEQ ID NO: 104048

SEQ ID NO: 233793 - DNA, 351 bp, Klebsiella pneumoniae
atgatctccctcccgtctggcacccgtatctggctggtcgccggcgccaccgacatgcgtaaatccttcaacggtctgggcgagcagatacagcacgtactggatgagaaccccttctccggccacctgttcatcttccgtggccgccggggtgataccgtcaaaattctctgggcagatgcggatggactgtgcctcttcaccaaacgccttgaggaagggcagttcatctggcccgccgtgcgcgacggcaaggtggccattagtcgctcgcaactggccatgctcctcgataagctggactggcgtcagcccaaaacaccccgtcttaactcactgacaatgttgtaa

SEQ ID NO: 233794 - DNA, 1590 bp, Klebsiella pneumoniae
atgagtcaggactatctcgcccgtatcaccgcgctggaagaagaacttcgccggaaagacagccagctcagtctcgttgccgagactgaggccttcctgcgctctgcgctgacccgcgctgaagaaaagatcgaggaagacgaacgggagatagaacacctgaggtctcagatagaaaaactgcgccgtatgatgttcggcacccgttctgaaaaactgcgccgcgaggtggcacaggccgaagcgctgctgaaacagcgcgaacaggcgagcgatcgttacagtgggcgggaagacgacccgcaggttccccgccagctccgtcagtcccggcaccgtcgtccgcttccggaacatcttccccgtgagatactccggctggagccggaagaaacctgctgcccggcatgtggcggtgaaatggcgtacctcagcgaagtcagcgcggagcagctggagctggttgccagcgccctgaaagtgatccgcacagtgcgggtaaaaaaagcctgcacaaaatgtgacggtatcgtggaagctcccgcgccgtcacgtcctgtcgagcggggtatcgccggaccgggtctgctggcccgtgtgttaacagccaaatactgtgaacatctgccgctgtaccgccagacggaaatccttgcccgccagggggtggagctgagccgcgcactgctctccaactgggtggatgcgtgctgccgtttaatggcgccgctggacgaagccctttatcactacgtgatgaactgccgcaaactgcatacagatgatactccagtgccggtgctggcgccgggcaggaaaaagacgaaaaccgggcgtatctggacgtatgtccgggatgaccggaatgccggttcgtcagatcctccggcagcgtggttcgcgtactcaccggaccggcagggaaaacacccggagctgcaccttcgctccttccgtggcgtcctgcaggcagatgccttcgcggggtatgaccggctgttcagtacatcgcgagaaggcggcgtgctgacagaggcggcatgctgggcgcatgcccgccgaaaaatccacgacgtgtacatcagcagccagagcgccacggcggaggaagcgctgaaacgcatcggcgaactgtacgccatcgaagcggaaatacgcggcatgccggagacagagcgtctagcggccagacagtcgcggagtgcgccgctgctggcgtcactgcatgagtggatggtggagaaaagtgcgacactgtcgaaaaaatcccggctgggagaggcgttcacgtatgccctgaaccagtgggatgccctgtgttactactgccgtgacggtctggcggaacccgacaataacgccgcggagcgggcgcttcgcgccgtctgcctgggaaagaaaaactacatcttcttcgggagcgatcatggtggcgaacgtggtgcactgctgtacggactgatcggaacgtgccgtctgaacggtatcgatccagaagcgtatctgcgccacatcctgagcgttctgcctgagtggccttccaacagggttggtgaacttctgccgtggaacgtggctatacctgcctga

SEQ ID NO: 233795 - DNA, 264 bp, Klebsiella pneumoniae
gtgctgattggcttgctgatcgccgtgatcggcgcgtcgatggggccgctaaccggctttgcgctgaatccggcgcgcgacttcggcccaaaactgtttaccagtctggccgggtggggctcgatcgcctttaccggtgggctggcgatcccttactttctggtgccgctgctggcgccggtggtgggggcgattatcggggcgtttttgtatcgcaagcttatcggccgccatctgccgtgcgaatgcggtatcgatgagtaa

SEQ ID NO: 233796 - DNA, 1524 bp, Klebsiella pneumoniae
atggacatgttaggcagagtcaggcgcatgcatatgcgcgataagttatcgatcagtgaaatcgccaagcgcacaggtttgtcgcgcaatacggtcaagaagtggctacgagcaccgggcgatgtggagccaacgtacagaagaaagcccgatcagacaaagctcaagccgtttgagtcttttctggtggcggcgctcaaagccgatagcctgcgtcacaaggactcaaggcgaaccgcccgagccttgtttcaccagatcaaatcccagggctacgaaggtggctacagccgggtaacggactttattcgttgcgtgcgtgaatcggatgggcacgcccgccgagcctttgtgcccttgacctttgcgcatggcgaggcgttccagtttgactggggcgaagaaggcatgctggttggcggggtgtttcataaggtgcaggtggcgcacctgaagctctgtgccagtcgggccttcttcctggtaggctacccgacgcagagccatgagatgctgtttgatgcccacacccgctcttttgccgccttgggcggcattcccaagcggggtatttacgacaacatgaagacggctgtcgacaagatcgagtcaggcaagagtcgcaaggtcaaccaacgttttaaagcgatgtgcagccattacttgtttgatgccgatttttgtaatcgggcagcgggctgggagaaaggcattgttgagaagaacgtgcaggacagtcgccggcgcatttggttggcggcacggcagaggcggtttggttcctttgtggagttgaacgattggctggccaatcgttgccttcagacttggcagcaggtcaagcacccgcagtacaccgagctcaccttggctgaggtgctggacattgagcgcgagcacctgatgcccatgcctgaaccctttgacggctacgtagagaagacgtcacgggtgagcagcacctgcctggtcgcggtcgcccgcaatcggtattcggtgccctgcgagtgggcgggcaagctcgtgagtacccgcctttactccacccacgtcaccgtggcggcaggcgagcagatcgtggctcgccacgaccggttagccaaccgggatcaaacggcttacgactggcagcactatatcgatctggttcagcgcaagcctggggcgctacgaaacggggcgccgtttctggacatgccagaacccttacagcgactgcgggcggcactgatgcgccagacaggcggtgaacgcaccatggctgatgtgttggcctgtgtaccccagtttggcctggataccgtgctcgtggccgcgtcgctggcccttgaagacatcacccccagcggtcaactgggcattgagcatgtcaagaacattctggccaggctcaacagcccaccaatacccgatccggtcagcaccatgcttgttgtcaaagaggcacccgtggccgacaccgcccgctatgatcgcctgcgtccgatgagccaggcccatcaggaggtgcgacatgcgtactga

SEQ ID NO: 233797 - DNA, 825 bp, Klebsiella pneumoniae
atgcgtactgatatccgggaaagcctgaaatcgctgcgcctgcacggcatggtcatggcctgggaggagttgaccgagcatggtgagtcaacgcggatcgagagctccaggtggctgctggaacacctgcttcaagccgaagacaccaatcgtgtgatgcgctcgattgcccaccagatgaagtccgccaaattcccactgcaccgggatctggccgggtttgacttcgccgcatcgccggttgaccaggcgctgatcatgaatctggccgatctgtcctttaccgagcaggcgcacaacgtggtattgatcggtggtccgggcacgggtaagacgcacctggccagcgccctgggcatctcggggatcacccggcatggcaaaaaggtgaggttctgttccaccgttgacctggtcaacgcgctggaaaacgagaagctcgtgcacaaaaccgggcggatagcccagaatctggccagacttgatctggtcatccttgacgagctggggtatctgccatttagtcaagccggtggagccttgctgttccacctgctctccaaactctacgagcacaccagcgtcatgatcacgaccaacctgacgtttgccgagtggtcacgggtatttggtgatgccaagatgaccaccgcacttctggatcgactcacccaccattgccatatcgtggagactggcaatcagtcctatcgcttcttgcacagtgaccgtcaagcaaaaagcaggatcaaggcacgtgaacaacggaagcgggagaactctatcgaggccgaaccacccatggaggaagaagagccgttttag

SEQ ID NO: 233798 - DNA, 2118 bp, Klebsiella pneumoniae
atgaatgatatttcaataactgattatctcgggcctggggtgtatttattacaaaattacccaaaagaaactgagggcctgattgcaaagaagggttataaggtgcacaactgcgctgatctggcgcagtgtaaagatattcttaaccgcaataaagttaatttccttttaaccaatgataaagataataattttaatgaatatgccaagattgtcagaaccgctgcaagacattttgtaaataaaatcgttattaatatctttgtagaaaagggaaacggtcagagtttccaggattttattaatataactgacaatcttggttattcgatagacactgtattttatttgctcaatcctggctatgatgaacaatttcgggatgatcaaagcctaaagatagttttgagttatagacgtcagtcagtagtttcgacagacaaaaatatcttagaaacgactatttttgaaaaaaaacttgtaaatacttttccctacatacgtcctggggatcgagtacttgtaatcattaagaataaaaattcgataacaaacattaaaaatattattacagaacaaaccaaggcatctgaagttgaaatttactcattggatgaaattaaaagtgttcagctaaatggcaatggctaccattttctcattactgataaatatgccgatgatggactaaataatgcactcaaagtcattatatcttacctggtgcccgctggcaggtacgttagttttcatacagataaaactgtagttgagacattaagtaattacaatttacaacctgaagtttatttattttatgaacatggccttttaaagactcaaatacatcagggagaggaaattacactctctcctgaattatgtgtttttatgaaaagccctttagccaggtcagagcttccgtatcaggaaacgatttatggctactcgcatccaccaaaaaacctattagcttttgccagagattatactaacccgtggcttattcgcgggatcgtagaattcccattcaggaataggtcaacttatcatctacagcagtatagccatcagattttggagcacagtgctcctgacagccccgattatgccgctgcattggcagtattaggttatcaaatgctaagcggcagtgatgatacagctgacatttacgcaaaaatgctagattactgctcaaatgtgtcgcagatggataatcctacgccacatcaatatcgttggctcatatctttatcgacacttttaggtcttatttgtaacaaaaataatgataaagctaatgcgttaatccatttatctcgtgcagcaaactccagcattgataaatttagcccctctatcggcacgaagattttacaaagcttttatcttcagtccgttatattaatttctttaaatagaatctcctgtgccgagataatcgtcgatagagggattaaaagaggtatacagctactttatcaacatcctgacgaactggtgggtaaaatatctcaaccatttaattttgtgctttatatttaccatgatattcttgattggcttataaagatggtcaacattaaaaacgccataccaggcagaaaattcaacattgcaaattttgacaacggtaacacctggtcggctttgcttcatgaacgcatgaatgcaataaataatatgtcgcaaatgatagatgagcgtgacagaacaattcatgatcaaaaatgcttaattgatgaacgcgatagaactattcacgagcagaagcgccttattgatgagcgagacagcactgttcttacgcaaaaaaatttaattgatgagcgtgacctggtctctgctcagcaaaatcaattaattgagcagaataataaaactattcagcagcaaattcaaaatgtaactgacttaaatagtcaagtttcctctaaggaacagaaaattgatgaattacagaatcaaaacataaaattaatttcattaatcgatgaaaaagatctccatattgcccagctctctgcagatctagaacgtgcaaataccatactgcgtaagattaatagcacgcctgtaataaggcatctactacgaatgctaaatataaaataa

SEQ ID NO: 233799 - DNA, 519 bp, Klebsiella pneumoniae
gtgcacgttcgcaccccgtcagccctgacggaggaagcgctgaaacggatcggcgaactgtacgccatcgaggcagagataaggggaatgacggcggagcagcgccttgccgaacgtcagttgaaaacgaaaccgctgctgaaatccctggaaagctggctgcgtgaaaagatgaaaaccctgtcgcgacactcagaactggcgaaagcgttcgcatacgccctgaaccagtggccggcgctgacgtactatgcagatgatggctgggctgaggcggacaataacatcgctgaaaatgcgctgcggatggtcagtctgggccgcaaaaactacctgttcttcggttcggatcatggaggagagcggggagcgctgctgtacagcctgatcgggacgtgcaaactgaacggagtggagccagaaagctacctccgctatgtccttgacgtcatagccgactggccgataaaccgggtcggcgaactgctcccctggcgcgtagcactgccgactgaataa

SEQ ID NO: 233800 - DNA, 990 bp, Klebsiella pneumoniae
atgaataagatttacattgattctcgttgggaaaattatggcggcatcgggacgttttattctgaaattaacaaaattaataattatgaagatgctaaactacgtggtaagcctatgtcaccctttgactgcttaagcactacgattcaacttttttttagaaagaatggagttttcttttttcccggatatatacctcctgtttttttaaaaaataattatatattcactatacatgatctaaatcatttggatagacctgagaactctagtttaatcaagcggttgttttatagaacaattgttagaagaggatgtaaaaaagcaaagtatgtttttacagtctccgagttttctagaaaaaaaattatagagtgggctaacatttctcctgaaaaagtgattaatgttagcaatggcgtttctcataaatttcgccctgaaggagaaaggtcttgttatgatttcaagtattttttatgtgttagcaatcgtaaggggcataaaaatgaaataggcctattagaagcgtttaaaaaagctagaattgataagaatgtaaaattagtttttactggtaaaaagaatgattttattgctaataaaattattgaattaaatttagaggatcgaatcgttttcacaggttttgttcatgaagatgaattacctaaaatttaccgttctgcaatcggtttagtatttgtttctttttacgaaggttttgggcttccagtgattgaggcacaagctagcggtatccccgttataacatctaatacaaccgcattgtgcgaaattgcagggaatggagctattttagttaatccatataataagaatgaaatttctgacgctatagagaaaatatataataatgataataatatttgtgagttattaatagaggcgggatatattaactgtgctaattatacatggtcaaaaactgctgaacgagtagatttttatattaattctataaaataa

SEQ ID NO: 233801 - DNA, 852 bp, Klebsiella pneumoniae
atgttcaatatagaaaataacagagagatattaaaaagtcaaatacctttaaagccatatgctacaaatgatttagagtttggattgactattcaaaataagaataaagctttagatatgctttatttacaagtaaatcacccgttgtatcttcatacaatgatatttgatttagacaaagaaaactgcttttatgagtttgaaaatgctcatttgcccatcccgtcttttataacaaaatcaccagactctggtagatgtcattacggttatatgcttaatgctcctataacatcaacagagaaaagcagacagaagccagtaaagtttgccagagcattatattacaatatggctaaccgtttaggtgctgatctggggtatgccggactgattacaaaaaacccgctaaatcctcactggtcgccgttctggtctggtgctgatttatacgaacttaatgatttagctgattgttttgatgatttagaagaccccaaaaaacgagaaaatacggggcttgcttttggtcgtaatgttgaaatgttcgacacaataaggcagtgggcttataaaaatgtgctaaaatatcagagtgaaagctcatttaatgatttccacaatgaactattgctaaagtgtcaaatgcataatgcatatttaaatgctgatgatttattgccatataatgagataaaagccacagcaaaaagcattgcaaagttttgttggaaagaattcagcgaagaaaaactcaacaagatacagagtaaaaaacagtcttaccgtggaaagaaaaacaaaggaatagtaaaaagtaaaactcgtaagtttttggaggccataaaatga

SEQ ID NO: 233802 - DNA, 243 bp, Klebsiella pneumoniae
gtgctggggaggtacatcatgcacgaacagaaggacaagaaacggcggttaggttttatgattggtaagagcaatgcaacattgccagcagacgaacaaacagaagcagagcttgatcaggaagtcttgaagctgttttatcctaaccaatgcaccaaagacaccatagaacgctcagaagctggtacagacgttttcacggcctccggttctgatgacctgttcaaaaaattgaagctgtag

SEQ ID NO: 233803 - DNA, 252 bp, Klebsiella pneumoniae
atgaaaatagttttatcagtatcaaaatgtttatacataaacgatttagatcgcttacttccgtgtgatcgtttttttgttcatttagattataaggatattagcaaaaatgagtcatttgagatgaatagacacgacaaagaaagctacaaacttatcattgataagattgtaggtaatgaagtaatgcttgctattgatgaagatatatatagcgaagttgtcgaaaacttaactttattattaaaatga

SEQ ID NO: 233804 - DNA, 270 bp, Klebsiella pneumoniae
atgattatggaatatgaaatgaagcttaatgtgttagcacgttttttttattatatcgagcaagctaaagatataccttttgattactcaagctatgacgaacaaggattatgttattttgtagctaatagatacattaacgaaaataaagctgatgatcttatacaggcattgatagatactaatgacgatgattatataaaagctataagagattatgttcagtatacagctttaaatgaagtgagaaagaaatatgaagacagatag

SEQ ID NO: 233805 - DNA, 1497 bp, Klebsiella pneumoniae
atgaaaggaaatgtagcaaaacccggaagatcatttaaaaatagagttgattacattcttaaagatgaccacgattttatatgtagcaatatggcaagtgattataataatgttagtgatttaactgatgagtttaaaactgtaagcagctttagacaagatataaaaaaaccagtatttcacgcttttttatctcttccaaaaaatgaacatttaacagatgaacaatggcaagagatagcaaaagactatttgaaagaaatgaatattgatatagacaaacatcaatatatttgtgttcgtcataacgatacagataaagaacatatccatattgtagctaatcgtgttggccttgatggttctgtatggctcggtcagcactcagcatttaacacaatagcagcttgtgaacgtttagaagtaaaacacggcttaaccatcacggatggcttaaaaggtcaaaaatcagaggtatcagcaccaaccaagaacgagatcgagcaagccttgaggacaggtgagaaaccagctcgtatcgtgctacagaacgcattacaggcggctatggtaggaaaaccagatcttgagacattcatagacagactgcaggctgtaggcatcgaggcggcctttaacgttgcaagcactggcaacgtcgccggggtgtcgtttggtatcaaaaataatgaaaaaaatatttatttcaagggatctcagttgggtaaaaaatacagttggaacactataaaaaacaaggtgatatatgacaaaaatagagatgatgaacttgttagaagattcgcagcaagaaaaacagatgacgaaaatagtattagacgatcacctactgaaccagatttcaatgacagtagagccgttgacagaatcgatgatgatactatcggagtcagtcagcacggcattaaaccagacacaacagacactaaccagagtgaacaactcattagaagcaacaacaaccgctttaaactcagcgaaaaatataatagaccagcaagccataaagttagaagaacaacacaaaaagctgcacaaatactcaacagagttaaaaaacaatacaataaagaaccaatcaaaacttataataaaaatggcctcaatagttggcgtgataaatctgatagcggttctattggtaggatacttgatcatgcagaaacagccaacgcagccacccattcatttagactcaaaggccgtggcagtttcaatagtagagcaactaagatcgaagagataagagataaacttggaataaaaaaacctgttattcagccaaagaataaagaaaaaatagttaaagaagaaataaagaaaaaacctttaggtttgagtatgaatgaaaatagatttaaatcgaagttaaaagaaacccttaaaaaagaaaaaccaagaaatgaaacaacaccaacacaactacagcaggaagacgatcagcatttaaaaccaagaggttttaaaccgcgataa

SEQ ID NO: 233806 - DNA, 1023 bp, Klebsiella pneumoniae; identical to SEQ ID NO: 164658

SEQ ID NO: 233807 - DNA, 558 bp, Klebsiella pneumoniae; identical to SEQ ID NO: 25161

SEQ ID NO: 233808 - DNA, 366 bp, Klebsiella pneumoniae; identical to SEQ ID NO: 157173

SEQ ID NO: 233809 - DNA, 273 bp, Klebsiella pneumoniae; identical to SEQ ID NO: 167055

SEQ ID NO: 233810 - DNA, 366 bp, Klebsiella pneumoniae; identical to SEQ ID NO: 170117

SEQ ID NO: 233811 - DNA, 486 bp, Klebsiella pneumoniae
atgtctaaatcgaagctattaaagtcattagagatttcacgtactttattgcgctcacaaatcgatgttcttcgagaagaggctgaagaactgatcaccaattattggatcgagtggaaagaacggaatcacattgagaggaatttacccagggatagcaaaactctaaagaaggagtatctgggttcatatgcaccaaaagttgagctaattggtaatgccaggaaagtcaccattacctggcatcagtttagcccgtataaaaacaggccacctagtcacatgtcgaaacggatttcaccgatgaaaagtggaaaatatacgaaaagctgctttgttaatcatgccagctgggaatatgaaatgattgaaaaaacggagggattactggaaccctacagagaattacttgagttctaccatgctgcatatatcgaactgggacgaaaagtccgtcaatactcaaaatcagaggtggcacaatga

SEQ ID NO: 233812 - DNA, 801 bp, Klebsiella pneumoniae
atgtcagaatcagataacatcacgcgtaacttactcggtaaactattacgtaccgagatttcgattattcgtagttaccgtgccttcttaatgttattgcctcttcatggatcttctaagtatcaaactggatcaccactcctccaacgccgactatttggtaatggatttggagctatgattgataatgcatttgaagttgaaactcggccaggaagcttcctcgttcctcgttctttaagtaaagagatctcttgggacaaattctttgtagctgtagttgatggcgacactaacgtcattcgagaatatgacagtgaagatactgacttcggcatttacaatgaaggtgaaaaagtaactttgctcagcgggcaggaggaattttataatccgagaaaaattcagcaactacgttctaagtgtgtagacattcaaaatgattacttaatgcaagttttctttatgtcaatgcttgcacctgagtttgttagtatcttttttggattaaaacctaccaccgtggaggcaataaaagatgtcgggatgtcatcacttaaattaattaatgatgtcgttctctttccacgaacaattccctttacgccaggtctgggggatgacagtgctacgctaaaatcaaaggtatttgcttgggcatacgaaatatctgccgatattcgtttgggtaaagttagtgacgttttaatggaattactgcgttacgacactatgtttacatgccaccgtcaggatgtgttcaatactttggcaaataaagtgctcttgaaggattattga

SEQ ID NO: 233813 - DNA, 468 bp, Klebsiella pneumoniae; identical to SEQ ID NO: 208719

SEQ ID NO: 233814 - DNA, 627 bp, Klebsiella pneumoniae; identical to SEQ ID NO: 208718

SEQ ID NO: 233815 - DNA, 165 bp, Klebsiella pneumoniae; identical to SEQ ID NO: 197342

SEQ ID NO: 233816 - DNA, 285 bp, Klebsiella pneumoniae; identical to SEQ ID NO: 197343

SEQ ID NO: 233817 - DNA, 360 bp, Klebsiella pneumoniae; identical to SEQ ID NO: 142263

SEQ ID NO: 233818 - DNA, 318 bp, Klebsiella pneumoniae; identical to SEQ ID NO: 197345

SEQ ID NO: 233819 - DNA, 846 bp, Klebsiella pneumoniae
atggcgattctgacccgcgagctggccaacaccccactccatgcgcgcgttgactggttgattggcccggcttcgctggtaacggcgctggatatgaaaggcttctcgctgaccactatcgtgctggaagagagcattgaaaaggcgctgctgtcggatgtcgaaaccgccagttggcagaagccggtgcagccgcgggctgttaatatcatgccgtccgcgctcgccagcgcacgcgtcgcctttacgccatcggccaacccgcaggtgggcgattacgtggcgcaggtgaccagcaccctctccggcctcgaaacccatctcaacgcgcttgacgccaaagtgggcgacggcgataccggctccactttcgccgctggcgcgcgtgcgattgccgctctattgcaacgccagcaactgccgctcaatgatttacccacgctgttcgcgctaattggcgaacgcctgacggtggtgatgggcggctccagcggcgtattgatgtcgattttcttcaccgccgccgggcagaagctggagcaaggcgccagcatggcggaagcgctgaacgccggtctggggcagatgaaattttacggcggcgccgatgagggcgaccggacgatgattgacgctctacagccggcgctggcggcgctgctggccgaaccggataatctgcaggccgctttcgccgcggcgcaggccggcgcggatcgcacctgccagtcgagcaaagccggcgccggacgcgcctcctatctcaatagcgagagcctgctcggcaatatggaccccggcgcccacgcggtggcgatggtgtttaaggcgctggcggaacgctaa

SEQ ID NO: 233820 - DNA, 819 bp, Klebsiella pneumoniae; identical to SEQ ID NO: 185108

SEQ ID NO: 233821 - DNA, 351 bp, Klebsiella pneumoniae
atgtttactgccctgaacgataaaaacactttcggttacccgtttgagaagatccgtaatgctatcgctgtacctagtgaaaaaaacgttgatgctgccaccagttccggtcttgaagtcctcagccggaggtatgatgcttttcgccaggagctggatgcggccggtgagctgggaaactgggaatacgatctcgatacctacaatcactgtattgcggtgctgcaacgttacttcaccggcaatccatccgggctcacagaacgtgatgcccggatttacagccattacctgcagactgagcacaaaaggtttgtgaaactggctgaagagctggctgccggccgctga

SEQ ID NO: 233822 - DNA, 123 bp, Klebsiella pneumoniae
atggctgactggtttattgcgaccgaaggcgtgaaggtggtgaaggacagcgccagtgtcaacgccacgatgtttgaccgttatttgccattttcatgcccgctaagatactttcgttactga

SEQ ID NO: 233823 - DNA, 243 bp, Klebsiella pneumoniae
atgttgggtggagcggacaatccaaatggtgaattaccgtcttatatcactggcgctgacaccagtctggggccgcagataattacagctgtatcgaccatcgcatctgctgtcggagcggtgttccttactcaccacttcacactcagacgtgaggagagaactgcagcagcgaagctggccagcgagcgtctttacattagtacagagctggtttttttactggcactgttgcaaagttag

SEQ ID NO: 233824 - DNA, 1419 bp, Klebsiella pneumoniae
atgtaccataaaataataggaggtaaaaaaagcaaaggtcaaagaaatataaaaaaaagtattgaatatttattgcgagagaaaaacccagaacaacagaaagacataaaaatattatcaacaaccacaaaacaagacctaatcaattttgaaaattatattttagataaaaacaaatcaaacccatatgtgtgtggtgttttatcatttgaagaaaaatccatatccgaagaattaaaaactaaattaattacagagtttgaagatattttatttgcagggattgaacaagaaaacagacctccagttatgtgggtagaacacaacgacaagggcagggtagagttaaattatttaacatttaacagtttacaagacagaagatcatatactgtatatttagataaaagagatcgtggattggtaaataactactctgaaataattaattatgaaaataatttatcaagtccattcgaagagaaagaaaataaaaacacattaaccaacaaaccaaaaaccaatattccagaagataaaaaacaatttattgaaaatattaatactgaaataatggcattaattattaatgaagagttggaaaatagagaacaaaccatcaaatatattgaaaatatgaaaggtgttaaaataaacagaatacgaaaaaatcaaatatcaattaaatctgatttgtttgatgacgataaacccattgtcctgaaaggagatatatatgaagagggaagagattacagcgattatagaaaagaattcaacccaaaacctacaagagatccagagtttgttagagaaaaactcacagagcttaaaagaacatttgcagaaagaattgaaaaacgagaaatcagaaatagatcaaagtttaaaaaaccatcgctcaaaaatataccagaaaatagacaaagtgttcaaagagaagatcaagatattggatataaatatactaacggcgattttatcaatgttagtaataacgatggtttttcaggtatgtatattcgcactgataatatggagattgtaaacaatgagtcaattaatacagaatataaaactaaaacagcaacagaagaaacagcaggaactacaagaacaagagatattgaaaaaattaatcagcaacaacaatttgttaattcgagacttgaagaagctggaagaaaacaacagcaattcagaaagtcgattgatacaactgagggaagatttggagtatgtagaagatctgtacactcaattatttctacttttggaagatacatacgaacgttttcagcatatacaaggaagaatgaacacagacaaaaattcgaaaaaagacgaaaaatcgaagaagaaaaactcaaaatcaaaaatcagggaagttacaacagaagacgatataaaccatattaa

SEQ ID NO: 233825 - DNA, 348 bp, Klebsiella pneumoniae
atgagctacaaggatagatacaacaggaagcacagcataaccctgtgcttcaatgatgaagaatttgcacaggttgaagaactggcttctatgttgaaaaaacccagagcaacagccgttagagatcttattctcaataaagattttaaactcaaaaaagaaatagcaaaaaataaaactggtgatgtatattttgaactccataaaataggagtaaacattaaccagattgcaagagcaataaatactgatattgataaatttatttcccatgagttttcagaagattttttaaatttgtttgaggaaataacaaatgagatagaagaaataaaaaggagaatataa

SEQ ID NO: 233826 - DNA, 822 bp, Klebsiella pneumoniae
atggttgaaaccagaaaaacgatgttaaaaatccatgataatgataaagcccgtagagttacgaaaaacgatactattgaaactgaaagtatcgttatgagtggtttatttttgaatactattgatagttttgcgagaaactttgatcaggaaagtattaatgatgggttaggaagaagacataattttgtttatgctgaaagaggggaaaaagttgtcccaacttggacagtagatcagatcatcgaatctctcaaagagggattagatgatttcttcactactgttaaaacaaacgtaatctatacatattccccagaatgtagaaagatttatgatcatttttatatggtttataaggaaaaatttgatcatatattaggagaagaaacaaacggaacattcttcagaacttattttatgttgagttggaaatatgcagcaatatatcatattttattaaaacaagaaggaaccgagattcaggcaaaatcttttgattatgggattaaagtttcattaatgtttttatccagtataaaaaggtttttagattataaagtagatttaaaatctggtgctaaacaagtaaggaaagaatatttacaaaaagcagcagaaaaagaattaaataatttacaaaaatacaaagagtttttgcttgataatattgaaatttcattaagagacttcaatagaaaatttaatattaaaaagatcgaaagtctaaaaatactcaaaacaatcagagaaaataaattaataaaatatcatccattgtttgaagtgttagcaaaagaagaagccaaagcaaaaaaataa

SEQ ID NO: 233827 - DNA, 528 bp, Klebsiella pneumoniae
ttgttcggacttttcaagaaggcaccaccaccgcccgagccgccaagacggttcccgccggtcccagattggcagcctagcgtgcaactgcctctcgacaggatcgctgaatgcatccgcttctacacgaacagttcacgcgactttgctttgttcaccaacggcactgtggccgttcttccgtcgggcttgaacgacaaggacgccgagcaacatgcgctcaaggcactccacggtgtgttccacgcccatccggatttcaatccgatgaacatgaaggatggcaacgtattggttcagtacaaccacgacgtcgcgagcgtcgtgctggctgatgtggttgagcagaattgggaggaaatcgacaagcagcatcagcgtgcgctggccacctacgaagtcctaatcactccgctaggccagaacatgttcgacgacttcggtaagaaggcactcttcggcaggtgtttcatgtttatggatgcccaggcgccgcatgttgttcgtatcgagcgccatgatggctaa

SEQ ID NO: 233828 - DNA, 1284 bp, Klebsiella pneumoniae
atgaaatcacaatttatgcatgtagaactctacagcagagaagaaccagctaaaaagacaataaataaaagtaaaaatataaatcataaatctgatgttagaacaacaaccgtaaacggtgtgttgtcagaaatgaaaagggaggagggttttacatcccatttagaaaccatagctgcaccggaggtgctctatgggtctatagatgccttagaacgctctatagagcgttacgaggccgaatttaagactacagacaagaacgggaaggagaagaagctacgcaaagatgcatgcatcttgctagctggtgtggtttctctagatcgagctgatgaagaaatttgggatgaatataagaccaaagcaattgaatatttaaaaaataaatatggtgaaaatttaaaatgtgttgttgagcatacagacgaaaccaacccacattttcatttttacgtcgttggaaacaaggatcaagatttaaatttgcttcatgatggaaagctcgcagtatctaaattagcaaaagaagataagaaaaaattacatcaaacagcttacacagaagctatgatcaaatttcaagatgatttttatgtacaggtatcaaataaatttggattgagcagaacgggcgaggagccgcgagaacgctataaatcacgccctgattacttgagatttaaaaaaagacaagaaacagcattaaatatattagccaatttagaagagtttgaagaaaaagaattaaaaaaagcaaaacaagctggctttaatgttggtattaaaaatttcgatgaaactaatttttttaggaaactcgattggagagtaaaaagaataaaaaaagaaaaagacaatgagattaaaaaattatcggatgaaaacgataatttaaatatagataagtcaaatttacagcatgaattagatatgagtaaaattgagctttcagatgcatatagtcaaaggaatgaagcatccagaaaaaatagcgtttatattgataaagtaaacgctctaaaaaaagaaaataaattattacttccatacaaagatcaatttgatttgaaattaaagcaggaaaaagagccattgcaagcagaagtcaaagaattgacttctgaaaataccaatttgaaaaatgagaacacaaaattaaaaaaagaaaatttagatttcaaagaatttattttgggtgttaaaaattactatggatctaaatttcaggaatggtacgaggaagtattcaacccaaaaacaaaaacaaaacccaaattttaa

SEQ ID NO: 233829 - DNA, 1248 bp, Klebsiella pneumoniae
atgagctatcagtttatacatattgaatcttacgcaagagtgggatcaaatcaaaaagggaaaagtacaaaatggaatattcatcagatcgcaggtgaagctatgcgaaatgatgaagactgtaaacacgtagagcatccacaagaacctacagttctttttggtgtggatgcttatgcagctgcagatatggctcaaaaatgggctgagacgtctgtagacgcttctggaagaaagcttcgtaaagacggctcctgtttactcgctggtgttatatccttccctgaaggccgtacagaggaggattggaaagcttttagagatgactctattaaatatttaaaagataaatacggtgagaatttaaaatctgttatagagcatagggacgaatctaatctacatatacatttttactctgttccaaagcttgggcaaaagtttgatgaaatacacgacggtaaaaaagctatattggaagctaaaaaagaaaactcaaagttgcttaaaggcgagcagaataaagtctatattgaagctatgaaagagtttcaagaagacttttataataaagttgcaataaatcatggaatgacaaaaaccgggccaaagcgtgaacgcttgacccgtgaggaatggaaggcaagaaaagaatatgcattaaagcaatcagaagaaataaaaaatattagtctattaaaggatcaagctattcagataggtaaaaaagaaggttttgactattcagtagaacagtcaaaaggctggggctggatcgcaaaaataggagctaaatataaatattacactgatggttttaaaaaaaagctagaggaaaaagatgaagaaataggagttgttaaaagccaaagaaatgaacagcaaaaaaagcataaagcatttaaaaaagaatattactctcaaaaaaaagaaacagaaaaagcagttaacgaaaaaaaagaaaaatcaaaagaagtttactttttaaataatgaaaataaagagcttaaaaaaaacaatgatattttagaagtggaaaacttatcattgagagaagaaaataaagagcttcagcaatataaaataacaagtgaaaaaatgaaggatcgttttcctgatgaatataaaaaaatggaagctgaaataaataaaccaagaccaaaaggagaaagctataaccatgagccgaaagctcaggagctttctattcagcagcaagatggatacaggaaaagacctcgaatgtag

SEQ ID NO: 233830 - DNA, 864 bp, Klebsiella pneumoniae
atgctacatgccttaaacttttcaatacctgatgattcttttctattggatggtacttattcgactacattaacagaggagttaaaacttcaaaatccgataagcaaaattagagaatcaataacaaaatcagatggttgcaatgattctattgataattctattaattatgaagaattcaaaagaatctggttccctgatgtaaatgcacatgttttcatttcccatagccatgtggataaagctaaggcaatagccttggcaaactttttattttcaaagtttggcattcgttcatttgttgattcagaagtgtgggggtatatggatgatgcactccgtgaactaaataataagcacaataagtttccggggcaagaaaatacttatatttatgagcactgcaataaacttgcaagcaatttaaatatgatactttcatctgcattaataaaaatgatacatgaatctgaatgtctgatatttattaatacaatcgactcatgcgttcgtgatgggaatgagtttagaacccaatctccatggatattcactgagttattaatgagttcaatgcttgaaaagagcgaacataaagatcgtccaactgaactgcgcaaatcacttgatgaatttcgtgtagtagctgcgaatgaatcatttgaccaggctgtgttttcatatccattatatttacgacacatgcataatgtaaccaatgataaaatcaataaaatcaatgcgataaaacctagcggtctatctttcacaacgacctgttacagagacactgcacatcactttgaagtcgatgatgtattcaaaaatttagactcgatctataacttggtcatttctcgttaa

SEQ ID NO: 233831 - DNA, 948 bp, Klebsiella pneumoniae; identical to SEQ ID NO: 129172

SEQ ID NO: 233832 - DNA, 807 bp, Klebsiella pneumoniae
atgaagccactgctggtgaacgctggtgacctatcggggttactctctggtgcggcagtgctctgtttagccttccttggttttgatgccatcgcgaccatggccgaagaggcgcacgacgccaaacgcaccttgccacgggccatactctttacggtgatcagcgccggtgctatttttatcgccgtttcctatgctgcccatttggcctatcccgactggcaatcgttgatcccgcatcaggataccgccagcctgattatctccgagcatgtcggtgggaagtggatgtataacttctttatggccacttatttgaccggcgtttatgcctcagcaatgaccgcgcagaccagtgtgtcacgtattttctatgccatggggcgagaaggcgtactaccacgcaaagtgttcttccatctgcatcgcaaattccacacaccgtggcgggccattttgttcgttgccaccatctcgctgctggccctgttccttgacctgaacttagtggtatcgatgataagctttggtgccctcggtgctttcacctttgttaatttgagtgtgataaagcactttattatcaatgagaaacaccgcggtactgcggctatgtttaagtacgggctattacccatgatgggattcgtcatgtcggtgtggctgtgggttcaccttgagcaacgggcgcttgaagtcggcttattgtggctattggcaggctttatctacttgttgtggctgactcgcggctggcgtaaatcgccgccatccgttaatccagatgatatttcacacctgttgtaa

SEQ ID NO: 233833 - DNA, 159 bp, Klebsiella pneumoniae
atgacccgtctggcttcgcgctttggcgcagtaaatcttatccgtagtgaccgtccgttaacccgcgaagaactatttcttgtggtacccagcgtattcagcgaggacaaacacgcatcccgcgtaagcgtcgtctcagcaccgtctggcagatcctga

SEQ ID NO: 233834 - DNA, 1071 bp, Klebsiella pneumoniae
atgaaaaagctgattaaccgtgttgaagatgtactgaatgaacaattacaggggctggctaaagcccatccgcagctgaccctgcatcaggacccgctgtatgtgacccgcaccgacgcgccggtggctggcaaggtggccctgctctccggcggcggcagcggacatgaaccgatgcactgcggctatatcggccagggcatgctctccggcgcctgtccgggggaaatcttcacctcgccgacgccggacaaaatgtttgaatgcgcgatgcaaattgacggcggcgaaggcgtcttgctgattatcaaaaactataccggcgacatcctgaattttgagaccgccaccgagctgctgcatgagagcggcattaaagtcaccaccgtggtggtcgacgacgacgtggcggtgaaagacagcctctataccgccggtcgtcgcggcgtcgccaacaccgtactgatcgaaaaactggtcggcgccgccgccgagcgcggcgactcgctggaagcctgcgctgaactgggccgccgcctgaacaatctcggccactcgattggtatcgccctcggcgcctgcaccgtaccggctgccggccagccatcctttacgctgaaagatgacgagatggagttcggcgtcggcattcacggcgagccgggcatcgaccgccgccgcttcagctcgctggaccaaaccgtcgatgagatgttcgataccctgctggaaaacggcgcttacagccgcacgctgcgccagtgggataccgtcaagggcgcgtggcaggaagtgcagcagagcaaaaccgcgctgcaaaacggcgaccgggttatcgcgctggttaataacctcggcgccactccgctttccgaactgtatggcgtgtataaccgccttgcccagcgctgcgaagcgtccggcatcatcatcgaacgcaacctcatcggcagctactgtacttcgctggatatggcgggcttctccatcactctgctgaaagtggatgacgagacgctgacgctatgggacgccccggttcacaccccggcgctgaactggggaaactaa

SEQ ID NO: 233835 - DNA, 522 bp, Klebsiella pneumoniae
atggggcatggtcttgatgttacaggggatatatttgcaaaccgttttgcaattaacagtagtaccggcatgtggattcatatgcgtgaccaaaatgttattttgggacgcaatgcggtatccaccgatggtgcgcaggcattacttcgtcaggaccacgctgatcgcaaatttatgattggtggactggggaataagcaatttggcatctacatgattaataactcaaggacagccaatggcaccgatggtcaggcgtacatggacaacaatggcaactggctttgcggtgcgcaagttattcccggcaattatggtaattttgactcacgttatgtgagagatgtccgacttggtacacgtgttgttcagactatgcaaaaaggcgtgatgtatgagaaatcaggtcatgcaattacggggcttggcattatcggtgcagttgatggcgatgatccggcagtattcagaccaatacaaaaatacatcaatggcacatggtataacgtcgtacaggtgtaa

SEQ ID NO: 233836 - DNA, 528 bp, Klebsiella pneumoniae
atgcagcatttaaaaaatattaagtctggaaatccaaaaacaaaagaacaatatcagctaacaaagaattttgatgttatctggttatggtccgaagacggaaaaaactggtatgaggaagtgaaaaactttcagccagacacaataaagattgtttacgatgcaaataatattattgtcgccatcaccaaagatgcctccacgcttaaccctgaaggttatagcgtcgttgaggttccagatattacagccaaccgctgcgctgatgattccagtaagtggatgtttagggacggagctgtggttaaacggatttatacggcagacgagcaacaacaacaggccgaatcacaaaaggccgcattgctttccgaagctgaatcagtcatccaaccgctggaacgcgctgtcaggctgaatatggcaacagacgaggaacgcacacgactggaagcatgggaacgctacagtgttctggtcagccgtgtggatacggcaaatcctgaatggccacaaaaaccagagtaa

SEQ ID NO: 233837 - DNA, 432 bp, Klebsiella pneumoniae
atgagcgagaaattaaagatagtctatcgcccattacaagaattgtcaccgtatgcgcacaacgccaggacgcacagtactgagcaggtggcacaactggtagaaagtattaagcaattcggctggactaatccggtgctgattgacgaaaagggcgaaattattgcgggtcacggtcgtgttatggcggctgaaatgctcaaaatggattctgttccggtcattgttctgtctggcctgacggatgagcagaaaaaggcgtaccgcctggcagataatcgcctaccgatgaatgctggctgggatgaagatctgttgcggatggagctgtcggacctaatcaatgctgattttgatgtctccctgacaggcttcggcccgacagaaattgatgaactgttgacggatgttttgcccggtatcgggccttaa

SEQ ID NO: 233838 - DNA, 765 bp, Klebsiella pneumoniae
atgagccaggacaaaacctctggtgcctgggttattcgtcgtcgtgtttctgccgatccaatcttcacttttttgcgacctgtcgcggacagaaaaagagctttccgtgaagtacgccggcgtttgctcgatgcattgtttgtgcttttcgtcaacaaagccgatcttgctaccggtattgtcactatcaacatcactaagctggctgaagaactcagtccacggaatgaagatggccagatcatccctgaaactgccgtgacggtatccagggtgtcgcgtctgatagacgaattggcgaggtttggcatagtccttgcgcctgaaactgagtgggattatgtgaacgggtgccgttttcctaagcatataatcattacagaagaaggctggcgtcttaccggtgtggatatggacaagctacgagccgagcaagaagaacgcctacgcgctattgaggacggcattctacaacccggtgaggctatgacagtaaaagaagcccgtaagcgctggtatgaacgttgccgccatcagacgatactcagccgccgtacacgcgctattgagggcaaacaacggcgtaagctggccgaattaccgttcgatgagcgaaagcgtcaggtggccgagcgtattttccgtgatatgaagggtgatatacaccatctaacccctcagcagtttgaaaaaatggtctggactcagctttaccagcttgaactggtaaatatggagcagccaggcacagccccgcctcactaa

SEQ ID NO: 233839 - DNA, 243 bp, Klebsiella pneumoniae
atggccagaacaacaagcgttacgattggcgaacaactcgattcgtttattagtcgattaatagacagtggccgttacggctctgcgagtgaagttatgcgttctgcgctgcgattgctggagcaacaggaaacaaacgatgaagttattcgtcaggctgttattgctgggctggaaagcggtgaaagctcgctatcactgcgggatattgcagcacaaagaaaactgagacatcgtgtataa

SEQ ID NO: 233840 - DNA, 285 bp, Klebsiella pneumoniae
gtgtataaactcactgaacgggcagcagacgacttcgccgggatttatgactatacgctcttgaaatttggtgaagctcaggcagaccattatacagacgcacttgaggcatttttcgagacactggccggaatgccagatatgggacgtgactaccataccgttcctggtgtgatgcgcattgaatttcagcgacatgccattttttatacggttcgtgatacggatattctgattgcgcgtattttgcaccaacagatgaaccataaacgccatttactgtaa

SEQ ID NO: 233841 - DNA, 1419 bp, Klebsiella pneumoniae; identical to SEQ ID NO: 233824

SEQ ID NO: 233842 - DNA, 348 bp, Klebsiella pneumoniae; identical to SEQ ID NO: 233825

SEQ ID NO: 233843 - DNA, 1146 bp, Klebsiella pneumoniae
gtgcgactgtgcgccgcgccgctggtggaagggacgctggcggccaccgtcagcgctgcctccggcgccgggatcgacaaggtgatcgccgacgccatgagcgccctggaggccaagcgggttcagctgggtttaccttcgccaacttctgacgccgcgccggcgccgatgcttgccgacgacggcgacacaaaatcggtgtcagtcattattaacaatcataacggcctgcacgtgcgtccggcgtcgaagctggtcgccgcgctggcgggctttaacgccgatctgctgctggagaaaaacgggaagtgcgtcaaaccggacagcctcaaccaaatcgcgctattgcaggtccgccgcaacgataagctgcgcctgctggcccgcggtccggatgccgacgcggcgctggcggcgtttcaggcgctggccgccgataacttcggtgaatcgcctgcggcgaaaccggcagcggctccggcaacgcccgagcgcgtcgaaggcgctgccctgcgctatccgctggccctgatccagccgctccgcccggctgccgccgatgccgcccgcgagcagcagcgcctgcgccaggccattgaccagacgctggcggatcttatcgccctgaccgagctggcggaaaataaatttcacgccgatatcgcggcgatcttcgccgggcaccacaccctgctcgacgatgacgatctgtttgatgccgccaacgatcgtctgctcaccgaacaatgcacggcggaatgggcatggcatcaggtgttgatggagctcagccagcagtatcgccagctggatgacccctacctgcaggcgcgctatatcgatatcgaagatattttgcagcgcaccctgcgccatctgcagggcgttcaggagagagtgccgacgcccggcgagccaacaattattattgccgacaacatttatccctcaaccgtcttacagctggatgccagcttcgttaaaggcctgtgcctgcgcgatggcagcgaacaggctcacggcgcgattatcgcccgcgcggcggggatcgcctggctgagccagcagggcgaggcgctgaacagcgtgcagcctggcgagactatcgtgctcgatatgcgccaccagcgccttatccgtgactaa

SEQ ID NO: 233844 - DNA, 672 bp, Klebsiella pneumoniae
gtggatgcccattcccagctcggcgtgaccggcctgatggcgcggcgcgctgtcggcttcctgcggcaggtggcagctggccagcgccaccccgatgctggcggtatggctggcggcgtattgcgcttcgcgcaggacggtggcgaggttgaagccgcgctcggcgaaatagccagccactttatgcaccagaatggtcccggcgatgccgcgcggctgtttgttatccggcagcgaaatatcgtcgccgacgatcagcatctccacgttgtagccgagtcggcgcgctttctccgccgccagaccgaagttaagccgatcgccggtgtagtttttgacgatcagcaggcagcccgcctcgccggtcactgcctgaatggcggtgagcaccgcgtcgacgctcggcgaggcgaacagatcgccgcagaccgcggcggtcagcatgcctttaccaataaagccgacgtgcgccggttcatggccggcgccgccgccggagatcaccgccacgttgtttttattcagatcgcgacggaccaccacccggatcgccgggtcgctctccagacgggcgaggttattccacgggctggcgataatggtaccctcaatcacatcgttgacgaggctggcgcgctggttaaaaaagaattgagacatagtggttcctga

SEQ ID NO: 233845 - DNA, 705 bp, Klebsiella pneumoniae
atgggtcgcgatcgtcgaggctcccggttcgccgtggatgcccatccccagctcggcgtggccgggctgatggcgcggcgcgctttccgcttcctgcggcagatgacagctggaaagcgcaacacccaggctgaaggtgttgttggctgcgtactgcgcttcacgcaggacggtggcgaggttgaagccgcgctcggcgaaatagcccgccaccttatgcacaagaatagtcccggcgataccgcgcggctgtttgttatccggcagcgaaatatcgtcgccgacgatcagcatctctacgttatagccaagacggcgtgctttctccgccgcgaggccgaagttaagccgatcgccggtgtagtttttaacgatcagcagacagcccgcctcgccggtcaccgcctgaatcgcggtgagtaccgcatcgacgctcggcgaggcgaacagatcgccgcagaccgcggcggtcagcatgcctttaccaataaagccgacgtgcgccggttcatggccggagccgccgccggaaatcaccgccacgttgtttttattcagatcgcggcgtaccactacacggatcgccgggtcgctctccaggcgggcgaggttgttccacgggctggcaataatggttccctcgatcacgtcgttaacgaggctggcgcgctggttaaaaaagaattgagacatagtggttcctga

SEQ ID NO: 233846 - DNA, 1155 bp, Klebsiella pneumoniae
atggcggcaaaggtgcggctgtgcgccgcgccgctggtcgaagggacgctggcggccaccgtcagcgccgcctccggcgccgggatcgacaaagttatcgccgatgccatgaacgccctggaagccaagcgggttcagctgggtttaccttcgcacacgcctgacgccgccgccccaacgcttgctgacgacggcgatgctaaatcggtttcagtcattattaacaatcacaacggcctgcacgtgcgtccggcatcaaagctggtcgccgcgctggcgggttttaacgccgacctggtgctggagaaaaacggcaaatgcgtcaccccggacagtctgaatcaaatcgctctgctacaggtgcgccgccacgataagctgcgcctgctggcccgcggtccggacgccgatgcggcgctggcggcgtttcaggcgctggccgccgataacttcggcgagtcaccggaggcgcagccgacagcggaacccgccatacctgcgcgtgttgaaggcgccgcgatgctttatccgctggcgccgatccaaccggcgctccccgccgccgccgacatcgcccgcgagcagcagcgcctgcgccaggcgatcgaccagacgctggccgatctcaatgcgctcaccgagctggcggaacacaaatttaacgccgatatcgcggcgatcttcgccggtcatcacaccttgctcgacgatgaagatctgtttgatgccgccaacgatcgcctgctcaccgaacagtgctcggcggaatgggcgtggcatcaagtgctgatggagctcagccagcagtatcgtcagctggatgacgcctatctgcaggcccgttatatcgatgtcgacgatattctgcagcgcacgctgcgccatctgcagggtattaaggagacgctgccattcgccagtgagccgacgattattatcgccgacaatatttatccctcgactgtactccaactggatgccagcaaggtcaccggcctgtgcctgcgcgacggcagcgaacagtcccacggcgcgattatcgcccgcgcggcggggatcgcctggctatgccagcagggcgaagcgctgaatgatattcagcctggcgaagccatcacgctcgatatgcgtctgcaacgtcttattcgtcgctaa

SEQ ID NO: 233847 - DNA, 783 bp, Klebsiella pneumoniae
gtggtgtctgttttaatttctgcggtgattgcagcggctggctctgtatatatcacgtcgaaatattttaaaactgagctccccggtaacgatgaaataggaagagtcgcggctacctatctggtaaaaaacccccagtatctgcttgaagcgggtaaggcgcttgagaacctgaacactaacgcctcccttgagcggatcatcccttacgccccggctctcttcgagaccaaagagacacctaacattggacctgataatgctgccgtcgccgtcgtcgagtttttcgactaccagtgccatttctgtatgaaggtagcgccggtcgttgaatccgtgttgagccagagcagcgatgttaaattcttctttaaagaatttccaatcttcgctggttcgaaacccgtttctgcgatgggggcggcaactggcctgcatgtttatcagacattcggcgctgaagcgtatcgtaagtaccacaacaacctgatgaccagtgcgtatgtattcttcaataaccagcgtgagtttacactcagtgatttagacatggttgtgaacaaatccgggttcaacagctcattcggcgaccgtgagaaaggccgctatgagaatgtcatctccggaaacatgcagttgggtgaagctctcgggatcaacggaacgccagggttcattatcatgaacatgcaaaaacccgacgctgcaacgacatcattcatcccgggcgctgttgacgaggccaccctgaaatatgcaatccagaaggctcgtggtggctaa

SEQ ID NO: 233848 - DNA, 1071 bp, Klebsiella pneumoniae; identical to SEQ ID NO: 78944

SEQ ID NO: 233849 - DNA, 510 bp, Klebsiella pneumoniae
gtgcagtctgacccggaatccgagccgtactggcgtgacgtgggtacgctggaagcctactggaaggcgaacctcgatctggcttcggtgacgcctgaactggacatgtacgaccaggactggccaatccgtacgcagcacatggaatcgctgccaccggcgaaatttgttcaggaccgttccggcagccacggaatgacgctgaactcgctggtttctggcggatgcataatttcaggttcggtggtggtgcagtccgttctgttcccgcgagtgcgggtgaattcattctgtaacattgattcggcagtgttgttacctgaagtgtgggtgggacgttcgtgccgcttacgtcgttgcattattgaccgcgcctgcgttattcccgaaggcatggtgattggtgaaaacgcggaagaagatgcgcgtcgtttctaccgttcagaggaaggtattgtgctggtcacgcgtgaaatgctacgcaaactgcagatcaaacaggagcgataa

SEQ ID NO: 233850 - DNA, 576 bp, Klebsiella pneumoniae
atgaaaacagaaaaattgttctttaacgaaccgatactgcataaaaaatatattcctatttatatttcatatattgtttgtgtgtttttttccgtttttgatggcgttagaggtgtacaatttccttcgtattttccattctcgctcatgcgtgacacttcgttatttacattatttattttatcactaggtttttataaaaatattaaatttgataaagagttttcaataatctttattagtcaaatttttatactcttctatacattgtttactagtgttctagtttcaaatcatagcgtttatgtgcgaagtaataatgtcgtattgtatcaagagtatggcgctggtgttggtgtatataaaaccatgaaatggtttgtaattgctgcttttttatattctattattaccataattatatatacagtattcccacaaattgctattaagctatcgcattggggagggcgtctttccttaggttatcctacggaagatgtatgtttcttggcattatcgcttgtatttatatattatataaacatgccttccatttataaaataaaaaaataa

SEQ ID NO: 233851 - DNA, 312 bp, Klebsiella pneumoniae
atggttggatatcctgcggatgactcagcatctcatgtcgctaatatatataatatttcattacaggggcataaagcacagcaatttacatcaaatttagcccggcagtatgagttaatactggtaatggagaaaaaacatatagaagatgtcagtcgcatagctcctgaagccagaggtaaaacaatgttgctaggccaatggttaaataaaagtataccagatccctatagaaaaagtgacgaagtttttaatctggtatttaagctgatagatgaggcatgccaaagttgggctaagaagttgaactga

SEQ ID NO: 233852 - DNA, 180 bp, Klebsiella pneumoniae
atgaacggcaacggtacggaacttactggcgaagctgcggggatagtcgcttgtctgatggcatacagccaccatgcctgtcgtaccgaatgtgactcaatgaccgagcactattatcgcttacgtgacttcgcgctgaaccatccggaatgcagcgccattatgcatctcatcgactga

SEQ ID NO: 233853 - DNA, 864 bp, Klebsiella pneumoniae
atggctcttcatcttttaacgtattctaatgttcatgactcgtgccgacggcggaccgaaagctgcgaactctggcttcgggctcttatccacgacaccctaaataaagaattcggtgaaaattatgtgaatgatgcgaaaattaacggcaacgatattttcagtcaaaagctcaaaacgcgtattcatagctatcgctctcgagatcctcatcgatataaacgcccggttgacacactgacttttgaagatctgagtactatcatagggaaagaggatgcatacagggagcatttccgaactgtcttccatgaagaatttccgggtggaattaagcatctcaagcacactatcagcattattgcgaaccacagaaatgcgttgtatcacgccaatgcgtcaacactatcattgcatgatgccgagcgtatcctgtgctactgcaatgaccttataactgcgataaaggtgcattataaaacaatgaatcagaatgataaattcccggctccggttttcacaaaatactcagactctgcaggcaatgttcattatgttaatgaaccccgaactcatcttgatttttcagacacaatactcttcatgggcgataaactacgcttcgaggtggaggttgactccagttattcgcctgatgaatacgacattatctggcgtatcaaagggaaagaagttgaacgtggacctgagttcatcctcaatcttacagcagagcatgttgggatgaaattcggcatccaggtagatctgtgctctaaaaaagagtggcatcgcattgatagcaatcttgatgcactattgactacacaataccaggtgctaccaggtgcccaccatgcatag

SEQ ID NO: 233854 - DNA, 1305 bp, Klebsiella pneumoniae
atgcctactcgctctgacaggatacgtcggttgctcagccaaggcccgatgcaagctcgtcaactcattgagataattggcattagccaaccaacgctgtcccgcgcattgagagatattggcgatgacattgttcgaatcggagctggtccatctattcaatacgctctacgtgatgtttatcgcggattcaggtctgcccccatttaccgcatcactgatgaaggacgcgttagaccccttggcgagctcatcccagttcatcctgagggatttgtcatggtgcaaaccaataacgtaagcctccatagcgacggactaccgtggtggctgtttgacatgcgaccacaagggtatctcgggcgagcctacgcatcaacttatgcggccgatctcggcttgccagcgaatccagagcaatgggctgactcggatgtcgtcagggcattgcttgcacatggccatgatgctatcggcaacctgctgataggagaacaagcacgagagcgtttccttgagatgcctgaacccaccccagttgagcgcgccacagcctaccccgcgttggcattggcggctggggccggcgaagcaccgggatcatctgcaggaggtgaacagccgaaattttgcacctatacagagcgcggtcacgtcttagtaaaattctcggccccagacgataatccggttagcgaacgttggcgcgaccttctgttggccgagcacttggcgttaagggtgcttggtgtggaaactgaggtatatgattttggtagtcagcgcttcctcgaaattccccgattcgatcgcgttggccaactgggtcgtattggcgtcttctcgctgagggcacttgatgcagagtttgtcggaaatgccagagctccctggcctgttctggttaacagccttgttacggaagggcatgtccatccggatgctgcaacaggtaccgcccggctttgggcatttgggatgctaattggcaataccgacatgcatcacgggaacttgtcgttcatcagcagccacggtcgcccgtatcaccttgcaccggcctacgacattctgcctatggggttcgctcccagaacgggaggcgcaatcgtgaacgagcttcgacctgcatcactacccgaagtaattagccgggatatctggcaggaagcgctaggcttggctgaggacttctttgttatagctagcagttgcgagcgtttctccgccaatttcgtcccatgccttgagacattacgccatcatcttgacgaggccagatcacgtatcgcccgtctaggataa

SEQ ID NO: 233855 - DNA, 1317 bp, Klebsiella pneumoniae
atggccgctaatcttaccgagactgctatacgcggattgaagacaaaaagcacgtcgtactacgtgtggagcaacagtgctcagcgtggtaccggcaggcttggcgttaaggttcagccttcaggcagcaaagttttttatttccgttactacgttgaaaaagggaagaaagagaagttcatccagttgggcatctggcctgagatgaaactggtgacggccaatgagctggcgaaaaagtatggtgcctggcttgttgaaggaaaagaaccccagcaagagcttgagcaacagcgcctggccgagcagcacattatgcagatccatcgctctcaaggatcgtttgaagagctggtgcatggttacgttaacaagatgaagctcgataacaagcggacttgggctgatgtactgaagcgccttgaaaaagagtgctattcagtcattcctcgcgagaccaaagcgaaagatgtcacgtccttacagatcaaaacgatcttgtctggcatcatccagcgtgatgcggtggtccatgcaaaccgcattcgttcctatctgatggcggcatttaactacggtctgaaagctgataacgatccgatgaataccagcgtgggtattacgttcggtcttgaagttaatccggtatcggccataccgaagcagtcctcggcggagaaagtgggtgatacatggttaacgctggaagagctacgttttgtcatggagcagttcgctcaggccaccaacgttgggccgctgatgcagcacctaatccgcttctgtgtttatgcaggcgggcagcgtccgtttgaaatgattgccagccagtggagcgcgattgactggcagcaaaagacgttactgatcatagctgatgtatcgaaaaacaagcgtgagcacctgatcccgctgactgaatcggcactacaggaattagcctcagtgaaagagctgacgaaggaaagtagcagtccctatatcttcccactctcgaccaacgccgagcgtccagtacgtaccgacagcctggctcgttccatcatgtatttccgtgcttttaatcctgagtttaaagttttcacggcgcgagatttacgccgcacctgtaaaacgctaatgggggaggcggggatcagtaaagagatccgcgaccgtatccagaatcacgctttgaacgacgtcagctcgaaacactatgaccgctatgattacctgactgaaaagcgcaaggcgcttgagatctgggaagagcgggttaacaactatcagcggcagcacgaaaacaacgttgtgaacttgtttggacggaggtaa

SEQ ID NO: 233856 - DNA, 180 bp, Klebsiella pneumoniae
atggtcaggcaaaagtgtagcggtattaggcgcagctatttagccttctgcgccaacaatatctcgccggtaatggcactgaacacgaaaactggtgggtatcggcccctgccagttttgtcactggcgcgctttccctttccccactacactgccatcacccatcaacttactgaataa

SEQ ID NO: 233857 - DNA, 912 bp, Klebsiella pneumoniae
gtgcgttctccagtgattgaacttcaggctcttgccagtgacccaaattcagacatcgttgctgttctaatgaaagcaaagatgattgcgtttaagttagaccttaaagacctttttgaatggatagaattagagcttaatggttaccctaatattgcctctgcacctgactataggtctgggaaagggcaattacgggcatggaaccccataaatggatggattccttgtgacttagatacttccgaccaaaaaataatcgactttttcactacctatactttaactgaatccattgcatccttaacacgtgttgctcttaaggaacagcccatgcttaatctcccattcaccccaatgttgatgaatcagttttataaagagcgaaaagatagattggaaattcattggttcttcagtgttgggaaggttcataatgttatagcagcagttcgaaatagaattttagattggtcgcttgagttagagaaaaagggaatcctcggagaagggctaatatttactagagaagaaaaagaggttgcaccaatgacagttaacaatacgaacatctttcatggctcagtgaataacgccggagctatcggggcaggaaatactggtaacatcagtcaacaaaactctatctcggtgggtgacattgcatcgcttgagcgtgagctaaagagtcacggtcttgatgataatgatgttgctgaattgaaacagctagttgagcaatcacctaaaccagcttcaaaagaagaagttgaaaaaggtttcggttcatggattggtaagatgacatgcaaggctcttaaaggtgcattaaaggtcgctggtgcggcggctcctgccgttcttactaacgcaatctgctgctacttcgggatccctgttttactcttttaa

SEQ ID NO: 233858 - DNA, 1332 bp, Klebsiella pneumoniae
atgagtacgactgagagcattgcatccagccagacaagcctttcgtcctggcgtaaatctgacaccacctggaccctgggcctgtttggcaccgctatcggcgccggggtgctgtttttccctattcgcgctggcttcggcgggctgatcccgatcctggtgatgctggtgctggcctatcccatcgccttttattgccatcgggcgctggcccggctatgcctgtcgggggctaacccctccggcaatatcaccgaaacggtggaagagcattttggcaaaaccggcggggtggtgatcacctttctgtacttcttcgccatttgcccgctgctgtggatttatggcgtcacgatcaccaatacctttatgaccttctgggagaaccagctgcagatgccggccctcaaccgcggggtggtggcgctgctcctgctgctgatgatggcgtttgtcatctggtttggtaaagacctgatggtcaaggtgatgagctatctggtgtggccgtttatcgccagcctggtggtgatctccctgtccctgatcccttactggaatagcgcggtgattgaccaggtcaacctcagcgatatcgccttaaccggtcacgacggcattctggtgacggtatggctgggcatctccatcatggtgttctcctttaacttctcgccgatcgtctcctcgtttgtggtctccaaacgcgaagagtatgaagcgcagtttggccgggagtataccgaacgcaaatgctcacagatcatctcccgggccagcatgctgatggtggcggtggtgatgttcttcgccttcagctgcctgtttaccctctcgccgcagaacatggcggacgccaaggcgcagaatatcccggtgctctcctatctggcgaaccactttgcctcgatgtcgggcaccaaatccacgttcgccaccctgctggagtatggcgcgtcgatcatcgccctggtggccatcttcaaatcgttcttcggccactatctcggcaccctcgaggggctgaacggtctgatcctgcgcttcggctataaaggggataaaacccgggtctccagcggcaagctcaataccctgagcatggtgttcatcatgggctcgacctgggtggtggcgtatgccaaccccaatatcctcgacctgattgaggccatgggcgcgccgattatcgcctcgctgctgtgcctgctgccgatgtacgccattcgtaaagcgccttcgctggccaaataccgtggacgtctcgataacctctttgtgaccgccattggtctgctgaccatcctcaacatcgtttacaaactgttctaa

SEQ ID NO: 233859 - DNA, 1287 bp, Klebsiella pneumoniae
atgggtgaatttacgcgccagcctgcgcgggatatcaaaagcgcgctgatcgacagcgtgctggccggtctttgcgcgttaattgtctttggcccgatcgtcggcgtggtgctcaaagggtatggttttaccctcgcgcccgcgcgggtggcgatcctcgtggcggtggtgatggccggcaggctggcgctcagcctgctgctgcagagccgtcggggaaaagcctttattgcccgctttgagggggcggatgacggggtgtacgtccggccgccgggataccgctcgcggctgcgctggataatgccgctgctggcggtcctggccattgcctttccatttctcgccagcaaatacctgctgaccgtggcgatcctcggcctgatctacgttctgctcggcctggggctgaacattgtggtgggcctcgcgggcctgctcgatctgggctatgtggcgttctacgccatcggcgcctacggcctggcgctgggctaccagtacctgggcctcggcttctgggcgatgctgccgctgggggcggtgatggcggccctcgccggggcgttgctgggctttccggtgctgcgcatgcatggcgactatctggccatcgtcaccctcggctttggcgaaatcattcgcctggtgcttaacaactgggtgagcttcaccggggggcccaacggcgtaccggtgccgtcgcccacgctgtttggcctcgagtttacccgccgggccagggatggcggcatccccatccatgagtttttccacgtcagctacaaccccaacctgaaattcatctttctctacgccgtgctgtgcctggtggtgatgctggtgctgctggtgaaacatcgtctgacgcggatgcccatcggccgcgcctgggaggcgctgcgcgaggatgagatcgcctgtcgggcgatggggctcaaccacgtgctggtgaagctctcggcgtttatgctcggcgcgtcgaccgccggcatcgccggggtgttcttcgccagctatcaggggtttgttaacccgacgtcgttcaccttttttgagtcggcgctgatcctggcgattgtggtgctcgggggaatgggctccaccctgggagtggtgctggcggcgtttgtcctgacggtcaccccggagctgctgcgcggttttgacgaatatcgggtgctgctgttcggcgtgctgatggtggtgatgatgatctggcggccgcgcggcttggtgcgcaccagccgcagcggggttgcgttgcgaaaaggagtcgcgccatga

SEQ ID NO: 233860 - DNA, 384 bp, Klebsiella pneumoniae; identical to SEQ ID NO: 209243

SEQ ID NO: 233861 - DNA, 192 bp, Klebsiella pneumoniae
atgttagattaccgcttcccgacagctttgcagatggttctcagcgtagcaatggcggagcagatgggtgaacgttcgacgagtgcaattctggcctacggcctggaagcgaacccgagctttatccgtaaactaatggttccgctaaggaaggtgcgaataagtccgagatgtgagatcatcgtgttgtaa

SEQ ID NO: 233862 - DNA, 363 bp, Klebsiella pneumoniae
atgacaacacgatttcactacttcactactcgcaacgccgctaaaacttcattcactgcgatcatcactgaaccagtagaagggcagaatgagttttacatcgcgccagatctgtcaaacgtgctggcgatggttaacacgtatggcgatggtgattttggcactgttcacgtacacaacgcggagaagctttccctggtggacttcaacaccagttatgaatatttagccaaagacgctgtgagaatgtcgaaggagtacgacaatggcgcctctggtgacttcgctcataagatggcggacaacgcccgcctggtagaagaggaagacgtaacgttctacatggaattagacccagcctga

SEQ ID NO: 233863 - DNA, 219 bp, Klebsiella pneumoniae
atgtacaagcatttaaatatcagcattacgatatcggacaatagcatgacccttcgcaacgatgaggcgttaggcaatttgattcgctcggcagaagttattaccaaggtgtcagatatgttggctaaaggccactgctccggtgcctttgcggtgcctgtggggactgagagttttgaactagcctggaactgctctgtttctgagtcgattgtatag

SEQ ID NO: 233864 - DNA, 195 bp, Klebsiella pneumoniae
atgagctgggtttattgttcaaagtgtggggaaggcattgacgcgcccacgccattggaggtgctggagaatagttaccagtgtcctcattgtgggcatcttgaagacccacagatgacgatcgtcgatgtggtgatcggcttgctggggcgtattgaggttttggaagccaaggttgaaggtggttcgaaatga

SEQ ID NO: 233865 - DNA, 501 bp, Klebsiella pneumoniae
atgattaattacctctccgatcttcttcgaaataagcggtttgagcggaatgtcatctcaaatctaaacttcctcgaaagtcgtatccaaaacctcaatgagcgaatccgagtgcttgaaagcaccgtagtgtcacaagccaacacgatcacctctctcacgaagagcagtgattcgacgccgcgccccgacccgttccctgataaaaactttgcccatggaaaattaccaaagaaaaagactacagccgctggcgcttctggttatcgggctgactctgtcacctctcggcatcgcgccagttacgcagatgatgcagccggcgctcagcaattcacggaaaacagaagccaagtccacgaggacagcgcatctgtctccagacatcacggctcatcccaccaccaccaccacgactccagttcctgctacagcagccacggggacgttggagggtatgactctggatgctccgattcgtcgtccgggtcttttgactga

SEQ ID NO: 233866 - DNA, 831 bp, Klebsiella pneumoniae
atgagcgctacaaattcaaccgcgaaagaaagcagcaacgctgatctgattgcaatgctatccgaactggacggcctttcatccatcgaagagccagatgttttgaaagaagaggttgttgaagtgaagaagtcaccaacctacacaactgatgatctgttcagcgaactcttgccgctagtctcagctgaaaagcccgtcagaagtgaagaagaggcaataaaagagcttctgagtaacattgatgatgaaattaagccgattgagaaaccgatagaagtggctgaagcgccggttgaagcgccggttgaagcgccgtctgaagcaccggttgaagcgccggttgaagcaccggtagttgaagagcaggcatcggaaacaaggtcagagcctgaaaagccgaaacgctcaccatcttcaacaggcgctcgcaaaaaacggttctcgatggatcagctttctgacgaagtcatggctgagctaggttttgagcgtaaagccttcatggatggatataatacctgtccgataaaagcgatggacaagattcagaacgtcatggcctggagccaggggctggctgagcttagcgtatatacccagatatcggtcactcacctaattaacacaggtgccagcgatacggcaggattccgtctggctatgatgagtaacccaactaaaccatacccctcatcgaccgcatcagcgcaggcgggacagatgatgagcatccttccggtattggggatggcgatcaaagatggcaaaacgctcgcgttgaatgaagattccccgctggttaagaagttcaaaaacgaggcgatgtaa

SEQ ID NO: 233867 - DNA, 408 bp, Klebsiella pneumoniae
atgtacagcgcagctgaagagcttgatagaaaagtctcagaaacccttgtggacattatcaaaaaacagactggtggattgatgacgacgaatgaagcgaaggcggcgattcattcggtgttctgctctgtcatgggtctggttggggtcgatgttgctgagcttcttgaagaggcgatgaatacgatagagaaggagcgaccttcgccgtttccgctctatatgaaaaccgccaatggtgcgtacatcaccgtatcaccagacacttcagcaagaaaggtcactgtaaaaattatggcgagcgagtaccgcacaatggattatgagtgcgacagcgcggccggaacgattaaaaaggcactggaagtggcacagctgcttaccaaacagggcgcgaaacgactatga

SEQ ID NO: 233868 - DNA, 651 bp, Klebsiella pneumoniae
atgaaaattggtctatgcggtgctcaggggacgggcaaaacgacgctggcgaaagcatacagtgaagcatccggcattccgtaccttgacgccaaagtcggggattatctcagcgatattggcgtcgatttatcacgagatgatatgcctgttgttgagcgcatgaaggtacagctaatggtggccggccacatcgcgagtattacggaagcgccaggtctgcacaagaccgggtttatcatagatcgcacgccgatcgacgtcatggcgtatacccacgacattgcagccaaacactacaaaaacgatgaagtgctggaattatatgcccagactcacatggtctgcctggatgcggctgcgatgaatttcaatctgtgcctcatgctacgccccggcgtccaactttccccacaagaccattgtcgaaagcagagagcctcgctgcagccgttctacgttaaccacatcaatatgctcatggcttcgatgatcctgtcattctcgcaaaaggtgattggcgatggtttatcccggtttgcgtttatgcgggacgatgtcattgatctggaactccgtgttagtgctctggatgaaatcgtcgggagcattgcttcaaattctgttatgaagtgcgagccttgtcattga

SEQ ID NO: 233869 - DNA, 483 bp, Klebsiella pneumoniae
atgagaatgatagcggccgttggccggaactttgaaataggcagaggaaatgagctgccttggaaatgctcagcagatttgcgtctcttcagagagctgacgcacggattcaccgtaatcatggggagaaaaacggctcagagccttggaaaacctctacccggtcgacgcaatgtcatgttgacgcgttcacaaggtattgaagttccgcaaggcatccagagcgcctcagtcgaacgctgtttgcgcgagttccccaatgcctgggttatcggtggatctgctgtgtacgaggcgatgctgtcacatgttacggaagtctggctaagccacatcaatgtcgaagtgccggacgctgatgctttcttcccctttgaagcgatgcgtcagatggggtttgaagcggttgacgtggtaaatgaatttattggtgatgacaattcgccgtcgtttaaacaaattgtttacaggaagatgaaatga

SEQ ID NO: 233870 - DNA, 699 bp, Klebsiella pneumoniae; identical to SEQ ID NO: 203482

SEQ ID NO: 233871 - DNA, 198 bp, Klebsiella pneumoniae
atgatcactatcgaatgcacaggtacacgtccgggcatcaactggttcactccgggcaaaaaatactctggatatgctgacgcagacggacaagccatccatacgaaagacgacttcggtcgcgatacgttcgtcttttttgctgcgtcccttcatggcacattcatagaggtaaaaaacagtgacattacagcgtaa

SEQ ID NO: 233872 - DNA, 876 bp, Klebsiella pneumoniae
atgaataaatcgtggatcgacaaaaacctgattgccgtaccgattgaggaagtatctacacccaaaactggccacgtggctcgcgtgggtgcgttcagaaaaggacataccattacagcggagcatcgggcattaatggaagcaggcaaagccgaaagaaaagccagacggctctcgcacagcgccgcaaagcgtataacgttcaggaaaaacgcccgccttatcgatctgaacaaaacacccggcacgccttacttcttcacgctgaagcctttgtgcgacattgaaccggaatatttcaacgaggcaatgacagggttaataaagcgtctaagaaccgccagcgcagaatatatctacgcgctggaatgggcagagcacgagaggatgccgcatattcaccttgtcgccaatatccccggaaatacgcccgcagaggtggaggcatttgcagagggggttatccgttattggctaaagaaaacgccgaagaaccccaacaccagaatcaagcaggacgccagacccgtctacgatgcccacgggctatttaactacatgtcgaaacagacgccggacgagttcaacgccagagcaatagcaacgggcaaggattggtcagtaattagcgtcacaggttgctcaagaggctgggtggagtccaggtttgataccgcagaggtgagccgggaaaccgggagcgcaatccaagtatctcttgaatgggacgcggatggtgagcctaacttttacacgctactccgaaacggcaaatggttcgccaaggtacagctcaacggcgagttgagcgcccaccagcaggaagcctttttaaacacgttctccactaagcacgaaaggacgccaaatgcgtaa

SEQ ID NO: 233873 - DNA, 192 bp, Klebsiella pneumoniae
atgttacagaaatttgcaaggcgcacctcagtgatacatagctgtggtgccgtggtctgcaagcgcggccaaggcttccatattgatactactttcatagagtttgggaatgtttatcatctgagctatcaagccgttcagattggcagcggcagatcgagccttagcaacagcaataaggactggttttaa

SEQ ID NO: 233874 - DNA, 324 bp, Klebsiella pneumoniae
atgagctttaaacgaatgacacccgaagagatgcatgaataccttttacagcaaggttttttgagagtgcggcagctggccgacgatagctggattggcgtgctgaaactggcattcacgacgtcagtctgtatggatattgacgaggtctccccattccggtatcgctggtgttttgctgatccgaatgaggcgcatcactttttcgagacggctgttgattatgatgaagtgccaactaagcgcgattcattgaaaggacaccggtatcgtggcgaaccactgctgcgtgaaaaggatgagtttgggtatgacaggtggtga

SEQ ID NO: 233875 - DNA, 210 bp, Klebsiella pneumoniae
atgacatcagaacagtttgcatattggcttcaggggttcgttgagctgggcggtcagatcccaacggaagcgcagtgggatagcattaaagatcacctgaaaacggtgtttgaaaaagtgaccccgcctgttcagacgtctagtatcggcgtactggcgtcaatgcgtggtggccccattggtcaaagcatcacatctttatcttgctaa

SEQ ID NO: 233876 - DNA, 522 bp, Klebsiella pneumoniae
atgacaaaagttaaattaccgcagtaccaaagcattaaaatcgtggaagcggctgagattgcgaaaatcgaggggcagacaatgctgttatccttccgcaagcatgtggcaaaagtcgaagtagatcagacttatctcgacaagcaccagcctcaagttggtggatatttcgtccgctatgaaaacggttatgagtcctactcgccaaaagggccgtttgaatcgggctatttgtcagtcgaaaccactattcacgccgccagggtaggcgcatcttttggcatcgcaatcgagatgctgaaagatggccatcgcgtagctcgcaaaggttggaacggcaaaggtatgttcttgcgcatggtgtccggcaaacaatacgacgtcgcttgcggcattgctcgcgatctggagctggcgccctggattggtatgaaaacagctgacggcaaatttgtgccatggctggcatcccagactgacatgctggccgaggattgggtaattgtggagatggtgccgtga

SEQ ID NO: 233877 - DNA, 483 bp, Klebsiella pneumoniae
atgacagtgattagttcaaacattaaactatcagctctgttattatttgcactactatctaattcagcatgtgctcaagaaaaatataactccgtgctatccctaccaatgacacttcctggcgaagaaatactagacccttctttacctaaaatctctgattggtatcagtcctgcaaacgtgctgaggatactaaaaacgctagagattggggttactgcaaagggtatctggactccgccatccagagtcattacgaaaccacgaagaaaagatgcccgaacctttcaatccagaactttttggacgcagttgaaaaagaagcctctgtatatcgagaacataactcaatgccggcgaagggaagagatggaaaggctatgaatggtgtgagagtctacaaaaaaaacactcttacggagtggcagcgcccagctttctctgttctttctggcattattaaaaaggaatgtacactctag

SEQ ID NO: 233878 - DNA, 351 bp, Klebsiella pneumoniae; identical to SEQ ID NO: 203470

SEQ ID NO: 233879 - DNA, 537 bp, Klebsiella pneumoniae
atgaatactcgtaccgattttacttacggcataaatgccgagtccgagagaaacctagcatccacgctggagtatttcaaagacgcccagaggcgaaaattaggtgtaagagttgtcaccgctaacgagatgacttttcaaatgattgtctctggcttcgacttaaaatcgtaccgtgtctatttaagcccggtgtcagatgaccataaggctaatcgcgtcatcatccctgtcgactacataatcacagcagagagaatcgcagtctcagatgtcgacacaacctataagggtcagttgacgataagacgaggtgatttggaggatgcgggctacaagcgatcgggtcgcgacttctttcaggtcatacggtacgcccaccagcagggaaagtccataagggtctatctctcagacaaccgagtcatcgaaggcgtgtctacaggcatgaatgaacaatcagtaggtgtaaggttgccagagggaaatctcatccagattttctatgattgggttgaccgaattacccccatttaa

SEQ ID NO: 233880 - DNA, 219 bp, Klebsiella pneumoniae
atggcgagagtcctcgtgaatgtatccgccaccatttgcacagatccagagaatagaagtgagtgctattcgattatatcggccgtcgcagagatgtcgagaatggttggagagaccgcagccaactgcggggatgacatgagtagtgatttctgcatctacaacaagacggattctttaatcatacaaaactggtatgatacctacggaaaaaaataa

SEQ ID NO: 233881 - DNA, 147 bp, Klebsiella pneumoniae
atgtcaggcagtatgactcgcgaagattttgacgcttacctggttccctgttttgcccccgcgccgtttattccggtcagagcggcgggctcccgcgtctgggaccagcaggggaaagagtatatcgatatggcggcatcgcagtga

SEQ ID NO: 233882 - DNA, 1665 bp, Klebsiella pneumoniae
gtgggggatgcgttacttgctgtcaaacaaccatacacaggggctgtagccaggactcagcacgacaaaaactgggacagtattaaccttctggattttgtatacgccacggacgttgtagatggttttgttgattatggtcttgggcttaaccgcgccattgccgctatgagttctttaggttcaaccagcgtagagcatattcccagacgcagaatcaatctccccgcaggtctgctgcacatcaaaacgaaagtcgaactttcttttggccccttcgcaatgtgcggcgaggggatattccagaccatctttgctatacatcccagcgcagcttcagatgatgattatctgtttgacttcagctcagccggctgggattcaacaggaagggtcagaatatccgaactttatctgagtaacttctcagtgcttggggaaactgcgagctggattcgtaaaagaatctttaaattctacggcgtcggctgggattttgcgatagagaacgtgcaggtctggtcgcctccactttcgtcattcgatatgacggatgtcatggacggggtatttaatcaggtgaggataaactccggaggccggttcctcactgcaggttcagaagtaacgcatcagattaacatgctgaatcagtatgataactgtaatgcaataagatacatgagctgccattttgaaaacaactattcaggcgtctcttatattcgtggtgggtcaaacaacattctctttggcggaatgtgtaaatttgaaaataacagcagaaacaaccttgttcctgttaaccagatttacgggtccacctcagatagtgtcaaatttgaaaatatcttcgtaagccacccggcccatatcacagtttactggctggacagcaatggccgccacgtatcaattcgcggaggctcacttatgagcccgtcggatttaggtggatataccggtctgaggtggttccgcatccaccgtacaaactgggcgagtgcgactgcgtgcgttcagctggtcgctgatattgacatgatgcatgtggacgggtacggatataacggggcgaatcagctctcaccgtttgattttgggggcgaggttattttccgggcaaaggctattcgcctggcgcgaccaaataccttcatgtacatcaactggaactgcaaaattgatattgaaaatctgacgctgttaggtgctgttaccagcgattatcagacctcactgtttaatgttgccgcgtcatcagtaaaggcagacgtaaacgttgataaatataacggcagcgttgttggaactgtttatgtcaatccagcaatgaccaccgcatcgcgccggcagtcaataatcaatgtgaggggtaaatcacttcagtcttcatcactgacgctctctgagggtacagaccctcttggttatgatgagtcctggacgtggaatgcctcgggaaatgtagccaacatcggatactgccatacagggaagcgaatggttgtcagatgtgcagacacatcaaattgcctgattgccggcggtaatattttccttccgggtggtgcggtaacggctgcatgtacgataaccctgatggcgatgaacacatcgttccgtcagggctgggtcgaagtttcacgggtagcaggagtctaa

SEQ ID NO: 233883 - DNA, 2088 bp, Klebsiella pneumoniae
atggccaacatcgaaaaacttggctcgtcatcaccagaggtattgcttaagaatgcaactaacctcgataagttagtaaatggccgggaatcggaatcattacctgatcgctttggtgtactgcgcaaaacctggcacggcatggagatgatcttcaaccgttttatagactacatcactggtcgcggcgagcaggcagttgcagctatcggctggcaggagcttggcaactgggctgttggtctggctgtagataatcgccagcagatcgtctactacaatggctcctggtacaaataccttggtgagcttgaacacgtcattgccggagattctcctgagaacgatggcggtgtgtggtcggctgcaaaccccacagggaaatggtcgaacatcggtgacgcggctcttcgctcaaacctgggttcaggcgaaggctttgctttggtggggcaggtatcatcatttactgctctgcgctctgttgttccttcatatgaaggtcaaagtattttattgcgcgcccatcctgtcggttgggccgcaatgtctcacggtcccgttggtggcggcgaatttatttcaaggcgaggctcagctgaggatgatggtggttatatatgcgtgccgacaggtcaatctgagtactactggcaacgcatcccaaaaaaccccggcaaagtctgcgcgacagagttcggtctttatgatggtgctgctcttgacgacatctggaccaatgcaattaactattgcattaagaactccattggttacttctcaaccccgtcactggggcctgccgggtatacgttagttggtgggctggagttcattaactcaacaaacgggcttatcattgaaggcccgggaatggcaaccaaaggaaccagcccggtaataacccacacaggtgcaaatatcggactcacctttaaacgtgaatcacaagcacaaagtttgtttaatagtgtaattctcaaaaactttactgtagttgggaatgctcttgctactgcttttgtcagattctcggatttttatggtggatcagtatttgattcagtagttcgagattacactgccggaacgattatagatgtttataatgacaaggggtggactgaggttctccgagtagataatgttatagttagaacgtcccagcgtgggatctggttccactcaaaccctgcatctactgatgatcagacgttgtctttttacggtgccagaattaccaactttggcttccagcacggtattaccggagcctcctatggaatctatgtcggtgatggtacacgcgcagataatttgtataactgcgatatcgacatgatgggatggtgggaggttggtggtaacagcacggcactttatgcagctgataaagcgcgcgttgatggatctgctaatttccggtatgacggttttgccgcaaacccaattacatcaagctctcaaccatgccgccttgtaagaaaggctggactggctggctatgttaagctgaactgcaaaaactataagcatgaagccggacttggattaactgctggagtcactcagttaacaatccgtccatggttagccattgcggaggcagttgctggcgtggcaacaccacacccgactcttccggctgaaagcataatcagcgtgcctggaatgaagtgcaaactaacaggaactttatttaaagggcagaactcagttgtctctgtcgttgggatgccaccattccaccggtacaaggtgactacacgctgcggattgtcgagtaccgctcagcagcaatacatcgtaaatattccaaacggagcgaacgctggcattactacacgcaccgactcagttccagctgtaacgacaacaaccactataagcggagggttagcaaccagtacctcaactgctaaaaataaaaacttcgagccagtatttattactaatgctggaaatcttcctgataatacatttagcgaaacaaataagcagggattcgatattcatctggatggcacacaatcaaacgttgttaatgatgagtatcctgtatccattgaaatcgaagctatcgattga

SEQ ID NO: 233884 - DNA, 342 bp, Klebsiella pneumoniae
atgaagaaaatactaattatgattgtttgcattcctttaattaatgcatgcaagccatctgaaaaagattttatttctattggggaaaccgttgttagagaatcactgaaagatcctgatagcgctaagtttgaatctttttatcacaaggttggtgacaatgatggatacgtgtgtgggaatgttaatgcaaaaaattcttatggtggatatacagggagaaaagaatactttgtatttatagaaacggaaagcggtaagcttaaaaataacggcccagtaaccatcgtaagtgatagcgatagtaacgcattagaaaaatataaacttttctgtcaataa

SEQ ID NO: 233885 - DNA, 201 bp, Klebsiella pneumoniae; identical to SEQ ID NO: 219564

SEQ ID NO: 233886 - DNA, 474 bp, Klebsiella pneumoniae
atgattaaaacatcaactggtgaaaatatgagtaagtactcagaccttttacaggtaatcaagtcccgggtttgtcaaaataacaacttcccccaaacattactggcagactcacacagttacagagccaggcaggtttggtatcgaataggacaaatattcactcttgaatgtattctcgatgaatacaggaaacatttttcatcggattattattatcttgataacgataaggctcttcatcaccttatcttcgaaatgaccaagtggaaacctgaagagattagaagactctcgctaaacgactgtctctttatcattgccagtcaactaaagcccagttatatgtcagaagatgctgccgctgtcctggcgtcactcaatctgccgactggccactatcctgttgaggattttccacaagaggactgggatcccagggaaaactcagcattccttcaaagctaccagtag

SEQ ID NO: 233887 - DNA, 357 bp, Klebsiella pneumoniae
gtgagagtaaaaattgcaatatgtggtggacccatacacaacggtaaggaattccttggaaactttgataaaacgttgcaggaagcctcgattaaacacatctggacctatccgtacacaccgaaaatgaatgcgacctgtgagcgatttaaccggacacttagagaacaatttattgaattcaatgaattgttgctttttgacgacctgaatttgtttaatcaaagaatggctgaatatctggtgctgtataacagcaaaaggccacataaatcactcgaactgatgacgccagtggactatattttacgtgagagtaaaaattgcaatatgtggtggacccatacacagtgttga

SEQ ID NO: 233888 - DNA, 837 bp, Klebsiella pneumoniae
atgacagagtggcaacgcaataccccttggcgccaggggcatctgttggagagtgctgttgccacagaattggggcttaatgatccagatgagcccgacagcactctcgtcattgtcatcagtcaggattgcgatatagcgcagaatccaactgtggagccgcagattgagatagtaatcggccgaagaattggtgacgatgttgataaaggtaacaacaccaatgctaagaatgcgagaaaactatgtcttagcttcgagcatgagcaaggtgttatttggggcgagtttatagcaaccaacaagaaagctatttgtaagatggagctaaaccgtcatagaccgcgagctgatgttcagcttacatttgaaaatctgacgatacttcagatgtggttggccagccgctatcgtcggtcagcattttctgatgagtttgagtcgcggttaaaaggtgaagggttagataaaaaactctcaaaaatagtaaagccgtacggcgaacttatattgggagttttattcgatgtcgatgatgggaaggaaattgtacatgaaggtcctgatgacccttataccctggacatcatgattttacaccgtgccgatcctgattacgaacaagccgaatctgctgcaaaagcatcagcggaaaaaataacgaaggcttttaaagataagttctataaaaatagtcagtggcaaggcatagagttacgtttttgtgaaccaacttcggagtctgtggctacttatcagaccgtaagacaatacaagaagtggaatctggatagtcttagtttggcagcagatccccaacagttaattctcgattaa

SEQ ID NO: 233889 - DNA, 642 bp, Klebsiella pneumoniae
atgatgaacaccgctataacatatgcacggactggtggttggttaaactcgccaactgcttcaggggtatgtttgggtctaattatgctaactgccatatcaggtagacctgtcaccggtacaggaactgaacagacattaaacccacgccagcacggtaatacgctaagaattttttctgctcgtgagaaagaaatggactcggtggaggtttatcgcgcaccagtcgaaaatctagctcttattcgagaggttttaaaacctgctgtgtcggatctcgcagttgcatttggagtatctcggcagaccatttataactggataaatggagagcaagttgcggaagccaatgcaaataagttggccgaccttgctaaggctacagaaattttggttaatgcaggagtgactatcaacgcaaccttactgaaacgtaagttcgctaacggtaagacgcttatgcaagtagtacaagcaggggaatcagctattgatgcggctaatttaatggtcaacatccactacaaagaaaaggttcaacgggatcggattacggccaaatttgccaaacgtaagaacacaccagcaacagctgatttcgatcttcctgaggcgaatgatctttcagaaggtgatgcatga

SEQ ID NO: 233890 - DNA, 783 bp, Klebsiella pneumoniae
atgggtaccaaactgaaagccgcaccagtctactacatgctcggccaagtccaattcaacccgattttggatttggaaacatatatgcctctcattcaggctgagatgcgaaaggcgcacttccctgattttaaaagggaggtgactcagcagttcataatgcctactgagcaaggccaaattgtaccgccgtctgctgcaacacaaactcgctatctatttggtgacattgagtccacatcaagcttcgttctcgacaactatggcctcattcttcaatgcacaaattacgatacgttcgagaccttctccactacttttcttcaggggttaattactctggatcggatattaaatttagattttgttgaacgcataggcgttcgctatctagacgcaatacaacctaaagaaggagagactttgaaggattatttgataccagaggtgttagggttatcaatgcataatgtgggagcgctgcagcagtcattcagcgagactggagctcttacagctgcaggacagttgatttcgcgtgttatcattcgggatggacaagtggggttgccgatggaactcaacgccctcgcaccagccatatccgcccgatttatggaaaaaactggcattcacgcaattgtggatactgactgctttgctatccagcgcgaaccattcaatatatcaactattgaaactcatttgacggccctgcatgatcaaatcgtagagtcattccgggttatggttacccgttttgctttggacacttgggcctaa

SEQ ID NO: 233891 - DNA, 570 bp, Klebsiella pneumoniae
ttgggaagaaatgacctgcttattcgcaccttccctagaagtacggcgatgatcagcgaacaagctgaaaatattctcaattatcttaagaccaaactggccccagttgctccgttggccgagggtgatgttgtcggatttatgcgagatagtgagctacggaatgtatttcgctcgctggatggagctgcgaaagaaaagctgatggtagcaatgtatgccgggaatcagattgatttatgtgacgccctgctacgaggtaacgccatttgctcaggcgtaacagattctcagctggagcgactgacttttgcccgtatcgccacagataacggagccgttatcaaatctgtttctaacctggtaaaagccattaaccgcaacctgcagcaaatcatcgctgttcgcacatggtatgcaaatctggtatttggaagcaatgacgaccctcgcgatgtggctcctcgagtctccgggctggcgaatctgtccgagtacattgatggtatggaaaaaattaattcccgacagggtaaagcagatgatgaagatgggaaacaggccgcctga

SEQ ID NO: 233892 - DNA, 1206 bp, Klebsiella pneumoniae
atggtaaaattaggagatgttttatcgatcattcgaggaataacgtttaagccaaatgatcaggtcgagccattgagtgaaggttcaaccattgtcatgagaacaaaaaatgtacaaagaagcggattagatatttcagatctaattgccgtacccaatagttttatcaagcgggatgagcaatatttacgttctgaagatatgcttatttccagtgcgaatagttgggacctcgttgggaaaattagttttattgaaaaattaccagcaaactctacggctggtggttttatatcaattattagagcaaaaaaagaaaaagtcattccaaaatatttatactattggctgacacttgaacacactcaaataaaaattagaaattgtggacaaaaaacgactaacatatcgaatttaaatcttgaaagatttaaagagttatttatacctctgccatccttaaatgatcagagacgtatagttgctatccttgataaagcaactggaatatgccaaaaacgcgaacaaactatcaaactgactgatgattttttgcgtgctacatttttggagatatttggtgatcctgttggaaaccctaaagaatggaaaaagaataaaataaaaaaaggtgtgctaaacattacttcaggttggagtgccactggagaaaatattccctgtaaatttgatgaatttggcgtattgaaaattagctcggtaacttctggaacattcaaaccagaagagaataaagtggtagccagtgaatccattccagcttcgaaaaaacttattcatcctaaaaagggagatttactatttagtcgcgcaaacaccagagagttagttgcggcgatatgcatggttcatcaggattatgacaaccttttccttcctgataaactatggtcgattaagttaaatcatgagctattgctaccagagttctttctcatcttaatgcaaaatgaaaaagtccgtgagctactaacaaaacaagcgaccggaacaagtgggtcgatgttaaatatatctaaaaataaatttgaagaaactgagattattttcccagagatcaatgttcaaaaagatttttgcaatgctttcagaaaaacaataaatttgaaagcaacgttaataaaaagttatgaattagccaatgagtcattgaattcattatctcaaaaggtatttcagcaatga

SEQ ID NO: 233893 - DNA, 1692 bp, Klebsiella pneumoniae
atgaaaattgtttatacacccaatctctactggaaatatgctccgccagcaaaaccagagtttggtgatgttttatctctgagcagtaataattgggatgattatggttataaaactagtttaaacgcacagatatacattagtaatgaactgatttcatttgacttttcaattaaattattggttgaaaatatcgacaacacagcaaataaacttgatgaattatgtaaggatggatggaatggagtattccccatacctaatactaactatatagcacttccatctgatgttgatttttataaaatacttatatctaaaatcggtgaagataaaacaataattcttcttaatgaactacacgacgctggttttacattcaatataaatcacgataaaaatactgaggcattaattgaaacagatgcctttaaaacatcattgcttcgtgaaagtggttccagtaaagcgtttcaagatggctatcttattttcaataacatcctgtctgaaataagagattttcaattaaatatcatcgcaaaagatgaacatgttagaacagtaccatttaagttcacttcttcacttttaccctatgatattaatgttattatagggcctaatggtattggtaagtctcactgtcttaaatcactagttgaatattggttacaaacaggaatgggagacttttctgttttaaacaaaaacaaacatactccttttgatgaaagaccaaatattagtaaattagttcttgtatcctatagcccgtttgaagatttcaatcttgatatggaagataacaatctacaagataaacaagcttatcaatattttgggtttcgacagaaaagagacgatggtagcattggtatcagtcgtaacttaccagcattgaactcaagtaattcattgattgatatggtattggatgacgaaaaatataaatttatagaaggaagaataaataaattaaatacaatcaatgatgtattaaaatcagctattgattatgaacaatgcgcactaaaactaaagccatcagaacatccaacatttttcaaccaccaagctatctctataaatggtgaacagtttttctcagctaaagatatatcaacctggatacctaatatagacttgcttcgtggagcatgtagccttaatgatggtgttatttttataaaaaataatcagatcgttccattgagctcggggcaacgattatttgcctacatcgtaattaatgtcgttgcatcaataaaagataatagcttgattgttattgatgaacctgaacttttcttacacccaacattagagatagaatttgttgggcttttgaaaaagatacttaaaccatttcgctctaaagctattcttgccacgcattctttatcgattactcgagaagttccttctaagtgtgtacatatatttcatgatgaaggcgacggcttagaaatactgcctcccccatttgaaacattcggtggtaatgttcaacgcatttcatcctatgtttttggcgataaatcaatttctaaaccgttcgatgaatggcttgaaatgcaattgcaagacattgaagatcctgaaaaattaattaaaatgttgaatgaagaaattaatgaggaaatgatcatgaaaattatgagtttaggtaaaaaatatcatggtcgctaa

SEQ ID NO: 233894 - DNA, 921 bp, Klebsiella pneumoniae
atggtcgctaagttacatttacctgaatatgattctattgcgatacttcgagctatcatttcagaacgagaaagatataaagatttctataatagattaactgatgattgggtggtacaggtacaaaattatctggaacatcatggtgatccacgttttattttacctctagacctttcatcgtatatttcagaagaatccgttcacacagaagaagaaaaaacaactgatgccaatagacacatatctgcaaaagaaagattaagacaaaaaagaagacaaagccttatcaatttgtattcccctgatgagaacaaaataccttacacaatccttgatacgttaagacggggacataatctcttattttgcccatgttgcggtgaacccggaaaaccgacaacattagatcattatttgccaaaaactgcgtatccagaattagctataataatcgctaatttaacacccatgtgcaatgaatgtcagcagaataaaagttctgattatcatgatgaaaatggtaacaaaatttacatacatccttattttgatcctattgaacaagttaatttaagcattgacatagaagaaccctatgctactccaacattcagactaactattcctgatgatgataatgagttatatgaattattggttcgacatgttaatggcgttaattttttagagagatttgatgaattctgtcgaaatgaatacatggcattattaagagctatgtcattagaacgccaggatgatgaacctaatagagcatcaagaatagtcggtcgtttcaaacgactgcatgatggacagtctcaaaatagatgggaagctattttttatagagggattttgaacaatactgatttacttaattatttggacaatggcgaactgcctatctttacttaa

SEQ ID NO: 233895 - DNA, 600 bp, Klebsiella pneumoniae
atgcctttagatttaagtaacactttagttattggcatcagcgcaactgcgcttttcgacatgagcgaatccgatcgtatgtttcgcgaaacctacgcaaccgatcctgatagcgccattgaaaagtatcgagcctacatgctggagcacgaaaatcagcctttacaaccaggaacaggttatcctttagtcaaagcgcttctgggcctcaaccagtacctccagccggatgataaatcaccgctgattgaggtcgtcataatgtcgcgtaacagtcctgatacaggtatccgcgttttgaataccattcgccatgacaaactcgatattacacgttcagcttttaccgcaggcgaaaccgttgccgattaccttgatgcctttgatgtggatctgtttttaacaactaacgttgaagatgcgcaaaaggtgattgattcccgattctgcgccgctgcaatcctgaaagatccgccttctgatgcatctgatatcccggaagagcaagtgcgcattgcttttgacggtgatgcagtccttttttcagatcaaagcgaactggtttataagattcaaggaatggccgcttttcacgcctaa

SEQ ID NO: 233896 - DNA, 522 bp, Klebsiella pneumoniae
atgcatctgctggggtttgcgttctgtccgcgaatcagggatctccacgacaaaaagctgtttatcaaagggaaagcggagcagtacacggcgcttcagtcactgatatccacgaccagcctgaatctgaaagagatcgaaattcactggcgtgaagtgctgcgtctggcgacttcgataaagcagggaaccgtgacagcatccctgatgctaaaaaaactggccagctatcctaaacaaaatggcctggcaaaggcactgagagaaattggccgcattgagcgaacgctgtttatgctcgactggttccgcgatcctgcgctgcgtcggcgggtacaggcgggactgaataaaggtgaagcccgtaacgcgctggcgcgtgcggtattcctgcaccgactgggagaaatcagggacagaaaaccggaaaatcagagctatcgcgccagtggtctgacgcttctgacggctgcgatctcgctgtggaatactgtgtatatggaagggcgatcgatgccctga

SEQ ID NO: 233897 - DNA, 408 bp, Klebsiella pneumoniae
atgcacctcagagtaaaggaggctgaagcaagagggattgaactggcgaaatggttaaaaagacagcccgagatcacccgggttctgcatcctgctttcgaagagtgtcccgggcatgaaaactggaaaaaatatttcaccggatcgactggtcttttctcaattattttagataaaaaattctcgcagtcctctgtagacaacatgctggataatatgagtatttttggtcttggatattcatggggcggttttgaaagcctgattattccgtttgattgcgcagattaccgcacagcaacgaaatggtcaccgggtggaatggccctccggttgcaggttgggctcgaggacatggacgacctaaaacaagatttacttgaagggctgaaaagactggctgaatag

SEQ ID NO: 233898 - DNA, 309 bp, Klebsiella pneumoniae
atgcctgatattgatttgaatgacgtgattaaggcgctgggaaaccctgtcagaagaaaaattctgcacatgctcaaggaaccgaaaatacacttccatcagccttatgctgatgcggacgaggtcggcgtatgtgtcagtatcattcaggaaaagatcgggctttcacagtctaccgtttctctttacctctcatcccttcaacgggcacaacttgttacctctcagcgcatcggcccctggacgtactacaaacgtgataatgataaaatcagggctgttcttgagctgctgaaaaatacgatctga

SEQ ID NO: 233899 - DNA, 1125 bp, Klebsiella pneumoniae
atgaagacaaaaaacctgttctctcccaccagactcggcccctacaccctgaagaatcgtgttgtacttccgcctttaacccgctcacggagctcacaaccgggtgatattccgaacgaactgatggctgaatattacgcacagcgcagcagtgccgggtttatggtgaccgaaggaacgcagatcgaacctcgtgggcagggttatgcgtggaccccggggatctacagctcacgacaagtggaaggctggaagaaagtgacgcgggcagtgcatgaaaaagaaggcatcatttttgcccagctctggcatgtcggaagagtatcccatacctccctgcagccaggtaacgcctcgcctgttgcaccgtcggcaataccggcaggagataacgttaaggtattcatcgaaaccgggccgggagagggggcgctggctaccgcttcttgcccccgcgcactggaaacagaggaaattagtgaaattgtcaggatgtacgccagagcagctcagaacgcccttgatgccggttttgacggtgtggaaattcactgtgcaaatggatacctggttaaccagttcatgtcatcctacagcaacaagagagaggatgagtatggtggctcattacataaccggctgcggtttctgcgcgaagtgacgcaggctgtcgctgatgtggtcgggaaagaccgtgttggagtccgttttgctccgctctttcagaccacggatgaagtaagggtctatcttggcctggtggaggatgatccccatgaaacctatactgaagccgttaaaattcttgaaaaaattggaatagcctacatttctcttgctgaagctgactgggatgatgcacccgagttacctgaaacattcagatcagaagtccgtaagttattcagcggtgtgatcatgtatgccggacgatatacgcaagaaaaagccgaacggattattggtgctggctggggagacattatcgggtttggccgcccgttcatagcaaatccggatttaccgcagcgcctttatcatgaatggccactgaatccggtcgatccaacaaccatgtatggtggaacggcaaaaggctatacagattatcccgcctttggctaa

SEQ ID NO: 233900 - DNA, 354 bp, Klebsiella pneumoniae
atgtttcggagtttattcagaaaagagcccgtcacagagcgggtcccgacagtcgtaactgaaatgtcgatcaatgagacgtcttatgtaaacagcagcgacgccataatgctgaagtctgtaatgggccttgttcaggagggagtatggtatgtggaagcgcctgacctgcagaatgattcgccggcctttttctcacctgtagctcgtcgtcttttaggcctgccttcagggcaggggaccggtctggcttcgctgacacagatgattcatccggattacagagacgtttcccgttcaggatctccgataacattatcagaaccatttaggttcatgatgccgattctgtga

SEQ ID NO: 233901 - DNA, 357 bp, Klebsiella pneumoniae
atgttggcatccgctcaggtaatggcaggcgttacgtctgagcagtcttatccttcatgcgacttgcagacgcagcgtgacgtcaaaggagaaacgagaggcagcatcacagatccgctggaagcgcatatttccgtaagggtcaacgtactgcaggctgatatcagcacggcacgcaaggcccgtcgcctgacgcaggcgcaggctgacatgctatggcagcactcatcacgggtgcgtaatgatactatgcaatttgttaagcagcaggggtttctcagcgctgcagagcgtacttcctatgacagggaactcgacgagctcgccagcaagctctgtggcaaagtcaaagattga

SEQ ID NO: 233902 - DNA, 933 bp, Klebsiella pneumoniae
atggacattattggaattatcatgtcggcgggaaaagcctctgtcgacgttgccttatatacgcttatccctgttatggtggtaatgcttattatcatgaaatatctggagcagaaaggcgttcttgatgcggttgtgcgtataatgtcgccgctgctcaggccgtttggcataacggggctcgctatttttgctctcatccagttgaattttgtcagcttcgcagcccctctggccgcgctggcaattatggaaaaacgcggcacatcggacaggcatcttgcagcaacactggctatgttgtttgcgatgggacaggggaatgttttttatcctctgatacccttcggcctgcactggggtaatacgttactcatttcaatcatcgggggtctggctgctgctgcgttcacctatcgtcttaccgggcgtaaactgtcttctgtggcagagagccgtccggaagaggatatacaggacggtaaagcttcccaggggctgattgctgttatcaatggcgcaggctccgatgcaatccggcttgcgcttggctctgtacccatgctggttctgtcgctgactgtggtaggactgctgaaggcgggcggcgcgattgaagcccttacctccctgctttctcccttactggctgtttttaatatttccgatgtttatgtgatgccggcgcttacaaaatttcttgccggtggaacggcgtactatggtgtgatgacagatatcatccataaagggctgatgacccctcagcagatcaacgcttcagctggatttttgatccagacgtttgatctgcctgggatcggtatttttctgggcattgccagccggtttgtcaggctttttcgttatgccttaccgggcgcgctgattggtatccttattcgcggcatcatccacgtattgctgagctga

SEQ ID NO: 233903 - DNA, 981 bp, Klebsiella pneumoniae
atgaaaaaaaaccgtgtctgtcagatcctgggcacagaaaaacctgtcattcagggaccattatcctggctgactgatgcccgtttagtcgccgcggtcagcaatgcgggagggcttggggtgctggggccaaacgcaggtttaacggcagacaccgctgtatctaccccagaagagacggctgaaaaaatgcgggaagaaattcgtaaaaccaaacggcttaccgaaaaacctttcggtgtgaacctgataccaacgcctgaaaatgatatctggacaccgcctattctgcaggtgatcaaagaagagggcgtcagggtggtggtctatacaggctacggcgaaggtgccattattcaggcgctgttcagtgagctaaaaaaagcaggtatcactgttatttaccgtgacatcaatcccacacctgagaacagtcgtcttgcagaagaagccggtgccgatatcattgtggcaaccggctttgatgagggcggcacactgcccgggaccgcactgggaaccttttcaatcgtgccgttgatagccgattccgttaagaagatccctgtaatggccgcgggcggtattaccgacagccgtactgccagagcggcgcacgcattaggagctgaaggtgtatttgcgggatcggtcttcatcggtacgcaggaaagtcgggtgccgcagtcggtcaaagataaaattgtcgctgccagtggccttgatttgctgcttttccgtaccctgccccattactaccgctccttgcctggtaagctggctgaaaatctcctgtcgatggataaagcaggcgcaagtaatgaagagctcggagaagtaatgggagggctacgtggtttgcgtgttggcatgctggaaggtaacacaaatgaaggctatatctcgctcggtacaggtattggaaatattcgcagcatcaaaagtgtggcagaggtcgtggacgagctgaccgtcagttga

SEQ ID NO: 233904 - DNA, 231 bp, Klebsiella pneumoniae
atgacaaaaggggcaaaacagcgtggcatacatattattattgggtactgcgagggaatattaatcagttatcatgccttttccaatctgaccgttggattacatgtagcgatgtggatttacaatgttttccagtgcaaaaatcttatcaatcactggtttcagcacaccgggcttaagcccgtcaaaagaaattttttcgcacgcaacgtttttcaggatcaggggtga

SEQ ID NO: 233905 - DNA, 993 bp, Klebsiella pneumoniae
atggcaaaacatgtacgctttcatgaaaccggtggtcctgaagttcttaagattgaagaggttccgaccccagaacctaagtccggagaagtgcgtatccgcgtacatgctctcggtctgaaccgtgcagaaagcatgtatcgtactggtcgctatgttattgagccacaatttcctgcaacccttggctatgaagcgtcgggtgtcatcgacgcagtgggttctgaagtgaaagactttgtagtgggtgatgcggtaagtgttatcccggcgtttatgtttgatgaatacgggttatatggcgatctggttgttgcccctgcacgcgctgttgtcaagaatccagctggcgtttcgtgggaaacagcagccgcaacctggatgccatataccacagcctggggtgccctgatcgatattgctaaactcaaggcgggtgagtttgtggtgctgggcgctgcttcaagcagtgtagggctcgcggcgatggaaatcgcttacagtgtaggcgccactccgattgcgattacccgtaaagacgaaaaagtgaaagaactgcaggacgccggtgcgaaacatatcctgcaggtgggcatacatgatattgagaaagaaattctcaagctcacaggcggaaaaggggcgcgtgttgtatttgatccggtaactggtcctgattttgaaaaaattatcaaggctactagcaaagatgccattgtatttatctatggtgctctcagccatgatgctaccccaatcccggtaatgcacattcttggtaaacataccaccattcgtggctatgaatttattgaggttaccgctgatgacgagaaactcgcaagagccaaaaaattcattaccgaaggtatggcttcagggaaattcaacgcaaaagtaacccgcacctttaaattcgaagagattattcaggcaacccaattcctggaatcgaatgcgcagtttggtaaagtcattgttaccattgattaa

SEQ ID NO: 233906 - DNA, 303 bp, Klebsiella pneumoniae
ttgccaaaaaccttaaaggaagtgtgcgatacgctgattaacaaatatggtcatcaagccctgtggctggatatgcgatcgggggctaatggccctggactttatcagtcaaagcagcctgtggtgatttcgtgctcgaggagagatctggctgaacatgacggcaagaagtggcatttgcttaacagcccgctgtatctcgactttgatcccgtggatgattccgttaattcgatcactgccacggatatttatctcgatgatgcggctattgagacgtatatgcattggaactctctttga

SEQ ID NO: 233907 - DNA, 819 bp, Klebsiella pneumoniae
atgggaagtatgaaggattacatgctggatcttgaagcagaacgctttaaggaatggtttgctgaacagtatccggatgctcagcctggcggcgaagagtgggagcaggccgggcttttatactactgggaacaggaggctctggctgataaggcacagtgggactatgaacgggggctgtttgtggcttccctgaacaatgttcatcagcgttatgtgcacgctaatcaggagctgaagaagctatatgccctgctagataatgagcaacctgagctggtttacaggatgtctttcgtccatgctgtgacggttatggaggcttacctgatgtactgcgccagggccttgctggaacatgactcgccacttaaacgcttcagggatgagtattacctgaagtccgaacgcgtcaaaaaaagcgaaaagcattcagcgtgtgagatggaacttcatatgttcaggcccgctgcgcgcaattatgtttcccgaatgacgtttcacaacgttaaaaccattgaacgctatttcggtgccgtgctccacatcccgccgatctggccagttaagccgctgggcatcatcgcagactggcgaaatgacctggtacaccgtaacggcgtggatgaattcgatgagccacgatcaatatcagtccatcaactgcagaacgccctgcaaaaagtgtcagacctgatagaggctgcagatatgtccctgtgtctcgaagtcgactatttcggtaactggcgtaatgaggaaaaccgggaaatcattgcgtcaggtctacgcataattccagacggagacgcatcctga

SEQ ID NO: 233908 - DNA, 129 bp, Klebsiella pneumoniae
atggaaatttttcacggcacaaggcagcgttttagcaactttgatacctcctataaaggaactggtgaaagcggagacattgacgcctgctggtttgcagacaacttcgaaggcgccagacaccattga

SEQ ID NO: 233909 - DNA, 1341 bp, Klebsiella pneumoniae
atgcgcaaagagacagttacaatgagctataaggaactcgacaggcttcagattattcagggatccgtaaacagacatatcactcaggagcaggcagccttacgtatgggtatatctgttcgtcaggttaaaagactggtgtatcgataccgaaatgaaggacctgccggtctggtttctcgtcgtcgcgggaagcgtcccaataatgcgtttactcctgaatttaaatcgacagttatatctcttctgaaagaacgttactcagatttcggtcctaccctggccagtgagaaactgcgcgaggttcacggcttatcgttatccactgaaacactcagaaagtggatggtggaggcagggttatggcgtgaacggcggcgtaaaattgcccgaatctaccagcggcgcatgcgtcgtccttcttatggtgaactgatccagattgatggttcgcctcatgactggtttgaggcaagggggccgcgatgcaccctgatcgtctttattgatgatgccaccagtgcccttatggcgctgcgattcgctcctgccgaaacgacccgtgcctatatggagacgctccggggatacctcacagatcatggggtacccctggctctctattcagatcggcacagtatatttcgcgtaaataacccggagcgcgagggagagctgactcagtttacccgggcgattaagaccctgggtatcgagccaatccatgccaacacgcctcaggcaaaaggtcgcgtcgagcgggcaaaccagacgcttcaggaccggctggtaaaggaactgcgccttcagggcatcagcgatattgaaacggcaaacgcatggttgccggagtttattgaggcgtacaataaccgctttgccacggcaccccgtgactctgctaatgctcatctggatgtacaccattcagaagaagagctgaaccatatcttcagctatcaggcgaagcgcatactctcaaaaaacctcacgtttcagtacaaaaccagcgcgttccagatacgcagtgaagggcgcggttaccggctccgtcattcagttgtgaccgtgtgtgagaattttgagggagagattgctgttctgtatgagggcagggtactgggctgggaaaaatatgtcgacgggcctgaacctatacctcttgacgatgaaaaaagtgttcacgaacgggtggacagagcccgtgtaaatctgcgttcaaaatactacgtcaaacctaaagcagatcatccctggcagacccgcagaacgcaaagtcatgaacaggcaaagccgccgcgattgccagcaagaaaatccggtgtggataaaccggactga

SEQ ID NO: 233910 - DNA, 897 bp, Klebsiella pneumoniae
atgattcagattcgttttggcgataattttatttacctggaaactaataagttaattccatctaaggaattattagaaaacgtaaagcgaagccataaatatcatcaaatagttacctctatcgaaagcttaggtattattgaaccaataatagtattctatgacaaagataaagatgtcactaagatacttgatggccatttaagggttgaggctttaaaagacttaggtatagaaaaagctccatgtatactttcgagcatagatgatgctttcactcctaacaaacaagtgaatcatataaatgtagttgaagaacatagaatgataattaagtctctggcaaaagtatcaattgaaaaacttagtgctgctttgggcatatctgttgatgccataaaagataaagctaatgtgatgaacggcatagacccaagtgtaattgcgaaactttctgataaacctatacctaaggctacatttgacgttttgaggaaaatgaagccaattcgccaaattgaagcagtcggtacaatgattaattttgataattatagtaaaaaatttgcaatgagcatcttggatgcaacaccggcatcgatgatagtaaataaagggaaaaacactccctataaaaaggacataaaaaaaaccatacttcgtctggaacaagaaatggcaacaacttcggaagaaacgaaaaagcttcaaaccgagtatggttcagatatgttgaaattcgttataatccagtcatatattaataaattacttggcaactctaaagttcttcattggttcttagaaaacgaggttgattatcttaatgagttaaaaagaatttctagaataaattctttggatgataagactctttctgaaaacagcaagtcatag

SEQ ID NO: 233911 - DNA, 897 bp, Klebsiella pneumoniae
atgctgcctgaaaaaaatgaattcccaataattcaaattgagattgcaaaaataaaatttcttaacccacgaacaagaaataaggtagtgcatgaagaaataaaggaaagcataaaaaaaagaggattaagcaagcctataagcgtaagagctattgatgaagacgatttcaaatatgctttaatttgtggtcaagggagaatagaggctctcgttgcattaggtgaaactattattccagcaattataagagatgtatcagaagaagatgcttacgttatgagtttagttgaaaacattgcaaggagaagaccacgttctaatgagttattacaggtgattaaagacatgaaaatcagaggactttcagactccgaaataagtgagattactggatattcatcgaactgggtgagcagtattaatatgctacttgataagggagagcataaacttctctcagcagtcgaacggggtaatttacctctgtatctcgcagtgcaatttgcaagatgtgaaactgaggaagcacaagatattcttaccgaagcatatgataaaaaattaataaaaagtcgggacattataaagataaaacacattctaaatcaaagaacagttgggaataaaggtgcaaaagcagccggattttattatcacaaaccatcaaaaaggatgactgcagaggagttgattgagctttatgaaaatagtatcgctgaacataaatctgtttataacaactcaaaattcataaaaaccaacctacttatagtaaatgagatttttaacatcataatgatgaataaaagctttcaacatatacttgaacaagagaatctttcagaactaccatctcagatattaaccccagtaaacaaagaggtattaaaatga

SEQ ID NO: 233912 - DNA, 1557 bp, Klebsiella pneumoniae
atggctagcgaaaatgacaaaaatcatagagttagggtcgcacagtacttgaggatgtctaccgaccatcagcaatattctttacataatcagtccgaatatatcaaagattatgctgaaaaaaacaatatggaaatcgcttatacctacgatgatgctggtaagagcggagtcagtatcgtaggcaggcattctttgcagcagttacttagcgatgtagaacaaaagaaaatagatatacaggctgtattattttatgatgtgagccgttttggtcgttttcaaaatagtgatgaagcggcatattattcctttctatttgagagaaatggtgtagatcttatatattgttccgaacctatacccactaaagatttccctttagagtcatctgttatactgaatataaaaagatctagtgctgcatatcacagcaggaatttatctgaaaaggtatttatagggcaagtaaatttaataaagcttggttatcatcaaggcggtatggctggttatgggctgagacgtcttttagtagacgaaaatggtatagctaaagaaatattgagtttccgcaaaagaaagagtattcaaacagatagggtaatattaattccgggaccaaaaaatgaaataaaaattgtaaatagaatatatgatctctttatagataataacgtcccagaattcattattgctgagagattaaatgaacagaacatacctgcagaaaatggaacattatggactcgtgcaaaaatacatcaaattttgacaaatgaaaaatatattggaaacaacatatataacaaaacctcatctaaactaaaaagtaggcttgtaaaaaaccccaaacatgaatgggttagatgtgacaaggcatataaacctattatttcaaagaaaaaatacaataaagctcaagaaataattcaactccgatccattcatttgactaatgaagatctattagaaaaactaaaacaaaaattagaatcgaatggaaaactatcaggctttatcattgatgaagatgatacaggcccttcatcttctgtttatagaacccgatttggtggtcttttaagagcatatactttgattggttataagccagaacatgattacagctatctcaaaataaatgaagcactaagatcattttactcagagataattgaggattttaagggtgaaattttaaaaagtaactgtcatatagacgagtataaatatgccccaatgctttacatcaatgatgagtttttaatttccgtccttgttactaaatgcatacatatgaaatcaggtaaacttagatggaaagtccggtttgataactcacagaaagcagacataacaattgttatacgaatgaattcacaaaacatttcacctcttgatttttatatcataccaaagattgaaaacgaatatagtaaaatgtgcatgacggaaacaaacaacattcgattagatctctatagatttgataatcttgataaactcctacaaattattactcgcatgaaagtgagggaactatatgctgcctga

SEQ ID NO: 233913 - DNA, 141 bp, Klebsiella pneumoniae; identical to SEQ ID NO: 225643

SEQ ID NO: 233914 - DNA, 567 bp, Klebsiella pneumoniae
gtggaaactgtaaagataaaatcaaagttaacaagtcaaaatgaaaacaaacaaacggttccggtcagaatcttcaaaataactgacatcccggatgtgatggagaggaaaggttggacggtgtcagcacgtttcatgcggaaatggttctatgatccattttacgagatgacaccaaaagagaaacaaaataaagttgatatgaatactgtagacaaaaatcatatcattgaagatttggattttgattggttattaacttcatctttacgaatcaaaccaatttacgatacatttgtgaagcaagtatcgagtgttattgagtataatgactatctagggagaaaaaaacaaatatcacaacagttatctaatggtctttgttatatcattaacagattggatgaatcaggtctttttattagcgacgaaataaaggactgttatttgaattatggcaatttgtcagcaatagaacttgataaaacaagtcagtttaactttataaaaattggtagtacattgtgggaaaaagcaacagataccctaaatagctgcgcggaatag

SEQ ID NO: 233915 - DNA, 387 bp, Klebsiella pneumoniae
gtgcaaagaatcgaagtgatcactggcgagcaaaagcgccgccgttatactcccgaagagaaagcccgttttgtagcgctcgccatgcagcccggctacaccgtctcactcgttgcccggcaatacggcatcactcccagtcttatttttaagtggaaacgactcatgaacgagggtggcaagtctgcgatcgccgcaggcgacgaggtgctcagcgtctccgagctcaaagcgctggagaaaaaagtcaaacagcttgaacagatgctgggacgcaaaacgatggaagccgaaatccttcgcgacgcgcttgagatagcccaggcaaaaaagttgatatcgcgcatgccattgctgccaccggacgatatcccctcatccgaatag

SEQ ID NO: 233916 - DNA, 156 bp, Klebsiella pneumoniae
atgcacgaatgcacgaaattactcgcaccggtgggcctcggagaagagaaggacaagcacaggctctttcccatttttacaagcaacaaacttttccttgttattacttctatacttattaagaaccttaacgaaggaatgactggcgtaatgtaa

SEQ ID NO: 233917 - DNA, 153 bp, Klebsiella pneumoniae
atgaacgtttattatgattatgatatcgaatcggtttttaactgggttaaggaacacttcattctgaagcattccgcttctcttgttaatagcccttggtatgactacgacatagagatagaggctttgttgaataaatcgaacttttgctga

SEQ ID NO: 233918 - DNA, 1245 bp, Klebsiella pneumoniae
atgagtcattctacaaattataattcaccggctaaaacccctatgcagtacgcgcaagaaacttttgaccttgtcaaatctcatgtgcagcaactgggtggatggcgtaatgtattaacgtactatcctgagtttcaggaggctttagaaaaagctccacgttctgtcaaatgcccgtttactggtagtggcaaaacgaaattcagatttaaagataggacgctagaaagtgttcatgctattcatgaggattatccccataatacttttattgatggcattgatttaattgctgaactaaaaagcattagtaaaacgcaggctgcaaaaaacattcttgaaatgcttggtgtttccaaggatagaaagttaactgaagccgaccgtgttaatattgttctttatgacaaaaaagctcaatctttttcagatattggtgaggaagagagacttagtcgtataaataagttagaagccgtgtataaatacacaaaatttgtgacacccgattcattggttgctcgatatctatcagggcgcggtataaaacggatgctcacaaaaattccagctagtctggggtttaatgctaagatgagatactggcccggttctaataagccagccagttttcatccaacgatggttgctatttttaacgataaattcggtcgcaattgcactatccataaaactcatcttactgatgatggacttaaaaaagctgatgttgaaaacccaaagttaatgatgaaaccggtctaccagatgaatggtggttcgatgcagttatttaaaccaacttactgtgatgaaactaaatcatggtttttgggggttagtgaaggtattgagaatgcgctatcagtaactgaggcgacttcaattccttgctgggcatcttcaagttcaacatttatggaaatgctggaaatacctgagtatttaatgccaccttctgattgccaatttattgaattgtcgatttgggcagataaagatcgggtaaatccaaacaccggtaattcagctggtgagtccgctgcacgtgttctcaagagccgtatggagcccttacttgctgaacgctatcctgaagcaacagtccgggttgagattcatttgcctgaactggatatacctgatggtgcgaaaggtgtcgattggaatgatgtattaatgctcaagggtcatgaagctttcccaggcaaactggaagaaagattttttgacttgattaaataa

SEQ ID NO: 233919 - DNA, 492 bp, Klebsiella pneumoniae
gtgggaaaagtaacggcgccggtaccactcagttcgtcacacgttatcgctgagtttcactgtggtgagcctgtactggacgaatggataaagcagcggggactgaaaaaccagtccatgggtgcagccaggacgtttgtggtatgcagggaaaacgcttctcaggtggttgggttctactctcttgcaaccggcagcgtcacccatgccgttgcaccggggagcctgcgaaggaatatgcccgatccggtacccgtcatcattctggcacggcttgccgttgatgcgggttaccacggcgagggcctcggtgctgatttactgcatgacgccgtcttacgctgctgccgggtggctgagaacattggcgtgcgggctgttatggttcatgcactctcagaccgggctaggcagttctatatacatcatggatttatcccttcacaaacgcaggagagaacgcttttcctgcggttgcctgtcgttacttaa

SEQ ID NO: 233920 - DNA, 174 bp, Klebsiella pneumoniae
atgcgaccattaatcacacaggacgaaattgacatgctcagacgcgatctggatatgctgggagagcaaaatcttgttggtattgaactttatgaagcacttcacttgctggaaatgcgccgtcagacagccaaacttgagctaatcaaacgggcactggaaaataaagagtga

SEQ ID NO: 233921 - DNA, 348 bp, Klebsiella pneumoniae
atgagttttgaacaaaaaaaggaacgtgcacttgccattatgaaaagtaaaaacatgtggcgcagcaactatgctccccctctgttacggggattatggcggttaggcctaaaaattccgccattacctttcgcttcattctggcaactaacatttattatgggatttggatttggtcttgtgtggggactcatcatgtggttttccacatggcaaaatatgggcgtacaaccttccggggcgatattaaggagtctctcaggtgggattctgtttggcttaatgatggcagcgtttcacggatggcgtagaaaagccaataatctgcctgactggaaagacctgtaa

SEQ ID NO: 233922 - DNA, 1230 bp, Klebsiella pneumoniae
atgatcgccatcaatatccgtatccagcagagatacgtgcgggatttattcttcaattccaaagatgccattgcgatgcgctacatatacggcgtcagcatggacaagagtttcttacaggagatccggctttacagtctggggaaatatcttattaacaaatttaatgagtctgcccgaaatacctacacgcgtatgcacaatcagcgcatccgcgcgttagtcacgcccgggccagccatgatacttagcctgttgatgttgttcgctggtatatctctttttctaagcagcttacgctacaatgacattgcagtgagtgcgctggtgatggtgttccagtccattgtgatgatgaaatcgcacctcgatgagatagcaaattatggttcgaatctcatcagcatgggcagttttttcaaccgctatcactcgtttatggcgaacaaaatagaaccggtgaaaaacggccatcttaccttacccgcccaaacaccttttgcgctcagcattcacaatctccggtttcagtatgaaggaagaaataatccagcccttaacggggttaactttgaaattgcccctggtgaaaaggttgctattctcggagataacggcagcggaaaaactaccctgattaaattgatcctgcgcatgtacgccctgagtgaggggacagtgtcggtgtcaggcgtgccgcttgaaaggctaaatattgaaagctaccggaaccagatagccactgtgtttcaggattacgggaaatacgagttcactgtgggtgaaaatgtcactctgaataaatatgatgctgaaaccccgtcgtcagcgattgatgaattgctggaacaggtagggtttccgtatggtcagcatatccggctgggtaagcagttcggcggcgatgagctctccatggggcagtggcagcgactcgcgatcgcacgggcgctgtatcgaaaggccaatctgtttatttttgatgagttctcttcgtcactcgctcccgaaaccgagcaccggctttttaatgacattcttaacctgaacacgaccgtgctcgccgtaacgcacaggctgggtaacataaaagaattcgacaggattattgtgatgtcagctggaaaggttatagaaaatggagacttctctgcgctaatgagcattaaggggaaattttacgatatgtggcatgcacagtttagatcggtgataactccgacgaattaa

SEQ ID NO: 233923 - DNA, 474 bp, Klebsiella pneumoniae
atgagttttgatattatgattgatttttttatcggtttgggtggtgtggtattaggtgtctcaatgtcatgttttgttaactatctgtttaatcatggaaataaacatgattcctataataaatggcggagggaaaggttgtacattaaagtcatttcgttgagggatagcattaaaaaaatctcattggaaattgccttatctacatcacaaattgaatgccatagtgatgatgacattaaacaaaaaatccacactcaatatgcttatgtccttgatgatataagtgaaatatccatccttctgagaaagaatcagagagataagctctatgcatattttatattttatgtggaaagtcaggttgcgttcaaactatcgctgaagaatcctaattttaacctaagccctttcattgaacgctctcaaagatttaatggccttgtttcagatatcattaataatatgaaatga

SEQ ID NO: 233924 - DNA, 780 bp, Klebsiella pneumoniae
atgcctaagtttgcagccaatttaactctgttgtttgaagaattaccttttattgaacgctttgccgcggcggctaacgccggatttcgcgccgttgagtttttattcccttatgactatccggctgaagtgatcaaagccgagctggaaaaacatcagctggaactggtgctattcaatactgcagccggtaacgtgcaggacggggagtggggtgtgacggcgatacctggtcgcgaagaagaggctcgcgcacatattgatgatgcgctcgagtatgcgctagcgctgggctgtcccaatgtgcatgtgatggcggcgaaagtacccaacggtgcagatcgcgctgattacgaagagacgtttgtgcgtaatatgcattacgcttcggatcgcttctcccctcatggtgtcggtttgctgctggaagccttaaatccgataaccagaccaaattatctctattccagccagttccagactctggagttgatggcgcgtattgatcgaccgaacgtgttcatgcagctggatctgttccatgcccaaatggtggacggtaatctcagcaacctgattcgcgaaaatgccggacgttatcgtcatatccagatcgcctcagccccgcaccggcacgaaccggatgagggtgagatcaattatccttacctgttcgaccttctggatgaagtcggctatgaaggatggatcggttgcgagtatcatcctcgtggtcgtaccgaagagggacttggctggcttacatcttacttgaaatag

SEQ ID NO: 233925 - DNA, 627 bp, Klebsiella pneumoniae
atgactgaacaacaagcacgtgaagagatggtgcaacttggggcgtcgtttttccagcgcggttacgccaccggctctgcaggtaatctgtcgctactgctggaagatggcaacctgctggccacgcctaccggttcctgcctaggtgaattaaaggccgaccgtctgtcaaaagtgacgatgcagggtgagtggatttcaggtgacaaaccttcaaaggaagtggcgtttcatcgtgcactttaccttaacaatacagactgtaaagcagtcgtgcacctgcacagccactatctgaccgcactttcgtgccttaacgatcttgaccacgggaattgtattcggcccttcacgccctacgtggtaatgcgtgtgggtgatgtgccagtggtgccgtactacaaacctggtgatgaccgccttgcagagaatcttgctgaactcgccccacgatacaacgccttcctgctggctaatcatgggccggtagtggtgggcaagtcgctgcgtgaagccgcgaataacactgaagaactggaagagaccgcacgtctcatgttcacacttggtaaccgttcaattcgttatcttaccgataacgaagtggcagaattgaggaattactga

SEQ ID NO: 233926 - DNA, 1260 bp, Klebsiella pneumoniae
atgcgtttgggtgtgattgcagatgactttaccggtgcaacggatatcgcaagcttcctggtccagaacggtctgccgacgattcagtttaatggcgtgccggaaagccatgaagatttgagcgcgcaggcgattgtgatcagtcttaagtcacgctcttgtcctgcagaacaggctattgacctgtcactcgctgcactgcaatggttacagcagcagggctgcaaccgtttctacttcaaatattgctcaaccttcgacagcactgaacacggcaacattggcccggtaaccgacgctctgatggctgcgttgggggaaacacaaacagtgatctcaccgtccctccccgtaaacggacgtacggtatatcagggctatctttttgtcgccgatcagttgctgtccgaatcgggcatgcgccaccatcccgtgacgccgatgaccgacagcaatttggtgcgcttgatgatgcgtcaggcaaaaggaaaggcggccgtaatcaacgctgcgcaactggataaaggcgctgacgccgtccgtgaacagcttggcgtgctgaaggggcagggcattaattatgtagtgctggatgcgcttaacgagcagcatctggtgattcagggcgaagctttgaaggaggcagttctggtcaccggcggctcaggcctggcgataggtattgctcgagcctggacctctcagaatcagaacagggatgccgaacaggcaggtcgcccacagggcgaccatgcagtggtgatttcaggctcttgctcgcaaatgacaaatcgacaggtacatgcatatcgccagcaagcgccatcgcatgaggtgctgattgaacgttgtcttgagaatcctgaaggttacgcgcaggaactctgtgactgggttgaagcaaacagtgggcagcctctggccccattactctttgccactgcagacgcaaagcagttacagggaattcagcaggagcacggcgcagcacgcagcagtgaggcggtagagcagttgttcgctgccgtcacccgtgagttgaaatcacgcggctggcagcgctttatcgtcgccggtggtgaaacttcaggcgtagtagcacagagccttggcgtcaccgcgttccatatcggccctatgatctcacctggcgtaccctgggtacgtgacatcgagcagccgctttcgctggccctgaagtcgggcaactttggcgatgagcagttctttgcccgcgcacaaacggagttttcagcatga

SEQ ID NO: 233927 - DNA, 762 bp, Klebsiella pneumoniae
gtgattccaattgaacgtcatcaacagattttaacgcttgttgctgagcgtggtgtggtgagcattgccgagttagctgagcgtttagacgtatcgcatatgactattcgccgggatgtgcagaaacttgaagagcaaggtgcggtgctttcggtctccggtggggtacgcagaaccgatcgtctcgcggcagagccctcgcatctcgccaaaaccagcatgtatagcagtgaaaagctggccataggccgctcagcagcacgtcatatacccctgaatagctgcatttatctagacgcaggtaccaccacgcttgcgcttgcacgcgaactggtcaagcgtgatgatttattggtggtgactaacgactttgtgatcgcccggttatttatggaaagcagcggttgcaaactaattcatacaggggggacagtttgccgagaaaaccgctcatgcgtcggagaagccgcagcgcgtagcctgaggatgctggcaatagatatagcctttatttcagcgtcttgctgggggccgcgtggtttgtataccccagatgaagataaagtaccggtaaaactggcagcaagtgaggtcagtagtaaacgagtattactgggtgacagttcaaaatacaataagattgccacatacttagctttaccaatggagaagtttgatattctgataacagataccgagttaagtaagtcaggtcgcgaaacaatgagttcaggcaactgggaattaatattggcaagctaa

SEQ ID NO: 233928 - DNA, 1320 bp, Klebsiella pneumoniae
atgaatgtacaaacatcagttcagccgcttagcagccatatcaccgatcgggaagaaaatgcctggaggcgcgcagtctggcgtatcctaccgattttgatgatcagttatatttttgcttaccttgatcgtatcaacgtcggcattgcgaagctgcaaatgtccagcgacctggccttttctgaaactgtttatggcttgggagccggcattttctttatcggcttcttctttttccaaatccccagcaatatcatcctgcaaaaatttggtgcacgtcgtttgctggctgcgctgctggtttgctgggcagttattgctccgctgactgctttggtttcgacccccttccagttttacgctgtgcgtttcatgttgggtctgactgaatctggtttttacccgggcgtaatcctctatctctctttctggttcccctcataccgtcgtggaaaaatgtttgctctgttcgccgctgcagttccgctttcgggattacttggcggaccgctttcaggctggatcatggagcatttccataatatgcatggccttgctggctggaagtggctgttcatcctccagggcacgccgtcgttattagttggtttggtcgtactgaagctgctgcccgatcgtattaatgatgctaaatggcttagtgcggatgaaaaagcgatcatgaacgcacgtgttaaggaggacgccgttgacgatacaacagttgaacaggcaagcctgggcacggttctgcgcaacggaaaactttggctgttaaccctgatttacttttgccttatcgcgggcttttatactgtcagtttctggttaccgacgcttgttcgtaatgccggggttaaagatgtcttcacagtaggcatgctcacagccattccttatgctgcggccatattcacaatgattgttgcatccaggagtgcggataaacatcgtgagcgccgctggcatctggccgttatagctgtcatgagcggcgtaggcatggttatctccgcgctttatgcagataacctttggatcgcaatgttcggtctgactttgggtgctgctggtggcttaagtacacttccacttttctggagtctgcctaccgcattccttggcggtacgatggccgctgtaggtattgctctgattaactctattggcaatctggcaggttttgttgccccttatctgatgggcatactgtcagatcttactcattcaacgctaacaggtatgcttattatttcctgcacgctgtttgtaggtgccgcggcaatcttcctgatcccaggtcgcgttgttaaccgctaa

SEQ ID NO: 233929 - DNA, 978 bp, Klebsiella pneumoniae
atgaatattgtcattacgggtgctgccggatttctgggtaagaaactggttaaggccttactaaaaaaaggctcgcttcttaaccgtgaaggtcaatcaaagcaaatttcacagattactgcttttgatatcgcacctctcacaggcattagtgacccgcgtttaaatgtagtctgcggtgatatcagtaaccctgaagaactggctaatctgattaacgaaaacaccgacagcgtatttcatctggcggcaatagtatccggacaggcagagcaaaatttcgaactcggaatgaaaatcaacgtagatgcggcgcggcagattatggagcgcatgcgtgctctgccgcagtgcatacgtctggtcaccaccagctcagtggcagtatttggtggcaatcttccggaaaaggtccctgatgatcaagtctggatgccacaaagttcttatggcacacagaaagcaatgaatgaccttctgctatcggattacagtcgtcgcgggttcctggatggtcgtagcctgcgtatgccaactattgttgtacgtccgggtaaacctaatgcagcagcatcgagcttcgccagcgggatcatccgcgaaccgctgaacggtgaagaggccaattgtcccgtcagtactgatacacgtctttggcttatgtcgccagataaagccgtatctgcactggtacgtgggcatgaacttgataataaagagctgactcagggtcgggtcatcaacctttgtggtctttccgtaacggtggaagcgatgattggctcactgcgacgtattgctggtgatgaggtcgtctcacgaatcagctttacacctgatcaggcaatcatgcacattgttaactcatggccgggtgatttccatgcagattacgcgcgccatctgggatttgaagctaatggttctttcgatgagatggtcgaggaatatttaaaagagaaaaatgctatcgcctga

SEQ ID NO: 233930 - DNA, 1977 bp, Klebsiella pneumoniae
atgcttcctgaaaatgaaagggaacccttttggtgggaagtatggctgccggtaaaaggtgatcgacaggctgtgctgcatgatttccgcctttttgccacctcaacactctgcacggccagcgaacatagcgttgagttccctgagcgaacggtgacctggatgtatggttcccaagccatgttttctgcaagtgcaatgatgctcaactgtgttgccgagcttaaacgcgcgaaagataccgcaacttttttcacaaatatgcctatggttgagcaacgcctgtgggccgatgatctgattgttaatttcactgcacctgaagagggcgatgctgttccacatgtatgcctgttggatacaggtgttaaccgggcacatccattgcttgcaccaatactgagtgaaggagatatgcatacgatcaatgctgactggggaacagacgacaggggaaatcacggtacaggaatggcggggctcgccttatatggcgatctgactgaggtgctttcatccgagcatcctgtgacgctctatcaccgacttgaatcggtaaaactgactactggtcaggacggaaatatgggcgacgacaagcaacacgcttacctttttggcgaagcagtatcacgaccggaaatttttaacggcgcaaggcgtcgtgtcttcagctcagcagtgacatcaacatattaccgtaattacggacggccatcggcctggtcttcagtcgtagacaggctggcagtagatgctgacgcagataaaccgttaccccggctatttgttctttcagcggggaatatattcaatgatcagcactggcttctttatcctgatggtcaagctcttaatcagatacacgatccaggtcagtcatggaatgcactgacagtgggcgcctttaccagaaaagtcgaactgacttacggtaactttaaagcgattgctgccgagggtggactcagtccattctctacaacgtcttctggatgggacagagagtggccgcttaaacctgatgtcgtcttcgaaggcgggaatgctgctactgatggtgttgaggccagtaattttgccgagcttgagttacttacaacagcccgtgaccctctgcgtcggctttactggaccaccaatgccaccagtgcagcttcagctctgtgcgcaagaatggccgcggatttgatggcgctctatccagagtatcgtccggaaacgatccgtgcactcattactcattcggcacgctggactccagaaatgttgagaatgttccctgcgaactcgcagacaggattcgtaaatttaatcaggcactgcggctggggagtccccgatcctgaccttgcgcgatggagcgttaataacagcctgacgctggttgaggaaagcagacttaagccctatagcaaaacaaaggatagggtgaaaactgaagacatgaatctccatgcattgccctggccggttgaagcacttgaagcgctacaaaatactcaggttgaaatgcgcgtgacgttgtcgtatttcattgagcctaatccctctgctcgcggacaaaagtcccgttttcattacccttcgcatcgtctgcgttttgcaatgaagaggccactggagcgttatgaagactttattacccgaatcaatgccgcatcagaagcagatggggagcgttatgcaggaaatgatgacaactgggctctgggcatgttgcaacgccatcgtggctctcttcatcaggatatctggaccggcacagcagcagagttggcaagctgcggttacctggcggtatatcctgggcagggctggtggcggagtcgtcagggattaaaccggtttgattcagaggcaccgtacagtctcgttatttctattcatgccccgggtactgaagttgatttgctcacgccggttgaaacactggtagacgcacttatcggaacgactgtcagaattccttcctga

SEQ ID NO: 233931 - DNA, 384 bp, Klebsiella pneumoniae; identical to SEQ ID NO: 209243

SEQ ID NO: 233932 - DNA, 3153 bp, Klebsiella pneumoniae
atggacttttcccgcttttttatcgacaggccgattttcgccgcggtgctgtcgattttaatttttatcaccgggttaatcgctatcccgctgctgccggtgagcgaatatccggatgtcgtcccgccgagcgtccaggtgcgcgcggagtatcccggcgccaacccgaaagtgattgccgagaccgtggcgacgccgctggaggaagcgatcaacggcgttgaaaacatgatgtacatgaaatcggtcgccggctccgacggcgtgctggtcaccaccgtcaccttccgcccgggtaccgacccggatcaggcgcaggttcaggtgcagaaccgcgtcgcgcaggccgaagcgcgcctgccggaggatgtacgccgtctggggatcaccacccagaagcagtctccgacgctgaccctggtggtgcatctgttttcgccaaacggtaagtacgactcgctgtatatgcgcaactacgccacgctgaaagtgaaggatgagctggcgcgcctgcccggcgttggccagatccagatttttggctccggtgagtatgcgatgcgcgtctggctggatcccaataaggtcgcggcccgcggtctgacggcctcggatgtggtgacggcgatgcaggagcaaaacgtccaggtgtctgccggacagcttggcgccgagccgctgccgcaggagagcgatttcctgatctccattaacgcccagggtcgtctgcataccgaagaagagtttggcaatatcattctgaaaacggcgcaggatggctcgctggtccgcctgcgcgacgtggcgcgcatcgagatgggttccggtagctatgcgctgcgctcccagctcaacaataaggatgcggtcgggatcggtatcttccagtcccccggcgctaacgccatcgatctgtcgaacgcggtacgcgccaaaatggccgagctggccacccgcttcccggaagatatgcaatgggcggcgccgtacgacccgacggttttcgtccgcgactccatccgcgcggtggtgcagacgctgctggaggcggtagtgctggtggtgctggtagtgatcctgttcctgcagacctggcgcgcgtcgattatcccgctgatcgcggtgccggtatcggtggtgggtaccttcagcattctctatctgctgggcttctcgctgaataccctgagcctgttcgggctggtactggctatcggtatcgtggtggacgacgccatcgtggtggtggagaacgtcgagcgtaatatcgaagaggggcttgcgccgcttgccgcggcgcatcaggcgatgcgtgaggtctccgggccgattatcgccattgcgctggtgctgtgtgcggtgttcgtgccgatggcgtttctctccggggtcaccggccagttctacaaacagttcgcggtgaccatcgccatctcgacggtgatctcggccatcaactcgctgacgctctccccggcgctggcggccctgctgttaaagccgcacggcgcgaagaaagacctccctacccggctgatcgatcgcctgtttggctggattttccgtccgtttaaccgctttttcctgcgcagctcgaacggctatcagggactggtaggcaaaacgcttggacgccgtggcgcagtgtttgcggtgtacctgctgctgctctgcgccgctggggtgatgtttaaagtcgtccccggcgggtttattcccacccaggataagctgtatctcattggcggcgtgaagatgccggaagggtcgtcgctggcgcgcaccgacgcggtgatccgcaaaatgagcgagatcgggatgaataccgaaggggtcgactatgcggtcgctttcccggggcttaacgcgctgcagttcaccaacacgccgaataccgggacggtcttttttggcctgaaaccgttcgaccagcgcaaacacacggcggcggaaattaacgcggagatcaacgccaaaatcgcgcaaatccagcagggctttggcttctccatcctgccgccgccgattttaggtctgggtcagggttccggctactccctgtacatccaggatcgcggagggctgggctatggcgcgctgcaaagcgcggtgaatgcgatgtccggggcgattatgcagacgccggggatgcacttcccgatctcgacttaccaggctaacgtgccgcagctggacgtgcaggtcgatcgcgataaggcgaaagcgcagggggtatcgctaaccgagctattcggtacgctgcagacctatctcggctcgtcttatgtcaatgactttaaccagttcgggcgtacctggcgcgtgatggcccaggctgacggaccataccgcgagagcgtggaagatatcgccaatctgcgcacccgcaataatcagggcgaaatggtgccgatcggcagtatggtgaatatcagtaccacctacgggccggatccggtgatccgctacaacggttatccggcggcggacctgattggcgatgccgatccgcgggtcctctcttcttcgcaggcgatgacgcatctggaggagctgtcgaagcagatcctgccgaatgggatgaatattgagtggacggatctcagcttccagcaggccacccagggcaacacggcgctgatcgtcttcccggtggcggtgctgctggcgttcctcgtgctggccgcgctgtatgaaagctggacactgccgctggcggtgatccttatcgtaccgatgacgatgctctccgcgctgtttggcgtctggctgaccgggggcgataacaacgtcttcgtgcaggtgggtctggtggtcctgatgggcctggcctgtaaaaacgccattctgatcgtcgagtttgcccgcgagctggagatccaggggaaaggcatcatggaagcggcgctggaggcatgccgcctgcgtctgcgcccgatcgtgatgacctccatcgcctttatcgccgggaccattccgctgatcctcggccacggcgcgggggcggaagtccgcggcgtcaccgggatcacggtgttctccgggatgctgggcgtgacgctcttcggtctgttcctgacgccggtgttttacgtgacgctacggaaactggtgacccgcaggaagccggtccaggaggatctgcccgcctag

SEQ ID NO: 233933 - DNA, 642 bp, Klebsiella pneumoniae
gtgaaaaaatcaaaagtggcagatctcattgttcagcatgttcaaaaacaactcttcatggccctttctgacgcgatttacgcggcatcaaagcgttcttacgattatgcgcaaaagaagaagctagaccacagagcgacagcgcttggttatgatcgtcatttaaacctgaatgaaactatttatgaggtgtttgaggccaacggttgtaatcccggcaagctgcgtggtaaccgtattgtagaaggccatagcggtattttcacgattgttcgtgaaagctacaatgataaccagtggaagagactatttcgcagcaaacgtaagcaagagctcattgccgaaaacgtttctgtggaaaaagtggtgcaaccggatttattctccgatggttctgatgtaccgaaagctacactgttcgtagtatgccgtttttccggttcattgcagaatcaacccgaagccccgatgtctatagagcttgtcgttccaagttctgacgggaagagctgggttttccatgagccacttgaactttttttaacccgatatgatgtagttccattccaagaagataatgcattctctgcactcaaaaagggcattatcaaaaaagatggaaccgaggaagatgaagtatga

SEQ ID NO: 233934 - DNA, 1224 bp, Klebsiella pneumoniae
atgagccgaggcatcgctgaatttcaaccggataggttagtgcaagtactagccgcccggcggctatcccaaactcaattagctacgatggttggcgtatcgccagctaccatcagtaaatggcgttctggccagcaggctccagaatccgaggccttagaacgcttggctacagtcgtaaatgttactcctgaatggtttacgcgccctctgttgccgggtatgtcaaagcccctgttcagaagtaatgcatcagctcatgtagcagcacgagcaatgttagaaactcgaatccattgggctaatgagttcgttactaagctgactgagtttgtagatctgccggagctaaaattaccgcaccgtagttttacaaacatcgatgaaattagtgatgcagatatcgaagatgccgctagtgagtgccgtgccctttggaatcttggtacaaaggaaataccggaccttactttagccgcagagagtaacggtattattgttgtcagagaggaaacaggtgtcgcacagattgaagggctttccgcctggagtgagactctaagtgttccttttgttctcctctcttcggataaaggtaatgcttttcgcagcagatttgaccttgctcacgaaattggacatctaatccttcaccgctacgttggcaacgagctcgaagctgaacgttataagctgaaggaaagccaggctcataaatttgcgggggcgctgctgcttcctgccgagacgtttgccgaagaaattagaaccccggtcacattagatagcttgcttttaattaaacaacgctacggtatttctgtcgcggcaagcatcatgcgtttgcatgtgctgaatattattactgaagaagagaaacaaaatctttataaacgccgttcagcacgttggggagtgaaatcagagccgggagatgattatcgtgagcctgaaaaaccacgtttgttgaaacgtactattgaattgttggcgtcttctggaattatttcagttgaacggcttgctgcctttgcgggattgtctgctatcgatgtcgagatgatggttggtttaccagagggctatctgaccggcaagaaggctgctgttgtgcatctggcaaaattaaaatctatgctggccgagcggcgtgaagagcaggctaacgagcataaaggagctttggtacaatttacgagaccacctaagcgctctaattcttaa

SEQ ID NO: 233935 - DNA, 993 bp, Klebsiella pneumoniae
atggacttattaaagtacttatcagaaaagggattaaccgaaagggctctcgactttgtcacatcacaattattcttcaatgcagagtcgcctgataacctaaagtacgctttaaaagcgggttatgatattaatactgttgatagtagcggcaacaatgctatttttggctgcaggacactggaagcacttgattttctacttagcaatgaagtcaatatacaccatatcaacaaggagggacaaaatgcgctctttcatcaaaaaaatccagaaattctgaagaaactgattgaactgggtttagacacctcgcatacagatactaagggctgtacctgcatttttgcacattacagggaccctgaaggactacaagtattacttaatgcaggttgtgatataaatcacgtcgataacaaagaaagaaatattctcttcctgcccctctccccggaagttttatccatagcaatagattccggatgcaatgtcaatcatattaatcatgcaggaaaaggttttattgaaaaggaatatgacgatgagttgcataatattattctatgccatattaataaatttgaaagaagaacgttgcatgtcgatttttgcaataccaactcagtattatttttatataaactctctgaatttggattcaaaatagagctcaataaagaccgtttcgtaattaacagttatattagcgattacaaagatattttaagcactcttgattgtatcagtgacattcaaaatgttaatttctataattgtgacgatgttcctctttacaaagatatagataagcgaattgtaaagtggatgataagaaataattttctcattgatcttacaaaaatttctgatgataaaaatcatgaacatatattaaaatataaaaccagttacgagcaaaaagaaatatccagaaatttaaaacatgctgcaaataaaatttcaaaagtcaaaaacggtggaaggctgtga

SEQ ID NO: 233936 - DNA, 855 bp, Klebsiella pneumoniae
ttgaaaaactggtcaccagagcatactaaagaaatcaaagcttggcttgacatagataactatcgcaagctcgaatacatcagtttaaatgccttgtatcatgaactttgggcaagagcacttctgttcaagccatggcctacagacgaagaaaagaaagggctatgggtgtacatgactgaaattttcagtgggaacccccatcttttcaaagggaagcaactcgattatccaacagttaacgatactctctacagtcctccacacatttttatcacggatatcaccaggcttgctgaacttagtgtgatggcccttagtgtgaatcttttcacttgggaggaaggaaacgatgaatattgtgttaatgcgcctcatcacgaagcttatgtgtcccaactcttgtcccccttatgtgagaaaacggtgttgcttgaaatcgatcttagtagtggtactgacgatgaaatagccgaatcgataaaagcggccctgccacaatggagatcggtaaaaggagtggaagttaatgaaaccggtatcgttcgtttcggctatggaaccattaaaaaaatcataaattacaggttggttgcgatgctggacattttactttgggcaaaaaggaaagaactaagaatctcagatgatcgcctctcccggcttctttatactgatgaagatgaagaaacaactatccgtttaggatatcacattaaagactcggatcgaccacttgcgatgaaagctgcaacgatagacttcattaggcagttcaattttttcatgaaccgaaatccccacctgaaaaatatgagagtttcagatgtgatgaaactctctgattctaactga

SEQ ID NO: 233937 - DNA, 207 bp, Klebsiella pneumoniae
atgaacaatcaaaatacccgcctaattcgcttgccagaagttatgaacagaaccggctatggcaaagcatggatttatcgattgattagtgaaggcttatttccaaaaccgataaaaattggcacgcgtgcaattgcatttgtcgaaagcgaagttgatgaatggatcgcttctgcaattgaacgttcacgtaaaaatgtagcctga

SEQ ID NO: 233938 - DNA, 270 bp, Klebsiella pneumoniae
atgaagaaaagactccctgattaccttcaccagtataaattatcagatgaacaacgcaatctgaacaatactgctcacaatgcattttggcttctcatattaatcgcttcatacacaccagataaaagcactgtttacctgagttttcaccgtgcaacatccatcgcacaacaggaagagatacatatcacacaagcccgattttatcaggctatcgatagactgattaatacaaatattattatgcgtactgaatttaaataccagtag

SEQ ID NO: 233939 - DNA, 234 bp, Klebsiella pneumoniae
atgttgagtccgatcgattgcattaccgctttcttttttcaaaaaccgggttgtttccagatttcagataaaaccccctcaggaatttttttgagagagtgctacgcactggttcacgcctccgacgacagatatatgttgattatttttacccgtcagatgaaaacccaacgtttaatccctcttgcagcgccgctgagtgcccacagcactcactcgctgaagcagaaatga

SEQ ID NO: 233940 - DNA, 237 bp, Klebsiella pneumoniae
atgggtgcaatttacaaagggttgcagttcaaaactgcgttggaagcacgctgggccgcatttttcgaccttgctggctgggaatggcatgtgaatcctgtatgtgttggtgactggtctcccgatttctgggtcagttttccgtgtagtcactcggaatgtggttcacacacacgttacttatttccgttttacctattgataatattgaagattataataatcacccaagcttaa

SEQ ID NO: 233941 - DNA, 528 bp, Klebsiella pneumoniae
atgcgactacgcagcaaacgacctccggtgggcgcttcaacctcaattttatccgtccacggaatttcagctgtgaggcgtgccaataaccgttcacgaacatcatccgctccccagaatatggcaatttgtggatcgataagtcgcgcagcgcccagtaactctgcggcgttgctgaggttgatcgcatcacaatcaggccttaaattgcttagcgccgccctgatactgtcaggaatatccatgccgaccaaagtacccataaaggtacataagcgtggcgtatcagcgcgtacgactaatgcgtttattgtgtccggggaaagtgcggacagtaacacttgtcgcggatctgtggccgaatgtacccgtaactcacccatggctttttgcaggcgctcgggaaagggaattattgatgtattttgccccgccacaacgaacatgacggccagggtaatcaatgttggttccacgccaatcacccgcgcctggggtatccaggcactcagcgttgtttcgatatga

SEQ ID NO: 233942 - DNA, 1155 bp, Klebsiella pneumoniae; identical to SEQ ID NO: 230263

SEQ ID NO: 233943 - DNA, 1677 bp, Klebsiella pneumoniae
atgtctaagactatcacccctcgctggtggaaagaagtggtggcctatcagatttatccgcgcagttttaaggataccaacggcgatggcatcggcgatctaaacggtgttgttgaaaagctcgattacctgaatgaactgggtatcgatttaatctggctgtgcccaatatttaaatcgccaaatgacgataatggctacgacataagcgattatcaggccattatggatgaattcggcaccatggccgatttcgatcgcctgctgcgggaagtgcatgcccgtggaatgaggctgatcctcgatttagtagttaaccataccagcgatgaacatccgtggtttctagagtcccgttcatcacaggataaccctaaacgcgactggtatatctggcgggacggcaaatcaggtaaagagcccaataactgggaaagcatcttcaaggagtcggcctggaaatgggatgctaaaagcggacaatattttatgcatctgttctccagccgtcaaccggatctgaactgggacaatcagggcgtccgccatgccgtgtatgagatgatccgctggtggctggataaaggtattgatggttttcgtattgacgccatcagccacatgaaaaaagaggccggtcttgacgatatgcccaaccagcagcagttggaatacgtgccctctcttgaaaagcatctgaatgtcgatggcgtacttgattatctcgatgatatctgccgcaataccttctcacactatgacattatgacggtgggcgaagcgaatggcgtctccgcagagcaagctgatgattgggttgccgagcgacataaccgtttaaacatgctcatccagtttgaacatgtcaagttatgggacaatgacacgaaaaaaccgctggatctctgcgccctgaaagccattttctctcgttggcaggagcagttgcatggtgtgggctggaatgctctgtatgttgaaaaccatgacataccgcgaattatctcaaaatggggtgacagcgaacgtttctggcgggaaagtgccacctctatcgccgccatgtatttcctgatgcaggggacaccatttatttatcagggacaggagatcggcatgaccaatacatcattctcctcccttgacgattttaatgacgtctcagcgaagaacctctaccggaaaatgaagaaagaggggttcagcgatcacacgattatagacttgctgtcgctgacctcccgggataattcgcgtacgccgatgcaatgggataacagcacgaatgccggtttctcgactgcagccccgtggataaaggtgaacccaaattacatcaccatcaacgtgcggcaacagcaagagcagccagattcgatcctcaacttttaccggcggatgattcaactacgcaaagacgagaaagttctggtctacggagactatgagttattgatggccgaggacccgcagatctacgcctatacacgttctctggaggggcggcacgcggtgattatctgcaatatgagcgccagcgaggcacaatatcgacaacaggatattctgctcgaacaccacaatctgcggttgaacaactaccaggttcccccacacgagccaaccaaccagctcagacttagtccttatgaaacaagggtttacttggtgcactaa

SEQ ID NO: 233944 - DNA, 1650 bp, Klebsiella pneumoniae
atgcaaaatacagggaaatggtggcataatgctgtggtttatcagatctatccgcgcagcttctgcgatgccaacaatgatggcatcggcgatcttgcaggtattatcagcaaactcgactatttgcagcggttggggatcaatatcatctggctatccccagtttaccaatcaccgatggacgataatggctatgatatttccgattatcaaaatatcgcagccgaatttggtacgctcgatgaaatggaaaccctgattgccgaagcgaaaaaacgggatatccagatagtgatggatctggtcgtcaaccacacttccgatgaacacccgtggttcatcgaagcgaaaaaatcaaaagataatccctaccgccactattacatctggcgcaagccgaaggacgatggctcggtaccgaataattttcactcctattttggcggcagtggctgggagtttgatgaggagagtggcgaatactacttccatcagttttctaaacgtcaaccggacttgaactgggaaaattcgcaggtacaggctgagatccataagatgatgaactggtggttggataagggcatcggcggttttcgcatggacgttatcgatctgattggtaaagatgtggataacgagatcatggccgacggaccgcagttgcaccacctgctccagcagatgaaccgggcgacctttggtcaacgggatgttctaaccgtgggagagacctggagtgcaacgccggagacggcgaaactctactccgaccccgcgcgtaatgagctgtcgatggtcttccagtttgagcatatcaccatcggttatcacccgcagcacggcaaatggcagcctcagccctttgatctgatcaaactgaaacaagtcttcaataaatggcaaaccgcgctcgtcgacagcggctggaactcgctattctggaacaatcacgatctgcctcgcatcgtgtcgaaatatggcgatcctggcctcttccgcgtggagtcggcgaaaatgctcgccaccacgctacattttatgcaaggcaccccgtacatttatcagggtgaagagattggcatgaccaacgttcgttttccgaaaatagaggattatcaggatattgaatcgctgaatctctactccgagcgtacggaggccggcgtaccggctgaagaaatgatggaaggtatctataccaacggtcgggataatgcccgtacgcccatgcagtggagcaatgaagctaacggcggttttagccgtgttagcccttggctaaaggtcaacccaaactacacggaaattaacgttgaggccgctttaaacgatccggattcgatattctttcactatcagaaattgatcgcgttacgcaaaaataaaccgatcattacctggggtaaatatcagcaattactggaagcacatcaggaggtatttgcctaccagcgtatattagataatgagcatattgtggtgatcagcaatttctgcggccatcaggttcagttgccgctgccggccgaaatccgcaatattgaaggagaatggttgatcggtaattatcctccacgtcacggcctggctgaagaaatcactttgcaaccttatgaatcttttgccatttcatggctgaataactga

SEQ ID NO: 233945 - DNA, 1095 bp, Klebsiella pneumoniae
atgtcacacttaaaattagagaagctaagtaaaagttacggtgaaaatgcccaagtcataaaatccctggatttacaagtcaacagcggcgagttcattgttatcgttgggccctcaggctgtggtaaatcgaccctactgcggatgatcgcagggctggaagatatttctagcggaagcatgtttattgatggaacctatgtcaacgatgataccccttcagagcgcggtatcggcatggtattccagtcctatgcgctatatccgcatatgagcgtctatcagaacatggcctttggtctggaactggcgggaaaatcggaaaaggagatcgatgacagagtccagaatagcgcgcacatcctacagttggggccgctgctgcagcggcggccgaaagatctctcaggcggtcagcgtcagcgtgttgccattggccgggctattgcccgcgaacccaaactgtttctgttcgatgaaccactatcaaaccttgatgcagcgctacgagtgcagatgcgcatggagatagccaacctgcataaacgcctgaggtcaaccatcatctatgtgacccacgatcaggtggaggccatgaccctcgccgaccgtattgtggtgttgaacaaaggccatatagaacaggtgggaacgccattagagctgtacgatcatccgggcaatgcattcgttgcccagtttatcggttcgccgaaaatgaacatgatcccggcgatgcttgcgcaagccggcgaaacccagagtctggtgcagttggataatggtaaacagctgctgttgccaatcagcacgccacaaactgcggaaggccagagcgtcaacctcggcattcgtccggagcacattctttggggttcgatggacgactcgcactatcgagccaatgtaatgtttgtcgaacatatgggcaacgagacttatctttatctggacaacggcaacgccagcgagccttgggtagtacgtaatgccgagcgttccccgatttcagccgggcaagatgtcggcgtatctttaccgcctgagcaatgctacctgtttgatggtgacggcaacgcctttctgcgttgctga

SEQ ID NO: 233946 - DNA, 1362 bp, Klebsiella pneumoniae
atgggcacaaaaattgttcttatcggcgccggaagcgcacaatttggttacggcacccttggcgatatttttcaaagttccaccttagccggtagcgagatagtcttacacgatatcaatccggtggcactcgccgccacggaacagacggcgaaaaactttattgccgcccatgatattccattcagcgtaaccgcaaccaccgatcggcaggcagcgctacagggtgcggagttcatcataatctctattgaggtcggagatcgttttgcgctgtgggatatggactggaaactgccccagcaatatggcatccctcaagtttacggcgagaatggcggccccggtggactgttccattcgttacggatcattccgcctattctggcgatttgtcaggatattgccgatatctgcccggatgcctggatcttcaacttttccaacccgatgagccgtatctgcaccacggttaaccgtcgtttcccacagctgaacttcgtcggcatgtgccatgagatcgcctcgctggaacgctatctgccggaaattctgcatacgccttttgaggatctgcaattgcgcgccggcggtcttaaccacttctcggtattgcttgaagcccgctaccgccgcagcggcgaagatgcctatgcggatattcgcgccaacgccccagcctatttcgagaaattaccgggctacagcgacatcctgacgtatacccagaaatacggccatttgatcaacaccgaaggggctaccgaacggcactccctggggggccaggatagcgccttcccgtgggccgatcgccagttgtttaaggcgatccttgagagattccactacctaccgatcaccggggacagccatttcggcgagtatatcagctgggcctatgagataagcgatcaccgcggcatcctagatttctataccttctaccgcgattatctcggccatgtgcagccggttatcgagctaaaactgaaagaacgggtagttccgattatcgaaggtattctgaccgatgccagttatgaagaggcggcggtaaatatcccgaacaaaggctttattaagcagttgccggaatttattgccgttgaggttcccgccattatcgacagtaaagggatacacgggatcgaggtgaatgtgcctgccgggattgccggtcttcttaccaaccaggtggcgatacatgacctgactgccgaggcagtgctgaatcaatcccgggatctggtgatccaggcactgttggtagattcagttaacaacaaatgcgcacgtattcctgaactggtggatctgatgatcgccagccagcggccatatcttgattacctgaaataa

SEQ ID NO: 233947 - DNA, 846 bp, Klebsiella pneumoniae
atgaaactcactcgtcgtcaacggcggataacgcagcagacattgatatacgcagcggctgcgctggtcagcgtggtctgcgtcttccctttttataatgcgattctgacctcgctgcgtaccggccaggagctgttcctgaccgagtatctcccgacgtcatttcactgggaaaactacgtcagtgcgctgatggtcaacggtatagcccgcagtttgctgaattcctttattgtggcgacgtctacggtgggcatttgtctgctggtctccatcaccgctgcgtttgccctcgcgcggatcacatttaaaggacgcaaatatatcctgttcaccatcctatgtgtttcgatgttcccccaggtggcggtactgtccggaatgttcgagttggtacgttttcttggcctgtatgactcactcggtgcgctgatcctctcttataccaccttctccctaccctttaccgtctgggtactgaccacttttatgaagtcgctgccggttgagctggaagaggccgcgatcgtcgatggagccggattgtgggtgattatcagccgcattttcgcccccatcatgggaccctcgctggtcaccaccggtttgctggcctttattggagcctggaacgaatttatgttcgccctgacattcgtcatttccaacgagaaacgcaccgtaccggtggcgattggcatgttacaaggcgcgtctcagtttgagttgccctggggcaacattatggccgcgtcagtggtggtcacccttccgatcatcgtactggtgctgattttccagaaacgcattgttagtggtttaaccagtggcgccgttaaaggttaa

SEQ ID NO: 233948 - DNA, 1002 bp, Klebsiella pneumoniae
atgaaacattcttctgaaccgctgcttgccaaaggaagctgcctcagcaaggcgccgacaggagcgcaccccgctcgtaagaataagcccagcctacagcaacgacgcagtcgggcagcctggctgctggtggcccccgcattgattttgttagcctccgtcgccggctggccgttactgcgtacactgttttatagctttaccgatgccgcactcgatacccctggcgagtataacctagttggttttgacaattacctctcttgggcggacggcgaaagctacggcgtgctagccgatccattgtggtggcgagcagtgctgaacactctctggtttaccgccgtttcggtctccttagaactgttcttcggcatgctgctggccctgctgatgaaccagaaattccgcggccagggcatcgtacgggcggccattctagttccctgggcgattccgaccatcgtcaccgccaagatgtggggctggatgttccacgatcaatatggcgtgatcaacgacctgctcacccacttaggcattattcatagcccattggcgtggattgccgaacccacattgtctatgtgggcggttgttatcgccgatgtgtggaaaaccatcccctttatggcgctgatgttgttggccgccctgcagatgatccccgctgacctatatgaagcaggacgagttgacggtgcgacggcgtggcagcgttttacccgcatcaccctgccattaatcaaaccggcgatgatcgttgcattaattttccgggtaatggatgccctgcgggtattcgacctaatttatgtcctgacctccaacagcgaagccacaatttccatttccggctacgcccgcgaccgcatggtctcatatcaggaaatgggttccggctcggcctcttcggttctggtgttcatgatggtcgccggtattgcagcctgtttcttgtatatcggccgcatgaatcacggcgacacggaggataaataa

SEQ ID NO: 233949 - DNA, 1272 bp, Klebsiella pneumoniae
atgaaaaaaaacaccctgacgctgatgatatctgcgttgtttcttggtgcgtcaaacatggcgcatgccgatacgctaaaaatggagtgtggcagtaccggttccgcaaaaacatattgcgattacatcaaagcccgttttgaaaaagagaccactgacaaactggagtttgttcagttacctcccgcttctgatgaaaaactggggctgttccaacaaattttcgccgccaaagatagcaaagtggtagatgtatttcagtctgataccgtatggctaggggtgcttgataaacacctgctggatctgaccgataaagtcaaagacctgcaaccgcagttcttccctcaggcgtggaataatgacgtcgtcaacggtaaggtcaaagcaattccagctttcctcgacaccggggtgatgtactaccgtaaggatttgctagctaaatacggtgaaaagccaccggaaacctgggaggaactgacccgtatcgcggcaaaaattcaacaaggcgaacgcgaagcagggcataaaaacttctggggatatgtcttccagggaaaagcctatgaaggactgttctgcgatgcgctggaatggatttactcctataacggcggcacgattatcgataaggacggtaagatcaccgtcaataacccgcaggcggcaaaagcgctgaatatggcggcagcctggatcgacaaaattactccgaagggcgccctcggttacatggaagaagagtcacgggcagtgttccagaatggcgatgcggcgtttatgcgtaactggccttacgcctatgtgctggcccaggacaaaaccagtcccataaaaaataacgtcggcattattccggtaccgaaaggcggtgccgacggtcagcatgcttcgaccctcggcggctggcagtgggcggtcagcgcctataccgaacacccggaggcggcgatcaagctggtgcgtatcctgacggatgccgactcacaaaaaatgcagttcaaaatcaccggtcaggcaccatcgcgccttgatgtctatgacgatccagaagtcaaagcactggcgccttatctcgccgattttaaacaggtcttcacctctgccgttcctcgcccggcagttgaaactaaatctcagttcccgaaagtctcaaaagcagcgtttaacgccgcctacgatgtcctcagcggcagggcgagcggcgaacaagccgttgctgaactggaaagcaaactcaaacgtatcaaaggtaaagcgtggaagtaa

SEQ ID NO: 233950 - DNA, 930 bp, Klebsiella pneumoniae
atggataaaattttgcagcaattccttgaggtagcttctttacaaaatgtgagtcatgcggcaaaaaagctttttctgagccagccgacgctaacgcataacatgaaaaaactggaagaatcattgggtgttcaattgtttgtgcgcacatcgaacggtatcaggctgacggaattcggcgaagtgctccgcgatcaggcacgcgtgatgcagcgggtttatgacagtaccttgttgaaaatagagcagcttaaagcgcggcatgaacgggagctgaaaatcggcactggccatgcttggtggtttctttttttaagcgatacgatttgtgactaccgccaggttcatccgggggccaatatccatattgatgtcggcaatcacctgcgactgatggcgcttttgctgagcggcgatcttgatttgtttgtcggtcatgagatcatcggactgaataaacgagccggggtgtcgtttattccgctgttcttgacccaggactgggtatatgttcgcaaagagcacccgctggctacgcgggtatgcagcaatcaggatcttgaaaactatcctatcattgaagttacgccggatgaacaccgtcatcagtttgtagttgaagatttgcagcctaaaaagctggagcgcgagcagctaaagttgacggaaaaaatcctttatcgcagcaattcactgtttacctgtatggatattgccaaccgttccaacggtatcctgctgtttccgaaacatatggcggcctactttaagcgctttaatctggtgaatctgcagatgagcgaagagtaccagcggaaaggcaatgtcgggatctacttgattcgtgaacgccagcacgatctgcatatccaggatattcaagagatcatacggagaaatgtagataaaataggtgctaacgtcgaatga

SEQ ID NO: 233951 - DNA, 267 bp, Klebsiella pneumoniae
atggatgtgaaaatggtcgcgcagacgattttagagtccgtgggcggtaaaaaaaatgtggtgtcgctggtttattgcgcaacacgcctgcgctttacgcttaaagatgaatcgtggatcgacgaggaacgaataacctcactcagtgccgtcagcggatctttccacaccggcggtcagtatcaaattatcctcggcctcggtaccgtaaagtccgtctttgatgaactaaacccgatgctggcacccgacgtcaaccaccaatag

SEQ ID NO: 233952 - DNA, 387 bp, Klebsiella pneumoniae
atggtgctggcgcaacgtagccatgaccgctacctgcagtcggatcgttatgattgggcaacgcttaatgtccgcttgatccaggggctttccgaaaactttgccctgcagtatgaggcgggctaccagtatatgaatttagatagcaaaggatttaatgataatggcaaagcaaaaggtgatttttataaattaacctttgcgccaacctttaaactgacggatccgacaaactttttcgagcgtccggaaatcagactgttcgccacttacatgaactgggataagtcactggacaactactccaccaccgattccttcggaaccaccgggttcaccgccggcggccagtggaacttcggtatacagatggaaacgtggttctga

SEQ ID NO: 233953 - DNA, 1068 bp, Klebsiella pneumoniae
atgcgctctcagtgcaaacccctaattgaagacaaaggctatctgcgtcacttctggcatccagtatgtactttggccgagttcgaaaaggcaaatagctccgggcatggtccaatgtcggtgaaattgctaggtgaaaacttggttttagccaggttagatggagagatgtttgctggggatgatcgctgtattcatcgttcggcacagctgtctctcggtcaggtttgcaagcaccaaggtaaagacacccttcaatgcccttaccacggctggcgttataacgatgaaggtaagtgcgctctgataccagcatgtcctgatatgccgataccttcgaaagcgaaaatttcaaaatatgattgtgcgattcgctatggcattgtctgggttcgcttggataactcctttgactgcaccgagattcctttcttaggtgattgggacagtgaaggtatgaaagtagtggtggctgattcgtacgtttgggagaccactgccgaacgccgttgggaaaacttcactgacttttctcacttcgcattcgttcatcctggcactttatatgacccattcttcgccactcatccaacagtcaatgtcgatcgcattagcggtgagatgcgcttccagcttgctccacccaaagaaatgtatgagaacttgcctgaggaagcacctatgggcgatttcatctaccgttgttcaatgccctattcggtgaacctagaaatcaagctatggaaggatgactctaaatttatcctgtggactacctcgagtccggtcgacgacacaacttgtcgtaattttatggttattgtgcgcaccgaagatcatcagcctgaccatattcatctcgccttccagaagcgtgtactggaagaagaccgtcctatcattcaatcccagtcacctatggatttggatagttcagaattatgcgtatctacagacaagatctccattcaataccgcaaatggcatagagagctctcaatggcagcattggaaggtaaagaagcattcaaatcagtccttctcagtgaagtgactgagagtagatag

SEQ ID NO: 233954 - DNA, 1128 bp, Klebsiella pneumoniae
atgaaaaagatgttcaagttaggttgtgccgggctcggcatccaagcgtcgtctatagaaaaccctgtctcgcttatcgagctgccaatcctcgagcagtttaagctggtaaaagaggctgaggtgtgggacttcatcgatcgtgttcccaataactaccaagagctggacgagtacataaagggcagtcagatatacgacttgccggtgctatccggcagtggctgctacacgttaggtttagatgaagaccttattaagcagaatataaatcttaccgctgaggtcggcggtaaataccataattttatggtctgggctaagcacaaggacggtcactacgtgaccaatgaagaagttgctgagagctatctagacgccttcgagtacgccgaaaaagccggtgtcatcatcaccttcgagaaccatgtggacatgtggtctgaagactatcgtcgagttgcgcaggttgctgatctggttgaggcgagaggagtcaagttcaacgtggccatggactacagccactgcattttcaaaattgaaaatgcagttgagcatgcagtttctcagatgcgtggtgacaatgaggcaattgccaaacttgatccgttcaatgacgatagttacgcagatgaatggctcaatcgcaatctagttcactgggcgcagatgcgtcccgcagcaccaaacggcccacttaactggtgggggtttgaaactggcccatgggatgcaaaagggattgatcgcccaggacgttccattcaatacccattccggcgccctgccaaaggcgaatggcacacagaaatgtggcatgcccacaagctggcatgtaccaaagaaattacgagaaaggtcatcgatgcgtacctacaaagcgatgataccaacctctcattaatgaccatcgacaacatcaacctgaatgcttacggattagggtggaagtacaacatgttcgctgatagctgcgcttacgctcagtatgtccgtgaaatctatgctgaacgtgctgctgttcatcaggcacgaaactccatgtcagcttctgaatttgtctcccaataccgggcaggcgccgttgtagcggtgccaaacaatgtacaggcaccaatatgttaa

SEQ ID NO: 233955 - DNA, 846 bp, Klebsiella pneumoniae
atgttaaatgagaacagttttatttttgacgactggcaccccgtcggcgcactagctgatacctcacttggtaagaaatacttttcccgagttttggctgtcagcattgaatatacgctcaccgaggatgggttgcgggcagaggtttcctctacaggcctaccgctaaaaacccaggtgatttatggacttttatgggtgtctctttcaaataacccacgagatgtagtagccatccccgaatttgatgaacctgatcgcagggtgatcagtgcaggatcaattcgggtgggaacctctgggttacgtgtcgttgaaaacttccttgatatggcgcatttcccgtttgtacacacagatattctcggcgcagaaccactaactgaagtggctgcatatgacattgaaatcgatgaagaccgagatgaagtgctggctattaattgcagatttccccaaccgaaagggtcggcggcagctactgaaccggtggacatgcattacgtctaccgagtcgcccgccctttcatctctatcttatataagacgtgtgtgattgaagatgatcgccttgatgttttgggtctgttcgtccagcccctagatgaagaaacatgcgttgcccacgcgatcatgtgctacctcgatgacattaacaccgacaagcagttaaaggacttccaacagagaatttttggccaggacatcatgattttgctgaaccaagttcccaaaggattaccccttgatccaaagtttgaaacccctgtgcgggctgatgccttgtcgagcgcctatcgtcgctggattaaagaaagaaatgtgacgtttggcaccgctcactaa

SEQ ID NO: 233956 - DNA, 1758 bp, Klebsiella pneumoniae
atggattcgttaaatcaggagtggcatgtcattgccaactccgaagatataccgtttagacacgtgtaccaatcacgtcttaatggtcaagaactcgcagtatggcgtgactatacaggagatgtgaatgtttgggaaaaccgctgcccgcaccgtggtgttcgactaacactaggcgaaaatgtcggagaccaattgcaatgccagtaccacggatggaaatatcagtctggtacgggacattgctcatttgtaccagcacatagaactgcacagcccagtaatgcctgtgtaaagacttatctatgcacagagttagaaggcctgatatttgtaaaactggatacaacgaacgggaccgatgctccaaagcagctatctctcgttgactctcttaattccagcaacctgcgaagccaggtgattgctgtagatgcccagactgcgatcgatacaatcaagaagggagcttctagctttgcccctgttttaggcaatcgcccagaagagattcagtttgtggacgacggcctaactatcgaccttacatgtacgggattggcggaaactttacgtatttttgtccagccagaatctgaacaaaaagtggtgattcacgcccgtttatacacggatactcctgtggatcttcaacgtaaagttatgttcatgcacgtgctgactgagctgttcgctcaaacggagcgtagtaccagcatttctgattcaaaaaatattatagctactgatagtagtacacatgtaaacctgggcaatcctgaagtagacagcgctcgaaagcagattatatgtactgtcatcgcccgaaatactgagacgcctgatattgattctttctggcttaagccggaagaagatcaagtattaactttggaaccaggcatgcatgtcggtttgacaacgccatccggtcacttgcggcaatactcaatcgttaatacacccgaggaacgagatgtcctgatcataggtgtgaaacttgaggctaagtcacgaggcggctcgcgtagcatgcacagtgatgttcgagttggctctaaaatgtcaataactcttcctcgcaatcaatttcaattacaaccatctgagcgtaaggctgtcctcattgccggtggtattggtgtgacacctctgctcgcaatggctcttttccaagagcaaagagaccgtaactaccacttacattactttgtgagaggtaatgagcacattgcctttaaagatcgtatttcggcgcttggaaataactgctctacctatgttggcttaggtatagaggagactcagagtgcaatcactgagcttctacaaggattaaatccggagtcacatgatatttacgtctgtggccctcaggcgatgatcgaacttgtctccacaacggcaatcaagtccggtttttccgcagatcaagtgtattacgagtatttcggattaactgatcacgcaacatcacgcgcccatagtgaagggggctatcaagtgactattcaatccactggacaagaattcactgttgaacctggtagaagccttcttcaagcatgcttagaagctggggttgaaatcgattactcctgtgaacagggcgtatgtggtgcatgcatgactaaagtaattagcggcgacttacaacatgaagatgtttatctctcttccaaggaaaagaacgatgggaaattaatcatgccatgcgtatctagttgtaaatcagcaaagctagttctggatatttaa

SEQ ID NO: 233957 - DNA, 639 bp, Klebsiella pneumoniae
atgcttaaactttacgactatgagctttctggaaactgttttaaagctcgcctacttctatcaatgcttggtgtttcttatgataccgagattgttgagttttatcctgaacgcgaacataagagtgctgattttctacgcattaatccacttggccaacttcccgttttgcaaaacggagacaaagttattcgtgaatcccaagccattttggtctatctagcgactaagtttgatttgggcaggaaatggtatccgctagatagtccagatgctcttgcagatattcaaatctggctggctttttctgacggaattacggcgtctatttctgctgcaaggctacatgagctttttatgtacgactttgatgtcgaggagtgtcggaaccgtgcttatgttctgttagaggtaatggacaaacatttgtgggtgaatcgtcagcaaggctttgattttctctgccccatggagcacccgacaatcgccgatattgcctgctttccatatatagctatggctgacgaagcgggcatttcacttcaagactatccctcagtgagactctggctagatagtgtgaagcgtattcccggttttatagcaatgtcgggaatattccctgtaagcaatatctaa

SEQ ID NO: 233958 - DNA, 978 bp, Klebsiella pneumoniae
atggttatctacaccccgccatctgtggcaaaagatattcctgttatcgacctcgcagaaagcttttcacacgatatcgaaaagagaaaagctgttgcgtgggaaatacataaggcagcacgtcaaactggcttcttttatataaagaatcatggtgttccagttgaattgcaaaaggcatatttcgatttagccaaggaatattttgcgtccccgatggacgaaaaaatgaagatcagttccaagaactctgtctgcctgcgtgggtacgaacctattactgctcaaactctggatgaaggatctcctcctgatttgaaggaggggtttttatttggtcgggacctaactgagtctcatccttatgttcagaataaaacaccgtaccatggtcccaatcaatggcctgaaggcaatccacacttccggcaacaggctgaggattatatgcaccatttggagcttttaggtcgtaagcttgtgcgcttattagcactctcgttggagttgccagaggacttttttgacgagggtctgaaggagccgatgatcatttctcgtatgctctactatcccagtcagccgaaagacgttcaggtaaaccaattaggtgcaggtgcgcatacggattggggtcttattacattactactccaggatgcagtcggagggttagaagttcgaaatgcagatggagaatggctgaaagccccttgtatagaaaataccttcgtagtgaatctaggtgatatggtgccagtgcttactaacgggttgtatcactctacaatgcaccgcgttctcaacgcatcgaaggaaactccacgttactctttcccgacattctttgaccttgactactattatgaggcttcagtggttccaactttgcgcaagcccgacgaagagtaccccgaacctatcacagtaggcggtcatatcgctgagatgttcaataaaacatttggcgtaaagtaa

SEQ ID NO: 233959 - DNA, 306 bp, Klebsiella pneumoniae
atgacaagaaaattatcaactgagtttaagcgagaatttgcagacttagttatcgttcatggatataaacataaagatgcggcggatgcgatgggcgttggtttatcgtcgattcagcgttgggttagccagtttaaaaaagaacaacaaggtataacccctaaagctacagcattaacaccagagcaattacgtattcagcagttagaaaaacaagttaaacagttagaaagtgacaatgccttattaaaaaaagcgtcacccttcttcgctatggaaatgaacaacggcagcaagtcgcggtaa

SEQ ID NO: 233960 - DNA, 273 bp, Klebsiella pneumoniae
atgaagcatattcacaatgatatggatgcaacgtacggcaaacgcaggatgttatctgagctgttggatatgggctttaaattggggattgataaggttcgtcgttttatgaaacgactcaagctcattgccaagcggcctaaacaacacaagtatccagttggtggcaaagcgtctgtgattgcacctaatacactgaatagacagtttaatcctgagttgttaaatacacattggtcgggtgatattacgtatggtgtgctcggagtttaa

SEQ ID NO: 233961 - DNA, 1521 bp, Klebsiella pneumoniae
ttgataatcagtgaaatgcaacgcaaattagcaacatggacattgactgataaaggacgtcgagttaatcgactattaaggcttatcagtcaccctgaatggctgtggcatgctgctaatatcacgctttcatcagccggcgctaaaacggccggtgttgatggaataacaaagtcgcacttgcaggacaatttagatagttaccttgatgatattagacaaactttattgtcaggtgactatcaacctatgccggcaaggcgagtatatattcccaaagcaaatggtaaacaacggccactaggtattccaaccttgaaagacagaatagtacaacgtgccatgttgatggcaatggagcctatatgggaaaacgatttccactcgttgtcctacggcttcagaccagagcgcagtgtacatcacgctattcgaacggtgcaattacaactgacaggctctagtaccagaggccgctgggtaattgaaggtgacttatctagctactttgacacggttcatcataaattgctaatgaagtgcgtacgcaagcgcattagttgcgtaagattcaacgatctgctttggcgctttatcaaagcgggtcatattgaacgcaatctattctgtgcaacaagcgaaggggtaccacaaggtggtgtgatttccccattgctgtcaaatatcatgctgaatgaatttgaccaatatttagatgaacactttctatcaaagaaagccagaaaagaccgttggtattggaatagaaccattcaggacaaacgcaaaattgcgatagaggaaaaccgacaatggctgccagccattgcctactgccgctatgctgatgactttattgttatcgttaaaggcactaaagcacaagctatggccattcgtaacttatgtcggtctttcttggaagacaagctgaagttgacgttaaatatggagaaaacacatattacccatgttaacgacgggtttgtcttccttggccatcgtattattagaaaacgaggtccaaacggcaatatgcgcgttgtgtcgggtatcccacatagcaaagctaaagcgttttcatccacgctcagtaaagctttatcgggtgattactcttgtagcaaagtcgataaacttgagcacattagtcgtaaattgaaaggttgggcacagttctaccgccatacccactttacagctaaagtgtacaacaaaatcgataggatcgtattctggaaatttgcaaaatggctggctaggaaatatcgctgttccattaaatcattaatgatgacatggatacgacgaccaacgcctagcaaagctaagacttgggtggtttatggtaagtcaaataacggtattgtatgcggggcaacactatttcgtttagtgagcagccctaaaatgccattcagatggcgactacctgaaactaacccttacattaggcgagaagaaagaaacacgatcacctcgcgctacaacgatgttgctatggctgtcagccaacattaa

SEQ ID NO: 233962 - DNA, 258 bp, Klebsiella pneumoniae
atgttgatggcccggagcctataccactggatgatgaaaagagtgtccatgaacgagtggataatgcccgtattgatttacgctcaaaatactatgttaaacctaaagctgaccatccctggcttacgcgccgaacgcaaagtcatcagcaagttaagcccccgaagttacctaaaaagaagcctgatcccgataaaaaagattgaaaccaagatcgattcggttgagtgcatatccattcatagggtagattcttaa

SEQ ID NO: 233963 - DNA, 996 bp, Klebsiella pneumoniae
atgaccacaatcagtgatgtcgctaagaaggctggggtttcgacggctaccgtatcaagggtgctggctaataccgattcagtgaccccaaaaactcgcgaacgggtaatggcggcggccgaggccctgaattacaagcccaacgctctggctcgtaacctaagggtgtcatcgacccgcgctatccttgtggtcgtgccagatatctccaatccgtttttttccgagatccttcgtggtattgagcttgtagcgaataagagcggctaccagatcctgttgggtgactccgataacacgctggaacgagaggttgagtatctggattttctcagacaacgacaagccgacggcatgattatgctgactgcacggatggaccagagcctgctcgaaagcatcgctgcgcagtatcctgtgatattgggctgtgaatattttgatgagggttcagctataaatacggtttcggtcgataacataagggccggatacaaggccgccgaacacctgatcaagttgggccataaacgtatcggatatatctccggaccggagggtatcgttcttagtcgggatcgcctcaaggggttccagaaggcgatgtccgactatggtctgcaaccggatgaactgctgatcgaagtgggctctttcagctatgactccggttggaccgccatggataggttccttgcgctggaagtgggtccgaccgccgttttcgcagcaagtgatgagatggctattggcgccatcaaggcggctcgcaaggctggtcttgatgtgcctaaagatcttgcggtcgtgggtatggataacatcaagttcgcttccatttttgagccttcgatcacgacaattgcgcaacctatgtgcgagattggttgtaccgcaatggagttgctgttgaaggtcattaataaagaagcaattccgcagaaaaaagttgtattgaaggacgaactaatcgtaagggaatcctgtggtgggtaa

SEQ ID NO: 233964 - DNA, 315 bp, Klebsiella pneumoniae
atggataggttccttgcgctggaggtgggttcaactgccgttttcgcagcaagtgatgagatggctattcgcgccatcaagccggctcgcaaggctggtcttgatgtgcttaaagatcttgcggtcgtgggtacggataacatcaagttcgcttccatttttgagccgtcgatcacgataattgcgcaacttatgtgcgagagtggttgtaccgcaatggagttgctgttgaaggtcattaataaagaagcaattccgcagaaaaaagttgtattgaaggacgaactaatcgtaagggcatcctgtggtgggtaa

SEQ ID NO: 233965 - DNA, 816 bp, Klebsiella pneumoniae
atgaaactaggttatgaaacaaatacttggggtggagttgtcggacatccgggcggtgtgacctcaatcaaggatgcctactatttggccaatggttccagcgaacaggccattcgcgatatagcagcggttggctataacggcttcgagatgttcgatggcaacctgatgcagtttcgagatgacaagcaggcgttccgtgacttgctgcagctaacatcgcagaccttcatcggtgtatataccggggccaatttcatttatccagatattctcgaagaagagctgctgaagttccgcaatgttgccgaattaactgccgaactgggaggtgagcattttgtcatcggtggaggagcaattcgaggtaccggtatccgacccgatgatcacaaattgctggccgacggcctgaatcaggctatgcagattgcagagcaagcgggacttgtcgccagttaccacccccatttgggcagtctggtcgaatcaccggagcaacttgatcagattatgactctgaccgatatccatctgtgcccggataccgcccatatcgaggcgggcggtggagaccccgccgacgtagtacgtcgatatggtaagcgtattaagtatatacatttcaaagacttgaaaaataatgagtttctgccgctgggtagcggcgtgcagaacttcgatgccattgtcagtgcgctgaaggagcacgattacgatggctggatcactgtagagctcgacagttatgcggatcccagggcgggtgcgcagatcagcaaagatttccttaagaagcacttcgacttcgtgtaa

SEQ ID NO: 233966 - DNA, 1152 bp, Klebsiella pneumoniae; identical to SEQ ID NO: 204202

SEQ ID NO: 233967 - DNA, 1170 bp, Klebsiella pneumoniae; identical to SEQ ID NO: 204201

SEQ ID NO: 233968 - DNA, 1500 bp, Klebsiella pneumoniae; identical to SEQ ID NO: 204200

SEQ ID NO: 233969 - DNA, 981 bp, Klebsiella pneumoniae; identical to SEQ ID NO: 204199

SEQ ID NO: 233970 - DNA, 1110 bp, Klebsiella pneumoniae
gtgttgcctgaattcgggcggaacgtcccagagattgaacgggtaaacactatgaaaacgattaaaggtcctgcaatttttctggcgcaattcgccggtgatgaggcgccattcaacagcttcgcgtcgatctgccgctgggcggctgatctgggtttcaaaggggttcaggtcccgagttgggacagccgcctgattgacctgaggctggcagccgagtccctcgattactgcgatgagttgaacggcgtggccgccgagcagggcgtgcagataaccgaactgtcgacgcacctgcaggggcaactggtggccgtacatccggcttatgacgaggccttcgacggctttgccgcgcccgaggtgcgcggcaatcccaaggcccgtgccaactgggccgccgaccagttgctgctggcggccaaggcgtcccgcaacttagggctgagctcccatgcgaccttttccggcgcgctggcctggccctatatctatccctggccgcagcgtccggcgggcctgatcgagaccgccttcgatgaactggcaaaacgctggcggccaattctcgatgccttcgacaatgctggtgtcgatctgtgttacgagattcatccgggggaggatctgcacgacggcgccagcttcgagatgttcttggacagggttgagcagcacccgcgttgtaatattctgttcgaccccagccatttcgtgttgcagtccatcgactacctggcattcatggatatctatcatgatcggatcaaaatggttcatgtcaaggatgctgaattcaatcccaatggacgcatgggggcctacggtggctaccagtcttgggtcgagcgcgccggccgcttccgttctctgggcgatggccaggtcgactttaaggggatattcgccaagctggcggccatggatttcgacggctgggcggtgctggagtgggaatgctgtctcaagcacccggaagtcggggcccgcgagggcgcagcgtttatcggcgaccatatcattcaggtcaccgatcgagcgtttgacgactttgccgatgccagcagcgacgaggcgatgaaccgcaagatgcttggaataggaggctga

SEQ ID NO: 233971 - DNA, 1161 bp, Klebsiella pneumoniae; identical to SEQ ID NO: 204197

SEQ ID NO: 233972 - DNA, 177 bp, Klebsiella pneumoniae; identical to SEQ ID NO: 204196

SEQ ID NO: 233973 - DNA, 1122 bp, Klebsiella pneumoniae
atgagtcagtggataaaaactaaacttggtgagattgtcattcttaattatggtaaagcattaaaggcacaggataggaatgctggctctatacctgtatatagttcaggtggattaactggttggcataacaaagcattaataaacgaacaaggaattattattggtcgtaaaggaactgttgggaaagcgtacttaacttatggaccattttggtgtattgatactgcttattatattttacctaacccttcgaaatatgattttgtttttttattctatttgttgaaaacattagggctggaagaactgaacgaagatagcgctgttcctggactaaacagggataccgcttatagtcaagagatcctattaccttcactgccagagcaaaaagccatcgcctctgtgctgtcctctcttgatgacaaaatagacttgcttcatcgccagaataaaactctggaatccatggccgaaaccctgtttaggcagtggtttattttagatagtactggtgtatcagttagtatagatcagataattgactttaatccaaagcgaactttaattaaaagccaagacgctacttatttggacatggctggactgagcactgttatttttcgtgcaaatggatattacagacgtccattttcttcaggaactaaatttactaaacgagataccttgctagccagaattaccccatgtttagaaaatgggaaagcggcctatattgattttttagacgacaatgaaactggatggggttctaccgaattcatagttatgcgtcctaaaaaagaaatccatccttttatctcatatatcatgtgccgaaacccggacttcaaagaatatgcagaaagctgtatggaaggttcaactggcagacaacgagttaacttggatcatcttaagaagttcaatgttaatctgccaacagaagcttcgctacgtataattaatgagctattagattcatttgaaagtaaacttattaacaactcaaaacaaattgatagtttagaaaaactccgcgataccttacttcccaaactgatgagcggtgaagtacgggttcagtatgcagaagaagcaatcgcatcagtagcataa

SEQ ID NO: 233974 - DNA, 3240 bp, Klebsiella pneumoniae
atggcaaagatgaccgaatccgatattgaagtaatggtaattgagcacctgcaagggctgggctatgagtatgtttacggcccggacattgaacccagtggcatcaatccgttacgtagctatcagcaggttatccttgaagataaggtgcgtattgctctacaacgcctgaatccgcaccttagtgaacagaagtgtgaggaagccctgaaacaggtgatgcagatcagcacacctgatctaatggcaaacaatctggcctttcatcgcctgttgaccgaagggatcaatatcgaagtcagtaaggatggtaatacacaaggagagctggcctgcctgatcgactttaacgatcccactaataatgaatttctggtcattaatcagctcaccatcaaagaaggcaatcatacccgccgacctgatcttattttattcatcaacggcctgccattagtcgttatcgaacttaaaaatgccgctgacgaaaatgctacggtaacaggtgcctataatcagattaaaacctatcagaaccaaatccccgttctgtttaactacaatgcttttaatgtgatatctgacgggctggaagccaaagcggggacggtttctgccgatttcagtcgttatatgacatggaaaaccgctaatggtaaaacacaagctaccagtacccaaccacagctcgaagttttattacagggattgcttaatcctgtaacgctgttggatgtgatccgccactttatcgtgtttgaagccagcaaacatgaagacagcaaagggattatcagtatccgtaccgttaaaaaaatggctgcttatcaccagtactacgcggttaatgcagcagtactttccactattcgtgcctcaggtgtaaatgcagattccccctctgccgaagtagcactgcgccagcagggacgtaacagtaaagttcttgttaatgcgcaaaaaaccggagatcgtaaagcgggggtcgtgtggcatacccagggttccggtaaatcgctttcgatggtgttttataccgggaagattgtactggcgctgaataatccaacagtggtagtgatcactgaccgtaacgatttggatgatcagctattcggtacgttttcttctgccactcagctacttcgtcagacaccaaaacaggccgacaaccgggaagaactcaaagaatatttgcgcgtagcctctggtggtgtggtgtttaccactattcaaaaattccagcctaatgatggcagcaatatctatgagttgttgtcagacagaaccaatattgtcgttatcgctgatgaagcccaccgttcacaatacggtttcagcgccaaagaagttgacgtgaaagacagtgaaggcaacgttacaggtaagcgcactgtttatggctttgccaaatatatgcgtgatgccttacctaatgcgacctatctcggctttaccggaacccccatagaaaaaacggacgtcaacacgcctgctgtttttggtaactatgttgatatctacgatatctcgcaggccgttgaagatggtgcaacagttcgtatcttttatgaaagccgtcttgccaaaattgccatcagtgatgaaggtcgtcagcttattgaagactttgatgatgagtttaacgaggacgaactgacgctcacgcaaaaagaacgttctaaatgggccagaatcgaaggtttgattggcagttcaaaacgtattaaagcgattgcggcggatatggttctgcactttgagcagcgcttaaaatccaatgccgatcatggtaagggcatgattgttaccatgtcccgccgtattgctgctgaactatataaagaaatcatagccttaaaacctgaatggcacagcgatgatttaaatgacggtataataaaagtcgtcatgacctcttctgctgctgacgggccagaaattgccaaacaccacaccacaaaaaaagaacgtcaggttctggctaaccgtatgaaggatgacgacgacaagctgaaactggtgatagtgcgtgatatgtggttaaccggcttcgacgctcccagcatgcatacgctgtatatcgacaaaccaatgaaaggccacaaccttatgcaggcaattgcccgtgtgaaccgtgtgtataaagataagataggcggtctggttgttgactatctgggcattgcctctgatttaaaagaagccctctccttttactctgatgcaggtggacgtggagatcctgctgaggttcaggaagaagctgtaacgctcatgcaggaaaagctggaaatcctggaaggcatgatgcatggatacgattacaaagcttactttgccgcaactacctcacaacgcctgacaattattcttgaatcagaaaaccatattttagggctggataacggtaaaggtaaaatgcgtttcctggctgcggttgcagccttgtcgcaggcatttgcattggcgacaccgcacgataaagcaatggaagcggcacccgaagtagcattcttccaggcagtaaaagccagactgaataaatttactgaaaactcagacggatcagaagaagaacacaatgacagtctggaagttcgggtaaaacagactatcgatcaggctctggttaccgataaagttgttgatatttttgacgctgctgggatacaaaagcctgatatttccgttctttctgaagaattccttcaggaaatgaaggattaccaacacagaaatattgctttggaaacgcttaaaaaactgctttctgacgagatcaaggttcgctcgaatcaaagtatcacccaaggcaaaaaactgattgatatgctgacctctgcaatcaatggctaccagaacaaggtactgaccgcagcggaggtaattgatgagctaatcaagcttgccaagactatccaggaatctgacagccttgccagccagttaaacctcagcgcttatgaatatgccttctattctgctgttgcagataacgacagtgctcgcgagttaatggaaaaggaaaaactacgagaactggcagtcgtacttacagaggctatccgcaacaatgtcagtcttgactggacagtgaaagaagcagcaagagcaaaaattcgcgtggtggtaaaacgtctgctcaaaaaatatggttatccacccgatatgtccttgctcgccacagagaccattttgaagcaggctgaacttttagctggagaattaggaaaatga

SEQ ID NO: 233975 - DNA, 1068 bp, Klebsiella pneumoniae; identical to SEQ ID NO: 138797

SEQ ID NO: 233976 - DNA, 186 bp, Klebsiella pneumoniae; identical to SEQ ID NO: 185169

SEQ ID NO: 233977 - DNA, 150 bp, Klebsiella pneumoniae
atgttaaatataagttttttgtgggcgatgaacagagaattaaagccggttattcaggcagggcaggaacaaccaccatggataatcggctcccggacatgtccgggcaaagaaatcgtagaactagcgcatgacagtaaggcggggtaa

SEQ ID NO: 233978 - DNA, 276 bp, Klebsiella pneumoniae
atgaaaaactggcgcaacgagctattcgcctggctgttgatgctcagcgggctgggcaccattctgctgctgatgggatccactttttatgtggtgatcgcccagagtctgggctggtttaacctcgaaggcgatagtcatttctctctagagtactggcgcaacatgctgcaggacgaggtactgcaaagcgccctgttctactccgtaaaagtatcactgctgggggcattcggttcggtaattttcgcgtatccactaaatagctgcgcctaa

SEQ ID NO: 233979 - DNA, 477 bp, Klebsiella pneumoniae
atggtcaggcaaaagtgtagcggtattaggcgcagctatttagatgatgtgtatggtgctcttgggtcttttataatcaaaattgcgtttacagatcttaatgtcacgagagatactgatggcttcatgaggttagaaattaaagagcttggattgtacgttagggatacctacgagtttgtgaatgatggtgatgatcaaccgttaggctattggggggagaatggtgtcatcaaaccaggagtaataagtgagctattgcaaaaagaatatattgatgacgatgactgcagatactttagagttactaactcatcttttgtgaggtaccgtgaaaaatataagaacgaaaataaaaccggagattttttcgtatactcgacggtgaaaaaaatccctacgaacattatcattcatttgaataagatagatatggaggaatatatttactggaaaggggtaaatataaatgcatag

SEQ ID NO: 233980 - DNA, 150 bp, Klebsiella pneumoniae
atgaccctgaaacatgcggtatttggaccacatgataaatttggtaatgccgccaaagtccgcatcaccctgcttatatacatcgccgtcgtgccgtactcgaccttcctagcctcaagtttcggagggaattggtattttaaacgttaa

SEQ ID NO: 233981 - DNA, 834 bp, Klebsiella pneumoniae
atggcggtttcatcaacgaccaccacaaaagagcgggagcatcaggaaaagaaggtcagtgttgatttcttccacattgatatgatcccggatgcgattgataaaatgaaatggcctgtggctgcaaagttaatgaggcattggtttgatatcaaaccttcatttacatatacggcgcaatccaaaaaaagtgctcaagatgctgacccgacaatattacccgaatcacaaattaactgtgacataattaaaatgtcttgggcaattcagaatgaacaggttaaaaatggaataagcgaactttcccgtatatggaaaagtgaaaaaggcattaagcggttgaagtttcaattgggtaagaaaggctcgcttgttgaagagggtattgcgttgagttattctgaaaatatcaaggagcttgatgcaaatgcccaagtcaacatcttaataattggtagcaagttcgatactgtgaatgaatggtatggtgctatggggaactctactttgaaagtatgcattcgtggaaaaacaagtaaaagtggaagtgagaatatatttactgtcgataaattagggtgttatctcaaagacacatatgattttgttgacgaaggcaagactccagaaccacttggcatttggagtaaaaacagaatattagataaaacagaatcagctttatatatgtcaacttatttatctggcgtttggggcgtattggcaagagattttactggttttgttctggttttcaacgcggactttagaaaatggcaggctaagcataacactggaggtgattttatagtgctttcagatgttttatggtag

SEQ ID NO: 233982 - DNA, 498 bp, Klebsiella pneumoniae
atgcccgatagaaaatcaccatctttatacgaaattcttactggcaactttacaggtgatcttcccctggaagttgtaaacgaagaagatcaggtcattctatcagtactggataacatccagtatattttgaacgcccgggccggtaccgtatcccatctatcagattatggtttgccggatatgaccaaaattcttcaaggtatgcccgggacagcccacgaactgatcgatacgctggcaggtgttctgctcaagtatgaaccccgtttgcagtcccttaatgtaactttactcgaacagcaagtgcccggggagttgcgctacgccatcgatgcggaactaagaggtatcggacttgtacggtatggcaccgagtttatgcccgaaggcaaagtgctggtcaggcatttgaaacagcagcaacatctggaaaaccatctgtttattcaacccattcacaggctgcggcctgactcagaccgtcacggacggtaa

SEQ ID NO: 233983 - DNA, 1224 bp, Klebsiella pneumoniae
atggcgcgaagaaaaaaagatgataatgttgcaactctcattttgatcattataggagcgatggcctgggggatttatgttgcggtaaaggcgttaatcaatcttaatgagcgattcattgaatccgtatcgaatccggcaggcgttattggtttgtttttcgggttactgatagccattgcgctgataatacgaattattatttatcgcggctttagaaaaaaagccactgacctggcaaaaaaggagcaagcctttgacgaaaccgtcagtagcgaagtggcttgcaagctgtatcaggaaaaacaacagcttgccgttcagtggacagaatttcacaatgccagaaataaagcctcccgtgcactgcagcgtattgtggattctgcgtataaattcaaagtcaaaacactactttccggcaccacggtaaataactggcaaagcaaatacgaccagctcaggaaggagagagacgcttacgcggctattagcgagaaaatcacctttctggaacttgaagataacgccgactgggaagctgtaaagcagcagtttctggataaggtcgccctgctggaaaaagcgcaggaagaaaaagagtatcaggctgagcttaagcgtcagattagggaagaaaaacagcgtcaggatgaactggaacagcagcagcgcgaagcggaagaagaggagcaacgccttgctgagcagcagcgtttactggaggaagctcttctcgccgctgaaggcacacaccgggaagagctggaaagacagcgtctggagctggagcagaaaatccaggacgtacatcagcagtatgaacgcgccaaatccatggcccagctcaccaggcaaggatatgtgtatatcatttcgaatatcggctccttcggtgaaaatgtcttcaaaattggtatgacccgacggctggagcctatggaacgagtaaaagaactaagtggggcggcggtaccttttgattttgacgtccatgctatgatttcctgcgacgatgcccccgcactggaaaaaacgctgcatgatcacctggaaaattatcgcattaataaaattaatctgcgcaaggagttttttcgggttgagcttcgtcggattattgatgaggtcgagcgccatcatggtcaggttgaatatattgccgacccggtcgcgttgcaatatctgcagagtctggaatatgcagaaagcgaagctgcataa

SEQ ID NO: 233984 - DNA, 705 bp, Klebsiella pneumoniae
atgaataccaatacaaaatttgatctatggttaatcagaataagttacatcgcccaagttggattgttttttttgacaaccttcacaatattttatacagtaatcccaatatatcaaaatgcaaacttacaggaatctatagcaaaaaaagaagttgaatacaaacaattaaaagagaaagaaataaatttatattcaaaattaagaaaggaatactctcgaaagtatgtaattgatgcgatctctaaatgttccccaactgaaatacttatgcgtcaaccctctgaagatgatttaaagaaaacgcatgatgttataatgaatgaactcaaaacaataatgaataaagatgtaactggttgctttgaagatactttctataacaatcagtacattaaggaattgagtgatagtgatcagcaagatattctacataaaatcaaaagcttgccgccttccattgctaaattacatgaaaaatacgaggcagattttaatgataatgccaagctattacttatcggaaaagaaagctcaacaagattaaaaaaagttgaggattttttaacagaaactgggaattatacagcaacacataaaaatgattttgagaactcatacatagagtctggagcatttgatttagttgtaaagtatgggtttgaactcaatgatctattttcaaaaaccataagatacaattaa

SEQ ID NO: 233985 - DNA, 849 bp, Klebsiella pneumoniae
atgtccaataaaattgatgtttttttgagcagagttagccacgtatcacagtttgtattggttgcttttgctatttttggctatttttatacagtaaggccaatttatcaaaaggaagttttgtcggaagacatagcaaaaaaagaggtggaattaagtaaattaaaaactgcaatgttaagctctcagaaatctatagagcaaaataaagcattgcgaaaagacctggagggcagcattgccaaacttgacttacaatataaggaatcagaagaaaagttaaactctataaaccatgaacttaaaaaaacattaaatgaactaaatcagcaaaagataatcgctaaaagagcagtcgatgcaaacaacaagaaccttgaatctgtttattgggagaatttcacgggtcttgttggagtagtttacctatccaagagtaccgattttgttaacaatactctaggtgacacaaaatcggcttataacacacctggtagtttatatttaaatccttatgatgcaattagtgaagcactaaaggatggcaaccataactttatatcaagttcagaaaacgtgcctgaaaatatccgccaaaaaatattaacaaagatccgttgcgccattgaaaaaaacaaagcaacattaacaacaaaacctattggatatgacgaaaagattagtgaattaataaaaacaataaagtcaacaaaatcacaaaacgatgaaaataaaataataaaaaattataatgcagaaagagaactgtcatcttatatcttccagataaataagcaatcaagggtccatgcaatggatttcttaaaagacattcaatatatagactaa

SEQ ID NO: 233986 - DNA, 552 bp, Klebsiella pneumoniae
atgatgacccgagccactcccgaccaggcgcttaccggttttcgaaatgccagtattctgtgggccggacatattgagagccgaaaaatcgttgaacaacaaatagaatctctcctcactgccacggagaaaccagcagattatgcccgacagctccaattacagcgggaacgtctggatgtgctgaaatggcaaattaactgtgctgcacgtgagtgtatttactcgcagcatttactgatggaggcctatacagaagacgctctcagcaattatatgcaggcgaacggagcggccctgacatctgcactggctccgtttcttaaggggcgcggagggctggaagttgcgtcccgtatgttacgcagtgccctggttcgccagctcgccataaccccgcctgaaattgcgggggattatcgtgtgattctggatgaatcgggtgtaataccggaccccgtgatggttcgtgactgccagagtacttacaccccggcacaacatctgcgctttcagcaacgcctggattacattaacgacatgcaggagtga

SEQ ID NO: 233987 - DNA, 744 bp, Klebsiella pneumoniae
atgaacaacaccgcagagaataacaacctttccacttttccggctgtcacgcagcgggcactggaaaccctgaacacagccagaaacgtatggcttgaagcacgccgtcagcagaaagcggcggcggataatattgcgacaatccgccagcgccgcgctgaaatggaagccacgacaaacgctttgaatgaggagtggcgcacgctgtttcgtgaaagtcagggcgttgtctcaaaagaaatgaaaaagctgcgcacggaaattgcgctgggacgtgaaacccttgaggattttgatgaattactggctgcgcatgaaaaggaagccgcttttttaccgcagaaagccgggaaattagccgggcagtatatcagcgcacataacacccttgtggaaattcgcgcaaagcaaatctgggaagacttcatgcagtcgcatggtaaggcgttaatccagacgctgagcctgctcaaaaccacaatggggcgggaagccagtgccgttgtgggtgtggtgaattcagttaatgacccggacacagtactgaaaaactttattcacaaacatatcaccagaccggatcttactaacgctgcgatgccggaacaggaccctgtgtttaaactggcaggtgttgcgccggattatgctgcccttgctgatttccgcaaacttccctctccggcggcccttcataaaatgaaggttcgtcaggaacgggctgagaaggagaaatcagtatga

SEQ ID NO: 233988 - DNA, 2673 bp, Klebsiella pneumoniae
atgacaacacagacggttacgcagatttcagccgccgcgcgggggaaatggcccgttattctgcagatgctgcgtattgatgtacctgaaaacggcaggcacggtccatgtccaaaatgtgggggcaaggatcgttttcgcctcgatgaccttgacgggcgcgggacgtggatttgcagccagtgcggcaatggtgacggtctggatctggttaagctcatgaccggttacggcgtcagaaaggccgcgcaggaggtggcgcaggtgcttaatgtgccggatgtgcaggaactgcccgttaagcccgccaggcaaaaagcccctaaacgcgatatgagccttaccgtggcggcgctgatgaaagagagccacacgggagaaagcccctatctgaccggaaaggggtttgccggatacccggcctccctgaccgggagcgtgcagcatatcagcggtaaggattttcctgccggttccctgctgttaccgctcaccaccaacgccggagccgtgaccggtgcgcagcttatcgccccgacgggtgaaaaaagcatactgcccggcagcacgatgaaaggcgcgtttgtggcgctcagcccgttaccgtctgaaccgccggtacaggtggtgattaccgaaggttacgccacggcactgacggtaagccagctcaccgccggatgcgtagtggctgccatatctgcgggcaacctgcccaacgtggcgcagtcgctgcgggcacgctggcctgaggtaaaaattatcatcgccggtgataacgattttcaggacgggggcgagaatcccggcagatcctttgctgaacgggcggcaaaagccgtcggcggctggatgacgctgccaccgggagagattaaggctgactggaatgatttccatcgggagcacggtattacccgtgcccgtgaagcctttcgtaacggtctggtgctgtgcggggagggccgcacgcagctgccgcacgggttccgtcttacccaggaatatctctggtatgaaaaacaggtacagcgcaacggtgagacggagatccagaacgtcaaaatatgcaatccgctgcgcgtgacggcaatcacctgcgatgccgatggcggtaacttcgggcgactgctggagtgggaagatacgtggggtgagcgccgccgctgggcgatgccgatggaaatgctgagcggcagcggtgaggagctgcgccgggtactgctggttaacgggctgtcctatatcagcaccaccggcgaggcccgcgcccgcctgatggaatatatatcgctgtgtaaaccggaacgccgcgtgacctgcgtcagccgtaccgggtggcatggtcaggtttacgtcctgcaggatgaggtcagcggtgaaggtgcggaaagtgtcattctccagaccacttccgtgcaggggcgcgatttccgcgtgtcgggcacaacggaggaatggcgggagcacgtatcccgctactgcaccggcaattcccgcgtggcgtttgccgtcagtctggcttttgctgcaccactgttacggctggttggtatggacggcggcggccaccacctcaagggggaatcgacggacggtaagaccaccaccatgaaagcggcaacctccgtctgcggcgggcctgactactggcagacgtggcgggcaaccggcaacgcgctggagggatgcgccagccgccgcaacgatgccgccatgatgctcgatgagatccgggaggtggacggacgcgaggctggcaatatcgcctacatgctggtaaacggtcagggcaagggccgtgccggtacggacggtgagctgcgcacccgcaagcagtggcggctgctgttcttttcaaccggcgagctgtcactgactgaacatgcggcaaaagccggggagcgtacctttgccgggatggaagtcaggatgatccagatccccagcgattccgggaagtttggcgtatttgaggagctacacggcttcgacagcggcaaagctctggcggaacatctggagtgggccacgtccagctactacggttcgccgttctgggagtggctgaaagccctgaccgctgaccttaacgggctgacggcacaggcaaagttactgatgaaggaatataccgccgccctgaccccgaaagatgcgggcaatcaggtgggccgggcagtgaaccgctttgcactggtggcgatggcgggcgagctggcaacccggctgggtatcaccggctggcctgagggtgaagcgctgcgggcaacccgcgtctgcctgaacgcatggctgaaagatcgcgggcacaccgccaaccaggaagatattgccgcactggagcaggtacgcagcttctttaccgcgaatcagtacagccgctttgctgactggcacgacgagcgtaaccgccccggcaatatggtgggctggcgcagggtggagaaaggcagtaccgcgcagggcacggaagctgtcaccacgttctacgtcatgccgtctggctggaaagaaatctgcaggggatttgactcgcgcaaggtggcacgtctgtgcgcggatcgtggatatctgctgccctccaccgatggcatgctgcagacaaacattcgcccgccagagatgaatccccgcaggctctatgtcttcaacagtgaggtgccgggttaa

SEQ ID NO: 233989 - DNA, 384 bp, Klebsiella pneumoniae
atgaaccagccgcaggtttccattttcccggcagaaatgactactgcgctttaccgacgggctattgcgtcggcatggcggcagaaaactctgaacgaaaccggcagcgatcagtatggtccgcacagcctgacggttgagcgtattgaaatggccattgcgctgcatatcgaatgcgcactgattaacgagtacggcgaagcacagggagccgctgctgcgctggcgctgctgactgacatgctggagccgtcactgctgaccgcgccgccggtactgaccgcgcgcggctgtgaagtgatggcggagctgtaccgcacgcttccggcggcctttgatgacttctgcagcacaggtgtggcgctgtatcagggggaagtatga

SEQ ID NO: 233990 - DNA, 285 bp, Klebsiella pneumoniae
atgaatatttcaaacgggcacaatagtgctcagggccacactttgcctgaaaaacacaataccggtgcttttgcctatggattgtcagaggacggtttcggaaagctgacccgcgcaagaaatgcctgcgacctgctccagcttctcttttctgaatacccgtctcaggtcggagcgctcgatacaggctgtgcgccgggcgtcgccgcgctgatggagtacctgcgggcagatttgacggatattgcgcacagctgcgcactgatagaaggaggtgccagatga

SEQ ID NO: 233991 - DNA, 582 bp, Klebsiella pneumoniae
atgacctgcttattcgcaccttccttagaatattgttcatttgaacgcgcttccagactattagaatgcgagattgaagatttattacacctatacgaaataggtacttttaatattgcattcaagtcggatggacttgcagttagatttaatgtcaacttcctcaataacaatcagacacttgaaactgatttaattcatcccgtattaactaatcaatcactagagatggagttatcgactatatggtatgggcagcatgaacgtggctggaccgtcacaatcatccgattaactgaagccccgccctccgtggcgctggttaatcctgaattcagctgcgaagtattgatacgtcatgacagcgataaccagctttcttcctgccctctggcatggtttaaacagcggtatacgcgcctgtttgatgcgccgctctttaaaccttcaccagctccggcaggcggtagtggctccggcccgctgacactgcatccgtctgtggtatttacccgctggcgggagcgcagcatacggcgttctgctgaacctgacgacagtcactattcaaaatttctctga

SEQ ID NO: 233992 - DNA, 441 bp, Klebsiella pneumoniae
atgaaaaaacaaaaccactcaaccctgacaagttacctctctaaaacaaaaaagaatacagatctctaccgtctttataaccctcacttctcagtattctgtaaaaatagcgctgaagatcatgttttttatcttaattatttttccagacatatggtgacggaaagaaacattctgaccatatttgctatccatacctttttctcttatggcatggacaaaaaagagaccataaaatcctttattcgcttccttaaagaggagaataacgacgctttttatcagtcattttcttttcgtggctgcaatatcatttacacaaacaaaaaaagagaagtgaaagagatctcatggttttccctttcacggatctatgacgagatcgttaagataaaagaatatgaatacaacaataatacttggctcaaaatggccgcttaa

SEQ ID NO: 233993 - DNA, 954 bp, Klebsiella pneumoniae
atgagtaactatacagaagataatttatttgacagcaaatctaaaaaagacgtccagaattgcattgctgcaggcattgacattaacacactaaatgaacgcggtgaaaacgcccttttcggttgcgacagtatcggggctttaaaagccatgattgaagcaggcatagagctgaaccatacagattgttatggtaataatgccctatttagcagaaaaagcccacgggcactggggctattgataaaatcaggtattaatgttcaccacaaaaataataaaggccagtcctgtcttcactggcagcactatgacatagattgtgcggaactcctcattaacgcgggcgttgatatccacagcactgataacgaaggacaaacgcttctttacaacctccacgatcataacatttttgattactgggttaataaagggtgtgacataaaccacagagattataatggcaaagcggtgctggagcttcctactgacgacgagtggtggatatatgatttcagtattaatgacctcaaacgccatgttgatagaatagacagcacgccagttttatttaaacatatttcatctgcggcgttgcctctgattgctttgcttcatgaaaaagggcgtaatatccttatcgctgaacactgtaccttcgcattatatgtcaaaaacatgaagtccttctttacctcactgaaaaaacataccgatatcagtcatgttcagttttataattgttatcatgacagacatattggtgcgtatactggtattgagacagtaaaatggcttattcgaaatggtatccgagtggacgacgatatactgagacagcgtgctgactctgataaagtttttgactatataaccggaagagagaaaacagactttctcaaaatcatgaaaccagaaatcatccatgcaccgaagagaaaaagaatgtga

SEQ ID NO: 233994 - DNA, 408 bp, Klebsiella pneumoniae
atgaataatgaaataaataatcataatgacataagaaggttatcaaggcgtggaaaattccatactgacaaacttccacctgatgaaatacgaagccactgtgtcagtgtcagattaaatgaagaagaattaactattctcgacagtaaaagaggccagtataaaaaaggggaatggctaagaatgtcttccctggataaactcccaccggttctgcccgaaataaatcgcgaagcatggattaaactcggcagcctttcccaggatttaaattacctgctgaatcatcttgacaagaaaagtcctgacagcgaactaacccgtacagaactgtttgccctgcgcagacaaatcaaaactcttcgggatcaccttattccctcaacatttctggagccagaccgatga

SEQ ID NO: 233995 - DNA, 1224 bp, Klebsiella pneumoniae
atgaaaggcatgcagaaaataaaaaggggtaaacagtttgcaggcgtggtgctttacagcctcaaatccggcccacaccacaacgttatgccttatgtcatcggtggtaatatgaccggaagttcggtggctgagcttatcagtgagtttgaaagttctaaacaattgcgtcaagatgtcaccaagcccgtctggcataattcacttcgcctgccaaatggagaaacactgtcagccagacagtgggcagcattcgctgacgattatatgacccggatggggttcactgaaacgcaccttcgctgttatatccttcacgacgatgccgacgggcagcatatccatatcattgcaagtcgcattaacatggtcggtggaaagctgtacctggggaaaaatgaaaatctcatcagcacccgcattatcagcgaactggagcgaatacacggactcactgaaacaacacctgcaaccagtagtcgccctcaggctaaaagaaacccctcacgcaatgagctgatgatggcagaacgaacagcagctccctgccctaagtctcagttgcagatcctgattgataatgtcttaacgcatcgtcccgatttactgacttttatcgacatgctggaacggaaaggtgtgacctgtaaacccaatatcgcgtcgaccggaaaaatgaatggattttcatttcagtaccagggcattgcctttaaagcatctcagcttggaaaaaagtatggctggtcttctctgcaaaagcagattgattttacaccagagcgactggcgttactgaaaaaagagcaacagcagactgcgtcagtgccagtgccagtgccagtgccagtgccagtgccagtgccatcatgcgagcctgaagaacaggttgcaatccgggaaacgattctggagaaaatccttcagcttgaagaaaaaattcgcctggaaagacaacaggaaacagtgagagtcattcaactcaggatcaaactgcacaatacagctcgtcagataccccgccagcgtcggctgtattcgtggcttgcattgcttggccatattgtggcacttctcaggcgcaggggtatgtcactgttacatgccactgcacatcctttccaccaaatcctgcacctgcatcttctgacaccctgtcattccatgacaacaaatctcaataaagaacaatcagttacaaagaaacaccatcctgcaccataa

SEQ ID NO: 233996 - DNA, 273 bp, Klebsiella pneumoniae
atggatcataaaacgattagctgtcccttctgctatacacaaagcccgcacggcgtgcggatttgcaaaggctgccatgcaaaagtcgcctacggtgagagtccggttagtgtggcattcctgtttcaattcgtggcattagctctcgcctggttagtattttcattgactggcagcactcctgtctcagtcattacgttttttgccagcgccattattcttatctgcattattaaaaagaaatatgcagacagagttgtttttatacggtga

SEQ ID NO: 233997 - DNA, 1578 bp, Klebsiella pneumoniae
gtgaacgacctgcccgcaccaaacgacagcctcccgctggtggatagcggtttttacgattttgataatctgacccttcatctcatgcagtgggtggacaatgaggcttatcgattacaggaggagggacagaaggccgatacaggatggttgaagacgcttgagaaattggtcatcgcaaaactgtatttcccggaagaagccatggatacgacgatcgtcagtgtggttaagtgttccctgaccaggaaggcgaaagtcatccaggaagacagtgcaaagaaagacaataaaaagaaagaagcggtgcccgatgacctcattaacagttttttcattcaggaactgcgaaagctcgacgcggagtggaggcaaggagggggtggggccggttttaaagaatttatcatggcgataacccgggataaccaacagcgcctcgatatacgcactgaagaaggcctggattttgcttttgagaaactgttgcccacacagccaccagctggctcctggccttcaaagtacccgctggcattcagccagcagctggccgtcaatgaaatctggaccagaaatcacactgaaccgggtatttttgctgtaaatggtcctccgggaacggggaagacaacactcctgcgtgatgtggtggccgcagtcgtcaccgatcgggcgagtaaactggttaaattcggagactctgcatttaaagccaaagacagcctcaaatacgatgacaggctgataccctattattcgcttcacccgtccctggcggggagtgccatcgtgattgcatcgtccaataacggagccgtggagaatatctcacttgagctccccgggatggaagcggtaccggaggatgtgtcagatcgcagcgattactttggcgggctggctaccgtaatacttaacaggcctgcctggggacttctggcggcaagactgggcaataaaagtaacagagagcagttcgttaacacactgtggtggggaaatctgcagaaaagtgaaaaaggcgatgaagcacctccggagaagttttcacccgaacgtggggaggggctgaaataccatctgaatttactgcgaccgccccggaaagtcagagagcctgcactgacctggactgaggctgtcacacgttttgaacaggcacaggcggtggaggaagccgagcgtcagcaactggtcaccagttcagggctaacgcataaaattgagtggctcgaagaacaacgaagagtgtgggaagaaaggaagcaaaccgcaacgcttcagattgaggaatgccggaacgcgctacagacgctctctgacagactcgccgctatggaaatgaccctgaccctgtccagtggagatcgggacgaactcaatcagcgcatccaccagcatgaaaaaaataaacccggccttctggctaatctcttttcgctggggaggatatcgaaggcatggtgggatcgttatcaacggctgacagacgaatcagattctttgcgggcgacgttgactcagcaacggcaggaactgcagctggcgcaatcagaaaatgaagtggtttactga

SEQ ID NO: 233998 - DNA, 3639 bp, Klebsiella pneumoniae; identical to SEQ ID NO: 134322

SEQ ID NO: 233999 - DNA, 807 bp, Klebsiella pneumoniae
atgtcttttgctaattcgaatataggacggagccaaaacaattcaaagtataaaaaggaagaaaattgctcattttgtaatggaagcagaattaaccaagaaacggcccaacttgatgttttaggatttacatttgatgattttttactatctcctatatctgaattatgtaatatcctgaaaaaaactataggtgactcagtattaattagagtgttgtcctcaataaataatatgggattgggatatttaaatttgtctcgttcaattcccagtctttctgggggggaaatacaaaaacttattttcagcaggcttttaacatctaatacaacaggtattctgattgttatcgatgaaatatcatcccaaattaaccccatcgattttgaagatatatttaaaaagctaaaaaaattatcagaaaaaaacacagtgattttagtagagcactcgcagtatttcatagatcttgctgatcagcaaatccatgttggtaaatacgcaggttcttctggtggggaaatttgtgaaaaagaaaaaattaagccgcaaaggaacctaaatcccaaaaacaatatatctgattactattattttgaaggacttaataaaaacaacatcattaatcaaaatatacgtatccctaaagagtgtgttactgttttttctggaatctctggatcggggaaatcatctttagctaaagctatttgtagtcttactgattcgatttatataagccaaaaattgtcttcatatacaggacgttctactgtcgcaacaatcacagatatgaatatatag

SEQ ID NO: 234000 - DNA, 1083 bp, Klebsiella pneumoniae
atgaataattttagactgcgacaaagtattggtatcgtcgtaaatgatgatacggtagagttttttaaatcaaatattagagaaagtataaaaataaaaattagctttccaaatatagttgaactcttaaagatgtttgatgggcaaacttctcttcaagaaattgtagcaaattatgcaggaatcgatattcaacaacttgaaaaattagctttgtttttgaatgaaaacaatataattatcgttcaagattgccaataccctgcagagcttgtcactgatcaatatagaatgatcaatacatttgaagactactgccataccaccagtgaggttttagaatgtataattaatcttaaaaagtcaaaagtaatgattgtaggtattggagcagtcggtagtaatgtggcaacgtatcttgctcattgcaatgttggttcgataatttttgtggatcacgataatgtagatataagtaatttacatcgtcagttttattttgaaggtgaaattaactctgataaaaatatggcgttactcaactctttgaaaaagatatctccagatattaagattgacattatcaatgacattatcgatgatggtttttttaaaagaaatattctaccctctgatatagatttgataataaactgcgctgatgaacctaatgtggattacaccagtaaaataatcgccctctttagtatgactaataatatcccacatatagttggcgggggatataatcttcatcaaacccttatcggtcagacaattattccatttaagtcagcatgctttaattgttttaacctatttttaggaaaaataaatagcaaagaccttgtcaatgtgaagaaattgcaccgggaaaaacgaaaattaggttcattttcaccattatcaggtctggctgcaagccttgcaagcttggacgctataaaattacttgccgggaaagtagagcacttacaacaagaaaataaaagggtcgaatttagtcttagaagtttatcttttaacgtccaagatgttccacgtgatcctgaatgtgactggtgtagaggaaagtatgaataa

SEQ ID NO: 234001 - DNA, 1125 bp, Klebsiella pneumoniae
atggactccagaaaatataaaataaaagaaactgtagatattttcatatcaaatgaagataatactgataatgtcaaactcacatttcatgtgatgacaacgcgtgatagattagaaataaaaaccaataaaaatgtcgctcgatttattgccagccttgatggtataaaaactataaatgatatagttactgagatggggtccctacgctcaaaagatgtcgataaactaattgcttttttactaaatcaacattttatttatgatgtaaataacatttgcgatattgaacctcgtttttcacgacaaattacattttgggacgattttgtccttgaacgacctggtgtagacactcaacatatcttggagagcaaaaaggttgttttattcgggtgtggagctgttggagccaaaattatagaaatacttgtccgcgctggtgttaaaaatatagttttggttgattataagtccctttcaaagtcaaatgcagcaaggcattgttattataactataagaaaataggaaaaccaaaggtagatgtcctgtcagaatttttgagttggatcgatagtagagtaataataacaaaacattttgaaaaacttatacctcctactaatctatcctctatcattcctgatgatacagatctgattattaatacttgtgatgagccttatataggtcatacttctttaaaacttggtcgatatgcacaagcaagagctattccgctgtatgtatcaggtggatttgacgcccatttaatgagttcaggagaattaatattccctccacatacaccctgtatagattgtgcccaaaatacgttttcaaaggcattaaaaggatggaagcctgtatatagcatagtcaataatcctcaactggatctttcaaaatctgtctatgataattatattcccggagggcctggtggattagcaatgatgaatggtttttcagctaacctaagttgcatgaaattaattcacttcctgttggatgattcagcattttcatatgtaaatagtcggtatgaataccttccaaacgaaggcaaaatgactaattttgaattggtaaaacaaagtggatgcaaaatctgtaatgaataa

SEQ ID NO: 234002 - DNA, 1410 bp, Klebsiella pneumoniae
atgacggctcatgcagcggagttttttacattggatgaagttaaccgactcaaaatcattcaggatgttgttgatcgccgtctgacaactcaaatggcagctcagcgactgggcatctcggatcgccagtgcagacgccttctgtcgcgttaccgtgaatctggcccacttggtatggctaatcgtcgtcgcgggaaacccagcaataatcatttgcctgatggtcttgcccggtatgcactcagtattatacgtgagcgctatacagactttgggccgactctggcgtgtgaaaagcttgcagaactgcacgatgtctacctgtccaaagagactgtccggtcgctcatggttaaagccggtctctgggtccctcgtaagcaacgtgcgccaaaaattcagcagccacgctatcgccgggcctgttgtggcgaactgatacagatagatggctgtgaccaccattggttcgagaaccgtgctccagcctgtaccgtgctggtttacgttgatgatgcaacgagccgactgatgcagctccgctttgtaaaatcggaatcaacattcacctattttgaggccacacgaggctacctggaaaaacatggtaaaccgctggcgttatacagcgacaaagccagtgtattcagaataaacaacaaaaatgccactggtggcgatggctttacccagtttgggcgtgcgatgcatgaactgaatatccagactatctgcgcgaataccagctctgccaaaggccgcgtggaacgcgctcatctgacgcttcaggaccgactggtaaaagaactccggcttaggggaatttcttctgttgacgcagccaatgagtatgctgatgagtttatggatgattataaccggcgctttgccaaagctccccgacatgactttgatgtgcatcggccacttgaacataatgatgatctggctgcctttttcacatggcgggaaccgcgccgcgtttcgaaatctctgacggttcagtatgacaaagtgctctatcttattgaagacagtgaaataagtcgcaaagcaatcgggaaatatatagaggtctggcactatccggatggcctaaaagaactcaggcttaacggcgtagctcttccctactccacttatgatcgcctgtcggaaatcgaccagggagctatcgtggacaacaagcggctcggacgtacactggaatatatcaaactggttcaggacaaacgcgacaataaccgttctcaggcaatacctgctggcgatgggccttcacggcggcgcaggaaaccaactgataagaaatcccagcgatcactgaacggcgacgatatgctggaagctttgaaagttttacagagtcgttccgatgaaatattcggttctaatactcaaaaaacatag

SEQ ID NO: 234003 - DNA, 519 bp, Klebsiella pneumoniae
atgcgaatgttgactgttgttgattatgatgagatgtggcctacattatttgagaacgaacgttatctattgcagatggcgcttggtaaagtgatatcccagattcaccatattggtagcacctctgtgccaggactatcagctaaaccagtgatagatatattaatcgaagttactaatcttgaggaactggacagactgaatcaggcaatggagcgtgccggatatactgtgcgtggtgaaaatggcatttcaaatcgtaggtacttcacaaaaggtggagatcagcgcagtcatcacattcatgcttttaccactggggatgctcaaataataaaacatctggcatttcgtgattatctgattaaaaacaataatatagcaaatcagtacgctttaatgaaaaaaaacgcggtgcttttatgtgaaaatgatacccaccgatacagcatttataaagcagatttcattcgaaaacatcttcgtatggcgcttattgatgcggggcatctgagctaa

SEQ ID NO: 234004 - DNA, 423 bp, Klebsiella pneumoniae
atgacactacccaaaggcatggtgcaggcgatttataatgataccgggatcagtcagtatcagggaaaccctctcattgaggctttgccgcctatcctggaccggcgtcagctaaaggacgggttgtcgggtcaaattatgtttcgcccaactgacgtttatcttgatggccagacccgtgttcatgtcatatctcaattactcgacaattttttccagccgctatcccgtcacattgagctggagtcaaaattatcggtcatgcttcgacaagggtatgtcggaagaaatctggcaacaggtgaactgaatgcccacatccagaatggttatgagcgtgtcatgcagggggggttggctgttttccggttcgagcatgtggaatccaccgctaaggaaggtgcgaacaagttcctgatatga

SEQ ID NO: 234005 - DNA, 2076 bp, Klebsiella pneumoniae
atgttgcgaatcaatgatgtcgtgatatttggggaggctcggtatcgtattcttgatgtctcagatattcgatatacatggattaatatcgattccgacaaagcatttcctgaacgggtttctctggcagagatggaagacttcatcctttctgagacgttaaaaaaaattgatgatccctattcgcatcttgctgctcagttcccggaacacggctcagtagcacagcaaatccgggacaagcgtatggccgttattgagcctttaatacaccaaccggatatctattatcgcagcggtcgaggcgcactggttcagcaggttgttactgaatctggaacggctaaaaaaacaatatatgcctatcttcgccaatattggcagcggggttgcactccgaacgcgcttttgccggactacgataaatcaggcgggcgaggaaagaaacgtacagcttcaggaaaaaaattaggccgtccgagaagtatagcgccaggtacgggcgcaattgtagatactagtgttgaacgcatgtttcgcattgtgcttgatcgacactatctgacggagaagaatcattctctaccctatgctcatcgacgtttcgaggacatgtttgaaacagctcatcccgatgtaccgaaagaaaactttccgacagttgctcaactacgctatttctacgagcgggaatatgtccggcctgaacgtatccggctgagagctaataaaatcgaatatcaaaaggacatcaggccgttacaaggaacagccacaagcggagttcacggccccggtgcacgctacgagatcgacgcgactattgctgatatctatctgctttctgccgacagacaaaagattattggccgaccaaccttgtacgtggttgtcgatgtctatagcagattgattgctggtttctatgtgggacttgaaaatccctcctatgtgactgcgatgttggcattggtgaacgccatgatcgataaatcttcgttatgccagtctttcggttatgacatagagtctgaagattggccgtcgattgggctgccggacgccattttggctgatcgcggtgagttgctgggtcatcaaattgaatatctggagcaggcctttggtgttcggattgaaaatacaccaccttatcgtggggatgcgaagggtatcgttgagcgacattttcgtaccattcaagcggacttcaaaccgtttgcaccaggagtggttgctggaaccaccattaaaaagcggggcgggaaagattatcggttggatgcaacacttacattggacgatttcactaaaataattatcggttctatcctgcatcgcaaccagagttcggtattggtcaagtatgaccgcgatccggatatgccagatacactcgcacctgtaccgattaatatttggcaatggggtattcaaaatcgtagtggacggctgcgtaacacatcggagtcggcgttgaagttggcattattgcctcgtcaaaaagtaacgctttccgattacggcattcaatgctttggtgccttttatacctgtagggagctgctggcgtctggctggctccatagaaccgggcaacagcgacctggcccctttatggctacgtatgacccctcggtagccgacatcatttatgtcttcccagatgcaacaaaatcaggttattgggagtgctctctaaccgaccgctcaagggaatttaggggccggtcgatgtgggagttatgggacagccagcagcaacaacgaaaatcaacagcggcagctaaattgaaagagagggaaagcaaaagatcactggaaaatgtgattcaggaaaccatccaaaacgcggaaaagctacgtccttccaactttggtgaatcaaaaacagagactttggcaggcatcaaccaaaaccgacgggaagcacgcgagcaggaacgccataaacgtcgtgaagattgcaaacctactgagccaaagcccaaagcggatgtcaggtatttgattgatcagcccgaagacgccgcattccctgattttctggatgacctgtttggagatgatgaatga

SEQ ID NO: 234006 - DNA, 498 bp, Klebsiella pneumoniae
atgtccacggattttctggtggacaccaataagcctgagcttcccagaatggcgattcaggtaaaaacctcttcagatctttcaaatcctagaacaatcgaaaaactggaacttgaacggcgttattgggcgttgaaggaagtgccctggtatttgctgacagaaaaacaaattcccaagaccgtcaccaaaaatattgcctggctgtatccagcgcaattggttctggatgggatcgaagatactctgcatatggcctccctttatctgagcttctttataaatcatccgactttgctgatttctcaggttgcaatgatgcttgatcaagcctattcactctctccaggcgaatccctgcaaaaaattcgttcgctgttagccttgagggttttcttatttgatatcagaaggccttggtcaacactgactgtgggggagttacaagcatcttcagacattgattcattgaggaattattatgttgcgaatcaatga

SEQ ID NO: 234007 - DNA, 729 bp, Klebsiella pneumoniae
atgttgccagatgctgtaagagacttcgtttttgatcaaaccagaagtgcggctggtcaagctgtattctcatcgacagtgactaattttatgctggctttgaacgtaatcggatggatatatacagcatatcaaataactaaaatgttattagagatgctattggcatgtgaccaaaaagaaatggaagcgtcaattcacaaaaaccaaggtgcatgtttcgttattgataccgatcgttgtgttaaatatctcaacgttggtttcactaagaagtgcattaagaaagcaaccgacatgtgctgttataattctttattatcaagagtaataatgcaacaggcatatccacagttaggaattaatccagtagaaagtggttgtgtgggattaactatctcacaggtgcagcaacttgactgggatcaaatagatatgactgaatatattgaatcagcagttgtagcgggagaagtccctgatgaatacgcggcattcacagaaaactctgtagccaatatggggccttataaaaatgataatgctcagttaccctctgagcgagctttagattcaatgggcggtagtgtcaatatgacaaaagcaagagaggagaatgtacaggcacttaaagcagagaatgtcgactgttcatatctaccaagacctgctatatgtgaagtagggtctatatattcggaccctacgacaggaaatgtaataaactaa

SEQ ID NO: 234008 - DNA, 663 bp, Klebsiella pneumoniae
atgcttacccagaaaattgttacagcagtatctgatgcgatatacctccggcgcttgcccccaggtacaaagctcaatgagcgtgaaatagcggatttgtttgaagtgagcaggactgttgttcgccaagcattgatccggttatcacaagagcacctggtggaaatctcaccaaagcggtcttcatcagtaacatgcccgagcttcgacgatgcttatcagctctatcaaatgttgttggtgttagagagtggggtgattgatcagttgacgaaaaccatcacccgagaggaactggatctattgcgcgcccacacagtcaaagagcgaattgcgcatgaaaacaacgatgatgatctcggcgacgaactgggcaggggttttcacactcttcttatttcattcatgaagaatgaaatgcttaacaaaatccactcacaacttcgtcgtcaggaagcattgataaatgccctatatcgttcaggcttcgattactgccaactacgcgatgagcacgctagactcgtggactgtatcgatcggcgtgatgctgattcggctaaggacttacttgcttctcactacaatcttgtaattaaaggttacaagttcaatatgtctgcgcctccagacattgatcttaaaattgctcttggcctgtga

SEQ ID NO: 234009 - DNA, 1350 bp, Klebsiella pneumoniae
atgaacaaagctttaccttcgaggggtttacgatttcttccgacattcctgctggcatgccagcatgtaatggtcatgtatgcgggtgcagttgccattccgcttgtactcggtgcagcactgggcctatcgaaaagtgatattgcgtttctaattaatgcagacttatttgcttgcgggattgtgacaatcatccagtcactcggtataggtcccgtaggtatccgaatgcctgtgatgatgggcgtcaccttcaccgctattgggccgatgattgctatcggatccgacccaaacgcggggctatcgagcatctttggtgccactattgctgcagggttatttggcctagcaattgccccaatcgtcggaaagttgctgcgcttctttccaccagtggtgacaggtacagagattgtcgctgttgggttgtcactgatgtccgtcgcagcagcttggtctgcgggagggtttggtaatccggagttcggtcgccctctttacctggcgattgcttgctcagtactcgtctgcattctcctagtagttcggtacgccaagggcttcattagcaacatttctgttcttcttggtttgatttttggctttgctctttcagcttcggccggactggtcagcttagaaggcgttggcgaagcaccggttttcggtttcatcatgccattccattttggtgtccccacattcgatctctggccaatcgtagccatgtgcatcgtgatgttagtcacttttatcgagtctaccggcatgttcatcgctcttggtgaagtcgtagatcaaacggtagatgaaaacaaactgactcgaggattccgagctgatgctttaggaacgacggtaggtggggtctttaatactttcccatatacgtcatatgcacaaaacataggattagtaggcattaccggggttcgtagcccttgggtatgtgtattcgccggcgggattcttattgtccttggcctgttccctaagatcgcatatttagtggcatccattcctcccttcgtattgggcggagcaggcatcgtaatgtttggcatggttaccgctaatggcatgaaatcgcttagccgtgttgatcttaaaaaggccagcaatctctacatcatcgcaattagtctagggattggaatgctacccgtcgtttcccctaacttctttagcaaattccctacttcattagcccccattttagaaagtcctattttgctgaccgcaataattgcgactgctcttaatttgttgttcaacgggaccggatctgaagttaaaaaacaaaacaccactactaataaagaagtaattgctcaggaatcaaattaa

SEQ ID NO: 234010 - DNA, 744 bp, Klebsiella pneumoniae; identical to SEQ ID NO: 134321

SEQ ID NO: 234011 - DNA, 1530 bp, Klebsiella pneumoniae; identical to SEQ ID NO: 134320

SEQ ID NO: 234012 - DNA, 204 bp, Klebsiella pneumoniae
gtgaccgccccgctggcgggcaccatctggaaggtgctggccgcggaaggccagacggtggccgcaggcgaggtgctgctgattctggaagccatgaagatggaaaccgaaatccgtgccgcgcaggccgggaccgtgcgcggtatcgcggtgaaagccggcgacgcggtggcggtcggcgacaccctgatgactctggcgtaa

SEQ ID NO: 234013 - DNA, 879 bp, Klebsiella pneumoniae
atgagcgccacctatggccacccggccaccgaggcgctggtcgccaccctcgccggcacgcaatatgacaccgggctggatatccacaggctggagagcatcgccgcctactttcgcgaggtgcgcaaaaaataccacgccttcgaaggccagctgaagggcaccgacagccgtatcctcgtcgcccaggtgccgggcgggatgctcaccaaccttgaaggccagctgaagcagcagagcgccgcccaccgtctggatgaggtgctggcggaaatcccccgcgtgcgcgaggacctcggcttcatcccgctggtgaccccgacctcgcagattgtcggcacccaggcggtgctcaacgtgctgggcggcgagcgctacaaaaccattgcgaaggagactgccggtatcctgaagggcgagtacggccgcaccccggccccggtgaacgccgccctgcaggcgcgggtgctcgacggcgccgacccggtgacctgccgcccggcggatttactcaagccggagctggcgcagctggaagcggatgtgaaacgccaggcacaggagaagggcatcacgcttgccgaaaacgccatcgacgacgtgctcaccgtggcgctgttcccgcagcccggcctgaagttcctcgaaaaccgccacaacccggcggcctttgagccggtgccgcaggcggaagccgcgcagccagtggcaaaagcagaaaaacctgccgcctccggcgtctacaccgtggaggtggaaggcaaagcctttgtggtcaaagtcagcgacggcggtgacgtcagccagctgacggcggctgctcctgccctgcctctgcacccgccgctgccgccccggccggcgccggcaccccggtga

SEQ ID NO: 234014 - DNA, 825 bp, Klebsiella pneumoniae
atgcacactcaggcagagaataaaaaatcactggctgaaaacagtaacaccggagagtttaaatttggtggctatgctcgttcggggatcataactaatggaacaggttctgctacgcagatggggccttatctaacccccgcaggtggctccggtggagctgtagggcgtctcggtaacgaacaaaacacctatgtcgaagccaatcttgaatatcttaaaacctatgataatggtgcaaaaatgcgttatcggaccaagattgccgatggccagagaaactataacgactggacatctgacagtagtgaactgaacgttcgtgaactgtttgttgaaatgtcggatctgccgaccttctctgattatgcgcccatgaagaatgccactatctgggcaggtaaacgctttgatcgggataattttgatattcactggctggactcggatattattttcctcgggggtaccggcggaggagtttatgatgtacagtggaacgattcatttaaaagtaatttctcattatacggccgaaactttgccgatattgatgatgactcgaacgaagcgtttaataacaccactggcacagaggactcttatattcagaactatatcctgaccactaataaccgcattggtcctctgcagattatggtcagcgggctgagatcgaaggataataataagcgtatcaatgatggcattgatgacgcccacgccgcgaaatatggtgtccatagcattctggcgttacacaatgatagtttttatggcctgcgtgaaggctcctcgaaaactgcgatcggctttgttgaataa

SEQ ID NO: 234015 - DNA, 453 bp, Klebsiella pneumoniae
atgaaactaggttatgaaacaaatacttggggtggagttgtcggacatccgggcggtgtgacctcaatcaaggatgcctactatttggccaatggttccagcgaacaggccattcgcgatatagcagcggttggctataacggcttcgagatgttcgatggcaacctgatgcagtttcgagatgacaagcaggcgttccgtgacttgctgcagctaacatcgcagaccttcatcggtgtatataccggggccaatttgccgttttcgcagcaagtgatgagatggctattggcgccatcaaggctgctcgtaaggctggtcttgatgtgcctgaagctcttgcggtcgtgggtatggataacatcaagttcgcttccatttttgagccgtcgatcacgacaattgcgcaacctatgtgcgagattggttgtaccgcaatggagttgctgttga

SEQ ID NO: 234016 - DNA, 315 bp, Klebsiella pneumoniae
atggataggttccttgcgctggaggtgggttcaactgccgttttcgcagcaagtgatgagatggctattcgcgccatcaagccggctcgcaaggctggtcttgatgtgcttaaagatcttgcggtcgtgggtacggataacatcaagttcgcttccatttttgagccgtcgatcacgataattgcgcaacttatgtgcgagagtggttgtaccgcaatggagttgctgttgaaggtcattaataaagaagtaattccgcagaaaaaagttgtattgaaggacgaactaatcgtaagggcatcctgtggtgggtaa

SEQ ID NO: 234017 - DNA, 1149 bp, Klebsiella pneumoniae
atgaattaccgctttaatggtaaacaagctacgttagcattaggggtttacccagatgttccgcttgcaacagcgcgaaagcgtcgtgacgaagccagacaactactggctgatggccgtgacccgcgcgaagcaaaaaggtcagaaaaggacgaactgacttcccccacattcgagaaagtagccagagagtggcacagtggaacagtgggacatcctgaatggaaagaaattacccgcgccaaaattctacgggaaatggaaaaccatctgttaccggctataggttcaaagcccattgatacgctcaaaacccgtgaccttcttccaatgttgattgatatgaccaatcagggcattggtgcgaccacaggacgtgttaaaaccactatgggaagtatctttcgttatgccgtccaacgtgggagcgtcgattacaatccagcccatgatctgaaaggcgcgattaccaatcccaaagtacggcatcgccctgccctaccgctcgaacgtttacctgagctgatgacaagagcggtaaattacaccggcagaccattaacccgactggcggttctcttttccttacacacgttcgtgcgttccagcgaactgcgccatgccaggtgggaagagatcgacattgaaaacggtctttggacaataccagggcagcgggaaaagatcgatggggtaaaatactcagatcgtggtgccaagatgggcgcggtacattacgtcccgctttccacccaggctattaagctactggaagatatccaaaagatcagtggtgaatatttgcttatattccctggtgacagcaatccttacaagccaatgagtgagaacacagtaaataaggcactgcgaacgatgggttacgatactcaggctgatgtatgcctgcatggcttccgggcaatggcctgttctgctctgactgaatcaggactttggtcacgtgatgcggttgagcggcaaatgagccatcaggaaagaaatgaagtgcgggcagcatatgtccatcttgcgcagcacatgcaagaacgccgcagaatgatgcaatggtggtctaattatctggaactaaataaggacgaatttcatgctccttatgacttatcagatattaacattatcaattaa

SEQ ID NO: 234018 - DNA, 249 bp, Klebsiella pneumoniae
atgactgaatataatacggccttcaatgaagtagacttgcttatgaatgagatgcttgaaaaattaaatatatcattaaatgaaacgaatttatatccaactgatgatatgtttcgggtaattgtgcaagagattgatgttgaaaatttaaaaatattatcttttatttataacgaaggatctcaagaggttatagacaatatcactcccgtaataaaagaatcatgtactggtggggtgataatttag

SEQ ID NO: 234019 - DNA, 258 bp, Klebsiella pneumoniae
atgagtaatacaataaccttatcctatacaaatgattttaaaccagtcaataatcatatcccccctgctcaatctttgcgaatacattgtgtcagtgttcgatttaataaagaagaattggctattctcaataaaaacagaggtgacaaaagcaaaggcgaatggcttcgattaacctctttgataggcttcctcctgtcgttcctgctatcaatgttgaagcttggaaatcacagtctaacatatcccaaaagctga

SEQ ID NO: 234020 - DNA, 708 bp, Klebsiella pneumoniae
atgccgatcatagcaccaattccccgtgacgaacgacgcctgatgcagaaagctatccataaaacgcgtgataaaaattatgcccgcagactgaccgccatgctgatgttgcaccggggcgagcgcgtcagtcatgtggccagaacactctgctgtgcccgctcatcgattggtcgctggattaactggttcactctgtctggtgctgaaggcctgaagtcattaccgtcaggacgtggcaggcgctggccgttcgaacatatttgcgcattgctgcgtgagcttgtgaagcattctcccggcgatttcggttatcagcgttcccgctggagtaccgaactgctggcgataaaaatccgtgatgtcaccggttgtccgctacatgcctcaaccatccggagatggttacctgctgccgggctggtatggcgcagagcagcgccgacactgcgtatccgtgacccacacaaagaagaaaaaatggttgctatccatgaagcactggcgaaatgcagtgcggaaaatcccgtgttttacgaagatgaagtggatattcatctcaacccgaaaatcggtgctgactggcagttacgcgggcagcaaaaacgtgttgtcacaccgggccagaatgaaaagtactatcttgccggtgcgctgcacagcggtacgggaaaagtcagctacgtaggtggaaacagtaaatgttaa

SEQ ID NO: 234021 - DNA, 330 bp, Klebsiella pneumoniae
atggtgcatcaccgcgtccagctgacggcttatctggaaatccagctcggcgatatggtggtcgatcagcgttttgtcgagcttttccacccgctggccggactgacggatgcgttccataaacacctgcatcgccgcggtgagacgctccgccgccggcgcctcggagagcgcggcatcgtccagaaagtcgttgatatccccgaggcgagacgccggggcgagattaattttttcaaacagcgaggcgtaaacgccctcgcccgccctgttttcctgcagcgtggtttgcccctgaacaggggcgttttctgtggtaacagacattag

SEQ ID NO: 234022 - DNA, 303 bp, Klebsiella pneumoniae; identical to SEQ ID NO: 96991

SEQ ID NO: 234023 - DNA, 720 bp, Klebsiella pneumoniae
atggccgatatctttgaggagaattaccgctgttacggctaccggcgccttcacgcgatgcttcgcagtaacaacagagttatttctgaaaaggttgtccgcagactgatggcagaagagcagctcgttgttaagcgcaccaggcgacgacgatacaactcttactgtggcgaaatcggcccggcaccggaaaatttactcgcccgggattttagttcctgcaggccaaatgagaagtggctgaccgatattacggagttccagcttccggctggaaaagtctatctgtcgccggttatcgactgctttgatggcctggttgtaagctggtcgataggaacacgcccggacgcgacgctggtgaatacgatgctcgatgacgcactcgatacgctcaacgaacatgataaaccagtgatacacagcgatcgtggtggccattaccggtggccgggctggctcgagcgtatcaacacctccggacttataaggtccatgtcgcgcaaaggatgctcgtcggataatgctgcgtgtgaaggcttcttcgggcgtatcaaaaacgaaatgttctatggcagagactgggcgggtatcacgctggaaaaatttatctgcttcctggacaagtacatacgctggtataacgagaaacgtatcaagctatcattaggtgcaatgagtcctgtgaagtaccggcagcatcttgggatcacaacataa

SEQ ID NO: 234024 - DNA, 552 bp, Klebsiella pneumoniae
atggctacaatacataaagcactgggcgaatgcagcgcagaacacccggtcttttatgaggatgaagtggatattcacctcaatcccaaaattggcgctgactggcagttgcgcgggcatcaaaaacgcgttgtcacaccgggtcagaatgaaaagtactatcttgccggagcgctgcacagcggtacgggaaaagtcagctacgttggtggaaacagtaaaggttcatccttatttatcagcctgttaaaacatctgaaggcgacataccggcgggcaaaaacgattacgctcattgtcgataactacatcatccacaaaagccgtgaaacgttgcgctggctaaaagcaaacccgaagttcagggtaatttaccagccagtttactcgccgtgggtgaaccacattgagcggttatggcaggcacttcatgacacgataacccgtaatcatcagtgccgctcaatgtggcagttactgaaaaagatccgctattttatggaaaccgccagcccattccccggaggaaaacatggtcaggcaaaagtgtag

SEQ ID NO: 234025 - DNA, 372 bp, Klebsiella pneumoniae; identical to SEQ ID NO: 104932

SEQ ID NO: 234026 - DNA, 270 bp, Klebsiella pneumoniae
gtgtgtgcagactggcacatcgcagaacaacccgggaagctgaagtccctgaaaaagcaccctcgtatcaataagatcaaaatccgcaccgagtatctgaaggccagcctccgcgccaaagtcgagcatccgttccgaatcatcaagttccagttcggctttgtgaaagcccgctaccgtggtctgaagaaaaatgacggcaaactggcgatgctgcttgctctgtcaaacctcgtgcgcgtggatcagatgttgcgagcacggggttaa

SEQ ID NO: 234027 - DNA, 744 bp, Klebsiella pneumoniae
atgaaagagcgcgggatgattttcaactctgaaatggtacgggccatcctcgacggtcggaagacgcagaccaggcggattatgaaggtacagccggaatccaaccagcttggcttgctgcttatcactgactcaaccaagcacagtgacattggcaaataccattgggcggaatctaacgctactggtaaccatgtgcgttcaaagcttttctcatccccgttcggcgccgtcggcgaccgcatctgggtgcgcgaaacttggggcgttgtcagtcacgcctttagtgacgatggcttgatgattgactgggttcctgatcgccccacgactgccattcacgaaatgccgtttggcaatggctattactctggctacgccatttatgcagttgatggtgattttacctggggtgatgacgatggttatgaagatggccgttcgtgctggaaaccttccattcatatgccgagagcagccagccgcattcttctggaaatcaccaacgtgcgggtggagcggctgaacgctatcagcgaagaggatgcgcgagcagaaggcattattgacggtggctgtcttaattgcggggaacctgagccatgcggatgcgccaatccagagcctgacgctaccgatgcttttgcctacctgtggcaatcaatctacgggcaggataactggaatgctaatccctgggtttgggttatcgagttcaagcgcgttgaaggcggtgcagcatga

SEQ ID NO: 234028 - DNA, 351 bp, Klebsiella pneumoniae
atgagccgattaaccgcaatcatcagcgctgtagtcatcctgctgctttcctgctttttctcgtggcgttctggctggaattctcacgctgaccatatcaacgccctcgcggcgaagaggaaagagaaagccgaaaagactatccagccagttgaggaaaaggccgctgccgctacagaagagggcaaggtcatctaccgaaccataacccgcgacgtggtgaaatatgtccagtctccgaatcgtactgtgtgccggtttgacgatgatgctgtgcagttgcgccagcgagctatcgacgctgccaacgccatccccggatttgatgacggcgccgtgcaaagcaagtga

SEQ ID NO: 234029 - DNA, 561 bp, Klebsiella pneumoniae
atggagtttgaaggctttcacggcacagatttcaaaaatcgtgattctattctgtgcaacaatttttctgtgagcgcaaaggatgacgaatggctaggtacaggtgcctactttttcatcgatggtattagtgaccctttggtcgatgccagaaactgggctaaggttcagtcttacgactcagaaactcgtgggaaaaaataccatcagtatgcggtcataaaagctacgatcaaagtagatatggttctgcggttagatgagcgagaaggacagatcgcttacaatgtcttcagaaactatctcattgataagatgaagcgtgaaagggtaaggcctaaagttggtgccattcgtaacgattgcgaggtatgcaatcacatactcgaaaatactgaatttgaagcgattattaacaacgaatttataaagctcgactcttggtcaaggcgtaacagatactcttcacgcgtaccgacatgtaaaattataagcgtgaaggaacctaagtcttcgattgatgtcaatgctttacaggtagtggagaggggtaaggtatga

SEQ ID NO: 234030 - DNA, 246 bp, Klebsiella pneumoniae
atgaagacacaaatgcagattgttcaagaagctatcgctcggctagagcagatgagtcgtgaagaatttgtccaaacgctggtctccgcaggcttggctgatccagaacctgcccaaaaccaacatcagctgtttttccgctcggtgtccgttgtagagattgttgaagtcagccgtagcgcctctgccaaagatgtcaatataagtaaaaatggcactgaaaacgcattgtcgtttgcattttaa

SEQ ID NO: 234031 - DNA, 225 bp, Klebsiella pneumoniae
atgaaatttgtaaagataatgatcgtcgccagtgctttttatttaacatttgctcatgcaagagagatacatcaggctgttgatgagccggcagccccttataatttgcgctgggggatgagttacgatgaagccagaaacacgcctttatattctcttgaggtatcagatatcaattatgccggaaaagacccggatctgattatctcaacgctgactccctag

SEQ ID NO: 234032 - DNA, 1215 bp, Klebsiella pneumoniae
atgaaaaataaatacatccctactgcggcagggctgtatctcaactacctgatccacggtatgggggtgctgttaatcaccctcaacatggcccatcttcaggaacagtggggaacagacaaagccggcgtatcgatcgttatatcttcgttaggtattggtaagttagcgaccatcgtgaccggatttctctcggatcgcttcggtcgcaagccctttatctatcttgggatcctgagttacctgatctttttcgtcggcatcctgctgaccaaaaatatctatctggcttacgtgttcggcattatggcgggcctggcgaacagcttcctcgactccggtacctatccggcgctgatggaatctttcccgcactctgccagccgggccaacgtgctgatcaaagccttcgtctctgcagggcagttcctgttgccgttcattatcagcttcctgatatgggcaaatctgtggttcggctggtcgttcgtgattgcggcagcgctctttgtactgagcgggatttatctgcttaaaatgccgttccctgacagccaggcggcgaaaaaagaggaagcccctacggcacaggcggaaacagccgtccagccacaggctaataagctggatatggtgatcttcaccctgtacggttatatcggcatggcgaccttctatctggtcagccaatggctggcgcagtacggccagttcgtcgtcggcctgccctatgcctcggcgattaaactgcttagcatctataccgtcggctcgctggtctgcgtctttgtaactgccgccttcgtcaaagaggtgtttagctcggccattgcgatgattatttatactggcctgtcgatgatttcgctgctgttggtgtgcctgttcccgacgccgatgatggtgaccggctttgcttttgtcatcggctttgccgccgctggcggagtgctgcagctgggtgcgacaatcatggcgatgagcttcccgaacggaaaaggcaaagcaaccggcatcttctacactgccggcagtatcgccagcttcacgatcccgttgatcaccgcaaagctttcgcagatcagtattgccagcattatgtggtttgattttctgatcgccgttatcggctttgtgatcgccctgtacatcggctatcgtcaactgcaggctcgggcggcgcaaaaagtgtcacgcaccgcagtcaccgcctga

SEQ ID NO: 234033 - DNA, 300 bp, Klebsiella pneumoniae
atgactatagccatcgatcgacttaaagaagtgacaagggactttggccgcaggcatatcgcctaccagatggccagggaactgctggcgatttatagcggtaacggcccgttagtgtggaatgtgttgagcgatttccctcctgaggtgactggcaaatatcttgtcattaccagttatggtgatattcgaaccgcctgctatgactgcgaatcaggggaatggagagcttcagatggcaccattaccggagttatcaaatggatggatttaccagcctccccgcaggaggtgaggtga

SEQ ID NO: 234034 - DNA, 879 bp, Klebsiella pneumoniae
gtgctcaaacttgataagtggatccagcgaaataaagagctcgcgcagacgctgggggtgattaccgctgtggcgatcggggtcgtggggatgattggggctattggactgattgcctggccggtgataaccggtgtaaatgccatcattgccgctgcgacggcactcggtaccgtatttactacggtggccggtggcgtcgttactgcaattggcgcgatctcctggccggttgttgctgtcgtggccgcaatagtggccggggcattgctcatccgtaaatattgggaacccatcagcgcgttttttggcggtgtgatggaaggattgcgcacggccttcgcgccaatagcagaactatttgcaccgcttaaaccgatgtttgactggctaggcggaaaacttaaagccgcatgggactggtttaacaatctgatcgcgccggttaaatcatcacaggaaacgttaaacagtttccgagatgccggtgtgttgtttggtcagcgcctggctgacgctcttactttaccgcttacagcattcaataagctgcgcagcggtattgattgggtacttgagaagctcggcataatcaacaaagagtccagtacgcttgaccagactgccgcaaaagcaaacgcagccacgcagggtaactcttatataccggctaccagtacttatagcggctatcaggcataccaaccagtcaccgcacccgccgggcgttcttacatagaccagagcaaaagcgagtatcacatttccgttgatggtagcgggaacggcacgcagctcgatcgtcaactacaggatgcgctcgaaaagtttgagcgtgacaagcgtgctcgtcagcgggccagcatgaaccacgactga

SEQ ID NO: 234035 - DNA, 1071 bp, Klebsiella pneumoniae
atggcaggtaaaaattttgcggcgatcctgactgcggcaggtgaatccgccatgactaaagcggcagtgaacggtatacctgttggattttcttatatggggatcggagacggcggtggagagattcccaacccgcagacagaactgattaacgagctttatcgcgctccgcttaaccggctggttatcgctgaccagggggcaaatgtaatccgtgccgaaatgattatgcccccgcaggtagggggcttctggttgcgtgaagccgcgctctatgacgatgaaggagagtgcctggcagtggctaacctgccaccctcctataaaccgttgcttgctgaaggttccgggcgcacgcaggcggtcaatttatggatagccgtcggtaataccgccaatgtggaactgaaaaccgacccgtccgctatcctggcgacggcagcagaggttaaccaggccaaaaatgaggtaaaggattataccgatgacgcaatggcgggtctgagcaaggaaattcaggcggccattgccagtgccgtggaaaaggcggtaagtgacgcatgggagcaggacaaccctgtcggcaccacccgcttttttaaccagaacctcaatcccaatgagcgctggccgtggtcgcaatgggtatacaccggtgaaaataaaacgatccgggtggcaaaagcggacggctcaaacgtgggtaccactggcggcagcgacaccgtcagcatccagcaggacaacctgcccgccgttcagattgatgttagcggcgaaaccagcgaacaggggcagcaggagctgacgacatcgggcaacggaaggcaccggcacagggcaggtgacggggcaccgggggatacctggcaggatgccacacacggaacggataaccagaaatatacgggatggaactatacagactatgcagaagaccatcagcataacgtcacgatcccgcagcacaaacattcggtcagcggcaaaacagccaaccttggcgagggcaaatcgttcagcgtggttgaagcccacacactgctgatgtgctggagtcgtgttgcctga

SEQ ID NO: 234036 - DNA, 3174 bp, Klebsiella pneumoniae
atgaccagtattactgagaacagacgctgggctgataaaatttatcagattgcccgtaatgataaagttgaaggggggcgtgatggaacggctaatattcaggctgcacagttagctgaccgcacgcagtatttaaagaccctgatagaaggaatgacagattatcgggagtatacattttataaatcagagtcagatcctgaaggagtaatttcggggctggctaatacgccagaaggaaaactattccgcgttgctcagagtctaacggatgatcttgcgtttatttactacctgaatgattcaggaagggcgattcctgttactgcacttcttggtcgtggtgctataacgaataacatcagggagtatacatccctggctctggcgcaggatgatgtagccagtggtaatatacttgatggatcaaggtgctgggtagcaaatacaacgaatgaaattctggctgatgagtttattaataacggcggaaccttagaactgaccggaaggcaaatgctgtctaaaaaatcagtggagggtgttgctttctataagggatacattccgctcgactctgcatatagagtgttagacggaaaagctctggatgttaatgggatacttgtttcaagaaaggacattggttctttggtgttagcttgtgcgggatactctcatttgtatatggtatctagtgctggagattttttgccaaacagagggcgagatttagcgttttataactcattgacaagttactcccctgaaaatcaaatcactcggggctggcctgtaaaaacaggtataaaaaatacaatgggattggatatatacaggctttctgtcccagtctcggcaatttctttgttagtaaatacgcgctgggatcagtttaatccagacgggattatgcttaaagtatattctacattagaatctgccgttcaagatgaacagaagataaataaattaaatcaagccacgcttatggatagttatattcatgctgcggggggtgttgactctttaacagtaaataaaactacaggttatgtattttctgggaatatggtggaggttgcctaccgggaaagtattaatattggtgtcaatgcgaatggtatatatggcacgttaaatacagcagtttcacgcggtattgatgtgtctgggttacgcaggatttatgctattaatagtgcgggggatttctcgctagggagtggcagaggttgttgcttatttactgataaatacaatttaacctctgacacatcgctgggtgtaccacgattctataagcaaggggtaactgtatctgggttagatatctacgttgcggagcttccattaaatgccgccagtctgattattaacacggcgtttttaaaatttaacccagaaggattttttgttggtatttatgataattatgatgctgctgttaatgaagttatcacatctggtacccgaagagtaacctctattttaggtgaggaaattcttgggttaaataaggataccgattttgagtatacacaggtcggtgttttgacctcactgggttctgacaacccgacaaattacggaataactgcacaggggtattatggaaacagaaatacagcaaggagtcagacatttgatgttgaaaactatgatgtgttatacctgtataactcagcgggggatttctcactagggcgtggcagaggggcatctttctttaatagtttatcgaacttcagtgatgataatctggttgctactgcatcttatactctggccggaaagaccagcaatggtactaacatatacaaagtgatagttcctgaaggggctgtgagtctggttgttaatacagcatttacgcagtttaaccctgacggattcacagttggggtatataccgatctgtctctggctctctctttgtcagtagcgccaccatcccgaagagtaacctctattttaggtgaggaaattcttgggttaaataaggataccgattttgagtatacacaggtcggtgttttgacctcactgggttctgacaacccgacaaattacggaataactgcacaggggtattatggaaacagaaatacagcaaggagtcagacatttgatgttgaaaactatgatgtgttatacctgtataactcagcgggggatttctcactagggcgtggcagaggggcatctttctttaatagtttatcgaacttcagtgatgataatctggttgctactgcatcttatactctggccggaaagaccagcaatggtactaacatatacaaagtgatagttcctgaaggggctgtgagtctggttgttaatacagcatttacgcagtttaaccctgacggattcacagttggggtatataccgatctgtctctggctctctctttgtcagtagcgccaccatcccgaaaaatcacctctatcttaggtgagaagatactcgatttaagcaaagagagtggtgacgataaatttggacttggacgattagccggagagaaagtttttatctttggcgacagtataagtaccactaactataacggggggtgggttccatatttttatgatgctacgagatgtaatttaaccaacttttcaacaaatggctccagggctgacaggatggtagataaattgaggattgaggggctcgctcgtcgagctgcatctgatactcaagaatggccaaagcctgatttttcaaaatgtaaggctgttatgttaatgattgggacgaatgaccgcccacaaatcccagcaggtggaatcgaaagcattatacctgcaggaaatctggcttcggctcctgacccgatgacatactggaatagttttcctaataattatgtcggtaatgtggcgctttttattgaatatgtgaagtatcaaaacccagccactgaaatatatctgatgagtaatgttcatatcgcgagtgacaaaaatgttatggaaagggtttctgctctgtgtgctcaaatagcaaggtattattcaatcccgcatattgatgctacgcataatgcagggtttagctataagttcataaatacttatctgtctgatggcctacatcctacgttgcagggaaatatgttactggggacatacattgcgtcggccgtcatgagtgcataa

SEQ ID NO: 234037 - DNA, 603 bp, Klebsiella pneumoniae
atgaataattcgttgatggcgatcgggtcgtcgttactggaacaacgagccgctgccgcatgcgcctctatcagcgacttatccgtgccgctgcgcgatctgtggaatccgtggaaatgccatgtgaaattcctgccgtatctggcgtgggctttctccgttgaccgctgggaggaaacctggccggaaacggataaacggcaggcggttagtgatgctttctggatacatcagcgcaaaggtaccgttgccgccgttcgccgggtgattgaaacgctgggctacagcatgacccttcaggaatggtgggaggtggccgatcccgccgggacattccgtcttgagattgacctcaatgacattggcattactgagccaatgataaaggagcttgagcggattattggcgatgcaaagccggtcagtcggcatatatcacagctgaagttatcgatgagtgcatacggtacagaatacgttggtgcggcaattactgatggggaagtaataacggtttatccaccaaattacgaaccagaagacagtatttgctatgatggaatacagcactattccggcaatacccatttttcaggaaaataa

SEQ ID NO: 234038 - DNA, 432 bp, Klebsiella pneumoniae
atgtcgaaaaacctcgatttgtttaatcagcagacagcggaaatttttgcattgctttgggataacttcccagtgcctcaagtaattacctacaaaaaatttagcgcagagctcactgacgattacttttttgactctaactcacccgagatgaaatcaatagacaagcttcgtagtgtgattgctggcacatttatgtttctgcaagaaaacggatacatcctgtacgcaacggatcatgacagaggtttttttgacgttagattgaccgaaaaggcgctttctgtgctcaacaaaaagcttgaggcactcgacgaaaatgagacgatgggcgataaaattatcagtgcggtaaaagacggaactccgggagtcattgacgatgcagttacaaatcttttaactttaggctttaacaccctaaccgcttaa

SEQ ID NO: 234039 - DNA, 1719 bp, Klebsiella pneumoniae
atgaaaattgaagctaacgataaagaaattcaagacatcttttcttccggctactttaaaattcctcgatttcaaagaccatattcctgggaaaaggatgaagttgaaaatttttgggaagatataaccaaaaataaagatgaaaattacttcattgggtcaatggttgtatttcaatcagcaaaaccttattttggcattgttgatggccagcaaagactaaccacaatcactatcattttatcggttataagagattccttcataaagttaaagcaagaaaacttagcgaagggtattcatatgtacattgaaaaagctaatgttgacaatgaaaatgaatttattcttaatgctgagacctcgttcccttttcttcatggtgtaatccaatcatttaaaaaagaaagtattacagatgatattggaatcgaggaaaaaaacctagaaaatgcatacaatctcatccgtgataaaataacaaaactaatacctgaaatacagtcagaaacaacaaatcaaatcgaactatttcatgacatcattgacagcccaatccagaaacttaaagatattagagataaaatactcgccttaaaacttgtctttatacagcttgacaatgaggatgatgcctaccttattttcgaaacactaaatgctcgtggccgtgatttaaaaacctcagatctcgttaaaaacttattcttaaaaaaattgcgctccaacaacaccagatatgatgctgcaaaaacatcgtggaacagcttagtctcaaaatttgacatcgactctggagaaaatgtattagacaactatcttcttcactattggttatcagagcatcaatacactactgataaaaaacttttctctgaaattaaagagtacttgggtgatgataactctaaggcagaaacactccttagaaccataattaactgcgctgattattataaaatgattaacaaccctgacagtgtacagtggagcaaacaagatttaaaaatcaaagacatatttgaaaacctcaactcattcaaagttaaacaacaatcatcaatgacacttgctctcactagggcttggaaagaaaataaaatatccttgaaaatgtttaagcaatctcttgacaagattgaatactttcattttatatttaactcaataacttcacagcgctcatctggttctattgcaacaatgtactctgaacatgcgataaaacttacaaatgcaacttcacatgacgagatacaatcaatactcaaatctcttttcaccgctctcgccatgaaactcccgcgctatgaagagtttaaagttaatttcattgaactgacttatttatctaataaaacaagaagtaaaaatgcaataaaatacattttatctaaacaacttggcgatgctatttcatgtttaaatattaaccacaaacttttaaccatagagcactacattccggagtcagcgataaaatctggaacaccaccagagattgttggttgcattggtaatttattgcttattgatgaatccaccaacaacaatatcctgaaagactccagtattgagagtaaatacaaaaccttagttgaaaaaggttacccactgaaacagacctatatctcgagccccaaatggggggaaagtgaaataaagagcagaactgaatctattgcaaatcagttatacaatagcacgtcacttatataa

SEQ ID NO: 234040 - DNA, 1317 bp, Klebsiella pneumoniae
atggaaatgatatttaatgaagataaagatattgaaaatgcattgcagtggctatctaaaactctaccagaacctaattcattgtttgatagaatgtgtctggcacaagagaattatattaaagaatcggccttgaaggttaatattggaaaggaatcgaaaatagaatggcatggatgtgatgttgtcgcaggttttttctctcaagctaaatcctatcttgataatcgacgttcttgtgatatttcagccgcatctaaaatacttccttgggtgaaacagcttggtgttaatgttgaatatcttaacaatattccaggtgcggtagaacgtgctaaaaggatgttggaaagttataccgtttatccggataatgcattgttcgaattaatattagcaggaaattatgcggctaaaggtttcgatgttgagtttatacctgagcagaaaggaatagctaaaactcctgagtttaaatgtagctttgatggtaaggctctttttgttgttgaatgcaaaagattaaaaaaggggcaatacgcccaacaagaggagtcggctcattcaacaagagcttcttttattgaatctcgtgtacatctgaaaagaatgagtgtctggatggatgtcacatataaatgtgaagtaaatgaaacaccggacgattatcttttaaaacatttatgtaattattatgggaaagaatattcctggagtgatgactacggtagtggttttataaagcctacaaatttgcgtagggtgaatgatgatattaaattgaacggttctctatcattacacaccaaattggcaagactaattaaaacatctccactcgatggtgagttttacaatgtttatgcgtttggtcgaccagatgaacgagatccacgttttttctctaaaattaattatgcaacattactgacatggcgaaatgtaagcgaggtgtcattagaaaacaggtccaggcatatcactaaacatttaaaagaaattgaagatcaaatatcaaataatggacttggtgtagggcatttagttattgatgctgacgtacaaaaagatgtcgctgataaacggagggaaaaaaatattgaggctgcactttctttccggataaagtccaagcttgttcggttaaatattcattatcttgttcctcgtgttgatgaagataattcgtggctggtggacgaaactcttgaatttttcagcggtgacgagttgattagtcatttgtttcctgaggtgaaattattttcaggggtggaactttttgaaaatgatttgcctgcatggcatcagaaatga

SEQ ID NO: 234041 - DNA, 240 bp, Klebsiella pneumoniae
atgtttaaacagaacgaaaaggctatttcacagattgcggaatatatcccgcacgcctgccggggtatgcagttgcaggaagccaaagcgcgcctggagaaaaaaatcgcactctataccgatgacggctgtgatgctgccgttcttaacgcggcgtttgcatcagctcttaaaagtcatacgcgggagtcttttttttcgtgcatcgcagagcagttgcatgagggggctgacaaatga

SEQ ID NO: 234042 - DNA, 174 bp, Klebsiella pneumoniae; identical to SEQ ID NO: 107918

SEQ ID NO: 234043 - DNA, 189 bp, Klebsiella pneumoniae
atgccttcaccgatcatgaagtacttcgcctatgaacacttgccagcgcatttgctggaggtttcaaaaccgattggtgacctggccaagcagttcgacgaatcattgcctgacggcgctgaaaagtctgctggactgcgcaagctgcttgaggccaaagatgcactggtacgcgccaagctaggatga

SEQ ID NO: 234044 - DNA, 510 bp, Klebsiella pneumoniae
atgtttgattttcaggtttccaaacatccacactatgacgaagcatgccgcgcttttgcgcagcgtcacaacatggcgaaactggccgagcgtgcgggtatgaatgttcagacgttacgtaacaagctcaacccggaacagcctcaccagttcacaccgcctgaattgtggctgctgactgacctgaccgaagactcaaccctcgttgatggttttctggcgcagattcattgcttgccatgtgtaccagttaatgagctggctaaagacaaattgcagtcttatgtcatgcgcgcaatgcgtgaactcggcgaactggcgagcggtgcggtatctgatgaacgcctgacctctgcccgtaagcacaacatgattgaaagcgttaatgctggcattcgcatgttgtcgttgtcggcgctggcactgcatgcgcggcttcaggctaacccggcaatgacaagcgttgtagacaccatgagcggcctcggtgcctcattcggtctgatgtga

SEQ ID NO: 234045 - DNA, 807 bp, Klebsiella pneumoniae
atgaataatctacatcgcgaacttgcgcctgtttccgatgcggcgtgggaacagattgaagaggaagcaacccgcacacttaaacgtttccttgctgctcggcgggtggtggatgtcactgatcctcagggggcggcattgtcggctgttgggacaggtcatgttgcccatctggatggcccctgtgcaggggtaagtgcagtaaaacgtcaggtactgccggtggttgaattcagggtcccgtttaaattaactcgtcaggcaattgatgatgttgaacgtggctctcaggattcggactggtcccctctaaaagaagctgcccgcaaaattgcggctgcagaggaccagacaatttttgatggctacatggcggcaggtattgctgggattcgaccacagtcgagtaatacacctttaaccttacctgctactgcttcagattatccaacggtgattgctcaggcactggatcagttacgcgtggcaggagtgaatggtccctaccatctggtgttaggtgaaaaggcttatacgtcgattaccggcggtaatgaaggcggttatccggtattccagcatatccgccggcttatcgatggtgaaattgtctgggcccctgctatcgaaggtggattactgttaaccactcgtggcggtgattttgtcatggatatcggccaagatatatccataggttacctgaaccataccggcacagatgttgagctgtatctgcaggaaagtttcactttcagtgcactcacgtcagaagccacagtaacattacttcctcctgaagaatga

SEQ ID NO: 234046 - DNA, 1056 bp, Klebsiella pneumoniae
gtggggtgtccattttcacagtccgtctctcaacctgtggatgagagacttacgcgtgcagccatattcctggttgtgactattaatcccggtaaagcggctgaagtcgccgtgcgtgctcactgcagcatactttcctctcttatcagaggcgtcggttttcgtatatctgatggtgggttgtcgtgtgtcatgggggtgagtgaaggagggtgggagcgcctttttggggatacaaaacctgaatatttgcatgtattccgtgaaatcaatggtgtacatcatgctccatcaacacccggagacctgttatatcatattcgcgccgcccggatggatctttgttttgagctggccagccggatactgtcggatctcggcaactcggttagtgttgttgactccgttcagggttttcggtatttcgacgatcgcgatctattaggttttgttgacggtactgaaaatccggtcgctcaggccgctgtggatgcaaccctgattggtgatgaggacatggtattcgctggcgggagctatgtgatcgtccagaaatacctgcatgatcttgataaatggaatgcgattcctgttgagcagcaggaaaagattattggccgcgaaaaactatcagacattgagctcagggatgctgataaacccagttatgctcataatgtactcaccagtattgaagaggatggcgaggacgtcgacatactgcgtgacaatatgccatttggcgatcccggcaaaggcgagttcggaacctattttatcggttactcccgaaaacctgaacgtattgaaaggatgcttgagaatatgtttattggtaatccaccgggtaattatgatcggatcctggatgtcagccgtgcgataacgggaacattatttttcgttccgacgaccagcttcctggacagtgttgaaccccagtcagctcccggtcaacagggagatgatgtgataaatacactacgctcaaccgccattaaaggagacataatgcccggttcccttaatattggttcgttaaaaaaagaggtttag

SEQ ID NO: 234047 - DNA, 633 bp, Klebsiella pneumoniae
atgactctgaggtgtctgttaaacccgtggcgattcaatgacgttgaaggtatgcattttgggactattggcgctggccgtattggacttgctgtattacgcagattaaaagcgtttgatatgccattgcattacacccaacgccaccgtcttgcgtcagctatcgaagaggagttagggttaacataccatcctgatgcagagtccctggctcgtactgtggacattgttaatctgcaggtaccactctacccatcaacggagcatttttttaatcaaaaaatgatatctgagatgaaaagggggtcttatttgatcaataccgccagggcacaacttgttgacagagatgcggttgttaacgcgctgaagtctgggcacctggcaggatacgctggtgatgtctggttcccacagccagcccccgcgtctcacccctggagaactatgccctggaatggcatgacgccacatatgtcaggcacgtcactttctgcacaggctcgttatgctgcggggacgctggaaattcttgaatccttcctgggaaactcgcctatcagagaagagtatctgattgtggatcgcgggcaactggccgggaccggggcaaagtcttatcaactgaactga

SEQ ID NO: 234048 - DNA, 828 bp, Klebsiella pneumoniae
atggcggatattcgggggcagattcacactgtgtcctctgaagaaggctcaacaacctcaacaactgtcggtggcttcgatggtgtccgcagttcttctaccggtaatggcggaagtcagggtgggcaggggccacagggacagtctctcgttatgcataacgggcagatgggatactgggaaaaccgatcatccggggctggtaataacgaacatactacccgcgcttttgtggcagtaggcccatcagaagcagaaaaagctgcacgagcggagaaggtagctcaggaaaaacagcaagcagaagaggctgcaaaagcattcgcagcgaaaacagcagcggcatccgccgctgctgaaaaagaacgtcagaatgcgatttctgctgcggctgctgcaggtcaacatcaaactgttcctgatgcgcgtaataatctgaatcaggcgactgctgaagcatcacgcctgaaaacagtggcagataatgcccttaatacagcgaagaataagcgaagggaagctatcgatgccgtaccagtagcaactcaggctgagaaaaaatatcaggatctgcagcaaagcattaaaggcctcactctaaataataacggccaatacggtacccaaaaatgggaggttatcagttcgaataaagagcatgaccactggggataccggtttgaagaacagcaacgggcagtgattgatcgtttaaacgccggaaccaccatcagcgcagttgctcgggaatttaatacatcccggcaaacaataatccgggttagagagggtaatcagaaacgcaatgctgtattaccggattactga

SEQ ID NO: 234049 - DNA, 2448 bp, Klebsiella pneumoniae
atggctggcaagtcactgggaactctgactatcgacttggttgcaaaagttggtggatttgtttcagggatggataaagctgagcgtgcatcagccaagtggagcaagcaggtacaagatgatgtagcaaaatccagtgctgcactagcaggtataggggcagcagcgattgcagctgggctggctgttggcgcatccggatttcaattactgaaatccacatccaggcaaatagcagaaactgaccgctgggctaaatcattacaattatctacccaggaacttcttgcttggcagtttgcagctgaaaaggctggtgtctccggtgaccaaatggctgatatcttcaaggatattggtgataagattggtgacgcggtattaaataaatcaggtgaagctgttgatgcgctcaacgctcttggattatctgcggaaaaactatcaaaagtaagtccagataaacaattgctcgctatcagtgaatctttggagaaaattagtactaatgccgagaagaccaccattcttgaaagtttgggtaacgacctttcaaaattacttcctttgtttgataacaacaaccaaaaactcaaacagtttattgaccttgctaaagattatggtgttgctcctgatccatcctctattgatgatttagtaaaggttaatcaactttttgaagatatggaggctcaggttgcagggctcaaaattgagattgcagccggattggcaaaagttgatctaactcctttgcagggctcacttgataagcttcatgacgtactgactgaccccttggttcttcaaggtatttctgatcttgtatcggaagtcgctcaacttgctggatggcttgtaaaagcagctgcaggagcgggccaactagcagccagcacaggaaaccgttttgcggcacttagtggcaagatcgacctaacaaatatagaccaagttaatgaacgtattgaatacctgcaaaaaatccttgaaggaaaaaaaggtttttactctcaaagtgagtctatgtttggttggattacaggggtagatgacagcgcgaaagcactaaatgatgaactgttatctcttatagaaacaagagataaattttctaaagctagtaaatcggtgctaccccttcaggtagccactgtgggaacggacaacccattttctttacctcctggtggtacgaacggaaaacctgttaaaacaccaacaagtaaaacagaaaatgcttttaacagtagattgcttgatctacaaaaacaagctgcccttattgaaactactggtaaaaaaacagctgaggttaccgagttcgaaaaaataaattttgatattaccagtggcaatcttaaaaaattgtcagaagcgcaaaaagaacagcttcgcactgctgcaaaagccctggattctaaaaaggaagagcttaggcttaatcaggaaaatgcccgggttgcggaatatgtttccggcttagaaaggcagaataagttagtgcagcaaggatttgataatgaaattgttggccgttattctggtggtcgtgagcgatcacgcatgcaggataataatgatatacagcaggattttgcaaatcaacaggatgatcttttaaaccagctccaatctggagatatagaccaaagtctttacgataaaaagaaagaagcattacagaattctcttgatgagaggcttaaaatacaggaggaatattacaagaagcaggatgagttacaaaatgatggtgctgctggttttatatcagggctagcaacgcaaatagaagcatcaatggatttatacaccaacatgcagcaggttggtgcacaggcatttagcagcttaacggatatgattattgactgggcagaaaccggaaagttaaatgttaaagattttgcttcgacatttctgcaatctgttggtagcacacttctttcttacgctgctgcccaagttgcaatggcgggtttgcaggcctttacagcaatgatcggcgtgccgtttgttggacccgaaatagcaggacctgcagcaatagccgcaactgcggctgctggagtactggcgataggtgttggtacagcccttcagggccaggctcacgacggtatcgactctgtgcccgaaacaggaacctggctcctgcagaaaggtgagcgcgttacgacagctaaaaccagcgcaaaactggatgccactctggatcgagttgcaaaccagtcaacaggcggcggcgcgatttattcgcccacaatcaatatccccatcaatggtaacccttccgatgcaactttagcgctggtccgtaaagctgcagatgagggggcagaaaggggataccggaaggcggttaattcagtcgcaagcggtcagggtgatttgcataaggccttgatggggaaaactacctcggggaggaaaattagctga

SEQ ID NO: 234050 - DNA, 552 bp, Klebsiella pneumoniae
atgcaatatccaacggtaattaatggcttcgattttcgcgagctaatttttctttcaggtactgactctgcgaccgacaccttcaaagtcgcaaaggcgttcaggaaagaacacaaggatgtgatgaggaaaacgagaaaagtaatctgctcatgctctcctgaatttgcagagcgcaattttacgctttgccatgaaaacaatgagttacagaatggaaagccccaaccattctatcgcatgacaaggaatggctggactatgttggtgttcagcttcaccggtgccgccgcattcgcttttaaggaagcgtacatcgcggcatttgactggatggctgacatgctcgcgcaaggggcgcgtaatttagagtcggaacgtaatgcagtaatgctggagtacatgaaggagaaggatgtcgccagtatgtcaggtcgtttgttacgccggtggggtaaagagaaaaagccgcatctactttctcgtattgagaacttggataagcagggccagctatgtttgccgggattcgttaacgctcgcccagagtaa

SEQ ID NO: 234051 - DNA, 3243 bp, Klebsiella pneumoniae
atggcggttcgtcttattttatccgtcgttgtcgggctggcgctgagcctctcgcctgccgcgtatgccatgaaacagctggagctgaagagccattctcatatcgcggcgatcgatatcccgcttagcggtaaggagaaagcatggctggcggcgcagcctacgctgaccgtcgggacctggcttcccgagaggacacccatcgtctatgacggcgacgagaaaagttatcagggcattaacgccgactatctggcgctgatggcgcacagcctcggactgaaggtgattatccgccagtatgacaccgagcagcaggcgctcaccgccctggccgaccgccaggtggataccctgctcactcaggtggcgcaccgggatgcgctcgccccgggcctggatcaatccgcgccgctgcttaaaacctggccgacgctggtcacctcgctgaaatcccctctgccgccgctgaccactgaccgccgcgtcacgctggcctgcacccgcgattgcgcttttttcgatattattcagcaggcgtttcccaacgccaaaatcaccctttatgatagcgactatcaggctctcgcctcggtggtcagcggcgagaatcagtattttatcggcaacaacatcaccactggccactgcatctcgaaatatttctcgcaatcgctggttatcgcgcactattttcgtcagcaggagcaacacaaccgctttgtcacccgtgacgatcggccagagctgcatcaactcctcgaccgttttatccatgccgtcgacagcgacaccgcgatgcggatcatgcaaaactggctcaaccgtggcgatctgtcgtttctcaataccccgcttacctttagccccgaagagcagcgctggctgcagaagcatcgtcgcgtccgcctgctggtgaacccctatttcccgccatttaccctggtggataacgaggatgaactgcgcggcatcatggccgatatgctgaatattgtctcactccagaccggcctgcagtttgaccctattctggtgcgcaaccgtcaggctctggcaaagcgcatggaaaaagaggactgggcgatcatgcccgccgccaccctgatcccacagccgcaggcctacgtcaccctcagcgatccgctcattaacgtggcctttgtgctggtcgcccgcggcagcgcccccgaccagcatctgctgacgcgctcggcgcggatcgccctgccggtcgggcctatcgccgcccatgatctgaaagcgcgttttccgctgattaactgggtggaaacggataacgttggcgtcgccatgaagatggtagaggaaggcgaagtggatgccgccgtagcctcggagctttccgcccgctatatgatcgaccactactatccacagggtctgcactacacccgcattgatggactccccgtcgcggccattcggctggccatcccgcgcgatgaaccggtgctggccgccattcttaacaaagcgctgcaggttattccgccacgggatattctgcagatgaccgagaagtggtcgaaaatctccagtcagcaaatagagaactggagccagtacagccgccagttttaccagctgatcgcctttgcgctggtgctgatcgccatcagcctcggctggggactctctctgtgtcgggaagtgcgcaaacgtaaagactcccagcagcggctcgaggaggagctggcgcagaaggaggccctctcctgtgcgctggagcgcgaaaaagacaaagcgattcaggcgacaaaagccaagagccgctttctggccagcatgagccacgagctgcgcacgccggtgagcgccatcgtcggctttctggagctgctggcgaaaccggagctgaacggcggccagcgtaaagaggcgatcgagctggcgggatcgacggcgcaaaccctgctgggacttatcggcaatattcttgatatcgacaagattgaatcgggaaaataccaggttaccccgcagtggagcgatgtcgcacagttagtgtcgcagcagtgtcataccttcgacgcactggcgcagcaaaagggcatcgatctgcactaccataacgcgctgcaggaagggaccatgctgtgggtcgacccgcaggcgctacggcaaatcctcaataatctcatcggcaatgcgctgaagtttaccgtcgaaggcgcaattcaggtctcctgccggctgacgccggcgaatgagacacagggagagttggccctcatggttagcgacagcggctgcgggatcagtgaagcagagcaggccaccctcttccaccgctatgcccaggcgcgccagggacgccagcagaccggctccggactggggctggtcatttgcaaagagctggttgcgctgatgcagggtcgcctggagatggtcagccgtccgggcgtggggaccactttcaccatcacgctgccggtcaaggcgagccgctgcgcgatccacgcgccgcagtcgtcgcccgccagaccgcaggctctacccgggctggcgatactgatagcggacgatcaccccaccaaccggctactgctcaagcgccagctcagcactatcggctatagcgtcgatgaagcctgcgacggtgaagaggcagagaataagctcgccagcaaacattacgatctgctgataacggacctcaatatgccgaagaaagatggcctggagctggcggcctcgctacgccgtcgctatccgggcctggtaatttggggcgtgactgccagcgcgctgccgcagtcgcgggaggcgtgtctggccagcggcatgaatatgtgtctgtttaagccggtgtcggtccagacgctgagtcatgagctcagccgtttagcggtgggccgcgcatcacctcacgctacccggcacctgaagctcagcgtgctgagcgagaatacggggggagaccaggcgctgatgaatgagatgctggagacgttccgcgatgcgtcggccgcggatttacaggctgccggacaggcaatcgcccggcatgagccgcagatctttctgcgggcgctgcaccgtctgcacggttcagcacaaattctggggattactgcgctacaacaactgtgcgtcccttttgaggcaaagcggcctgattcgctgacgccggcaagctgtctggaggtggtacagcgcatcaccggcgtcatgcgcgagatcgatggcgaaatcgacgccctgatcggccgctag

SEQ ID NO: 234052 - DNA, 288 bp, Klebsiella pneumoniae
atgcgcaactggctgaaacaggcggtgaagcgggctgaagctgatggcgtgcatttttcgatcgccgtgacgccgcataccttccggcacagctatatcatgcacatgctttatcaccggcagcttaggaaggtcatccaggcgctggccgggcataaggatccgcgctcgatggaagtctatacccgggtatttgcgctggacatggctgccaccctggccgttccctttaccgctgacggtcgagatgccgcggagatccttcgctccctgccaccggccagctga

SEQ ID NO: 234053 - DNA, 195 bp, Klebsiella pneumoniae
atgttaacagtaaaagtaatgtcaccagatggtggcgaagaaatccatagcggcctgagcgttggtttcaaccccaatcagcagagtatcgcagtgtcgggaatggaccagaacgttttcctgaagcagggagaagtggcgtacgtgatgaacgcaaacggaaagaccatttcccgttacgagcacttgacctga

SEQ ID NO: 234054 - DNA, 330 bp, Klebsiella pneumoniae
atgacctttgaacaggtggtcaaaatgttaaagccgtttcaccaagcgctctggttttgttgtagatcttcgccagaagaattgtttcacgctgattgctggcaaggagggacgataacaacaaccggagggaaacttctggcgtttcaggttgggcaccctgatgagtggaaattgactatattggctaatcagcctgacaccggccttgtcatcgatgaacccgatgtcgagtcagagataacagaagagttcttagtagaagttagattctacatggtcatgttagtacacactgtttatgaatgcccccctgagcctggaatatag

SEQ ID NO: 234055 - DNA, 972 bp, Klebsiella pneumoniae
atgcgacgtaatgcacaaaaatggatcccgtttggatttgatacggattcaaataaaattgttgatatcgccagcgttgaaaatgggctttcgtgtaactgtatctgcctcatctgtgggacctccctgattgccaggcagggtcaaaataaaaaatggcattttagccacagcacagaagtaaaaggggtttgtagtgagctcacactacaacatataaaaaaatacataaaggtgaaaatacaggaaaaaaaataccttgctctccctcatcttctgcagggtaaggagaaagggatagttaacctcaaaaatctcgctggtggtgggattgtttgtggccttaatgctgacctcacagggatatgtaacgatacgacaatcgggatatttattaatgatacgtcggaggatatccagcccaatccagacctgttagcgcaaacagaccagctggcgctggtggagatcgatgccgttcggattgaaagtatcatcgctccatatcgtgagaatggggaaggcataaagatgatggatgcgatagaaaagttacttttcgtttctgaggaagcgaaaaaatggatctaccatcctatgatgaagaaggttaaacaccatactttacaccagtaccggcgtgagctgtctaccagtggaaatcagatccttgctttaattcctcatgaacttccgataagcatgaacgccctcccatcctccccggcacagcagtggcatcaccttcgagccacgattaaccttctttgtcgcctgagccgttctgatatccctcaaggcagtattgcctttgaagaactggtttattatatcccccggcttctggaagcatctgaatctatcaatgttgccgcctacgaacgatggtatgacttctatatacggaaaaaaggagagggtgtactgaatgaggctgaaattgaatttttgtcttttatagggctttgttga

SEQ ID NO: 234056 - DNA, 255 bp, Klebsiella pneumoniae; identical to SEQ ID NO: 177850

SEQ ID NO: 234057 - DNA, 585 bp, Klebsiella pneumoniae
atgttcaaatcgatcatgaccgtatcactgctggccgccgctattgcctctaccagcgcagtggccgcagacaattcggcgggtggtatcattaactttaccggcgctattaccgatacaacctgtaccattaacggcggtaaaagcgcagactttaccgttgcgctttcccctatttcggtaaaagatgcgggcaccacggttggcctgatcactaagaataaaaaatctattgcgctgactttctcaggttgttcaccagcagccggaacgaccggtaccccgctgaaagtgtatttctccagcgcggataatatttccactgacggtaaatacctgctgaataacagcgtgaacgaaagcgatgccagcgtggcacgtaatgtcggctttgcgttagtggagccaggttcgtctacgcctattaccctgaaccagccttacacgacaaatattatgggtacagcgaccgcgccagattccgaaacgctgacgctggatgtttattactataaaacgaacgccgctgccgccaccgtgggcgagttaagctccaacgtaacgtataccatttcctacctgtaa

SEQ ID NO: 234058 - DNA, 693 bp, Klebsiella pneumoniae
atgcgcaaggcaattttgctggcaggcttactgctaagcacgggtcactcatgggccaatattgtcattaatggcacccgtgtcctttatcctgaaaataacaaagaggtgatcgtccagttaatgaatacgggcgatgcgccggctctggtgcaatcctggatagatgacggtgatattaattccacgccggaaacagccaatgtgccgtttttgctgtcgccgccagtgataaaggttaacgaacataatggccaacagcttcgtattaaaaagctgccgtccagcttgcctgcggatcgcgaatccgtctttttcctgaatgttctcgacattccgcccagacctgaaaatctgcaaaatcagaataccgttcagctggcgattaaatcccgtatcaaacttttttaccggcccgctgcgctgaaaggcacgctggatgacgcggtggcgaaacttacgctcgccgccgacggcgatcgctttcgcattacaaataacagtccgttccatattacggtcgccaatatttcgctgggtaaaacgaaattgctccaggagtccccgatggtttccccgtttgggcagctgacggtcgccgccaaaaatacggttaagcgcggacagaccttccagctgatgtatgtggacgatcttggcgcgtataaaacccggactttcaccagtcagtga

SEQ ID NO: 234059 - DNA, 2493 bp, Klebsiella pneumoniae
atgaaaatgaaacaaaacagactctgtctgctggcagtctgcacgcttctgctttcgcataaattaggggccgtctcgtttgatccctccctgcttgctggcgcatccggtgagtccgatctgtctcgcttttccgaaaacaacgccatgcctgccggcagtcaggagatggatatctacgtaaacggcagctggaagggacgttataccgtcatctacggcgagcagcgtgacgacatccgccttgcctggaaagatgcccggtcgctgggcatcaacaccacgtccgtgcctgcgcccgccattgcgcacgggcaggtccagctgcgcgatctggttcagggcggtgaagtcaaaaccgataccagcaccctgagtctggcgcttaccgttccgcaagcggccgtgctgcgtactgaagaaggttacattgccccccagttctgggacgaggggataccggcgctgatgctctcgtggaacacgacctggtataacacccgcgcgaaaggcgctgcgaaagacacaaatgatgatttttatgccgggctggattccggcgccaacctgttcggctggcagtttcgcgacagcagcgcctggcggaaaacggccagcggagagagtagctggcagaataatacccgctacctacgccgtcccctggcctcgctgaaatccaacctgacgctgggtgacttttatattcctggcgatctgtttgattccctgcgcgtgcgcggcgtgtcgctggcgtcggacatgaagatgcgcccaaattcacagcagggtttttcaccggtggttcacggcgtggcgcggacgaacgccctggtgaaagttatccagaatggcaacgtgatctatcaggagaacgtgccgccgggccagtttaccctcgacagcattcagcctaccggctccgcgggcgatttgctggtggtggtgcgtgaggcggacggttcacagcagtccttcacggtgccgttttccgccgtgcccgggatgctaaaagaaggggtgagccagtacagcgtggtggcgggtaaagtgcaccagaacacgctcgatgccgaacccgcattcatgcaggccacgctgcgctacgggtttaataacctcatcaccgggtataccgggacgattattagcgataactaccaggccgggcttgtcggtaccgggtggaaccttccctttggcgcggtctcgtttgatgtcacccacgccaaaaccaccctacaggatcgcaccagcagcggtcagagttatcgcgtgtcgtacagcaaatttatcgataccaccgccaccaacttcaccctggcggcctatcgctatttcacaaaaggctattacagcttcagcgacgcgctctattcgcgcgaagggtatcagcgcctgagagcgcagtacgacgactatgaagatcggtttggcattgcgcccgacatgtcgctaagcacctgggacgccctgcgtgcggcgcagcccaagaatacctttacgcttaaccttaatcagcgcctgctcaataactggggcacggtgtttgtctccggcacacaccgcgattactggaactcacagcaaaccacgcgcgaataccagatgggctattccaacgccatcggccgcgccagctataccctgtcggccagccgggtacggaacagggacagtgaagaagagacgcgcctttacctctccctcagcctgccgttcgcgctgtttgataataatgcgtggatcacctccagcctgacggccagcgattcgcattacgagcagagcaatatcagcatgagcgggaacgcgctggcgtcgaaccgactgagctacaccctctccggcagtaatgcgcggggggggaaaaatgcggcaagcgttaacgccgcgtaccgttcgaacttcgcaacactcggtggctcttacagcgaatcctccgactaccgccagaccgggctcagcggacgcggcagcctggtggcctacccgtggcacgttctcgcctcaaacgaaaccggcacaaccatgactatcgtcgatgcgccaaaggcggaggggctgatggtgaacggcgatgaaagcattatgacgaaccgcgatggcgtggcgctggtgccttacgccaccccgtatcgcaaaaacgccattacgttaactgaaacggaaaacagcgctggcgcggaggtgatcggcaatatggctaacgtggctccttacgacggggcggtgagctatatccgctttgaaaccgacaagcgccagtcatgggtacttcatgcgacgcgcgccgacggcaaaccgctgccctttggcaccgaagtgctggatgaacatggtgaatctgtcgggtatgtcggacaggccagcgtactgtatatccgtgctgaacggccgccacgcgcgctcaacgtgcatcttcgcggcggaaagtgcgaaatctcctccccggcctgggggctgaacagcccctcattggtttgccattaa

SEQ ID NO: 234060 - DNA, 1065 bp, Klebsiella pneumoniae
atgttacgatcattcatgttcctgctcctcaccagcgttagcgggatgagctatgccacctgctccggcagcggcatcgtttatggcacaccgattaccattgatttatcggataagctgagcccggccacgcccacatggaccggcagcttcaccacccagtacagcggctcgttcaactgtacgacgcgtaacagtgaattttcttacacgccgatcctctcgaccgacaacaaatacgcgaccatcctcggattcagcaacaacaagtatatggtgcgggcggagatcaccaatcccccggccaataaaaccctgtctgccagcggtagccatacggcgtctgagctgaacacaccgtttacggttcgcttcaccctcgttaaccagagcgacaccaccctgacgggggatacggcgaacatgagcgacgttctgttcgtcagcgacatgagcggattgtcgattttggaaatcatcctctggccaattaatcaggtcatcaaaatcgcccagtggttattcagcgggttaaaatggccttacgacaaccgcgatatgtttggtcagccgatgatcatcaaatacgcgccaaaactgactacctgttcctttgataatgcggggctgaccgtggcgctgccgacgctcggtattccccagctcagtgcatcctcacagccggggctgacgcctttttcactgaacatgagctgtcagaacgtcggggttaacggcaattccgatcggtcaattgagatgtttctgtccagcacgcagctgctttcgaccgacagctcggtgctgatcgacagcagcagtagcgcggcgcagggcgtggggctacgcctgataaaacgtgacgccccgcaaacgccggtgaccttctctacctcgaccaccagccgtggcaacgccacaatgattttcagcgtggcggctggcgcggcgctggacgaacatttcacccttccgatggcggcgtactattacgtgtgggcgcccgcccaggtgagccagggtaagatcaatacatcggctacgctgaatattatctacccctga

SEQ ID NO: 234061 - DNA, 768 bp, Klebsiella pneumoniae
atgcggtttttatggaggcctttgccttactctaggttaagagaatgtgattttttaaactgtattgatgaaaatgattcgtcttcatggatagctgcattgaaaatattcatttgcattgttattaaatctgatctggatgagaatggagagtattgtgcaatgattacgtatccacaaatccagaaaatgacagggatgagtaggcagttaatatgttgtggttttgataagttgaggttttataaaataatatctagcgaaggtgttaggaaaaaaaagcattcattattaacttgtgaaaaaggctctacaagacaaaaacctttgacgaaaaggtttgatgggctgtcagcggggcgatggtgtaaactcccgttaaaaggattgattgatgatgatggtgtaatcccttcgtttctggcaatgagcaatagaaatattaacgaccttcatgcacttcggttgtttatctatttgttgtcagtgagacggcatggtgatgtttttattgttgtaaaagcagaaacgctgatgaaaaaattacgacttaaaagagttcagctaacattggctttggctcatatgtcagctttggggttgatagttaaagagcgatatagggagggcgattttttgagtttaaataaaacacctgcatatgcttttttattgtgtgggtgggatgttcttgaatggaatcacaatagaataaaagagagcaactggagaaatgattatttagagtcgtttgataactgggcttga

SEQ ID NO: 234062 - DNA, 156 bp, Klebsiella pneumoniae
atgaacgatacatgggatttttatactgatggtaaaggcgaatggcgctggcgcagaacggccagcaatggtcgtattgttggtgcatccagtcagggctatgtaaaccgagcggattgtatcgctaatgcccgccgcaatggttacaccggctag

SEQ ID NO: 234063 - DNA, 300 bp, Klebsiella pneumoniae
atggctaagacagcaaatcaacttattaaacaggcgtacgaaatagccaaaactatgccaccagcacaggcagcaatcatcaaggaactggctaccgtcctcgatgtttcgaatgtagctctgcgccagacgcgcaccgaacgtgacgcccttctcgcagaggtcaaatcatgggcgaaagagtgtgatcgtctgaccgagcgacacaccaagaagcgcacaaatctgcatgtcctcgaagcaatgcgcgacttgaaagcaatttgccccaccagcttccgtaacgtggaggctctctga

SEQ ID NO: 234064 - DNA, 2373 bp, Klebsiella pneumoniae
atggcccagacgtcgccggacgcagacgacattattgcagacagcatgaccgtatccggttcgagcgtaacgtttaccgggctggacacggatgatgatgacgataatgacgagaacgataacgcactgccgcccagctgggtcgctggcgccgtggtcgaacttaaagccccggcgaactaccagatcaccgcggcggctggatacagcgttatcgcaagcccgctgctgacggagatcgcgccggtagtaggtatgccggtgacgctggggtttaactctgtcgattacgatctgtttatcgcgtcatatacccccggtcaggctgcagtgcccggcgccggggggagtgcggcaaaactccaggccagtgcggccccgaccacctacgacttttcgaccagctccagcacgttcacgatcacctggcagggggttacctacccggtgtcgctggtggctaactacgtctcgatgtcgggactgctggcggccattaccgagggactcactggctccggcctggttgcgcaggacaacggcggcaccgtactgataaccgaggcggccagtccgttcgtgggcggggcgatcacgtcctcttcgctgcctgcagctgttttcggtgatgccccggtttacacctccggcacggcatcaaccggcggcagcccggcggtaacggcgaatgtgacgcttgcctataacagcgccacgggaacggccttttccggcatgccagagggggtgcaacggctttcacttgctcaccgcgggaatgagtaccggattgtctcggccgacggcacaacggcgacggtggcgcgcctggtttccggtgccgttgatgagtcatggccgggattcaccgccaggacgatgatcgactatgaggccactggtcttaacgacacgctgagctggctggggccgttcctggtttgccctgagaatgaagtggtggatgcattcgaggtgaatttctccttcccgaacggcatctgtggctttgacagtaagggcaaaaaacggatccgccacgtggagtgggagattcagtatcgcgtctacggttccgattcggggtgggtgagtcaccagggcgagtatgcgctgaaaaacgtcaacgggttaggtttcactgagcggatcaccctcagctctccggggctggtagaggttcgctgccgtcggcgcaatgagcagggctcaaacaacgcgcgagacagtatgtactggcaggcgctgcgcgggcgactcctgacgcgcccttcatcctatcccggcgtgtcgctgatggcggtgaccgttgagacggggggcaaattggcggcgcagtcggaccgccgcgtaaacgtggtggccacgcgggcctatgactcaggaacggccagaaccatttcgggggcgttgctgcatgtcgggaactcgctggggctggagatggatgtagacaccatcaacgcgctggagtccgcgtactggacgccacggggcgaaaatttcgattttgctaccggagacagtatctcagcactggaaatgctgcagaagatagccaatgccgggaagtcccgcttcctgttgagcgatggcctggcgacggtcaaccgcgaggggattaagccatggaccggtgtgatcactccgcatgagatggtggaggagctgcagagcggatttaccgtaccgtccgacgatgattttgatggtgtcgacgtgacgtacatcaacgggactacctgggcagaggagagcgttaaatgccggacgccggacaatcccacgccggtgaaaatcgagaactacaaactcgatggggtactgaatcaggatcacgcctaccaaatcgggatgcgccgcctgatgaaatacctgcagcagcgggtgacgttccagaccactaccgagctggacgcgctgtgctacaacctgggcgatcgcatcgtgctcacagatgatattccgggtaacaacacgatttcctgtctggtggaggcgatgacaacggcgggtggcgtgacaacgttcaccgtcacggagccgctggactggtcgtttgaaaacccccgcgcgctgatccgctatcaggatggctctgcatccgggctgatggtggcgagcagggtaggcgattttcagctgtcagtcccgcacctgagcgagtttgatgacccgatgaaggttgacctgtcgtcggcaaccatcgagccgatccgcctggtgttctgcggctcaacgcgccacgtctacgacgccattgtagaggagatcgcgccgcagtctgacggcacctgtcagatcaccgcaaaagaatacctcgaatcgttctatgcctacgacgacgccacataccccggcgacgtcgcgtaa

SEQ ID NO: 234065 - DNA, 942 bp, Klebsiella pneumoniae
atgacgagtgcagttgcggtaaaaaaacccaaaaaactacgaattggcttctatacgagtagttctggaaccattcgaagcaactctgttgccaaagctgcgatcgatagcctttacagcacttgcgtgaatgtaactaacaatcatttcgatactacatataaaaataaaaagttgaaaattgcgtttataaataaagacactaatgccaaatattattttggctatatgtcttgctcaagagaagagtacctccttccttatattggcgatgagcactggaaagaacacaacatcccattggatgataaaaaatacattgtcgagcgtacttattttttatattactatgaaagcgacattttgatccttacgcaaaaccatcttggtccaaaggaatctgatctcgcttatcttctttatagccaaagtggacagcctggaaacaatttttctttccaagccatttggaagaaagaaagtattaaagaacttctcgaaacaggaagtacacttagaagctgcgaacttatcctcgctgctccacgaaacttcgatgtgactaattatcagttagatagttctttttcgaaagaactattaaatatgatgattggtcttggtggtacgcatttaaaaatcaatcttagagggagagcttctggaagagttaaagttaaaggctacctttcggatgtggtaaaagatggtattaaagaattattagaaaaaataccgaatattgtcaaaaaagcagcagtaacacagcccaaaaacactgctgagcagagtctgcttgaacaggttctcatctcggaaaaaaatatacataccgtaaacggctatggcacagatagcgatgtgctccaagcgatgatttctgctaaaattgataataatggttaccttatgcagtacgacataagcattaagaaggtatag

SEQ ID NO: 234066 - DNA, 531 bp, Klebsiella pneumoniae
atgaaatcatctgcgctgacctgtcgcgtggttattggttttgcattgcgcttcaacccgctgctggtggtcgtggtaacggggctggcgacgggtttgctggtcggtatggatttcggcatgctgctggaaaccttcggtgagaagttcgtgaagagccgttcgctggccaccttcattctgatcctacctgacattggtctgctggagtattacgggcttaaggagcgcgcccaggcctgggtggcgaagatcgctagtgccacttcggcgcgtattctgatgctttattttgttgcgcgtgaagccacggccgcgctggggctgatgtcgttgggcggccatgtccagacggtgcgtccgctgctggcctcgatggccgaaggagcggcgctgaacgaatacggcgaagtcccacagcatattcgcgacaaaatcaaagcccatgccgccgcgtgtgacaacatcgcagttttcttcggagaagatatctttattgcttttggcgcagtgctgctaattgacgcgtaa

SEQ ID NO: 234067 - DNA, 444 bp, Klebsiella pneumoniae
atgattttaaaagaagaaattgttttgggtatctacagctggcttcatatgactccggtcagcatgctggtaagaaacataaccagcgatcagggaggggattacgcgatcgtccgctttaccgtcgatagccggggggtccagatggggcctaaggcacagggccagcttctttgttcattcgggtttaatgtaaaggaatcctgtgaggccgaccctaaagacggtccaggcctcataaaggccgaaatgatgaacggtgttatgcagctggtaccggaatgcattgagctcacagacagccaaacccaggcaatcaggaaagaagtaaccgtgtttaacagggtttgtgcaatgcaactcctgggggggcatgggaatgcaaggtctctgtgggagaaagaaattcttccccggatgaaagtgcgcagacaactacattga

SEQ ID NO: 234068 - DNA, 297 bp, Klebsiella pneumoniae
atggaggacatttccaacacgtcgttactggctgactacttcgctcgccgtcgtggtgctctgctggtggatgttccgcacctggaagaactggaccgcgtggacttgtttagccgggcaatgcgtacctctgccgccagggggcaggtcgatcagattatcgaacaggcgcttgaagatggcgttattgaaaggcacgaggccgaagaaatcatggtgcatcaccgccgccacctggcagctcgtgaagaagagattgccgcaatcatcacgcttttttcacgcaaaaagaagtga

SEQ ID NO: 234069 - DNA, 297 bp, Klebsiella pneumoniae
atggaagacatttccaacacgtcgttactggctgactacttcgctcgccgccgtggtgcgctgctggtggatgttccgcaccttgaagagctggatcgcgtggacttgttcagccgggcaatgcgtacctcagccgccagagggcaggttgatcagattatcgaacaggcacttgaggatggcgttattgaaaggcatgaggccgaagaaatcatgttgcatcaccgccgccacctggcagctcgcgaagaagagatagccgcaatcatcacgcttttttcacgcaaaaagaagtga

SEQ ID NO: 234070 - DNA, 558 bp, Klebsiella pneumoniae
gtgctgattggttatgccagggtctcaacaggggatcaaaacctcgatttacagaaaaacgcgctgattcgcgcagaatgtgaactgatttttgaagacaaagccagtgggaagcacgtgcgccgaccaggtttaaagcaggcgattcgacgtgcgcgagaaggcgatacattggttgtctggaagttagatcgattgggaaggagcgtcagggacctgattacccttgtctcaggcctgcaatcacgtggcgtacatttccgcagtttgaccgactcaattgataccagcacgcccgcagggcgttttttctttcatgtaatgagcgcccttgcggagatggaaagggaattgattattgagcggacgcgtgcaggacttgcagctgcacgggctaaaggcagaattggagggcgtaagcgagtgatgaccgaggaggcagtgggaagagcccagagaatgctcgcgaatggggcttcccgccagcagattgcagagatttataacgttggggttaagacgatctacaagtaccttccagtggcccctaagttgtaa

SEQ ID NO: 234071 - DNA, 1671 bp, Klebsiella pneumoniae
gtggcaggaggggatgattttatttctgtcgaagctacgcaatatcccgctgataatcagggtgtgtgttttagttccgcaaatccggcattgaactggtatcgcctgagagtcctgagagaaaaaattatttacctggaagattttggcgcgactgaaagcgtcgtcccagacatgattgattgctcagtcgaaattggggccgcactgacctggcccacccgtcaggcgaacggtgtttttaagattaaaagccgcgggtgtttgtacaaagtttcctcgttcctgggtttgatcgactttgcgtatactcaacttgattttgatgggaatgttacgttttatgcccctacgccagctggcagtgatttaccggtcactctgatggaatgggtgatgacgaccagaaattcggtagagggtgcctatcaggggcggaatttaatcgtcagaaacttatcgattaaagcaacctcccgggaaacctcacaggtgacagttgtctacgtgcatgatatgtggggtgtgagctttgagctaaatactcatggtgttgccagggccttcttgatgggcagtaacatctggtgtttaaatattctcgggaaatttagcgctcaatgcatctttgataattcggctgcatccacaaatgccggtgaaaacatcagtctgtcgcctggcaccattctttataattcaggccaatgcgctgacctgtcgcaccatcagttttttgtaaatatgctgggcgtatccattgattacacccccggccgtaatggtaagcctgtctgggacctgggtaactcagtggtctatcataccaccgggcatactgaatatgcgggaccgtcctcagccccattcgcacggattaatggggattttggcgggttccatgtcacagatggtgtgttgctgttagtagtgaactcagcagcccattatgattattttgcagaaacgaaaaaagactatcagttttcaatccggggcacatcagtattcgggactcgcatggttggcaaggcgctgtgtaataaaaaaatgcgctactctcctcatgtcaatattggaagcacgcagaatatcagtcgtatatcagacaacggcggcaatgttctttttgacccaacattttcaaccggggtgataaaggacaagtggcatgtcgtaggcggcacacaagcagaccgttttacaacaaatttcgcggctatatctgtggcggcgtattcagctgctgaatcaggctatgcgttaaaagtgagtaagctgattgcaggtgtcggaaatacggtggctttacgcctggaggttaagtcaaaaggagcctatttgtcaccacgcatcagctttaaaatccgaactaacacggatgtttcggcgatggcgactgtcagcctcaacccgtataccgtgctggtgcgtgacgcctatggaatagcactgtcatcgggtagggttatgaccgcagtcgcaccgagatcaacctcatttacatcaatgagcgcggacgtggctgtagatgtcgtgctcaactcaattgaaatggtgagttctgacaatatcagtccggacgtattcctgctggatattggtctgcaaaatctacccgttggggattactacatttacgacgtcaactactgccagggggatatttaa

SEQ ID NO: 234072 - DNA, 231 bp, Klebsiella pneumoniae
atggcaggcgaaatgaaccagctgacagagaaagagcagactgtattgtcattaatgaatttgttgggcatggatacaaatctgacggcgcaggcaatggagtttattggcgacagcgttctaaattatcagctcttcgtcagatatttcagtgccagcgatttaactgataatgcaaccaaattaacggaagcaatcggtaaggctgctgaagcaaaagtgttattttga

SEQ ID NO: 234073 - DNA, 804 bp, Klebsiella pneumoniae
atgaacgacacatattattatggtcagggtaaagttttcctttccgtgcggaacccggtaacaaacaaatccgaaatctggcgctggattggtgacgtctctgctctgacgctgaagctctcattcgaacagagtgaaagaaaaatatcccgggctggcgtggtcatgacgtctgaccgtcggtacacctcttttgctgcatcactcgcctcggtctggcacgatttctccgctgataatctgtcgctcctcctcttcgggaagaccagccggattgcgcagagctggcagaacgatgaagcgttgccggagggcattacagcgggtgaccgtgtcgcgctggcctatcagaacgtccgggaagtcagtatcgacgggcttgcagaggggacagactacgaggttgattatggtttcggtgcgatcaactttctgaccaccccacaaaaccaacccgtcaaggtgacgtacgactattcaggcagtcagtccgtcagcctgcttaacgccaaatcgccagaggtttcgctccggtatgaaggcattaacctggctgaagggggaaaaaaagttctcctggaactctggcgaatgacattcgatcccctgacggttctggaactcattaataacgccacctcgctttcaggaatggaaacctcatcggcggtcttacctgacctgaaccgccaggcggcggatgtttttggcctgtttggccggatcgtaatgatagaagacttcatgactatcacttacgacggcaccatcgacttcgatggtaaatacaattttgcttattag

SEQ ID NO: 234074 - DNA, 2706 bp, Klebsiella pneumoniae
atgggcggtggtggcaagggttcaaaaaaagtcacggtcggctaccggtactcctgggatgtgcaggcgggactggggcgcggtccggtcaatgagattgtgtcgattatggccgataaaaagacggtctttgccggtactccggggcagatatcatccagcacctcagtgtacatcgacaaacccggtctgttcggcggtgatgataccggcggtgaaggcggcatacagggtcagctcgatatcatgatgggcgaaccggatcaggttccaccggcctcgctcctgaagttgctgacgggactcgtgccgggatttcgtggcgtggtgaccactttcttcagcggtctggtcagttgttacagcgccagccccaagccgtggttataccgcgttcgccgcacgactaaaggctgggacggtgatgtctggtacccggagaaagcgactatcctgctggagaacagcgagacccagattgatgatgaagcggatcttctccctgaacaagtcgccaacctccgggccattcatgccatgaacccggctcacattctggtggaatgtgccaccaatcgcgactgggggcgtcagctgacgctcgccgatgacctgaacctcgacagctatcgtgtcgccgccgacacgctgtttgaggaaggttttggcctgtgcttccgctataaccgtcaggatggcctggacacctttgttcagcagatcctcgaccacgtgggcgcggtgcagtatgccgaccttgaaaccggcaaactgaccctgaaactgctgcgcggggattacaatgtcgatgatctgccggttttcacctacgacaacggcattatcgccgttcaggatgacgacagcgccagtaccacatcgaatccgaatgaggttgtcgtgacctggaatgaccccgtcacgaattccgatggtgaggtccgggcgcagaacctcggggcgatacagaataccggactcaacagcagttctgtggagtacaaagcgatccccacgcactctctcgccgaacgcgttgcccagcgcgacctcgaaaccgcccagtctgaactgacccgtctggtcatccagttcgaccggcgcggcggtattctgcgcccgggcgatgtattccgcattcagctccccgaccgcaatatcgacaatatggtgctccgggtgggcaaaattgaggaaggcgataccggcgtcctgacgctgaccgtcgtccaggacgttttcggactgccgtccacgtcgtacagctccggccagcagggcagcagctggactcccccggataaaaccgccagacctgtcagcgttcagcgcctcatcgagcttccctacgccgtgctggccgccacgctcagcgaggcagagctgagctaccttaagcccgaatccggttatccgggcatcatggccgtggccccgacgacactcagcatcaactatcagatccagacccgcgctgcaggtggagattttgctgatcggggaacgggggactggacgccatcagggctgctggtagcggcggtcggcacgcttgatacggttctccatgtgaatatgacccgcttcccgtctgtcggcgacgggctgctactcaatgatgaagtcatccgggtcgatgccgttgacgagtctgccgggacactgagtgtcggcaggggctgcttcgatacactgcctgcgggtcatgatgaatcggacgttatctggttgtggcgtgatgcgctggagtctgacggtattgaatatctggcaggggaaaccgtggaagcgcgtctgctgacccgaaccagcacagagacgctggcggcgtctgctgcgccggtgagttcgctggtgatagcccagcggcagagccgcccctatctgccggggaatatccgcgtcaatggttcgccatacccgtcacaggtcattgctgccaccgactacaccctgatatttgctcaccgggaccgcctgttgcaggccgaccgcctgattgactgcacggaaggcagcatcgggccagagcccggcgtggaatatgtggcgacgctgattaaccaggataccgctgaagaggtctggtcgatcacctccggtgatgccagcattccgctcccatacgtcaccggaggaagtgacgcggcagaacatgccctgacactgcagagcatccgcgacgggatcacctcgttgtacaccttccggaccctgttgcctgcgggccagtacaaagccttcccgctcaccgtcacgctgtcgctgaccattcttgatggcggcgactgggccgggaccacgcctgaagatacggataccggtgcagtccccgagctgtacgccatttctgatgcagccggaatgaccaactggtatccgcctgacctgctggccagcgggctttccatccctgcggacgatatcggctatcccgccgggacatggccagcgtcgccgtggtcgtttggccctcaccagattttgtccattgtgcagtggactgagagcggtgtgccgtggaccgttctcaccctgtccggtgatgcctctctttatgccatcgactccacgacagattctgccgccgttattccctggaatgccggtgtttatcacgctgagattgatatgacgttgttcatgacggatgagccggttctgaacgagggcataatctctctcacgctgacccagagaggttaa

SEQ ID NO: 234075 - DNA, 204 bp, Klebsiella pneumoniae
atgctgatcacaatggaacatattcgcgccggtggcggctgtgcatgggggctacggaccttttttgcccgccaccatcttgacctgcaggcatttctgcgtgatggcggcattgattcgcagacactgctggcgaccggcgatgcactggccatccgggttgtcgaactcgcgcagctgcaggcgcaaaaggaggaaaaatag

SEQ ID NO: 234076 - DNA, 702 bp, Klebsiella pneumoniae
atggataacgttcgaattcaatattgtttttttatgggaaatagattttttctccttcttttaattattgtttcgaccttgattctctccggttgtgacaatgctcaaaaagccggaactaattacttggcgcaacaaatgcgtgacccagactctgcaaagtttcgtgacgtacagacagttactgattctgctgatccttatgttcaaaatatctgtggtttcgtgaatggcaagaacctcttcggcgcttacagcggtgaacaacgttttgtcgtcaaggtgttcactggcccccaaaaatcaacttttacccccttgagtttcgttgttgaaggtgacgacaaccagtctcgtcgggctacaaaggattcgaacaaaacaacccacccgcaaacgctttttgaagaacgatactggaacaaactttgtatcaccaatgagcgtaaacctacatattctggtgttagctggaagacgcccttcgagctttgcagagataagatactttcctcaatagaaattaaaggagatgtgccagtggttgaagcccaatccgttggtggtgatacaattcttgagtggtatggcgataatgaattctttgtaccgacatcaacaccacatgagatggatttgcatagtgttcgttgtgttgtgaacaatgattctggggagataagtgagtttcatatattttaa

SEQ ID NO: 234077 - DNA, 306 bp, Klebsiella pneumoniae
atgagcaaggtaatcacatccacatccggtggccgtatcctgcgggttctcaaagcgctcaaaggctcttcactcagtggccgttccaacagcgaactggcgaaagcactggatgagtctccggccaatatcaaccgcgccctcaataccctgatagacgaagggcttgcccagaagctcgataacggcaggtttgcacttagtgtgcaggttctgcagatcgctgttgcccatagtaatgaaattgcccgcgctcaggggcgtattgatgaactgaatcagcgcattatcgctggcagtcgctaa

SEQ ID NO: 234078 - DNA, 195 bp, Klebsiella pneumoniae
atgtctctgttatgcaaacgttgtgacaatccggtcgatgaactggattttgaaaaggcgaccattatgaaaaatttggatggtacgtggtgtgtcgatctgacgctgaaatgcccttactgcgtgctttcttataaagccattgtccccacagctgaattacaacccctgacaggtgatgaaaatgacaaatga

SEQ ID NO: 234079 - DNA, 834 bp, Klebsiella pneumoniae
atgccaattccagataacattgctgccaaaatacttgttaaatcagctaggcattgctgtatttgcagaagattttcaccattgcaaattcaaatacatcatatcgtcgcgcagagtgaaggaggtttagatgatgaagacaatctaataccaatttgtatttcatgccattcatctgttcattcaaagatgcacatgacgaaaggatttagcagggcagaattaaaaggacatcgcgatgctgtgtacgatatggttgaaaaaggaaagcttcctgcacaacctcaagtaaccggcgatgaaatgcatgcattatcaacagttattatcgaaacattgaaagcagaggggaaaagtcaagacctttctgagcgtgcgacagagattctattagctgctgcatgcgaggaaagcccagcattaattaataggacagatgatggaattattatcgagtccaacggacagacctttcatttttattccaaggaagtaaaacagtatcctgatgagctatttgaacttgcgcatgctggtttcatgagccttgatggggcgacatcaagcataacgaacgccggtattgctcatgtgcaaaagattgtaaaaacaacagccaaatatacagagaaaaaagtcagatgcatgaaatgcagtctacactttactatcttttcttggtatccagaactgcatcgagctaacactctccattgtccagaatgtggacaatctgagggattgtttattgtttgggctcagcagaaatttggttttatttttcagaaggtgccgggtaattcatcgctatgggacatggggaatcttccctag

SEQ ID NO: 234080 - DNA, 912 bp, Klebsiella pneumoniae
atgaacagttcacgctttgaaatgatgatgcattcaataaaaaaaccatgcgtcttacgtttaaaattaattaaggataaatcaccaaacaaaccactttttatatttgaaggcagtgatgattatgatttttattatcacgcaatgaatttatgcgcattcgataaagatttttcacatatcaagggctctggtaaagatcagtccatagctctgtatgatgaactatcttctgaaaatagtgaatttcttgatggcacttatttttttgttgatcaagactattcattattttgctattctaataaaaatatattcacacttccattttatgctattgaaagtccattatctgacaacagagtaataaaacattttttgatatcttcatttaaacttgacgaggcaaacaaggaattaatagaccgattgatgacattttatgagtctgctaaaaaagatttccatgaaggcataaaaaaaatatcaatacaactatacatgtctagaattcttaaccttagcgtggaatttccaagcaacgcacaaatattcaaggcaattaaaaaagacagcgtgacattcaaattaaatgacattcctgaaatcacatccagactcaacaatatgtctaacgatgaaaaaacctatcacgatattatctctaatttagacgaagaactattgattagaggcaagtatgtttattactttatatgtgagtggcttatggtcataaaaaaatacatacataatcgaatcgactccgccatagctttagacaataccagagcactgccactttgccaagtaccaaaagctcaatataaccacaccgatctttccatatctagattagctccctcatgtaaaaaggttaaagagtttggagaattcctaaggcaaatttaa

SEQ ID NO: 234081 - DNA, 1467 bp, Klebsiella pneumoniae
atggaattaaagcgtttctcactgaaaaatctttacggttataaaaatattgagctagtttttaataatgaagcaacaataattattgcagaaaatggggcaggaaaaacaacacttataaactcattaaatgcagtattaagaggtaatgctgatgagttaagaaagctgaagtgtgattcaatagaaattgatttcaaagataaaagctatgaaataaatatatctgaactgaatttctctgattttctagccactgcacccttacctacacaatttttaaaaatgatgtcattcctaaaaccatctcaaattgatgatttgttacatgatataaagagcagatccgtaagggaaataagggaatcaagaaataaggagtggtaccgccttatatataactcaaccccatatggatactccgagattgataatatattaaccaatataaaaaggcttcttaacaatcactactctcagcagcttgatatctttcaaaatcatgaactaggaaatggaaatcaaaaaaacaagtcaactttagcgcttgaagaaataaaaaatagaatgcgtaattttgacataatatatcttccaacctacaggcgaattgaaaaggcgacattaagagataaatatacaatcgagtcagatgaaaaaatgcaattccgtgatggagagcttgtaaaaatccgcacatcttctgctaacggtacacatattgagtttggtctttatgatgtcgaattagaacttaaagacattagtgaatcaatcgaacgtcgttcaagtctagggtacagaacattaagtgcaaacattatcgaagacatgatgactggaaaaatagacgataaacgcactcgatatagaatacctgctattgatgagctttcaagatttttaggtagggttgttaacaaagataaagaaggaaatgaaaaaataatcggggaagtaacgcgcataatgaaagataaagctgcattagcatctaatggcaacttaatctactttttgtctaaattaaaaccggttatagactctacaaaagaacttgaagagaaaatagaatctttcgtgtcaatgtgcaataaatacctgcaactctctgatgattctaagtttttagattatgacgttgaatcattgcaggttattgtaaaagatttacataccaataaccccataggcttggaagatttatcatccggagaaaagcaaattatatctctgatggcacatatgtacttagatgatacaaaagcaaagatagtacttatagatgagcctgaactttcattatcaatcgaatggcaagaacacgtacttgtagatatagtgaatagcccttctgttttacaaatgtttgccattactcattctccttttgttttcaataatgaactgaagaaaaacgttaaatctttaaatgttaaaaagaatttaaggaactttgacaaatga

SEQ ID NO: 234082 - DNA, 921 bp, Klebsiella pneumoniae
atgttacataagaaaacaacacaagaaaatgtagcttttggacttgctgtacttaactactatcttcgtttcaattctaaagcaaatttacaggacgctaatgtaagttcagaggaattgataagtaatttagtgaatattctgtatggccataattttatttgtacatcggaaatttcatcaaattatccgggaatagatgctatagataaaataaatagactaggactccagataacacatacaagaaccaattcaaaaattaataaaacaatagataaaattcgtgaaaacaaagttaacaatgacattggtgtgctatatttcttcattacatcaagaaggcagaagaaatacactatcacctcacaatgcccaaatctaaacgtcacagtaaataacattctagactttgattccctggctgaactgctttcgcaaaatcagaataaattggctcaagcagaagcagagcttattaaagcaatgcctcgtctctaccaagatgtaaaagcacaatatgaggttatgcttaatagtattcttgtgactaggaaggagttggatagaagagtattcactgctgacaaaattttggaagaacctgaagaaatgctttcatcccttagggaaatcagaatcgtcatacaaaaatcaggcattatgaatgaagctaattccgttgtatcttcttcatttaaagaaatagtcaacattattaatgatgttgagagtcaaattgcaaaaaaatacatgagtggatataaaaaatataaggccgggatttttccttcgtgggattatcctgataaaggagattgtttagacattttaatgggaataagaaaagatgttttagaccaaatgcataatgttgacattgagatcaataaactgaaagggtttcttgggatacagtaa

SEQ ID NO: 234083 - DNA, 1119 bp, Klebsiella pneumoniae
atggctcgaaaatttgttatacaaaaacctcagtcaaatgaggagctatttaaatcgttagtaattaacgctattgattttttagatgcatcaattgataatttggataaaagaccaaaaaactcaattattgatttttatactgctattgaactttttttaaaagcaagattgatgcgagagcattggactcttatattagaagatccagggaatgcacatagtcaaaactttagcttgggtgactttaaatcggtttaccttgatgcagcagttaaaaggctaagatctattcttggtataaatcttggtgataaagttgtagataatttcaaagcattgggtgagcacagaaatcaaattgttcatttcgctcatacagaatattcaaatcagcaagcaaataaagctggtgtagtagcgcagcaatggtcttcttggcattatttatatcacctcttatcggtagattggaaagacatctttttagatcatcagaaaagcatagatcgtattcatagaagaatgctcactcagaaagagtttctaaaagcacgattcactgaactctcgcaacaaattgaaataaatagaaaaaaaggaataaaggttgtaaattgtaatcaatgtaatctacctgcaggcatagttaataaaaatcataagtggggagatgattatgaatgcttggtatgcgaatcacggggtgtagctttggaaaaagttcgggataccctagattgccctcaatgtggtaatccttttgagttttttagccatgatgtcaatgaatgttcgacatgcaaccataaaatagacacaaatttattaattagactgtgcaaagcaaagtataaaacaggtgatgattggcatgagcctggtggagatgtcattgctggatgccatcaatgtcaacatagccctgattctgttttttatattgaaggacagtggagttgcgtttcatgttttgatcgcggatggtctgcaattaactgtccacattgtggcgcgtatgttactggagatatggaaagaattaaatactttgcttgttataaatgtgaagataaacagagggatttgattttatcaacgtcgggcgttaatttataa

SEQ ID NO: 234084 - DNA, 228 bp, Klebsiella pneumoniae
atgagacactccacgattactgcccgtgacctcgaatgccttgagcatatgcgcaatgtcggccagctcgtcagcgacctgatgcaggtgcaggactgtacctccctgcgtcgtgacccgactcagcagttacagctcacctccgtgatttacctgatgaccgcccagctcaacggcgtggtcgaacgctgcaaccaccgctggttcaccggggagggcaatgtatga

SEQ ID NO: 234085 - DNA, 1335 bp, Klebsiella pneumoniae
atgataaaatcacaatactcagataggtttgcttatcattttacacacattgataatcttgagggaattataaaaaatggattactgagtacaaatttaaaatcaaatagaggcattactcataaagatatagcaaataatgaaatacaacaccgccgtagtgaaatgagggtcacttgtggtccaggtggagtggtccatgattatgtgcctttttacttcactaaaagatctcccatgttacttaatgttattaagaaaaaaaatgtagatcaagaaggaattatataccttgcgataccaatagaggcgatagaagataaatcagtagttttttcaaattcttctgcaaatactttaacgccaccaacattttactctaatgctgatgatttaaataagctaaattgggatgcaattgacagtagagtgtgggtcccaaagaccgaaagtgtaaaacagcaaaaaatggcagagttgcttattcataatgaaattcccttcaataatttttcatttcttgttgtttgggatctttgcatgaaaatgcatgttacacagctattgaaaaaatatggggttaataattttgatgttcgttgtgattatatttcatttgatcatcattactttcatgatttaaatgtggcaggccgggtaaatattgttacaggacctaaaactctccttgcggagactaaaaaatatataagtcatataaaacaaaataaacctttaaatcctagatttaaaaatatcgcagatgtgttagaagcgattagcaataactttgggtgtataaaagaactttctgatattgatggccttgaaacagataatcctattcatcaagaggatgttggggcacatagcagaagagttgccagcttacttaacacggagtctgcattccacgacttatcggaaagagaacgacttgttgtaacgctcgctgcatatttacatgatattggcaaaggacctaaatctagatggaaagatggagtacaaaaagtagatgatactcatcctattaaatcgttacctatgcttagaagaattttatgtgaagaaataggtgatttatccaatagggaaataaggcaaattgtcacactcgtagtttacgatgatcttgttggagatataatagcccatgaaagaaatgaagagcaaatgcaaaaaataataaagataaaatctgatgtagatatgttaattctaattgctaaatgcgatatgaattccattaatacagcatgggtaagagatgggcttgataaaattgaagagttaagagcaaggatgtatacttatcttgaggagaatttatga

SEQ ID NO: 234086 - DNA, 1116 bp, Klebsiella pneumoniae
atgattagattcgttgatggtgatttttttgattatgctgccgacattagaatcaatacagttaattgtgttggtgtaatgggggcaggggtagcttttgcttttaaaaataagtttcccgaaatgtatgatgagtacgtattgctatgtaaaaaaggagacatatccccaggtaaaccagcagtttggaaaaatgttgatgcgtatggtaatgatattgagatcataaattttcctactaaggatcattggaaaaataaatccaagtatgaatatatagaaaaaggtctggtttggctctcgaattatttggagcataagaaaggtaaaattatcactctaccagctttaggttgtggccacggtggtcttgattgggaaattgtaaaaaaaatgatacaagattctctatctaacaataaaaatgagattttggtttttagcccgcaagcatcaaaaaataataaacgagaaaaagtcacactaaaccatagctacccatcgctaaaggatctaaatgtgtccgaaattcgacgtgatgataaaagctatccggtaaaactttcaactttatcaaacaaaaatctttattatactgggcagttatttactgactttgatctttctataatttcgagtacatcacctagcgatatagaaaagcaagctgtccttgatactattgatatttctgttaagaaaggctattcattgctgtttggtggaactgctttcgataaaatgatggctgttactgctttgcgtaaaggcatcaagacaggtgtttttttaccaagtggcatagctaaatcagctgaaaaattgaatttgcacggtaaatttaatcatctaaccatcctttcttttggtgatccttttgttcaatttaatagaagtgagtatctcccctcagtttttagtcgcattcttttaccgcgccgagtgttgttcactacaagtaaattacaatggcttaagaagcataaaaaaatcattttacaaaataatattgattcatttttccttatttcggaaacaaatgataatgacatagaagctgcgaatttaattggatcaaaagctatagatgaacatgagttatttaattttatttga

SEQ ID NO: 234087 - DNA, 279 bp, Klebsiella pneumoniae
gtgacagtaggcgaattagttgatgcggtggttgagcttggtaataccccaaaagtttttgtgcgccatgatgatcaccttggcctcaagtcaatgttatctgatgattttttaaaaacaaaattatcagacattgaaggcgactcttttgctccagaagttgaagaggttctggaacaggctaacacgattatcgaactcgatagccgtgaactgtccgaggaagacgaagaggatattcgcgaagaagaggaatactggggtagcgccaaaggctaa

SEQ ID NO: 234088 - DNA, 723 bp, Klebsiella pneumoniae
atgatgaataacttgatcactaacaaaccatccatgaccagccttgagatcgccgagctggtagaaaaacgccacgacaacgtgaaacgtaccattgtgacactggcttcaaaggacgttatccggtctcctcaaattgaggttctcgaaagaatcaataacttaggatttgccgtcaatgacgaggtttacaaattttcaggtgaagaaggaaaacgcgacagcatcattgtggtcgcgcaacttagccccgagtttaccgccaggctggtagatcgctggaaagagctggaagaagaacgctcccggccaaaatcgcaggcagagctgatcgctgaaatggccctgctgaatgttgagcaggagcgacgcctctaccaggttgaagaacaggttgaaaccgtcgcggaagctgtcgaaaacattaagcgaggaaatatgcggcccgggtatgtcggttatcgccaggtggtcgcaaaaagcggcatgaccgatgccaagtgccgaaaccttgttaacgcataccgtatccccaccgatactcacgagtttatgacacctgacggcctgctctcacggcgggctatcgtggagtttgaacctcttatgaaagcattccgccaaatgatggcagaagccgaaccacgtgggacccgttggtatcacccgaaaatgggactctttcaggctatcggatgggaggaaaaacattgtgaaggttga

SEQ ID NO: 234089 - DNA, 579 bp, Klebsiella pneumoniae
atgctcaacaacaatttttcaccggaaccaacatctaccggcatccggtttggccgcagagttattggttacagcacggctattcgctcgctcgataacggtcgctatgacaggaacttatcaaaaggcttggatgttctggcctgcatcatggaagcggtagagagcaactggatcacgcttaacatcgagaagcaaatcatcgtctggcgctggttgctcgttgcggtattcattaccgaggagcaggagaagaacgggactatcgacgttccgaacgacgaaggcggcgttgatacagccgttatctatgtgggagagcgcggggcaatcagcgtctaccccgggccggagcgctttgcactcgctaaccatattgaggccggcgccattgagaaatacggcccagaggttggccagcagctggcgctgcggatgtatcaggacatggttattgctgacgaagaatttgggttcaggttatcagcacttggccgggaggggtttaacctcctccacgacagctttatcgaacacatccagatcgaaggtgtgccagaagcaccgattatgcattga

SEQ ID NO: 234090 - DNA, 405 bp, Klebsiella pneumoniae
atgatcgacaaccgcacagccagcgccatcgacctggcactacagaaacacgataccccggctggccctttgtttgtagctcaacgccacggacgtatcaagaaatgctttagccgggataccgccattcgctatctggctttcttcatgaccacctgggcattcgaggcatcaggctttaagtgccgccaccctcgagtacgtatcgatcgtgacgatatggaagtctggcgcgatggtgaaatacgagctgagtatcaggctgcccaccagcgttgccttcgaaggctgcgtcgcatccttgcccgcaaacgtgaaatgcagaaatggtgcgaaaagtgggatgccatgcatgaccgttacatcaaagaacgcgacgaactccaggccaaaaaaccgttttaa

SEQ ID NO: 234091 - DNA, 258 bp, Klebsiella pneumoniae
atgagaatgattgaatatcgtggcgtacttattcccgctcccccaccaatggtgcaattaagttgtgagccgggttttaccgggcgagtggtgatcgagctgaaagatggcgagttcgtcaggcagtacccactgcgagaaaaagacatgttttgctcactcgaggcgtttctcgatctggctcaggaagctggatatcaggtaatcgcacccgagacggaggatcactgtggcactgacagcaatacgcattcctga

SEQ ID NO: 234092 - DNA, 336 bp, Klebsiella pneumoniae
gtgaaaacaaacctgattgagacccgccgccgtcacctcgttcgcgccaagcttgattcaatgatgcgaagaactgggagttatttccagatagtcaaactggaagacggcacgaaattacctgtagagcttgatgaagatattttaacaaaatcattaatcaaacttttcgaagcgatgatttatgacacccacaaacgcgagcaggcagaaaatttaatttctgaacattattcgaattgcatgggcgttaataaattaacgcccgatggtgtggactttatgaatgcactcattgccacgctggccgaacagtcattaaaagccgagggctaa

SEQ ID NO: 234093 - DNA, 474 bp, Klebsiella pneumoniae
atgcgtagtaataacaacgaacataataaatatttttctgtggatgcaggcatctcatcagagacaattacgaaggctgagcgtcttgttatggagcgcttcagtcatatttatgcaaactgggccgatgaaaaaaacttaagtcgtgaggcggaagaacttcgcgtaagagaaattaaaggttttaaaaacatcctcctctctccctggacattaagcgatgtaaccattgaatgggattactgggaatccgtacttcgtcacaggtataaaacacaaaatggcgatggctacgtccagattatctgggatcggcgcgggtggctcactgaccttttgtgcgccatgaaaccagttacccgggctgaagcattaacagtctgcaagtggttactggcatgtgactattttgaggaacgggattcgctgtttgattgcattattttgaacctggtcggggagtgcgaagaatga

SEQ ID NO: 234094 - DNA, 1128 bp, Klebsiella pneumoniae
atgcaaagcctgtctccaacatcgcgttaccttttagccctgaaagagggcagccatcaacccgacgacgtccagcaagaagcggtgagccgccttgataccatttaccaggaactgcagacgcagcccgcgccggtcgcgtcaggcggcggtttgcgcgcgaaattcggcaaactgctgggtaagcgcgagccggctgccgggacggcacctgtccgcggcctgtatatgtggggcggcgtggggcgaggcaaaacctggctgatggacctgttttaccagagcctgccgggcgagcgtaaacagcgcctgcatttccatcgtttcatgctgcgcgtacacgaagagctgaccaccctgcagggacatagcgacccgctggagatcgtcgccgaccgctttaaagcggaaaccgacgtgctctgtttcgacgagttttttgtctccgatattaccgacgccatgctgttgggcgggctgatgaaagccctgttcgcccgcggcatcaccctggtggcgacctccaatattccgccggatgaactctatcgtaatggcctgcagcgggcccgttttctgccggcgatcgacgccatcaagcagcattgcgatattatgaacgtcgatgccggcatcgattatcggctgcgtaccctgacgcaggcgcacctgtggctgtcgccgctgaataacgacacccgcgaacagatggataaactgtggctcgcgctggcgggcgcgccgcgcgctgccgggccgacgctggagattaatcatcgcgagctgcctaccctcggcgtagaaaaccagacgttggctgcgtcattcgccacgctatgcgtggatgcgcgcagccagcatgactatatcgcgctctcccgactgttccatacggtgatgctgttcgacgtgccggtgatgaccgcgcagctggagagcgaggcccgccgctttatcgctctggtggatgagttctacgagcgccatgtaaagctggtggtcagcgcggcagtaccgctgtacgacatttaccagggcgagcggctgaagtttgagttccagcgctgtctctcgcgtctgcaggagatgcagagcgaagagtacctcaaacgtccgcatatgccctga

SEQ ID NO: 234095 - DNA, 1185 bp, Klebsiella pneumoniae
atgaagacacaggtcgcgattattggcgcgggcccctccgggctgctgctggggcagttgctgcacaacgccgggatccataccgtgatccttgagcgtcaaacgccgcagtatgtgctggggcgcatccgcgcgggaattctggaaagcggtaccgttgatctgctgcgcgaagcgggcgtggcgcagcggatggatgccgaaggcctggtgcatcatggggtggagtttctgtttgacggccagcgggtgcccgtcgcactgagcgagctaaccgacggtaagagcgtaatggtttatggccagaccgaagtcacccgcgatctgatggctgcccgggccgccagcggcgcgccgatcgtctatggcgtgagcgaggtggctatccatgacgccaaaagcgaccggccgacgatcacctacctcagcgaaggggaaacctgccgtctggagtgcgattttattgccggttgcgacggtttccacggcgtatcgcggcaaagtattccagctggcattttgcagacctacgagagcgtgtggccgtttggctggctaggcctgctggcggatacgccgccggtcaatccggagcttatttatgcgcaccatcagcgggggtttgtattgtgcagtcaacgctcactgactcgcagccgctattatctgcaggttccgctgagcgataaggttgaagcatggtcggacgagcgcttctggcaggagctgaaaagccgcttgccggaggagctggcatccaggttagtgactggtcactcacttgagaagagcattgcccccctgcgtagcttcgtcgtggaaccgatgcaatatgggcggttgttcctggtgggggatgcggcgcatatcgttccgccaaccggggcgaaaggattaaatctggcggcatcggacgtgaactatctgtggcggattctgcgcgaatactaccatcgtggccgcagcgatctgctggcggcctactcgcaactggcgctggatcgggtctggaaaggggaacgctttagctggtttatgacccgcctgctgcatgattttccggatcagaacgcgttcgacgctaaaatgcaggccgccgaccgccgctactatctgggctcgcgcgccgggctgaccaccatcgcggaaaactacgtgggcttgcccatggagcgtgtcgcctga

SEQ ID NO: 234096 - DNA, 126 bp, Klebsiella pneumoniae
atgagcacgcaatatggattctttatcgactccgctcgctgtaccggatgcaaaacctgcgagctggcctgtaaggactacaagaacctgactccggaggtcagcttccgccgaatctatgaataa

SEQ ID NO: 234097 - DNA, 264 bp, Klebsiella pneumoniae
atgaacatcgccacttatctcaataccggtttagccattcttggatgggcatacatcatggttaaaacaggccagtgggttaccaaaaatgctctgaggcagtgggacaagcgtcgtaaggaatctcgccgccagaaagctgtgaatgagttttatgacgcctttgagcttaacagcctggaacccggctctaccgttcgcctggccactaaaggcgacctgacaatcatgatgttccgcagcgagggaaagtccaatgactga

SEQ ID NO: 234098 - DNA, 1476 bp, Klebsiella pneumoniae
gtgacagacgccgctttatccccggaagaacagctgatcgacgatatcgccagcttcacccatgacccgctgggctatgcgctgtatgcgttcccgtggggcgaggatggcacagaactggcgcacgcctccgggccgcgacagtggcaggctgacgcattccgcgagataggcgagcacctgcagaacccggcaacacgtcaccagccgctgatgatttcccgcgcatccggccacggcatcggcaaatctgcgttcatctcgatgctgattaactgggccatgtccacctgtgaagattgcaaggtggtggtgaccgctaataccgacaaccagttgcgcacgaagacctggccggaaatcatcaaatggtcgaacctggcaatcaccaaagaatggttcacctgcaccgccactgcgatgtacagcaacgatccgggccacgacaaacgctggcgcgccgatgctattccctggtctgagaacaacaccgaggcgtttgctggcctgcacaacgagcgcaagcgcatcgttgtggtgttcgacgaggcatccaacatcgctgatctggtctgggaggttgccgaaggtgcgctgacggacgaagacacggaaattatctgggtggcattcggtaacccgacgcgtaacaccgggcgattccgggagtgcttccgcaaatacaagcaccgctggaagtgcgcgcaaatcgacagccgcaccgtcgaaggcaccaacaagcagcagctgcagaaatgggtcgatgactacggcgaggacagcgactttgtgaaggtccgcgtgcgcgggatcttccctgaagcgtcagagctgcagtttatccctaccgggctgactgatgaggcaatgaagcgcgttgtgaccgctgcgcaggtggcgcacgccccgcggataatcggcgtcgacccagcatattccggcgtggatgatgcagtgatttatttccgccagggactgcacagcaaagtgctgtggaccggcaacaagaccaccgacgatctgattatggcgaagcgtatcgctgattttgaggaccagtaccaggctgatgcggtgtttatcgacttcggctacggtaccgggctgaagtccatcggtgacggctggggtcgcacctggcagcttgtgccgttcggcggcgcatcggcagatcctcagatgctgaataagcgcggagagatgttcaacgcctgcaagacgtggctcaagctcggcggcgcgctggacgaccaggagacggcggatgatctgtcagcggcagagtacaaggtgagggtagacggtaagatcgtcatggagccgaaagaggatatcaaagagcgtctgggtcggtcgccgggcaagggcgatgcgctgcttctgacgttcgcctatccagtggcgaagcgttcagatttccccgctgccggcggcaagcagcccaacgtgatcagcgagtacgacccgtgggcgtaa

SEQ ID NO: 234099 - DNA, 234 bp, Klebsiella pneumoniae
atggcgggagaaatgaatcaactgacagaaaaagaacagattgtattgtccttaatgaatttactggggatggatacgaatctgacagcgcaggcaatggagtttattggcgacagcgttctcaattatcagcttctcatcagatactttagtgccagcgagttaacagaaaaccaaacaaatctgaatgaggcaatagaaaaagccactgccgcaaaagtgttatttgaataa

SEQ ID NO: 234100 - DNA, 1869 bp, Klebsiella pneumoniae
atgaaagaaccaaataaaatagatggaaatcgccgcgatctcctcaaaggtctggggattgccgctgtcgtgagcctgttaccagagacgggaaacgccgcgcaaaataatgccgccccgaaagcggcatgggatattcctttcaccggcgaaatccctgacacactgcccgaaggctacaatattttactcataacctgcgatcaggaacgttatttcgagcggtatccctttccggtgccgggccgggaacgcctgatgaaaacgggtatcacttttaccaatcatcagaacacggccaacgtttgtacgccatcgcgctctgtcatgtacaccgggctccatatgccgcacacccggatgtttgataatcttggcttcccctggatgaattacgatctggacccggaattacgtaccgtgggccatatgatgcgtgaactgggttattacacggcgtataaaggtaaatggcatcttacccgggagatcgatcagccggtcgctggtaaatcggtagaagaaatggacctgggcgagatcccgacgccgcgactgcatgaaattatggaaaagtatggtttctctgattatcacggcattggcgatgtcatcgggaaaagtaagggcggctatttctttgattcagtcaccacggggcagaccattagttggctacgtaacaccggccgcccgctgaatgatgaaaataagccctggttcgcggtagtaaacctggttaacccccacgatgtcatgtttatcgacaccgatgagcatggtgagcaggtgcagtggaaagggccaatggataaagaaaaccacaccctgctgccaacccaacccccgcacaaccaaatctatcagcaaagctggccagactatccgctgcctgcaaaccgccatcagccgctcgatgagcctggcagacctgccgcccataaagagtaccagaatgccagggcggtgatggagggacagttccccgatgaagaccggcgctggcgcaaattactggattattatttcaactgtattcgcgacaatgaccagcatcttgaggcgattctcaatgagctggataacctgcagctgacgcaaaatacgattatcgtctttaccgccgaccatggggaactcggtggctcccaccagatgcatggtaaaggttcctcggtgtacaaagagcagatccatgtgccgatgatcattcgccatccggcgtatccgggaaatatccgctgcaacagtttgaccaatcatctggatttagtaccgaccctgattggtctgactggacgcgatcgctcgctgcgagagaaagtcctggagggcagaaaaggccgggatatgagcccattactggcgcatcctgagcaagcgggcttaaatgcgctgcgtccgggttcgctttattgttacggcatgatcctgtatatggatgcgcaatacacggcaaaattcagaaagctggctggagaaaaactcccgcacgatcaatttaaaaaagcgatcgcgtcactccatcctgatttttcccatcgctcagggatccgtatgatcaacgatggacactataaatttgcccgctacttttcgctcaagcagcatcatattcctgctaccctggccgagctgctggagaataatgatgttgaacttttcgatctggttaacgaccccgaagaaaatcataacctcgcccgggagccagagaaataccgggatctgttaatgacaatgaacgataaactcaatcagctcactgccgctgagattggcgaagatgatggcagctatatgcccccgtttgaaggaagccagtgggatctgacggcggcccagatgcatcaatatatgcgcgattag

SEQ ID NO: 234101 - DNA, 1263 bp, Klebsiella pneumoniae
ttgaataaaagaatactatcaaattcaatatggatgatgtctgaaaaaattatatcactatttggattgatttttgttacatcatttgttgcgaaatatgtaggtgctgaagtatttggtcaaatagcttttgcaacctcactttttcagattgcaatgataatagctcaattaggcagcgatgttataatttttaaacgcgtaagtaaaaaaatagattctggtgtaaggcttattacgtcaacaatctatttaagagctataacttatattttgacagctatcccaatagttattgtaagttatgagaaaaatgatgttaatgcacttttttttattattgcctgtgcaatctcatgctttttcaatgcaatggatgtttttggtatatattatgacgcaagattagaatcaagaaaaaatacaattattaatatgttaggcttgattattagtttatctttgagatggcttattgcttttgttcaccttgagccagtatatttgtgtttgccaattattctaactggttttattccttgcgcctttagatggggtcttttccgaaaggaacatcaatttgatagtattaaattgaaacataaaataaagtacatgaaatacttgctagttgcaggtcttacatttgttgtatcaacaatctctgtcgccatatatactagggtttcaatgctatctctaggtttcttttacgataaatcaattgttggggttttttcaattgctgtttctttagctgcatcatggtcatttgtctgtaattcacttatcacttcgtcattaccatcaattttttctgaaaaaaatgatagcgttgctacccataaagcatcaaaacttaatttgcttgttgtaattattagtttgccaataatcttatctacatatgcttttggttcaatgattataaatgccttatatggtgaggcttacaaagcagcatatatacctttaatgattttgtcattttcgactatgatttcatcacttggtgttatttcatcaagatttattgcgaggtactcgggctatgcttttctttctaaaaaaatgttcgccatacttatatttagtttggctgtgaatataccatttatatatatgtatgggatgtgtggtgcagctgctgcgactttattaacagagttgttttctcttacagttttcaattatttatttaggcgtgggcttgtattaaaaatgcatctgcaaacattcattccaagagctggtaatagataa

SEQ ID NO: 234102 - DNA, 1278 bp, Klebsiella pneumoniae
atgacaattaccagaaggaaatttttagggttttttattcccacatctcttacttcattttccttttcttcttcagctaataacaatcaaacgaaggttctggatgaggatttttttaagctggatggggaatataatggtgatgatgtatgtttatcattcgaaaagcttttaaaaaaaaagaacgctatatttattaacaataatctatcttttcataagcgtatatctttttcgcgtgatgaatctttatttttgcttacgtcaccaaatgcaaatgtgagtggtactggttttttcccgaaacttaaaacaaatccgaaccatgttatcgctggaaatacaattagacgagttttaaatcgtgataatttagtaaatttatatgatagagtttattcacatcaagttattgcctttgaagcattagttaaaaatgtcgaaaatagccatgttcgctctgagaactttgtatcactttactcagggattgaatcggtggattgtgaagagcagcggatgtgggctatcaatactgtaactaatgcgcataacttaaggtctggggatgaagtttatggtattgaagtagatactaatattgatggtgatgttaccggtggacactatgtaggtttatatatcgcaggcataggcgatttaactggtacagcaaactctgatggtattagagttcaaagggtgagagactctgcatcaaaatggcaatatgggcaaagaatatttgattctgtcgtagggataggcatttatgatgcaactacattttcaattgcagcccatggaaaaggtgcgatcgcaagattcgaccccaataatgatggaagttggtcatttgctcactatggcccatcaaataaaatactatggggcattgataataatggttattcatatagtgaaagattgtaccttggtgatggagttggaaaagataaaaaaaggattaatctcgagggaggagtgtatttctttaaaagtaaaaccaaaatagtatttaaaaagttattgccaagaacctttaacgattatgattttgaggatgtgtttaatgttgatgtggaaatcgattattcacgtgcatctatagttattactcctgttatggatgcatgtgatttccctttgatgagttttattggttattatgttcgtcagcaaaaaaaattctatatcagagctttaaatgttggtaatgctgaaatatctaaccttagtgtatctttgaatgttatggtatgtgttcattcaatttaa

SEQ ID NO: 234103 - DNA, 1170 bp, Klebsiella pneumoniae
atgatcgtaggtttatgcaactttgattatcaatcttattttacagatgatggcttaccacttgaactttcatttgaagagataaaaactgaactactcgatgtgactgtaagatgctcaggattgcctttattgaaagagcagaagagtggagatatttactttccagataaaagtaaaatggtcatccactatcatgtgcaagaagccttgaaagcggatgagagaactatttatattgctccacgcgaagacagaaaagataaaagatatcatttttgtgaaggtttcaatttttcatattcatctattgattatgagttcataccgggattgtacagagaatggaatgatggattcctcactcctgtcttctttaatatttcagttctcaataaatattcacaatcgccggactacatactcgatctcttttcctcaacatacggtaatataactaataaaaatgataaatggatcatcagttttggaattaacaaaaataagaaagtcataatgtggctaggggatattgaccaactccccgaaaaggaaaaatattatttactatcagaaaatgttgaaagcgatcattctatacactctgaattctacaacgcgcaaatagatgtcaagtggtctgaccctagtattgagaatgaagttttcgaactaagaaaaaaaatatcagataaagcaaactttaagcatggccatccaatgaacaaactggagggcgaaatatccaatattataagcaacttagacaagccagtttattgggaagataagcatgtaagcccaataatagagtccctcaatagagttttcatagaatctctgaacgttgagcttttcaaagcaagcatatcaaaactagaaaataaaattgatataaagaatcttaagggtctgaaactttattcattatggctaaaggaatatcttaagatggatgattctgataaaataatgtgtccattcttcgtactatatgactttagaataatggtatgtcacttacaatcagaacaaagtaaatcagagcaactaaaaagcataaacaaaagattaaacattgatgaagaaaactgcgactacgaaataatctatgagaaactttttgagcagctaaaagactctctcacttctattgaagataatatttaa

SEQ ID NO: 234104 - DNA, 249 bp, Klebsiella pneumoniae
atgtatattttgattttcaaaccaaatgctgctgaggtatatcagataggcagtcatttgctttataatgcaaatacaatgatgataaatgatatttcattaactagcgcttcacgagttgaagttaaaagtgacgccggaggattattacatgtagtgaattttcctgaatatgatgacaagaaattggttggagaaaccttaaattatggtcaggagattgattttaatatggagcaatttagttaa

SEQ ID NO: 234105 - DNA, 693 bp, Klebsiella pneumoniae
atgacatttcagaaagtgtattcaaaagttgaatcctctgttgttaaggttgtttgtattgatgaaagaaattctccagttgagtttggaacagcaagccttattggtgatgggagatttgctttaacttgtgcgcactgcattccaaacataagtggtgtccgtcccggaatttataaggaagataaaaataaattattggtatgtagagttgtttttcgtgatgatataaacgacgttgcaattattgagtatgtatcccctatggggaaacctatcattttcgcaagtagtaacgcttgcagtgtcggggaacaggcatttgtgatcggatatccaatgggggtaggtaggaaatcattatcctcagcttttatatcaaatattcatgatgaccttatcttggttgattcctccataaatcatgggaatagcggtggcccattatttaatataaatggtgaatgcatgggtattatatcaaggaaaaatgcactttaccctaaagagttaatggatttagagcgttataaagcagatgttggaataattataggtgaaataaatcattttgaaacagttaatcacattctaaaaaccatgcgaattcacataacaacaggtcttgggtttgctatttccaataacatattgaaagtattacatcctatacttgcaatggctattaagtag

SEQ ID NO: 234106 - DNA, 231 bp, Klebsiella pneumoniae
atgccaggagaaatgaatcaactgacagaaaaagaacaaattgtattgtccttaatgaatttgctggggatggatacgaatcttacagcgcaggcaatggcgtttattggcgacagcgttctcaattaccagctgctcatcagatattttagtgtcagtagtttaactgatgatgagtctaaactaacggaggcgatagaaaaaacctctactgcgaaatccttattttaa

SEQ ID NO: 234107 - DNA, 267 bp, Klebsiella pneumoniae
atgtcgttttctattaatcgaaccgtttccgtgttgcgaactacggacactggaattccgctaagcccggaaagcgaagatataagtctgacattcaaagtttctgggttaacaatatccgaggcagggaatatggcggtggtaatggtaagtgctgacgctggtgcgacctatcagttctttgagaacgctaatatcgccgacccttcagttacgtctcttgaaggtgaagagaaatatatacgaacaacatcaaagcatcagtaa

SEQ ID NO: 234108 - DNA, 552 bp, Klebsiella pneumoniae
atgctgattggctacgcgcgggtatctaccggcgatcaaaacctcgatttgcagaaaaccgcgctggttcgcgcagaatgtgagcagattttcgaagatacagcgagcgggaaaaacgccagacgaccagggctgaggcgtgctattcgtcgcttaaaaccaggtgattctcttgtggtctggaagctggatcgcttggggcgtagtgttcgtgacctcatcactctggtctcagagctgcaggatagaggtattcactttcgtagtctgaccgacagcattgataccagtacgccagcaggccgctttttcttccacgtcatgagcgccctggcggaaatggaaagagagctgatcgtcgagcgtacccgtgccggtttagccgctgcgagggagcaggggagagtcggcggccgccgccggataatgactgaagaagtggtggagcggtgccgccgaatgctggagaacggcgctacccggcaacagatcgcagatgtgattggggtgaatgtgaagacgctatataagtacctaccagccgctgtgtag

SEQ ID NO: 234109 - DNA, 909 bp, Klebsiella pneumoniae
atgaaatattatgttgcaatcccaacatataatggtggggagttatggaaaacgactgttttttctattaagaaaaataccccaaaagaaactctagtacaggttatcgactcgagtagcaccgatggtaccgacagtgttgctctcaatgcaggttttgagctgctgagtatcccgggccgcgattttaaccatggaggaacgcggaatttggctgttgaaatgcatcatggtcaatatgaactggtcattttcttgacacaagatgcaataccacaaatgggattcctcgagaaaattattgatgtatttaaggatgaacgtgtagtgtgtgcgtatggaagacaaattcctcatgatgatgctaacccgcttgctcagcatgcaagaaaatttaactacaccgacaagagctacatttgtagtcaggaagatgtatcgagaatgggtttaaagacagtttttatgtcaaactcattttccgcgtatagattatctatatttaatgaaattgggaggtttccttctaatacaatactatgtgaagatatgtactacacggcaaaggctattcttgcaggatataaagtagcatatgtagcagatgcggtggtcaaacattcacataattattctccaattgacgaatttaaaagatattttgatattggggtttttcatgcgaatgaaaaatggatccgagaaaattttggtggcgctggtggcgaagggaagaaatttatactatctgaattttcttatttatataagaatggaattttatggattcctgctgctattattaataatttcatgaaaatttgcggttataagttagggcttatttataaaaaactccccaagaaactagtcatacgtcttagtatgcataggcgttattggttatga

SEQ ID NO: 234110 - DNA, 399 bp, Klebsiella pneumoniae
atgcgtcataagcctcagcaggggacgctggtgataccggatgacactgtctggatccagggggacgaagtgcgcgtccatcaggtgctggtgaacatgctgtccaatgccctcgacgcctgcccgcacgccgcgcaaatcaccgtgagctggcaaatccagggcggaaggctgtgcgtgttgattgccgataacggccctggctggcctgcggccttactcccttcgctgttaaagccgttcactaccagtaaaaccgtggggctcggaatagggctttcgatatgtgtttcgctgatgacgcaaatggaaggggcgttgcgcctggcgtcgacgtttacacgcagtgcctgcgtggtgctggaattcaatttgacggatgtaaaagatgttgagtaa

SEQ ID NO: 234111 - DNA, 180 bp, Klebsiella pneumoniae
atgtcattttttaattcctggaacgagccgtatcccagttccctgacgaatttggtgatgctcgaaggcgtcgtattacagtacgacgccagctcttcgattttcacatacggaaattcttcgattttagcaattaccgccatcgcaatggcggtaaagacgtttcgcttaccggcataa

SEQ ID NO: 234112 - DNA, 1434 bp, Klebsiella pneumoniae
atgcgcttttctgagtattttaatctcaacaggtcacaagcttatctcgactttgtggatgtaccacttgatacagacatccctgtcttcctagatcctggggctataaaatgcctagattctatttggggccacgaactaacagcgcacttacagagcttctttgaaaaagttctgacactaatcaaagcagggaaaaatgttgaagcacaagggcttttagcatctttaaatgaaagaaatgaatttcatttaggttattcatccggaaaatcacgcggacatggatttggtgcaggagcagcccattctgtttggaacgctttaactcaaagcaaagctgtttctactggattattaaaagacctcgaagatacagccttattaattgctggaattggtacagatatgatttctgatgccgttagtaacattctcagaggaccattaataaattacacacaagagatgtgtaaatattacaatattccattaacacctaatatagactctggcccaatatgggaccctcacaaaggagcatggttccatcgttatgtatctctgccgatgactgacttcggaaaagttatactagttcccaaaataatagtcaggcatcgtttatgtatgcaatatgatgaattctacacccattatttgctacctgaaatgcaggatgagcatttaaggaacaactctactcttgtcgaagttttaaaagatggttccaggagagttacgaagaaaagtctaaagctaaaatatggccaagataaatcttctgttatagatcaaactttacagagaccagacgttttcgaagattataaaaaacacaaagaaaccaacccatcatcaccgttaactcacgaaatttttaatgaattagaggaaatagaagaaaaggtagatataaacccgttactaaaaaaacttaaaaccataaaaactggagctaaacaggccacagattatgaaaatataattgaagaaatattttctttgatcttttatccatccttatgttttcctacaaagcaacatgaaattcatgaaggccgtaaacgcattgatataacatatgttaatgaagcaaaatacggattttttcattggcttttgcaacattacatttgtccgaaaatttatattgaatgtaaaaactatacatctgacatagctaatcctgaacttgatcagctatctggtagattctctcacaacagaggaaaagtggggattttaatatgtcgtaaaattaaggataaacaattatttagacagagatgtaaagacactgccgcagatggcagaggcttcatattagctattgatgatgatgatcttgatattttatgtaaagaatacatggacggaggcaatcaaaacttctactcactgagaagactatggaactcactaattgactaa

SEQ ID NO: 234113 - DNA, 1026 bp, Klebsiella pneumoniae
atgaaaataatatctttatttaatcataaaggtggtgttagcaagacaactacgacttttaacatggggtggatgctagctaatctaggctataaagttttaatagttgatgctgatccacaatgtaatttgacagccttagcgttgggctattcgaccactgatgactttgataaaatctataaaaataatccgaactgtgatatttatagttgcataaaacctgttgtagatggttctttaggaaaagttataccatccgacccattagacacaacaaatccaaatttaagtttattgtgtggtagcatctatttatcagaaattgaaacgcagattggagttgcgctaacaaccagcgctgctatccccgcaattagaaatatccccggcagtataggggcttttttgcgtgagacagcacggaaacatgaatttgattatgtccttgttgacatgagccccagcgttggtgcattgaatgaatgtctcttaatgtgcagtgactattttatagttcctacatcaccagatttcttctgtgctcaggcaataaagtcactcgcgcaagttcttcccagatggaacagcgagataaatagttttagagatagcaaaatactatatccattccctattgaacctccgaaattcatcggttttatatctcagaagtatcgtccaaggaacaatttaccagtaaaatcctttcaaagatggattgatatcatcaaagatgaagtcactaatacattaataccagctttaaatcctatcaacatgtcaatttcagttgctgattttgaaaatgcctgcccgacaaaagagccttttaatttggcgaatatttcagattttaactcactaattgctcaatctcaaaaacatagcaccccggtatttgccctatcagatgcgcaaatagagcaaaatggagtaatactggatacaatgaaagaaaatagagaagagttcaaaaataattttagtgagttagctcgctcagttgctacgttagcaaattga

SEQ ID NO: 234114 - DNA, 639 bp, Klebsiella pneumoniae
gtgttgattcctgatgatttggacgaggacgtttatccagattgctgctggagctatatagggaaaaaggattatttgaaacctaatgcatacttacaagatgcgattgatgatttgaattcaggaagtgagcgccgaaatctgaataatgccgtgcgaaatgcaaaatcggcattacatatgagagtggatattctttgtcgagctttttgtggtgatgaccacttccagaaaaatctaaagaactttccaaaaaagatggatttcctagaaggaattggaatagtcagacctagaatcatagataaaataaataaaataagaaatgaaattgagcacgagtatcgagatgcaactcttgaggaagcagaagatttcatagatatagttttattgtttatggaggcaactagatatctaaattcaaggtttccatgtgaagctgacttttatgttttggcagtttctaatgaagtttatttaaggaagatagtatgtaattgggaaggtggggaattaatcttttactattcaaagcaagagtcacaccgacttgataacgtggaaacttactcaataaaagtaggtgattatagatatgctctgtgggtaaaattcattctagatcattgcgattga

SEQ ID NO: 234115 - DNA, 567 bp, Klebsiella pneumoniae
atgaccaccctcacgctacagcaggcctttgaggcctgtcagaataacaaaaccgcctggctgaaccgtaaagccgaactcgcggccgcagagcaggaataccgggaacaggtgctggccggggatgagcgtataccgggcagaatgcagacactgcgcgacataatcgatgtcaaaaaatgggagaaaaatcaggctgccgggcgctatatccgctcccatgaatcggtacagcgcatcagtatccgcaaccggctgaatgactttatgcaggcgcacgggacagagctggccgccacgcttgccccggagctgatgggactcagccagcagcccgcactcctgaccggccatgcgctcgaccgttcggcgcattacctgcgcgaagcgctgtccgtgtggctgagtaccggtgaagaaattaattattcggcagaagacagcgatattttaacggccatcggattcaggcctgacgcggcttcgcgggtggatcatcaggaaaaatacacccccgcacagagtctgatttatgcccgccggcacgcggaactggccggcagatag

SEQ ID NO: 234116 - DNA, 810 bp, Klebsiella pneumoniae
atgagcaagccatttctgaaatgggctggtggaaagtatacccagctggctgacctgttcgtgcatatcccggcagggaaacgccttatagagccattcgttggtggtggttccgtcttcctgaacagcgacaagcatgctgacttcctgctggctgatgttaaccctgacctaatcaacctgtatcagatgctggcactggtgcctgacgcggttgaaaaccatgcacggtggatgttcgaacacatggggcatccggacggatatgaactgatccgcaaagagttcaatgcgcagacccttgacaccaccgaacgtgcgtcagcgttcctgtacctgaatcgccattgctacaacggtcttatgcgttacaacctggcgcaccagttcaacgtaggctggggaaaatacaaggcaccgtacttcccgttcaatgagctgaaggcgtttgctgatatggctcataactgcgtattcatgacctcgggattccgccggaccattgacctggccggcgcggatgacgtggtgtattgcgaccctccttacgagccgatgcctggtactgcgggatttaccgcgtatgccgctggtggctttacctgggatgaccaggagcttctggcagagcattgtgttgaagcccacaaacgtggcgcgcgggttgttatttcaaacgcatctgcaccgaagattctcgacctgtaccgggagcatggttttaacctggaattcatcaaagcgcgccgttcgatctcctgcaaaagcagtacgcgggaagtcgcaaaagacgttgtagcgatcctttaa

SEQ ID NO: 234117 - DNA, 213 bp, Klebsiella pneumoniae
atgcgagagctcaaccgatggttcagagatcactacggcgtcccggtcagggtcatacgctgggagccccagacacagcgcgttatatacctgcgcgaagggtataagcacgagtgtttcagccccctcgagcagttcagacgaaaattcagggaaatagaggggtcttatgagcctgttaatgccatcaaggccgatagtcatcaatcctga

SEQ ID NO: 234118 - DNA, 231 bp, Klebsiella pneumoniae
atgaacccggaacaattcattaaaaacaatgttgttaaggcgctactgactgatggttattcagcagaacaggctgagccggggggggtagaggctatttcatactaccggcgctcatctaaaccgacaaccaagcgtaggaatatctttgatgactgcctggaccaagccagaacaattctcaagtacggcaaaaagaaaggcaccaaaacaaaaggggctctgatttaa

SEQ ID NO: 234119 - DNA, 567 bp, Klebsiella pneumoniae
gtggtaactcttccagtcccgataaacctcctcagtagaaggggacttatcgggaatgaatgttgtgacaccagatcgctaatctgcttacttcccgccgctctgttttggtattggcaaccagctgctgttgctcagtcgatttccgggtctttgcgtcgaccggcgctgcagtacgcttgtacacgtcacaactggaagcgcactccttcagttacaaaccgatcctcaccggaaagaaggggaatgcgcttccatgttgtgtgcctgtcttttcaccacatcaggctcggtggtatcttggtgtttccacacaaccaagtagaatttcaaatgcttaaatcaacgcttattgctaaatgcctgcataaaaacaacatgatttctgatgttccaactggagaagccgccgttgaatccatctttggtgaatactttcctggtcacagctataaaaaatggaacactcaaatttcagatgaagtcgtgaatcattttctaaacgcagccagaggtgcaggaacaatccgtgttgacagtttcatcaaagacctttggtctctgtaa

SEQ ID NO: 234120 - DNA, 288 bp, Klebsiella pneumoniae
atgagcatcatcgacgattcacatctgaccgatgaggtcgtgaatgaagccttcgagggcaccaacttcgggcgtaccgacttccgcactattctggcagaaacagtgctcaagcgcgcttcgggttatcactcgggctggacggcaacaactatctgtgtgcgccttggcctgctgagcgaaaagaaccagagcgctacaaaactcggtctgactttcgcctttcaccactactaccgccagagcgtccgcgatgcgctgatgccaaaacaggaacgtgcagcatga

SEQ ID NO: 234121 - DNA, 711 bp, Klebsiella pneumoniae
atgaaagcgtggaaagcgcgtcacgcgttcataagtttcgcgcactccgggcagataaaccttgcatctgagtattgccagtccttcgccctcgacaatggtgcgttcactgcatggaaagccgccgggaaaaacaaaatcgactggagtgattattacgagtttgtcgcgcgctggaagaaccatcccggctttgatttcgccattatcccggacgttatcgacggaggcgaggaagagaacgaagcgcttctggatgagtggccacacggtgagttctttggcgttccggtctggcacatgaacgaaagcgatgagcgttttatcaggttgtgcaacgagtggcctcgggtggcaataggcagttgtggcgattacgacgttaagcgaccaaacctcgcagtcgccagaatgaaagacctgattcgacacgttgtagaccagcacgaccagccgataaccaagcttcacggccttcgtatgctcaatccgttgattttcacaaaacttccgctggcgagcgccgatagcacgaacgtggcccgcaatatcgggatagataaagcctggtctggtgcctatgcgccagcatcgaaagagactcgcgccgccctgatggtggagcgcattgaatcacataatagccccggttcgcttacatattgcgagcagcgcgaccggttcgatatgcagctgcaactggcagtgtga

SEQ ID NO: 234122 - DNA, 1896 bp, Klebsiella pneumoniae
atgtctactaccaaactaacccgtcgggaacaacgcgagcacgcgcagcgattcattgatacgctggcgggtaccgcttttcctaattcacgccgcatctatgttcacggctcacaagcggatatccgcgtcccgatgcgtgaaattcagctcagcccaactctcgtcggcggcgataaagataacccccggtacgaaaccaacgaaccgatcccggtgtatgacacctccgggccgtatggcgacccggatattagcattgatgtccgccaggggctggcaaagctgcgccagccgtggatcgacgcgcgtaacgactgcgcgccgctcagcgaacgcagctcggcctataccaaagcgcggctggccgacgacggtctcgatgagctgcgcttcagcggcctgctgacgcccaaacgcgccgtcgttggcaaatgcgttacccagctgcactacgcccgccaggggatagtcaccccggagatggagttcatcgccattcgcgaaaacatgggtcgcgaacgtatccgcagcgaggttctgcgccagcagcacgcaggtgaaggcttcggcgcccacctaccggaaaacatcacccccgagttcgttcgcgatgaagtggccgccggacgcgccatcatccccgccaacatcaaccacccggagtctgaaccgatgattatcggccgcaacttcctggtgaaagtgaatgccaatatcggcaactcggcggtgacctcttccatcgaagaagaggtcgagaaactggtctggtcaacccgctggggcgccgacacggtgatggacctctccaccggccgctatatccacgaaacccgcgagtggatcctgcgcaacagcccggtgccgattggtaccgtgccgatttaccaggcgctggagaaggtcaacggcatcgccgagaatctcacctggcaagtcttccgcgataccctgctggaacaggccgagcaaggcgtcgactacttcacgattcacgccggcgtactgttgcgctacgtcccgatgacggcgaagcgcctgaccggtatcgtctcgcgcggcggctcaatcatggctaagtggtgcctgtcgcatcatcaggaaaacttcctctaccagcatttccgcgaaatctgcgaaatctgcgccgcctatgacgtgtcgctgtcgctgggcgatggcctgcgccccggctccattcaggatgccaacgacgaggcgcagttttccgagctgcgcaccctcggcgaactgacgaaaatcgcctgggaatatgacgtgcaggtgatgattgaaggccctggccacgtgccgatgcagatgatccgccgcaatatgaccgaacagctggagcactgccacgaagcgccattctacaccctggggccgctcaccactgatatcgcgccgggctacgaccatttcacctccggtatcggcgcggcaatgatcggctggttcggctgcgccatgctgtgctatgtcacgccgaaagagcatctcggcctgcccaacaaagaggatgtcaaacaggggctgattacctacaaaatcgccgcccacgccgccgacctcgcgaaaggccaccccggggcgcagatccgcgacaacgcgatgtcaaaagcgcgttttgaattccgctgggaagaccagttcaacctcgcgctcgacccgttcaccgcgcgggcctatcacgatgaaactctgccgcaggagtccggcaaagtcgcccacttctgctccatgtgcgggccgaaattctgttcgatgaaaatcactcaggaggtccgcgactacgccgcgaagcaaagtatcgaagccggcatggccgatatgtcgaataacttccgcgcccgcggcggcgaaatctacctgaaacaggaggaagcctga

SEQ ID NO: 234123 - DNA, 771 bp, Klebsiella pneumoniae
atgttacgtattgcagacaaaacgtttgaatcccatcttttcaccggtaccggcaaattcgccgccccggaggtgatggttgaggcgattcgcgcctcgggcagccagctggtaaccctggcgatgaagcgcgtcgatttacgccagcgcaatgacgccatcctcgccccgctgctggcggcgggggttaacctgctgccgaatacctcaggcgccaagacggcggaagaggcggtgtttgccgcccgcctggcgcgggaagccctgggtacccattggctgaagctggagatccacccggacgcccgctggctgctgcccgacccgattgaaaccctgaaagcggcggagctgctggtccgcgaagggttcgtggtgctgccctactgcggcgccgatccggtgctgtgtaaacgactggaagaggtaggctgcgcggcggtgatgccgctgggtgcgccgatcggctccaatcaggggctggaaaccaaagccatgctggagattattatcgagcaggcgacggtcccggtggtggtcgacgccgggatcggcgtcccgagccatgcggcgcaggcgctggagatgggcgcggacgcggtgctggtcaataccgccattgccgtcgccgacgaccccgtggccatggcccgcgccttccgtatggcgatcgatgccggattactggcgcgtcaggccggaccgggggcacgcagtacgcaggcgcaggccaccagcccgctcaccggattcctggaggcgctggcatga

SEQ ID NO: 234124 - DNA, 1341 bp, Klebsiella pneumoniae
atggaattcgcgatacaactcattattatattaatttgtctgttttatggtgcccgaaaaggaggtattgcgctggggctgctgggcggcatcggtttggtgatcctcgtctttgtttttcatctccagccgggcaaaccgccggttgatgtgatgctggtgatcattgcagtggtagccgcctcggcgactctgcaggcgtccggcgggttagacgtgatgctgcagattgccgagaagctgctgcggcgtaacccgaaatatgtttctatcgtggcgcctttcgtcacctgcacgctgaccatcctctgcggtaccggccacgtggtgtataccatcctgccgattatctacgatgtggcgattaagaataacattcgtccggagcgtccgatggccgccagctccattggcgctcagatggggatcatcgccagcccggtctcggtggcggtggtatcgctggtggcgatgctgggaaattttacctttaacgggaaacacctggagtttctcgatctgctggcgataaccattccgtccacgctgctgggtattttagccatcggtatcttcagctggttccgcggcaaagacctggatcaggacgaagccttccaggcgtttattgcgctaccggagaaccgccattacgtctatggcgatacggcgacgctgctggacaaaaagctgccgaccagcaactggatagcaatgtggatttttctggcctctatcgccgtggtggcgctgcttggcgctttttctgaactgcgcccggcctttgacggtaaaccactgtcgatggtgctggttatccagatgtttatgctgctctccggagcgctgatcatcatcattacaaaaactaacccggcatcgatttccaaaaatgaggtctttcgttcgggaatgatcgctatcgtcgcggtgtacggcatcgcgtggatggcggagaccatgtttggcgcgcacatgaccgagattaaaggcgtgcttggtgaaatggtaaaagagtatccgtgggcttatgccatcgtgctgctactggtttcgaaatttgtgaactcccaggcggcagcgctggcggcgattgtgccagtagccctggccatcggcgtcgacccggcctatatcgtggcttctgcgccggcctgctatggctactatattctgccgacctacccaagcgatctggcggcgatccagtttgatcgctcagggaccacccatatcggccgctttgtgattaaccacagctttatcctgcccgggctcatcggcgtcggcgtctcctgcgtgtttggctgggtattcgcggcgatgtacggctttctgtaa

SEQ ID NO: 234125 - DNA, 1023 bp, Klebsiella pneumoniae
atgtcatctcttgatgcgtattttcgtgatgttactcatcacgaatttgttttagatacagcacttagaactcaaaagctagatgatgttgataaagacacttgtaattgtccaatacctgaacttcttgagcttgcacctttaatcattgctcaaaaagatttctcatacgcatatttatccaatacccttgttcttaccctacaagatgctgagtattatcctcaggggagtagtaacccaacacatctgtgcctcttattcaatgcaacagataggaatggctcaactacggtgctgaggaatccaaaacgacaaacaagaagaaaaatagaaccagatcataaggatggagaaggctatgagttctcctctcacatattgatttctctttccggccaaaaaagaacctacaaggcagtaataagccgcgcaccaaaaatatcaacaaatttaatagaattgttttttaacaagatattgttccagatttcacgagctaacacagaaaaattctcgattaatgccaaaaccaatgccactgacacatctacaggtaaaactaaaaaagtcttatacaaacctgtagccgaattacgtgggacattagacatagagttattcaataagatgaacagtggcggcttgtcggaggtaacactgataaggtatgacactggaacaatcaatgttcctgatatgaatggagttgtaattccaattgaaagtaccatgaaaatcaagccagtagagcaatctaaaaatgtaatagcctggctaaaagatattggtggacatttcaataaaaagacaaatggtaattacaaagatatcagagttaaatattatgatgacaatagtaaaacgcgaactgtaacaatgcacaccaataatataaaactagagtcacttgaaaaaacctttatcaaaagaagtgtaattgatggcttcagttcgcgcctaagcaactcatatgataagatagactcagaaattacaattaaactccatagtattttatga

SEQ ID NO: 234126 - DNA, 573 bp, Klebsiella pneumoniae
atgtacataatacaccaattatttagaccttttggatatctaagcataaaaggcgtcaatggaaagtttatctatgactggttaattccattgtttttatctttattatcaatgggttacttttacggcctaaccacgccatccctttctttaagtaatgatggtttttttaaaaataccatatcattcatttctatacttccggggttttacatcgcagcattagccgccatcgcaacatttaataggaagcaaatagatgaccctttaattagcgataatggcactccatacatttatgtaaaaggggtaaaagagaatggaaaaccataccgaacaaaagaagacatgacacgcagattatttctttgcatgttattttcttttctcacagcagaaagcatagttcttattatgttgcatacctttgcatcccctcttatatcagcaacaacaaacacttattgcttagctatttattcatttattttcctattaattctttggcagttgttagtgaccactttttttggcctttactacctcggagatagaattcacctcaacaactga

SEQ ID NO: 234127 - DNA, 201 bp, Klebsiella pneumoniae
atgtcgatcaagtctcaatcgtatctttaccccaccccagagggggtgtggatgttccagatttttgttcccaaatacatgcgccacatttttggtggaaaaaaactttaccggaagtcgacgggaactaaagacctcgccaccgctaaacacttccgtaatcacattgaagtggtcaacaaaaactggccaccgcgttag

SEQ ID NO: 234128 - DNA, 408 bp, Klebsiella pneumoniae; identical to SEQ ID NO: 78808

SEQ ID NO: 234129 - DNA, 210 bp, Klebsiella pneumoniae
atgccccgccgttcgatcctctccgccgccgagcgcgaaagcctgctggcgttgccggacaccaaggatgagttgatccgtcactacacgttcagcgaaagcgacctctccatcatccggcagcggcgcggcccggccaatcggctgggcttcgcggtgcagctctgctacctggggtcgtctcagaattcggaaaataaagcacgctaa

SEQ ID NO: 234130 - DNA, 657 bp, Klebsiella pneumoniae
ttggccttcaaaccccgtgactgccggaagattaccggcagcaagcaaagcctaacggatgatgattttttccttaaagagctgcacagcagcgaaaaatggcccgcattcctgcaaaccgccgttgagaagaaacgcactatcgtgatctgcggtgaaaccgggtcggggaaaacggtactcacgcgcgcgctgttaaaatcgctacataaagacgagcgtgtaattattttagaggacgttcacgaagtcacggtcgatcacgttgtagaagccgtttatatgatgtacggcgatgcaggaaagatcggccgcgtcagcgccactgatgccctgcgagcctgtatgcgtctgacaccgggccgtatcatcatgactgagcttagggatgatgctgcgtgggattatcttaaagcacttaataccggccatccaggcggtgttatgtcaacgcacgctaactctgcgcgcgatgcctttaaccgtattgggctgcttatcaaggcgacccctatcggccgtatgctcgatatgagcgatattatgcgaatgctctactccaccattgacgttgtggtgcatatggaaaagcggaaaatcaaagaaatttattttgaccctgaatataaaatgcagtgtgtgaacgggagcctgtaa

SEQ ID NO: 234131 - DNA, 768 bp, Klebsiella pneumoniae; identical to SEQ ID NO: 133624

SEQ ID NO: 234132 - DNA, 615 bp, Klebsiella pneumoniae; identical to SEQ ID NO: 187172

SEQ ID NO: 234133 - DNA, 1413 bp, Klebsiella pneumoniae
atgatgaccgattatatcctctcgccctgctcgctggccgcccgcgggttgagccagctgatgctgaacgccgcgaagcggcccgttgagctgccggtcgagggcgtgtccctgcgcgaactggccgccgtgaagcggatcgtggtgtatctccctgacgatcccctgtggatgctcaccacgctgcgccaggcggcaaggctactcgacgaggccttgccgccgttaccgatgttgattctgagccgcagcccggccatctggctgtggcaaacgctgctctatcaggtgagtcatccggatcgtctgcgcaacgtccatacagcccccgccgatctgtcctgcgcggagctggcccatcggctggagaatgcgccgcggcttgagcggcttgccagcgaagccgccctgatccacggaaaacgggtcgtcgggttgacccacgccgagctcaaggtgatcctcgccctgctgcaagggcagacgataggcgagcaggcccaacgtctcggattgagccagaaaacgctctacacccagcggctggctggggtgaaaaagctggtggaatgtcatccgcatctggccccccgctttccgcgcacgctgctgccgcgctcacccgcaaacgcactgacggcgtttgaacaggaatgggtacaagcgatccacgatcgccaggtcttcccggtttttcaacctatcgtcgatagtcgctcacagctacagggggtggagatcctgatccgctggcgccaccgcggccaggtacttcacccccagacctttctgccgcacttccgcgccgactacacctggctgctgcttacggcctttgttctgcaggaggccgtgcagaatattaatgagtatccaggcgccttctatttttcggtcaacataccctcctcgctcgccgacagtgacagcctgctgcggatggtggaagccgctcgccagcagcttcggcagccagagggcgtggcaaggctggtgctggaatatgctgaaactatcgattttcgccatcagagccgctccgccgcccacgtggcgcagctgcaacgtgctggcgtgcgcgtgatgctggacgactgcttttctcaggggagcgttatctttccggcgcgtcgactgcacttcaatgcgtataaactggatatgagcatcgtcaacgacgcccagcacgatccaaaggcgcttgcgctaataaaaagcctggcctactactgccagttaagcgacagtcgctgtgtggcggaaggggtggattcactggcgaaatttacgcagttaaaatcgctggggattgatcgcttccagggctatctgttttcaccaccgatgcggcgcgaacatctcccggatctgatccgccgcttttcccaccagcgcgatccggcggatcgttga

SEQ ID NO: 234134 - DNA, 2679 bp, Klebsiella pneumoniae
atggactctccgcagagcattggcgccgcgcaggtgttcaatacgacgctagatcaggagcaactagctgggcttggtctcgcaaataaaacactcagcgtcacgcctgctggccggctggctcagtctccatcactggtttcccgacagataaaccagcaactggctgagaataactatttctttgccaaaaatgacgaaggcctagctacatttacggcagcagaaacaaagattaagcaatacgatgccatgctctataagcagatggaaaccacccgagacgcttatcagcagtacagcaagtccgtcagcgccagcggtgcgaagaggatgaactttgtagatttcaatgaggctgtgggcatggctatgcgccgcggcgatcagagtgatattcctgaagtggcgcaggcggccgccagtattcgacctattttcgagagcacaaaagcccgtatgcaggagcttgggatccttccggaagatgtcgatgttgtgacggcacaaagctatcttccacgtatttataagttcgataagatactttcagaccgcactgaattcagggggaggatagccaactggatacagggtattagtgctaaaggagctgataaagccgggcagagaattgaaaagataaatgcaggtctgaaaaatgcggaggaatcagcgccgcgcgctgaggccctggcgagtgatatcgccgaagccgagaaatggtccgggaaaaaaatcctactcatggaagagctggataaacgcaataagctcatatctcaggaagctgacacacaggcccgccttaccagaatagaaaaacaattggctgatacttcatcagaaagacttcaggccagaatgatgaaagaaagctctgatcttaaaacacggcttgatgatatagctcaggctaaagaagagcttccggtctatcagcgccatatggagttgctggataacccacggaaataccgttctgagcttcgccgactgcaaaaacgggcaaattcaaccacaaggctgaatgcaagccgcgagcgggctctaaagcagatggaacctctatcccgagaggaagcagaggacgctgctgacgagatcgtgaataaaataatcggcgcaccttccgggcttgttcctgccgatattatcccggagagactcgttggccgggctggtttcaccaaaagccgaactctgcttattcccgatgaacgtatagaggatttcctggagtcagatgtcaatcacatcatggaaagttacctcaggcaggtggctccggaaatcgaactgactgcgcagttcggccgtaaagacatgggggatcagattcgccaggttagcgaagaatatacgcggctgatcaaagaggcgaaaacgcctaaacaacgcgctgcgcttgaaaaacaacgcgaagcagatatcagggatataactgcaatgcgcgaccgccttctcggtacctacggcgccccgcaggatcctcgcagtttcttcgttcgggctgggagggttgcaaggaatgttaacttccttcgcctgcttggcggcatgaccgtcgctgcggcaactgatctgatgcggccgatgatgcagcatggtctacgcaaatctcttggtcctatggccagcatgctaaggaacatggatgccgtaaagatcgccacaaaagacctgcgcgaaatgtctgttggcctggagtacgttctttcaacgcgaaccaaagctattgccgacctgaccgatccctacagccggcgcactgcattcgagcgcggtcttaactggatgacgcaaaagtttgggaactggacattgatgaaccagtggaacagcgtgcttaaatcgtggtcaggaatgattgtgcagtcgaggatacttgatgcggctcggcagatatccagcggcggcgagatagccaaaaccgaattacgcaagatggcgcaggttggtatcaatgaggatatgctgcggcgcatcggtgagcagttcggtaagcacggcgaggatatggatggacttctaaccggccacagccacttgtgggacgatcgtcacgttagggagatattccaggccgcggtgctgaaggatgtcgattcggtgattgtaacccctggcgttggcgatacgccgctgttcttcagtaaagaggggtggaaactgatcacccagttcaaaacgtttatctttgctcagcataacagggttctggtatctggtattcagcagggggatgcgtcattctatctgggcgctctgggtactgtcgcactagggtctatggtctatatgatgaagcaaaagcttagcggccgcgatatcgactacagctggaataaccttgtgaaagaggggatcgacaggggaggcatgctgggatggctgtcagagccgctcaatacccttgaaaatgtaagcggcggcaggtttggtcttggcgcgatgtttggtgcgccgccggtatccagattccaaagccgcaatgccattggtgctatgctggggccgaccttcgatctcggtggtgatgctgcaacggtggcgcatggggtactgaacggagaatttgacagccagcaaacccacgcggcccgtaaaatgctaccatttcagaacctgtgggcgatatcaccactactaaacaaagttgaagagcagatgaaataa

SEQ ID NO: 234135 - DNA, 459 bp, Klebsiella pneumoniae
atgtccaccaaaaaacctctggcgccaccattctttattaaacttcgtactgatgaagaaagaatcagagaggttcttgctgaatacggttccaggcaactttcacaggcagatgaatatgatcgcttgtataaaaaagttattgctactaccaaagtaagagcaaccaagagatcaggacgtagtgctattgcaggtgattatacatcccgtaagtacatttaccgaactaagcttcttgagcaagtgattagagatcaactgtctattgaagagcaagactatggttctgagattagccgccttgcagcatctggaagtttagtatcaggtatacaagtacatactgttcatcaactgccgtctatgagcagagaccaggtgatttctctctctgaccgtatgtattcaagaacccttgaagagatgcagggggagatgtacgacgatgctgaatga

SEQ ID NO: 234136 - DNA, 507 bp, Klebsiella pneumoniae
atgctgaatgagtatcagggattgatacataccggggtgtttaggaaagatcccgatttatgtaagtttatagaaccattcaaagcgcattacagacatggccaccacccacagtttggaaaggatactctgttcggaagacctccagaggtatggccgtatcatttgcggaaggtgcatgttgatctgaagttttacaccaaagattttggcgacagtggaacagaagcttgctggaaaaactgggcagctggcaagttagacaaaaccacaaaaaaaattaaagtcattccaaccagcgatgtttatctaatctatcttgtctcatctgagcgtcattgttttcttatggatttctgggggcctccgagtagcgctcatagagaggctgagcaagagaagcaaatggataaactaatccaggaatgcgacagaattctgcgtatgaaaggcttgcagtcaatgcctagagaagcagaaatatggcgaccagaatttcttgtataa

SEQ ID NO: 234137 - DNA, 525 bp, Klebsiella pneumoniae
atgaacaatgatgaagaatttagttttgtttccgaaatatctaattccaaaagaactattgaatcaataataaaatcagaattattagaaaactttaaaactgatacattgattttcaattcaatcctcatcaacttacttattttaacaagagatataacatataaatcatttaagttagggaatgaaatttcgtttactgatgacgtcatcattaccaataaaataacaaatgtttccatgctaataaaatatgctagagatgcagcatgtcatatcgactccgacaatcatatatcaatagaaaccggggcaaaattcagttttaacatttattttggaaaaggaaatttagcaaatataaatggcgttgagtttcgatcagattatgatgatgatgtttgcatatttataggtgatcaaaagatatatttaaaacgacatatatatagagcagcaactgaagcaattcattttttcaaagagcactacaaagacactgaatttagtttccatcttcggtaa

SEQ ID NO: 234138 - DNA, 177 bp, Klebsiella pneumoniae
atggatctttttgcccgcagggtaatcgactggagtctgtcagcgaatgccgataccgcactgataagcagtgccctgcggatggcctatgagacgcgtggccagtcgcgggatgtcatgttccacagcgaccagggaagccagtatacgggcctgaaatatcaacaacttctctga

SEQ ID NO: 234139 - DNA, 801 bp, Klebsiella pneumoniae
atgccctccagcacgaccctgcaacacgcgatcgagaacatcaccatctggcgcaaaggcgaacagcgtgcgccgcataagccactgttgctgctgtatgtcctctctcagtatcagcgcggccatgcgcggatgttcgattacgcttcggagatacgcgatgagctgcatagcctgctggaacgctttggcccgcagcgccgccagtaccggccggacatgcccttctggcgcctgaaaggcgacggcttctgggagctgtacaacagcgaacagtgttcaacccagggcagccaacagccgcctggcaaagagctggagctctgtcaggtcgccggcggcttcgatgagccgcattttgcgctactaaacagaaataagaagctgatcaataccctcgcccatcagatcctcgaggcgcatttcccggagagtattcaggaagagctggctgaagagatggggtttgatctgctgcagatccgtaaagaacgcgacccgcattttcgccagcaggtgctgcgcgcctataactatgagtgcgctatctgcggcttcaatatgcgccatgataatacctccgttgccctggaagcggctcatatcaagtggaagcagcacggcggcccatgcgaaatccctaacgggctggcgctctgcgcgattcaccataaggcttttgataaaggctccattggtctggatgaggatatgcgcatccaggtttcgccagcagtgaacggcgggggcatcgttggcaggctgttctggaattttgatgagatgagaagctggctttag

SEQ ID NO: 234140 - DNA, 546 bp, Klebsiella pneumoniae
ttggccctcagaccccagcactgggccagtcagtctcaggtgttcgcccactatgcgcgccattatcagaccggggaagcgatgccggatacgctgcgtgagcggatgctgcgcgcggcgaagtttaataagggctatgacatgagcgagcagctggcggcggcgctgttggatatgcactggcatagcctctcgtcggcagatattccgcgcgatgtcgatagctttgaagcgctggcgttgcgtcaggagcagatggacctcgccgcggtaccgccgcgctaccgtagcagctacttctcgcatatcttcggcggcggctatgccgcaggttattacgcctacctgtggacgcagatgctggccgatgacggctatcagtggtttgtggagcagggtggtttaacccgcgaaaacggtcagcgcttccgcgaggcgattttgtcccgcggcaacagcactgatttagctgaactttatcgccagtggcgcgggcatgacccgcagattgagccgatgctggagaaccgcgggttgagtgagtag

SEQ ID NO: 234141 - DNA, 1266 bp, Klebsiella pneumoniae
atgaaaaaagtcgcacttaccccgccaaaaggttggaacagctgggatatatatggcgcatcggttaccgaagaagaggttcgtagcaatgcgagagtgatggctgataaattaaaatcatccggttgggactacgttgtcgtggacatacagtggtacgaacctactgctctcacatctatctacaatacttttgcctctgtctgcatggatgagttcagcagggtgatcccagctgtcaaccgtttcccttcaagcgagggcggaaatggctttaaacctcttgctgactacattcatagtctcggacttaaatttggcattcatattctcagaggcattcctcgagaggcggttcataagcgcttacctgttaaaggcactcatttgacagcggatgagattgcaaccaatacaatttgcccctggaattcagatatgtatggtgtaaacacagaattagctgaaggccagctgtattatgactcacttcttgagttgtacgcatcctgggacatagacttcattaaagtggatgacattgcattctctaagatttacccaaatgcacatcttgatgaaataaaagcgataagaaaagcaattgataaggttgaccgaaatattgtcctgtccctgtctcctggacctgcacacctaagagatggcgcattcctgcagcaaaatgccaacatgtggcgtctaacagatgatttttgggatgaatggccaatgattcttgatatgtttgaacgctgtaacagttggtctccttttatccgaccagggaactggcctgactgcgacatgcttccgttaggccgcatagctattcgatccgatgaaagaggcttatctgaacgcgatacgcggctatctaaagatgagcaacaaaccatgatgactctatggtcaatcttccagtctccgcttatgtttggaggggatatgactcaactggatgagtggacactaagtcttttgaacaatgaagaaataaatgccatgcatcttaagcttattaatcagaaacaggtctatcgagataatacctgggttatctgggaagccatgtctccacacgatagctatgtcgcagtgtttaatatctctgataccgttgcagttttacctgaagaacttaaaaacgaatatctccctgcttccgattatcttgaattgtggagaggaaaagataaatcggttctgaaagagacagttaacccacatgccagctatatttttcgtgctttgtctaaaaattaa

SEQ ID NO: 234142 - DNA, 414 bp, Klebsiella pneumoniae; identical to SEQ ID NO: 207758

SEQ ID NO: 234143 - DNA, 165 bp, Klebsiella pneumoniae; identical to SEQ ID NO: 231180

SEQ ID NO: 234144 - DNA, 426 bp, Klebsiella pneumoniae
atgagcaacatcaccatttatcacaacccagcctgcggcacgtcgcgtaatacgctggagatgatccgcaacagcggtatcgagccgaccgttattctttaccttgagactccaccttcacgcgatgagctgctcaaactcattgcggatatgggtatttccgtccgggcgttgctgcgtaagaacgtcgagccgtatgaggaactgggtcttgcagaagataaatttactgacgaccagctcatcgactttatgctacagcatccgattctgatcaaccgtccgatcgtagtgacgccactgggaactaaactttgccgtccttcagaggttgttctcgatatccttccagatgcccagaaagcggctttcaccaaggaagacggtgaaaaagtcgttgatgattcaggtaaaagactgaaataa

SEQ ID NO: 234145 - DNA, 417 bp, Klebsiella pneumoniae; identical to SEQ ID NO: 190687

SEQ ID NO: 234146 - DNA, 1551 bp, Klebsiella pneumoniae
gtgcctggactttcggctctggagatcgacccgcaggacgccgcccagcaataccgcgccagaatcattaatcctattaaaggtcttttgcctgatgacgttgttaacagcatcagtgaacagctttcaggagcttgtacgacagagattgctgcgttcgacgagtttactggcttactgaccgatacttctctgctgacccgcttcgatcacatcatttttgatactgccccaaccggccacactattcgtcttcttcagcttcccggagcctggagcagcttcattgaaagtaaccctgatggtgcctcctgtcttgggccgatggcggggctggaaaagcaacgcgaacaatacgctcatgccgttgaagcattatccgatcctgaacgaactcgcctggtgctggtcacgcgattgcaaaaatcaacactacaggaagtcgggcgtactcatgacgaattatcagctattggccttaaaaatcagtatttagtcattaacggtgttctgccagctagcgaagcagaacgtgatgcactggccgccgtaatatggcaacgagagcaagaggcgctggcaaatcttcctaccgggttatctgatttgccgacagacaacttataccttcagccgctgaacatggttggtgtgcccgcattgaaaggcctgctcaacgaacacgctgagatagcattgcttcctgaacaaagcatacaaaacaaaccagagaatatgtcgttctctgtcctggtcgatgatatcgcccgcagtgaacacggtctgattatgctgatgggcaaaggcggtgtgggtaaaaccacaatggctgcggctatcgccatcagtctggcggataagggttttgatgtgcatctaaccacctcagatcctgctgcacatctcagtacaacgctgaatggcagcctcaaaaatctgcaggtcagccgaatcaaccctcaagatgaaaccgaacgctatcgtcagcatgttctggagacgaagggcagggatcttgatgaggccggaaagcggctgctcgaagaggatttacgttctccttgcacagaagagattgcggtgttccaggcgttctcacgcgtaatccgtgaagcaggcaaacggtttgtggtcatggatacggcaccgaccgggcatacgctattactgcttgatgctaccggggcttatcaccgtgagattgctaagaagatggggaataaagttcattttaccactccgatgatgcagcttcaggacccggaacgcaccaaagtcctgctggttactctgcctgaaaccactccggtactggaagcggcaaacctgcagtccgatcttgagcgtgcggggattcatccctggggctggattatcaataacagcctctctattgcacagactcattcaccactgctgtgtctgcgtgctcaacaagaacttcctcagatcgaggctgtgaagaaccagcatgcaaggcgcatagcgttagtacccctaatggcatcagagcctaatggcatcgagaaactcagagagttggcagtttaa

SEQ ID NO: 234147 - DNA, 282 bp, Klebsiella pneumoniae; identical to SEQ ID NO: 61246

SEQ ID NO: 234148 - DNA, 1143 bp, Klebsiella pneumoniae
atgtactggcaggcactgcgtgggcggctgctgacacgcccttcatcctatcccgatgtgtcgctgatggcggtgaccgttgagacgggcgggaagctggcggctcagtcggaccgccgcgtaaacgtagtggcaacgcgttcctatgactcaggaacggccagaaccatttcgggggcgctgctgcatgtcgggagctcgctggggctggagatggacgtcgataccatcaacgcgctggagtccgcgtactggacgccgcggggcgaaaatttcgatttcgccaccggcgacagtatctcggcgctggaaatgctgcaaatgattgccaatgccgggaaatcccgcttcctgttaagcgatggccttgcgacggtcaaccgcgaggggattaagccctggacggggatcataacgccgcatgagatggtggaggagctgcagagcggatttaccgtgccgtccgacgatgattttgatggtgtcgacgtgacgtacatcaacggcgtcacctgggcggaggagaccgttaaatgccggacacccgacaatcccacgcccgtgaaaatcgagaactacaaactcgatggggtgctcaatcaggatcacgcctaccagatcggcatgcgtcgcctgatgaagtatcttcagcagcgggttacataccagaccaccaccgagctggatgcgctgtgctacaacacaggcgatcgcatcgtgctcacggatgatattccgggtaacaacacgatttcctgtctggtggaggcgatgacaacggctggtggcgtgacaaccttcaccgttacggagccgctggactggtctttcgaaaacccccgtgcgctgatccgctatcaggatggttctgcatccggtctgatggtggcgagcagagtgggggattatcagttgtccgttccccatctgagtgattttgatgacccattgaagattgaccagacttcaccagccattgagccagtccgcctggtgttctgcggctcaacgcgccacgtctacgacgccattgtagaggagatagccccgcagtctgacggaacctgccaggtcaccgcaaaagaatacctcgaatcgttctaccagtacgacgacgccacataccccggcgacgtagcttag

SEQ ID NO: 234149 - DNA, 600 bp, Klebsiella pneumoniae
ttgagccttcttctggttggctttttcgtccttgagccgttgggtatcccggtcagcgcgattgctgctgtaggggctgtcattctgtttacggtggcgaagcgaggccatgccattaacactggcaaagtgcttcgcggtgcgccatggcagatcgtcatattctctctgggaatgtatctggtggtctatggtctgcgtaatgccggactaacagaatacctctccggtgtactgaacgtgctggcagataaaggactttgggcagcgacgtttggtaccggcttcctgacggctttcctgtcttccataatgaacaatatgcctaccgtgctggttggtgctctctctattgatggcagcactgcaacaggcgttatcaaagaggcgatgatttatgccaacgtgattggctgcgatctgggaccgaaaattacacctattggtagcctggcaacgctgctctggctgcatgtcctttcacagaagaacatgaccatcacctggggatactatttccgcaccgggatcgtcatgactctgcctgtgctgtttgtaacgctggccgcgctggcgctacgtctctctatcactttgtaa

SEQ ID NO: 234150 - DNA, 252 bp, Klebsiella pneumoniae; identical to SEQ ID NO: 223499

SEQ ID NO: 234151 - DNA, 1113 bp, Klebsiella pneumoniae
atgaccgcctttggtaaaaaatggttaacaggtctggttacgggtgcgctgatggccgtctctgccggttcgctcgccgccgaacaaaaaaacctgcatgtttataactggtctgattatatcgcgccggacacggtagcgaatttcgaaaaagagaccgggattaaagtggtgtatgacgtttttgattccaacgaagtgctggaaggcaaattaatggcgggtagcaccggtttcgacctggtggtgccgtcggcaagcttcctcgaacgccagctggcggcgggcgtgttccagccgctggataaaagtaagctgcccaactggaagaatcttgaccccgaagtgctgaagctggtcgccaagcatgacccggagaataaatacgccatgccttacctgtgggcgacgacgggtattggctacaacgtggataaggtgaaagccgttctaggcaaagatgcgccggtggacagctgggatctggtgctgaagccggagaacctcgaaaaactgaaaagctgcggcgtctccttcctcgacgcgccggaagagattttcgccaccgtgctgaactacctcggcaaagatccgaacagcagcaaagcggatgattacaccggcccggcgaccgatctgctgctgaagctgcggccgaacattcgctacttccactcttcgcaatatattaacgaccttgccaatggcgacatctgcgtggcgatcggctgggcaggggacgtctggcaggcggccaaccgcgcgaaagaggcgaagaacggcgtcaatgtctcctactttattccgaaggaaggcgcgctggcgttctttgacgtctttgccatgccggccgacgcgaagaataaagatgaagcctatcagttccttaactatctgatgcgtccggacgtcatcgccaaaatcagcgaccaggtgttctacgccaacggcaacaaggcttccacgccgctggtcagcgagactatccgtaacaacccggcgatttatccgccagcggatgtgttcgccaaactgttcacgctgaaggtgcaggatccgaagattgaccgcgtgcgcacccgcgcgtggaccaaagtgaagagcggcaaataa

SEQ ID NO: 234152 - DNA, 1167 bp, Klebsiella pneumoniae
atggtgatcgtttttttgccggagagcacccgattgaacgacgtaatgccccgcccacaggcgaaagcccccaaagcgctgaccccgctactggaaatccgtaacttaaccaagtcgtttgatggccagcatgcggtcgacgacgtcagtctcactatctacaaaggcgaaatttttgctctgctgggcgcgtcaggctgcgggaaatcgacgctgctacgcatgctggcgggctttgaacaaccgaccgccgggcagattatgctcgacggcgtggatctggcgcgcgtgccgccctatcagcggcctattaatatgatgttccagtcctatgccctgtttccccatatgaccgttgagcagaatattgccttcggcctgaagcaggaccgcctgcctaaggcggaaatcaccgcccgggtgcaggagatgctggccctggtacatatgcaggagtttgccaaacgtaagccgcaccaactctcaggcggccagcggcagcgcgtcgcgttggcgcgcagcctggcgaaacggcccaagctgctgctgcttgatgaaccgatgggggcgctggataaaaagctgcgcgatcgcatgcagctcgaggtggtggatattcttgagcgcgttggcgtgacctgcgtgatggtgacccacgatcaggaagaggcgatgaccatggcgggccgtatcgccatcatgaatcgcggcaagtttgtgcagattggcgaaccggaagagatttacgagcatccgaccacccgctacagcgccgagtttatcggctcggtgaacgtctttgaagggctggtgaaggagcgtctggaagacggtctggtgctaagctccccgggactgatgcatccgctgaaggtcgaccccgacgcctcggtggtggacaacgtgccggtctgggtggcgctgcgtccggagaagatcatgctgtgcgatgaaccgccggcggacggctacaattttgccgtcggcgaggtgattcatatcgcctatctgggggatctctctatctatcatgtgcgcctgcaaagcgggcagatgatcagcgcccagctgcagaatgaacaccgccatcggaaagggacgcccacctggggcgatgaggtgcgtttatgctgggatgctgacagctgcgttgtgctgacggtgtga

SEQ ID NO: 234153 - DNA, 132 bp, Klebsiella pneumoniae
atgaacgacttgccggtagtacgctcgccgtggcgcattctgatcctcgtgctcgggttcaccttcctctacgccccgatgctgatgctggtgatctactcgttcaacagctcgaagctggtaacggtctga

SEQ ID NO: 234154 - DNA, 1239 bp, Klebsiella pneumoniae
atgtctaacatagaggaaacactgccaggaagtgcgatcagttcttgggggggctttgtttaccaagggaaagtggctctttatcactgcctgaaattattaacagagaaatcatttcaacagagaataattgatgattttgagttgcaattagatagcactgatgactttgctatttattgtgatggcaaggtgatttcaactcatcaagtgaaagcaaagttatcgcaatatcgttctgaatatgtcaaagctatttataaagcagcatgtatagctactgactgtgatgaagatacaatcagatattttcatgtagctaaaaaacttgataattttgaaaattacataagcaatgatggaaaaatagttgagttttacagttatggcgatattaaatactgtttactatcaaaaataaatgaattgattgatgagcaaattgaattatttttagataccaataatttgattaaaacaaaaaatttaattattgaaaaatctactttactctctgaatttataaccaacaaagtaattttgattcacaacttagttcataagggacaaactcaagactatgctgcctaccataatagaatagcaagtagcatttttttggcactactaatctcccctccccttaatcgtacagacgaagtataccatgcattattaaccaaagaaaaaataacaaatattattgaaactgagttctacaatgacttagacgcttttagcgagaggcaaattgaatcgatatcaaacgttttcagatttatttatagcttaaattataactctgccatacagatgcatacctctttgcagcctcatagacaaaacaatgttataaatgaagatgatgtccgggattatcttgatgtagtatcagcaatatctcacataccaaatctgataggcttgcctcattattcaaaaaaaataaacaaataccttccaacagctttgacaattagagatggaagaagacgaaatacttcattccaagaagagttgaaaaaacacataagggataattccacgcttgcatcattgctttatgaatataataacataatagcctataaagtatccgatgaaacgatagtatcagcaacctcagaaaaaattacaacagttaacggcactaaagagaacaataaccatattgtaagggaatttgatttaagggttatatcaactgataaagcagaggcggaactaaatgctaaatga

SEQ ID NO: 234155 - DNA, 348 bp, Klebsiella pneumoniae; identical to SEQ ID NO: 230009

SEQ ID NO: 234156 - DNA, 156 bp, Klebsiella pneumoniae
atgaacataaaagagatcggagacgtgtttcactttgattgcggcttttcctggtcgcgcagtaaaaacggtaaccataattgccctgatggtttgcctgaaaaggtacggcagctggctgcggagaatgtggcgctgaaaattcattcagcctga

SEQ ID NO: 234157 - DNA, 1224 bp, Klebsiella pneumoniae
atgagcgagttgagttatctggaaaaattgctggatggggttgaagttgagtggaggaaccttggtgatacttcactcttcgaaatagcgaataatggaagaaagccagtaaaagcctctttgcgcattgcaggcgagacgccctattatggtgctaacaacattcaagactatgtggatggatatacccacgatggtgagtatgtcttaattgcagaagatggctcggctagtttagaaaattattcaattcaatatgcaactggtaaattctgggcaaacaaccatgttcatgtcgtacgaggaaaagaaagagttcattctagatttctatatcattatttatgtatcgttaatttcctccccttccttaccgggggaggaagggcaaaattaactaaaggacaattaattgagatacctgtaccaatcccctgcccggacaacccggaaaagtccctcgctatccagtctgaaatcgtccggattctggataaatttactgcacttaccgctgagcttaccgctgagcttaccgctgagcttaacatgcgtaaaaaacagtacaactactatcgcgaccagttgctgagttttgacgatgatgaggttgagtggaagactttgggggagattggcacttggcacggcggagggactccttcaaaaagccgaagtgaattttgggaagatggcagtattccatggatttctcccaaagatatggggagaccaatagttgacacttcagaggactacattacggaagaagcagttgagcaatcttcgacaaaactggttccagctaactctatcgcgattgtagttcgttcaagcatattagataaggtaatgccaagtgcattgattcccgtacccgctacttttaaccaggatatgaaggtagttataccgcattgtaatatttcacctaattatatagctcatataatgagatcgcgaggggatgatattctccgtgcagctaagaaaagtggtggttctgtagcctctattgacagtaaaaaactattttcatttagaatcccagtacctcacttgaatgaacaaaaaaggatcgtaaatattcttgataagtttgatacgttagcaaactcaatcactgaaggtctgccccgtgaaattgaactacgacaaaaacagtacgaatactatcgtgacttgctgttcagcttcccgagaccagaaaccgccagcaactga

SEQ ID NO: 234158 - DNA, 519 bp, Klebsiella pneumoniae
atgaaattatatccagtggttatatttttatgttttctttcatccggttgcatgacttcatcagagtatcataaatacttaattgataggattgatgaaggaaaaaacaaaaagactgcaaagatattacaagaaaatgagaatcaccaaggcggtgagttcttatgtaaaacattcggttctgaatttaaaggattgaaaccaaattcaacagtcaaagtaattgatgaggttgttagatttaaagtgtatgaacaaaacaaccttgtatttaaaagccctgatctttcaataaacaccagtacaaaagacaggtcagcatcgttagatgataaaagcatcactgcctgggttttcgccggttacagggatgatggcgtagggtaccggtatgaagttaagtttgaaagcaaaataaaagatgggtcattatataaggttgtttacggaacggcacatcaaatattaaccccagtttatgctgggaacatcactctaagtgaatgtagaaaattatag

SEQ ID NO: 234159 - DNA, 831 bp, Klebsiella pneumoniae
atgaagactttcacgcgcaccgtacgcgaggcggtgaagttctttctgcgcaatggctacacctcgcggcaggagctggagcaatggcaggccatcatccgtcaggcagctgaaagcgaaactgatgacgactacatgagcatggtgtccgatcggttgcgtaagacctatgacctgcaggttagcaaggctggagcgctggagcgccataaggggctttcacgcttcacgctgaactacatggagccgaagttacgcagcgagctggatcgccgcatcctggccagcgctgacctgataaagctgaatcgcaccgcggcgattaacaaaaccgtgcagcgtttcagtggctgggcaaccagcataccggtgcaggattatgtcggtggcggtctgtcaccatcgtcgcgaagcggggttaactacaactgcgatcatatccagaagagtgcccagcaggtcgactatgaagcgcgccgcgtgatgattgaccagagtcataagctgatcgccaatatcgacaacatcatcgcgacgagcaataacgcgattgctgccgagtggcatagccactggcgccaggcagggtacgactaccgggaagaccacaaggagcgtgacaagctggtctatctcatccgcggaaactgggcgcagaaaaatggctatgtcaaagctggttccgccggctatctcgacgaaatcacgcagcctggagaagaggttttctgtcggtgctacgtcacctatctgtacaacctccgcagcattcccgaggacatgctgacccagaagggccgcaagttcctggagtccatgaaaacagcatag

SEQ ID NO: 234160 - DNA, 630 bp, Klebsiella pneumoniae
atgaaagttatcaagtattggaaagttcagcttctgcagctttctcagccttccagcgctatcaacgaccgtaagttgatcgaagccctgttgtttgaaggctactcaaaagataagcccaaaatcaatctcggtaccgggcagggcatcgagctgtttacagctcctgactcgctggaaaccaaaatcatcagggatcacttcattgacggcgtgagatacatcccggtttatgaagatgatggtgatgatgaaactgacgggactcaggaagagcagactaagccgccctcacgcgaagcaatgattgaatatatcaagcaggctatcggggaaggttatcagcccaaaacctgcgatgagctcattagcaaccatgatctgatttggctcttgcatgacaagatgctcgattatgaatatcgcgcttgttggaactggtgccaaaactaccacgtatccgacgttaataaggctcgcagatcctccttcgaagacgtcgtgaagccggtaatcaaatggcttaacgaaaacgccaaccctcatacatcagtgagcatcgacgcaaccagtgctcagctgcttactggtgaaatcggcattcacacggaagagttcattaaggactga

SEQ ID NO: 234161 - DNA, 582 bp, Klebsiella pneumoniae
atgcttaaacgcactcagcgccgctgcaaaatctgccgggcgaagtttaccgcgacatttgagaatcaacgctggtgctgccctgagcatggcgctgaatttgccatgcaggaactggagaagaagcgcgataagcaggcccaggcgaaagagaagaaagagcgcgcagcctggagaaagcgcaaagcagcggtgaaacctctccgacactgggaagatatgacccagcgtgtcgttaacgactatatccgcgagcgtgaccatgatctgccgtgcatcagctgcggcacgttcgaaacggttcagtgggaagccggtcattaccgttctcgcggtaaagcatctcacctgcgctacaacgaggacaacattcacaagcagtgtcatcactgcaacgtgcagatgtcagggaatcagcagcagtaccgcattgctctggtagagaaaatcggcgctgagcgcgtcgaggcgctcgaaaacaacaacacccctcaccgatacaccatcgaagaactggaaggcatcaggcgccattacagcgcgctacgccgtgcgctcataaaacaacgggaggccgcatga

SEQ ID NO: 234162 - DNA, 177 bp, Klebsiella pneumoniae
atggctatgcaatgtcttctcgccaaagtcatggagcacggcatcttccgcgtgcctgcacgtcgcaagcgcaaggtcgaagttaaaccttccgacatcccgacactgaaaggctatacggcccgtctagtcgacaagaagtggctgtgcctgagagcaaggaggccacatgcttaa

SEQ ID NO: 234163 - DNA, 480 bp, Klebsiella pneumoniae
atgactgatatcaccgaactggcgcagagcctgaaagcggcagcagagaaggccattggggcgaatgaacggctctcagtatacaaaaatgatgaaattattgacatttcccagcatgaaggtgaacagattgatattgatattgcagatattaatctgttcctcggagaggccaatcctgcaaacatcctcacactggtagaggctctggagaaggcgcaacaggtagacgaagaactttgcaatctcctgcctcccggcgttgagtacatggacccaccagacggcggtgatgtcacgccgcttgaaggagtgcgtcgaatggtggctgattaccgccagcgcatcgccgagctggagtcccgcaccgtgaagctgccgccatgtgttgacgatctgcatggtattgggatggtcatgtctgctgacgcagtggtagaggcgcttacctcatatggaatcaaggtggaggctgagtga

SEQ ID NO: 234164 - DNA, 396 bp, Klebsiella pneumoniae
atgagcaagacgctggacattcgcgccggtgatcggttcgaaacagtttacccattcattttcgtatgcactgaccatcagcaatgggacggaaatgtattcaccgatgaaaggtggattggtggttgccgaaagacatttgagccagctgattgcggttatggagatcagaccgtttatacagctgacgcggaaggtaaaagaatccttgaggttctgtctgtcgctgagatgcctggaaagtggcagcgccggattatctacgcctgccacctcattgaccctgaggggaaagagagaaaaggcaggaaggcctatacggtaaccgaggacagattcatcaaaatgtcgtcagggtattttgcggattatggagtggagaacagcgatgactga

SEQ ID NO: 234165 - DNA, 135 bp, Klebsiella pneumoniae; identical to SEQ ID NO: 208732

SEQ ID NO: 234166 - DNA, 849 bp, Klebsiella pneumoniae
gtggtggcgctggagctggcgcaagcctttgcccggctgggcagcaaggtcacggccctggcgcgcaataccttgttcttccgtgaagacccggccatcggcgaggcggtgacagccgctttccgtgccgagggcatcgaggtgctggagcacacgcaagccagccaggtcgcccatatggacggtgaattcgtgctgaccaccacgcacggtgaattgcgcgccgacaagctgctggtcgccaccggccggacaccgaacacgcgcagcctggcattggaagcggcgggggtagccgtcaatgcgcagggggccatcgtcatcgacaagggcatgcgcaccagtagcccgaacatctacgcggccggcgactgcaccgaccagccgcagttcgtctatgtggcggcagcggccggcactcgtgcggcgatcaacatgactggcggcgatgcggccctggacctgaccgcaatgccggccgtggtgttcaccgacccgcaggtcgccaccgtgggctacagcgaggcggaagcacatcacgacgggatcgagaccgacagtcgcctgctaacactggataacgtgccgcgtgcgcttgccaacttcgacacacgcggcttcatcaagctggtcatcgaggaaggtagcggacggctcatcggcgtgcaagcggtggccccggaagcgggtgaactgatccagacggcggtgctcgccattcgcaaccgtatgaccgtgcaggaactggccgaccaattgttcccctacctgaccatggtcgaagggctgaagctcgcggcgcagaccttcagcaaggacgtgaagcagctttcgtgctgcgccggatga

SEQ ID NO: 234167 - DNA, 1008 bp, Klebsiella pneumoniae
atgagtcagataaatggcatagatttaattagagatttggaagcacagtctaaaaagtacatgtgcttagctgatgtattattatttcttagccttaaacttaattgcgacgcgtctgtcgctgctgaaatacttcttggccgcatacctatggagcaaggtataaaccctccttatttcggacaaaaaataggtatggctacttttaggcagtcccctaatgatcctcttctttctggattgttagagggtgttattgttggagcagatactgcctttgaagatagccctttcaatgaaatggcgttttctaaacaatactgggattattcatttattgtgaaggagttggagcaggcgatatccttcaaattggacgcgctttcccaagagttacctgaatatctaaaaccttataaaacaagaataggtattcaactaactgaagttgcaaatattatggctggttgtaaaccaagagatattataaataaacttcctgaagctgaaatcattggtagctttacggcatcgttgtgggatgctgttgatcataatgttttatcggcaacaaatgaggttattgattacggttacaatgaatctaaccgtgtcgatgttactttgttaaaagatgaagttactgaatgggcaaagaagcacggtataaattggccttttgaactatcaaccaaaacaggcgaacgtgatttagcggaggatagtgcccagaccattaaaaggttaatggctgaaaatgatgagttggaagatgaattgatagatctaaggttaagctcgccaatttttttagggaagttcaggccagatgatccattagatatcgctattaaactacgtaatgctgaatggggagccttcaatgaaaatgtgcgttctactatcccatcagcagagtacctcgtcgcaaaattaaaaagtgaatatgcgatgtccgatgctctggctaaggctattgaaaaagtggcctgcccgattcagaggtga

SEQ ID NO: 234168 - DNA, 198 bp, Klebsiella pneumoniae
atgtctcacaatctaattcgactccctgaagtacagcgccgcactggctatagcaaagcgtggatctataaattgcttaaagagaagcgatttcctgcggcagttaaaattggttctcgtgcaatcgcatttgtagaaagtgaaataaatgattgggtgaaccagcgtatcgctgaatctcgcggtgaggtagtgtaa

SEQ ID NO: 234169 - DNA, 321 bp, Klebsiella pneumoniae
atgggcatatttctcatcgagataatggtgccgactaagctggttttacctgcgagacagtccttccccccctggggtgactctaaaggtgcgatttccgtatttttaactaacaacagggtaactaacggttactctgttcgcctggaagattccctattgcatccgggatattcccgcatgtacgggcccggaaatttaatactctcgatcgccgctatagtatgcagcgccaaccacaacacacgtttgccaatcagtgcaattcaaatccatttcaaacagtataaatttaacaagcatcttttttggatgccctaa

SEQ ID NO: 234170 - DNA, 927 bp, Klebsiella pneumoniae
atgagtaataaaaaagtcacagtttttattttgacaaaaaatgagtcattacatatcaaaaggtgtcttgattccttacggaatatagctgataaaatagtaattattgattctttctctactgatgatacgaaagaaatatgtctatcatacggagatctagtcgagttttctgagcatccttggaaaaattacgctgaccaatttcaatgggggttagataaccatacagtaaatactgaatggtgtatgcgaatggatgctgatgaatatattgattcagagttacagaatgaattactgtcaaagttaccagaacttacaggtgatataaattgtatatttatccgcaggaaatatatttataagaacaagtggattagacatggtggtgtttatcctttgaatttgcttcgcgtatggcgtacaggaactggtagaattgagcagcgctggatggatgagcatattgttgtacaaaacccgagaacaactcaattccatgggcatatatatgatcataatttaaatgatataagatggtggagtgataaacatttaaattatgcagatagagaagttgtagatcttttaaatatcaagtattcactatttaaaaaggatgatgaagttaaaaaaaatggaggttttcaggaaaaaataaaacgtcttttaaaagaaaaaatctattttaagctaccaccttctttaagatctttattatattttctatatagatatctattaagattgggtttcatggatggttctaagggatgggactatcatttcttacaagggctttggtatagaagttatgtcgatattagatttaaagaattagataatgctatttcatctattactaacaaagatgaagtattggattatttatctgttaaaactggattgaattttaagcgctga

SEQ ID NO: 234171 - DNA, 552 bp, Klebsiella pneumoniae
gtgactattgtgaataatagctatgagctgaatttttttagccgtgcaaataaaatataccgtgttgcatggaatatattttatattattttttttaaatatactcccccacagttattttcttatagaaattttgttttaaagatttggggaagcaaaatccaatcaggagtgcgtatatatcctacggtcaagatttggagccccaagaatcttgtcatgaaaaagggctcatcgattggaccgcgagcatatatatacaatcaaggaaatgtcgagattggtgaatatagtattataagccaagatgtaactatttgtgctagtacacataattataaaagatacgatcatcccttggtattaaaaaacattactatcggaaaacgagtatgggtctgtgcagagtcttttatcggaccaggggtgactttaaatgatggttgtattctaggagctcgtggtgttgctaaaaaaaatttggatgcttggtatgtatatgatgggaatccgtgtcaaaaaattaaaaaaagggtgatggaaaatgagtaa

SEQ ID NO: 234172 - DNA, 546 bp, Klebsiella pneumoniae
atgataataaacaaaaatagctttgtttatcgtattctacgaagaacgaaatgcaagttttcgcatttaaggtacagagtaaagcaagtacattattccgcaatgataagttcaggatgtgatatctctaacgacttgattatggaagctgaaacctatattgggcctaattgcttgattggacccaatgttgttattaaaaagttcgcaataattggccccaatgtttctatagttggacacgatcacatatttgataaagttggagtacccattatttattctggtagaccttatggagaagcaaagacatatataggtaaagatgcttggatcggtgcgggtagcataatattaagtggtgtgaatatcggttcaggagctattgtggctgccggctcagtcgttacaaaaaatatccctgaatgcactatttatggtggtgtaccggcgcgattcattaaaaataggttttctgaagatgataaaataaaacatttaaacctaatcgaaaatgagaatttaactggtgactattgtgaataa

SEQ ID NO: 234173 - DNA, 1131 bp, Klebsiella pneumoniae
atgcaaaaagtagcagtaatatatcatttttttcctcattatcggtctggcattataaaagaattattaaagtcaaatgaatatgagttccatttttttggtgataatatacaacaatatcaaggcatcaaacgttataacgatatacctgaagatagattccatgtcattaaatttaataattataaaggacttatttttcaacatggcttaatgagattagcaactgacaaagactttgctaagataataatacttgccgaccctcattttgttatgtcgtggcctctatgtgttttaggcaaattgcgtggaaaaaaaataatatattggacgcatggatggactaaaaatataagtggtctgagatattttataaaaaagaaatatcataacttagctgatgatttacttctgtatggtaatcgtgcaaaagatctcgcaatacaatcaggatatccagaggaaaagtgccatgtgatttataatagtcttgattacgaaaatcaagtgatggcacggaataaattagctaatattgatcgtgatacaaataggaaagagaaatttggagttacggatggggcaattgttacggttgctcgattaattgagagttgtaggtttgacctattaattgagtcgcttaaattgattaaagaacaaaaaaagttagcaccaaaagttatcattataggtgaaggcccagagaagaataagttacaaataatggctagtgaacttgacgttgcggatcagataacatttatgggggcttgttatgacgaagctgtactgtctgaaataatttacgctgctgatgtaactgtttctcctggtaaggttgggctcttggccatgcatagtttgaattatggtacacctgtaattacacatgacaattttgaaaaacaaatgccagaatatgaagcaattattcctaataaaactggatcgttttttaaacataatgatgcaaattcacttgcggaagaaataataaaatggatcgtcaataaaaaagatgcccaagttattgagaattgccatagtgttatagattataaatataatcctctcgtgcaaagtaaaattattcatgaggttttgaatgataataaacaaaaatag

SEQ ID NO: 234174 - DNA, 636 bp, Klebsiella pneumoniae; identical to SEQ ID NO: 188184

SEQ ID NO: 234175 - DNA, 240 bp, Klebsiella pneumoniae
atgcgaaatattcgttttccggatttagatatcaccgggatgtgggtgctggccgtgggcgtgtttttccacctgatagcccggcttgtcagaaagcagcctgagctggccgtccaggccggggaaatcttcgggctgggtatggtggtgtttgggggataccgcattcttaacgccctgattgctgaagccgaaaaagaggagaaagcctgtgaaaaacagcctgatgaacctcgctaa

SEQ ID NO: 234176 - DNA, 645 bp, Klebsiella pneumoniae
atgattaaaacggtcgcactggtactgatggtgactgaccacaccggcttactgctggccggaaacaatgaagtgatgcgcctgctgggacgtggttgttttccgctgttcggtctggcatggggaatgaatctggcacggcacgcggaaatacgccagtctcaactgaacagcctgtggggctgggcgctggtcgcccaggtgtcgtttatgcttattggatacccgtggtataccgggaatattctgtttgcctttgccgttacgggccaggtcctgcggtgggtcagccagccgtcctggtattacaccctcccggcggctggactgctggtcacctggatacccctgtcaaccggcagctacggcatggccggagtgggcatgctcaccgccagctggctgctttgtcgcgcacagcatgcaccggaacggctgggatacggggtgctgtgggccctcatggtgttgctgatgaatatgcatgacgtgagtgaatcagtggccgggctggcgattgcgctgctgacgctgatggtgtgctcatctgccggagaacgtgtgaaacgcttctggccgcggcagttcttcgtgatgttctatgccgtgcacctggcggtactcggtattgtcgtctcgatgtaa

SEQ ID NO: 234177 - DNA, 1542 bp, Klebsiella pneumoniae; identical to SEQ ID NO: 30088

SEQ ID NO: 234178 - DNA, 501 bp, Klebsiella pneumoniae; identical to SEQ ID NO: 105788

SEQ ID NO: 234179 - DNA, 570 bp, Klebsiella pneumoniae; identical to SEQ ID NO: 34949

SEQ ID NO: 234180 - DNA, 669 bp, Klebsiella pneumoniae; identical to SEQ ID NO: 36186

SEQ ID NO: 234181 - DNA, 234 bp, Klebsiella pneumoniae
atgacggtcggcgaattcaggatgtgggctgaatacgaccgtatcagcccaatcggcgatattcgcggcgatattctcaatgctcagctggtatctgcggtttacggagcgcagggcggtaaagtcaccattgaagatgctcagcttcagtggagcgcagaagaggttgaggtaaacgacggcggcgatccctttgcagggctggaagcggcgctgctggctgcgtcagcatag

SEQ ID NO: 234182 - DNA, 201 bp, Klebsiella pneumoniae; identical to SEQ ID NO: 183315

SEQ ID NO: 234183 - DNA, 1710 bp, Klebsiella pneumoniae; identical to SEQ ID NO: 95281

SEQ ID NO: 234184 - DNA, 1728 bp, Klebsiella pneumoniae
gtggttgaaatggcggatgaagttgttagtccgtctcagtatttaattgattggatgttgagtaagcactggaatgttcctgaagaacgtcatgtaattttaaattgcgagccatttcaagggtttgtgacgagagatgatgttacagttaaaataaatgaaaagccagcttctggcgttgagcttgtatttttcggccgccttgaaacccgtaaaggacttgacatattcctgcgtgcattaagaaaactatctgatgaagataaagagagcatttctggagtaaccttcctcggaaaaaatgtcactatggggaaaactgattcatttacttatattatgaatcagactaaaaatttgggactcgcagttaatgtcatcagcgactatgatcgtaccaacgctaatgaatatataaaaagaaaaaatgtattagtcatcattccatcacttgtagaaaactcaccctatactgtttatgaatgcttgattaataacgttaatttcctcgcttcaaacgttggtggaattccagagcttattccgcaggagcatcatgcggaagttctatttattcctacacctgtcgatttatacgggaaaatccactatcgcttaaaaaatataaatataaaaccagggcttgctgaatcacaagacaatattaaagaagcttggtttgtcgcagttgaacgaaaaaacaaccgcgcattcaagaaaatcgatgaagctaacagcccgttagttagcgtgtgtataactcacttcgaacgtcaccatttgcttcagcaagcactcgcatcaataaaatctcagacgtaccaaaatattgaggtcatcttggttgatgatggaagtacgacagaagattctcatcgttatttgaatctcatcgagaatgattttaactctcgaggctggaaaattgtccgtagttctaataactatctgggtgctgcaaggaatttggctgcgcgacacgcctctggcgaatatctgatgtttatggacgatgataatgttgctaagccttttgaggtagaaacgtttgttactgcagcattaaactctggggccgatgtgttaaccacaccaagcgatcttatttttggtgaggagttcccttctccgttccgtaaaatgacgcactgctggcttccgttagggcctgatttaaatatcgccagctttagtaactgctttggcgatgctaatgcgctgatcagaaaagaggttttcgaaaaagtaggcggatttactgaagattacggtttaggtcatgaagactgggagttttttgccaaaatatcattacagggatataaattgcaaatcgtcccggaacctctattttggtatagagttgcaaactccggcatgttgttaagtggaaataagagtaaaaataactaccgcagtttccgtccttttatggatgagaatgttaaatataactatgcaatggggttgataccttcctacctcgagaagattcaagaacttgagagtgaagtgaatcgcttgcggagcatcaatggtggtcattctgtcagtaacgagttacaacttttgaataataaggttgatggtcttatttctcagcaaagagatggctgggcccatgaccgttttaatgctctgtatgaagcaattcatgtccaaggcgcaaaacgaggcaccagcctggttcgccgggttgcccggaaagtgaaatcaatgttaaaataa

SEQ ID NO: 234185 - DNA, 963 bp, Klebsiella pneumoniae
gtgttcggtattcagtcctatgcccagctggaagatatctatggcgtcaagcctgccgccacgctctttgacgtgatgaacacccgggccttcttccgctccccgagtaaggagattgcggagtttgctgccggtgaaattggtgagaaggaaatcctcaaggccagcgagcagtattcttacggtgctgacccggtgcgtgatggtgtatcgaccgggaaagaaaaagagcgggaaacgctggtcagttactccgatattcagacgctgcctgacctgtcctgctatgtcacgctgcccgggccgtatccggccgtgaaactggccctcaaatacaaaccgcgtccgaaaattgccgagggatttattcctcgcactctcgatgcgcgggtggatgcgcggctcagtgcgttgcttgaagcgcgggaagctgaaggcagccttgccagggcgcttttcactccggatgcgccggcatccgggcccgctgatacaaacagtcacgccggtgaacaacctgagccggtcagtcagcctgcgccagcagacatgacagtatctccggaaccggtaaaagcgccgccgacaacaaagagtccggcagcggaaccttccgtcagaacaacggagccttccgtcctgcgggtcacgaccgtaccgttgatcaaaccaaaagcagccgcagcggccgctgctgcctcaacagcatcctcttccggtgcccctgcaacagctgcaggcgggacacaacaggaactggcgcagcagtcagcggaacagggacaggacatgctgccggccggcatgaacgaggacggtgtcattgaggacatgcaggcgtatgacgcctggctggcagatgagcagacacagcgggatatgcagcggcgtgaggaagtcaatatcaaccacagccaccggcacgatgagcaggatgatgtcgagattggagggaatatctga

SEQ ID NO: 234186 - DNA, 393 bp, Klebsiella pneumoniae; identical to SEQ ID NO: 217930

SEQ ID NO: 234187 - DNA, 393 bp, Klebsiella pneumoniae; identical to SEQ ID NO: 222346

SEQ ID NO: 234188 - DNA, 633 bp, Klebsiella pneumoniae; identical to SEQ ID NO: 16794

SEQ ID NO: 234189 - DNA, 477 bp, Klebsiella pneumoniae
atgggtgtcagcgttggaggagataaacaaccagccattgggtcggtcctcacggacaccccgcatccagtcccggatagtgaatggctcgccgttcttctcaatgccctgcaggtagcgaatagccttgacgtagttggtcagcacggcacgaatggagatggccgttttctcaattttctcttcaaccaggttcgctgccggcgtgttctgcagataggcgcgcagcttgtcgattttaatggacagcatggtatcgaccagcttctcgtagctgcgatccttgtcttcacgcatcaggtacgcgccttcggcaaagatagtgcgaccggaaccctgccagaacgggtcttctttggtacccatcgggataagggtgttggagatgttgtcgaagtccggcagcgtcaggcactctttccacaaatcccaggccgcgcagcgcgagtccagcgggttgaggattttatccagtga

SEQ ID NO: 234190 - DNA, 534 bp, Klebsiella pneumoniae
gtgaaccagccgctcgatgccggtaggcagatcgagtgcctgccatgccttgaggcgttcgatgtgttccagcatatgccgcgaatttggcttggccggagactggcgcaaccaagccaaccaggtcgtcttgccgttgtcccggcgcttgagcagatcgtcgaggcggcggcgatgcgcgtccgccagtggttcggccaaggcgtcgtagatgcgccggttagcacgggtgatcgcctcggcactcgcccgctcgacggcgttgagggcgggcagaatgaccgactgccgccgcaggtgcccgatcaaggcgctggccagcacgatgcctttgtcggtttgcatcgccagctcggtcagcatctggacggcctgccggtaatggctcatggtgaagggccggaaaccgaacacggtttgcagctcgctcaggtgctcgcgccgggtctgctcccgctggccgtactcgttccagctttcgacgccgaccttgagctggtcggcgaccagcttcaacaagggcgggaacggtag

SEQ ID NO: 234191 - DNA, 780 bp, Klebsiella pneumoniae; identical to SEQ ID NO: 56175

SEQ ID NO: 234192 - DNA, 321 bp, Klebsiella pneumoniae
atgctcggggtgtctaactcacttatttaccagctgacggactatatcggctacgacatcctgctgcagtacattcaggaacttatccagcaggcccgggcgatgatttcaaccggtaattatccccagtcgacaatggatatgatcatggaaaacctcaatcaggcgagtgtccagattgccgcttttcagtcccgtgttcaggttcagcaggacgccttgcttgtggttgacagacaaatgagttacatgcgccagcaggtctctgcccgcatgatgacccgctaccagaataactatcattttggggggaatctgtaa

SEQ ID NO: 234193 - DNA, 621 bp, Klebsiella pneumoniae
atgatgaaggacgtatctttcatcttgttatcgtctgctacgatcgctgcttatatgaggattgataccttaatgatcagctattaccttggaagtgatgcagccggtaaatattttgcaggttcccgacttagtgaaggggtttattttataggtatttcagttgccaatatcttttattcccaaacattaagagataatatagccgagaaaaaaacagtatcgagagatataaaaaaatatatattgtttcttttcgtattaggtgtcgcaggtacaagcttcataaatttattctcaaatatggctattaattttctatatggtaaagaattttccgtaagtgcaaaaatactctcaatacatagtatatcaatagcgtttgtttttatcggcggatatctcagtcgcttatatattgggtgcggttatgctaaaaagaatttcagacgcacttttttctctttgattataaatgtagctttagtttattatatgatcccgcactttggaatatcaggtgcagcctatgcaatggtcattagccagatattctctagttttataatgtttataattgataaggaatttatgtctaggctggctaaagggaaaatatga

SEQ ID NO: 234194 - DNA, 237 bp, Klebsiella pneumoniae
atgaaaattaattttcacaaacagcatgccattgattttgttctgagattaacgctgacaataatcattatttcaccggtgatttatttctcctgggatgccgtcaaagcgacgtcggggagtgattatgtcgagagtgtggtttttattgttgcggttggttttttctggttcgtgagctatctcttttttagttcgcttgccgcgttgttacggaaaaagacggaggaagaatga

SEQ ID NO: 234195 - DNA, 294 bp, Klebsiella pneumoniae; identical to SEQ ID NO: 102300

SEQ ID NO: 234196 - DNA, 249 bp, Klebsiella pneumoniae
atggtagctcgtcacccgggtcacgcactctttcccgtcgcgccccaggcggccaattttcagatgaccagcggtgacctgcatatcaaagctgtcatcgacacactgatagttcagatcctgataggggtccagcttatacggtacgcggtacatttcgtgcgggtccgggtttatcagctcacgcatcagttcgaccagcccggcagcatcaaggatacgcgtcggaatataggcaccgcccagtga

SEQ ID NO: 234197 - DNA, 600 bp, Klebsiella pneumoniae
atgcacaaaaagacgttattttcgcgtgccggtcgtctcgccgtggcggtgagcggcgcactggccctggcgggcgccgccttacctgccaacgcctccacgctgcggatcgccatgaccgccgcggatattccgttaacccttggccagccggatcaaggctatgagggcaaccgctttaccggcatcccgctgtacgacgcgctggtggagtgggatctgtcgcaaggtgaaaagcccagcggtctggtgccggggctggcgaccgagtggcacatcgatccgcagaacaccagccgctggattttcaccctgcgtccgggggtgaagtttcatgatgggacggaggtgaacgccgacgccatcgtctggaacgtggataaggtgctgaataaagcggcgccgcagtacgccccgggtcagatcggcaacaccctgtcgcgcatgccgaccctcaccggcgcagagaaaattgacgaccacaccgtggcgctgaccacctcggaaccggatgcgctgctgcgtacaacatcaccaacctgtttatcgtctcgccgacggcgtggcagaagcagtatgacgcggtgccggccagcgtga

SEQ ID NO: 234198 - DNA, 279 bp, Klebsiella pneumoniae; identical to SEQ ID NO: 141626

SEQ ID NO: 234199 - DNA, 915 bp, Klebsiella pneumoniae
ttggccattttccattttcctttacttttttgggtgccatccacatctgatgacgtttctagagctcatttcaaattgactggccgaaaatgggatgtgtcgatttttgatttgtattctcttgcagcggaaggccatcagatgcgaatgccagtcgaattaatgcaggtctttttgccgcgcgttaatcttgaaattgccgttgaagctgaggagcactccgccgcatgccgtcagttagatattctgcgtgcaatgctatatagcaggggattagctccgacgcttgcgccgttcgcaaccaattattccttgaatgcatatgctggtatcaacgggcgctcctctgatctgacaaaagataaattgcacaaagggttgcagactggcattaatctcaaagatgcgaaagttgaggggtggccgtatgaactttcactgatgtgtttgcgtggcgaccccgaacaattatcgaatacagtgcgtgaggatgtttttttgtcagccgttcaagattcgttactttggcgcaatttagaagataaaaatccgccggctaaagttatacgagctgcgttggccaaagcgcctctaatgcctgatatatcctcatcaatattgcacatgtggcaagcgttagaaaacatcatacgaattcagtcagagattacgtatcgcacgtcgttattactggctgagttgtgcgcaccaattcagccccgttcgttaacctacgacacggcaaaaaagagttacggagaccgcagtaagatcgcacacggttcaagttcatctgtggatatttttcaatggatgcgggcttgggggctattgcaaaagacatgtcaggcaattttgctacggggcggaatcccgtctgcagatgaactgactagagagcttttggcacactag

SEQ ID NO: 234200 - DNA, 2160 bp, Klebsiella pneumoniae
atgggggggagtgtgagtaattattttaacgacagtccaattgagaggcgagaagaagatctatacggtgtgacctctttttcagaggctctcgcaaaaagtatattaaatattaaggatccgattggaacaacaattgctttaaatggagcatgggggtcaggcaaaagcagtacagttaatcttattagagcggagctttcggaagcaaaagattcccatttgattgtcactgagtttaaatgttggtggtatagaggagaagaggccctggcgctcgcctttcttcaacaattaaactctgttttgggtgaacaatttggtgacaaaactcgtaaattagttcgaaaattgggtcgcggcattctccaagccggtcctgttataggccccgcaattgcattaactccggtaggttggttgtctgggttagtcggcggcttgtttgatgtagcgaagcggttgtttccagatgaagagcccctagagacagtgtttcgagagctgtcaaaagtacttgaggcagagaatcgacgattcctcgtcataattgatgacatggatcgtctatcttcggaggaggcacttgctatatttcgtcttattaagtcagtaggacgattgccgaatgtgatgtatcttgttgtttttgacaggcaactagcagataaagcgattaacgaaaaatatccgtcagaagggccgcattttttagaaaagataatacaggccggttttgagctaccaatgccagtgtcgactgacttaaacaatgcggtactcgcttccattgatgagatttgcggaactcccagcgaagatcagctagtgcgcttcatgaatgtattctatgatgtcgttgctccatacataacttcgcctcgccacgttagccgatttcagaatgcaattagcgtaacttggccagcaattgctggagaggtaaatttagctgatttcgttgctttagaaattttaagactttatgagccgacgctattttctgcgataaagggaaataaaagcctcgtatgcggaaccaaaacagaaaataataacaataatgatgatcgattttcgatcttcttaaatgggatagaggaggggcgccaagacgtcgcaaagaccgcgctccagcgactttttcctcgactggagagtataggatatggaggtgaatggataagtgagtggagttcagaaagacgtgtttgtgttgaagctcatttcgatacttactttagattaaatctcagtgatgaggtgttgtctggcaaagcgattgatgaattaatagagaaagcaggtgattctgattacattaaaaaagtattcatggatgctgcgaatgcaaggcgcagaactgggcaatcaatggtgccagtttatttcgatgagcttacaactcatggaaagcgggtagataaagataaagtgaggccacttttaagtgcgctttttgaaattcatgatgcgattgatcttaagattgatgctgatagtggattcatggcgatggcgaatacaactcttcgctatcactggttaatcagaaaattaactcgaaataaatttagtattgaagaacgtacggatatgtacttaaaggcgacggaggccgcgtcgctcggttggcttatcaattttgtatcttctgctcgtggggactatcaggtgcgagaagatagacagcctacagcggaagaagattgtcttgtatctgaaaacgtattgcctgaacttacaaaacgggcactaaatgcgatccgaacatctagtgctgatggctctcttttggtccataaggacctactatatatattatatcgttggattgattttatgggcggtgatccaacggaagctcgtgcgtggactgattcccttttggacgatcgaaaggctctcctaatactcgtaaaagtcatgacaggggcatcgtggtctatggggatgggaggttttggctcgcttggagatcgagtgtcaaaacggacagttagagcgcaaatttccgatgactctcctgtgattgatgcaaggaagttccgtgcagccattgagaaaattgcgaacgataaaaactcatcagatgatgaaattgcgtccatccagactctcctgtccgcatgggatcatcgcgctaggggagaagattga

SEQ ID NO: 234201 - DNA, 690 bp, Klebsiella pneumoniae
atgctacgcgagtgtatgcgaattagcgcgaatgtacgcgattacgccatattttactggcgattctgctccagtcgcatagaatcgcagagaggtagcaggcaggatgtgtgttgtaccggtacgggcaagcccgcaccagtccaacaccgccccttactcacctgcggttcgacggcatcctgctctgcgaggctgacggtcgctgccgcgacaaaggagccacgggcaccaaaaaggaggcgcaagccgggcaagacaacgacaccaatccgcgccatcgggcgcgatgaaaaaggggcactgatgagtgacgaagaacagaaaccgaaagggaagggccgaggaacccgaccccgaggccaacgaatagaggtatgggtgaacaacgacgaaaaggccgagctggccgaccgggctgctcagtccggtttgtcgttgtccgcttacatgaaagcggccggactgaacgcgcctatccgggcaagggctgacctgtcagccgtggccgatcttgtgcgagtgaatggcgaccttggccgggtggccgggttgttgaaattgtggcttgcggagaagcgtgggcagagtgcccggtctatggacattgagaaggtaatgatcgaatttagagccttgcaggcttctatcagagagaaaatgagcgctatagttgtgtctcggaaatga

SEQ ID NO: 234202 - DNA, 225 bp, Klebsiella pneumoniae; identical to SEQ ID NO: 126355

SEQ ID NO: 234203 - DNA, 6051 bp, Klebsiella pneumoniae; identical to SEQ ID NO: 230264

SEQ ID NO: 234204 - DNA, 1506 bp, Klebsiella pneumoniae; identical to SEQ ID NO: 230262

SEQ ID NO: 234205 - DNA, 351 bp, Klebsiella pneumoniae; identical to SEQ ID NO: 231803

SEQ ID NO: 234206 - DNA, 357 bp, Klebsiella pneumoniae
atgtcggaagcaaaattattcagcccactgaaagtcggtgcggtcaccgtccctaatcgcgtatttatggcgccgttgacgcgtctgcgcagcattgagccgggcgatatccctactccgctgatgggcgaatactaccgccagcgcgccagttccgggctgatcatcaccgaagcgacgcagatctccgcgcaggccaaaggctacgccggcgcgcctgggctgcacagcccggagcagattgccgcctggcagaaaatcaccgccggcgttcatgccgaaaacggtcatatcgccgtccagctgtggcacaccgggcgtatttcccatagcagcctggcggcgccgccccggtag

SEQ ID NO: 234207 - DNA, 786 bp, Klebsiella pneumoniae
atggctaaagactcaaagctggtatatggcgcgagtggcaaaacgaacgttttgacgttcgaacctgaaaacctgcacttggttaccgacaaaacgcacccgctttacgatgagcgtatccacctgcctatcagcgaggcaatggtgcttaacatcatggaccagggcgttcttgagccgattatcgtctggaaagacccggagacagggctgtcttgtgtagttgatggtcgccagcgtgtgcgccatacactggaagctaacaagcggctgtcgaaagcaggaaaagaaccgttactggttcccggggtccctaaacgtggctctgccattcgcatggcgcaggcaatggtaagtgctaacgaaatccgccaggcagatacgccactgggccgggcaaagaaaatggctgatgcgctggagcgcggccacgacgaggacgatttagcgctgatgtttggcgtgagtgtccagaccgtacgcgcaacgctgtcactgctggatgccacccaggctgttcgcgatgcagtggagtccggaacggtcactgttacccaggcgcgtcagctggcatcgcttaaacctgaagagcagcgggagaaggtatctgaaatcgaagcggcaactgctggcacaaccggccatgaaaaagcccggcgtcagcgtcagatcctcggtgatgcaaagccgcgcctgaaaacccgcaaagaaatcaccaaagccctggaatcagccgagggtgagtatgcaagcgcacttcgttgggtgcttggggaggaatcataa

SEQ ID NO: 234208 - DNA, 969 bp, Klebsiella pneumoniae
atgagtcagccaaatcagatctgtgttggtattgatgttgctaagggatccctcgatatttgcgtgggaaccggcaaagcttcttttactgtcataaatggcaccgatggtttcgaacagataattaaggccctggaaagcgtctctgtttctctgattttgatggaggcaactggcggccttgaagccccagtggcctatcatcttcaagctgaaggttacgaaatcgctgttgttaaccccagacaagccagagatttttgtcgggcgatgggataccttgcgaaaaccgatagcattgatgccagagcgctcgcccaaatggcggatgtaatcaataaccatcctgagcgagaacgattcattctggccctgcctgacaatcagcgtcaggttctgaccgccctggtagctcgccgccgacaattggtggggatgcttgttgcagaacgaaaccgacttcacaccacccatccagcagtgatgaaaagcgttgagtgccttatttgcgcattgaacggtgagcttgagctcattgatattgagataaaagagcacgttcagaagcattttattgatctgtccgcattgctcagttcggtcaaaggtgtaggcccaacgaccattgcaagcttgctggctgacgttcctgaactcgggaacctcactcgaagagagatatgtgctcttgtgggcgttgccccagttaacagagattcgggcaaaatgcgtggtcggcgctcgatttttggcgggcgtgccagtgtgcgaaccgctctgtatatggcgacactctgcgcagttcgtttcaacccggcacttaaaaccttctacacgcgtcttgtcctggcagggaaacccaaaaaggtagccctggtcgcctcgatgagaaaactgcttactatcatcaacgccatgatcaaaaaaggtgaggaatgggacaatactttccataatttggcctgttaa

SEQ ID NO: 234209 - DNA, 792 bp, Klebsiella pneumoniae
atggaggttgcattgatcgttcctcttcaaaaaaaaaccgaggctggaaagccttacacacgtatacctatgattgaaactaggctaacggaacttagctctctttcagatggagagctggtagatctttgtaaacaaagtagggcacatccgaaatacgttcccagcgaatgccttctttacttcgttcgacgctgcacatcaactaaaccatccctttttgaacagctcttcaaggttctttccgaacgaattcttaggaaacttccgaggccagcaagccaaggcggaaagaccatatcaatgacgaatagcgacatccgagagggtgtgtatgaccgcttcattgagatgcttatgatcgacaaagcagactacgaggaacgattggacatgttcgaagtacgttttgatctggctttatcgagattaaaaacagacgctcaaaggaaatcttatcgggctgagaatagaaatgccgatttggggtttgatgatgattcagccgatcttaatccagaagttgaggctgcatctgagggatatgatcctttcgcggcaatagatatcgataattatcgttaccgttgtaggcttgatgcggcgattgagactctacctcaactacagaaaagaatcattgaaatgacccgattagatattccaatagactcgatagacccaaatgaggtgactatttcccaagtactcaataaggttgaaaagaccgttcgtaatcaaaaaaagaaggcactcgcaagtcttcgtatactgcttcaaggggacctatga

SEQ ID NO: 234210 - DNA, 582 bp, Klebsiella pneumoniae
atgatgacaggactttcacctcaagcatccctggaagaggtactggagtcattctctatagagcatgatgtaggtacagctaccttgcaaaaataccttactgcatatccagaattttgcaatgaaatcatagatttatctagggaaatagcaagaacatacgcagaggatgaggaaccactatccgaatatgatctccgcttgatcagttcagccgtaacacgcatccaaaatgctccaggaaaaaagataatagatccattcgctgatctttcagctcaaaaaatgcgtgatatatccaaagcactaagcttacctcgacaggtactcatggcatttaaggaacgaaccgtagttgtcggatctattcctcagcgatttttgagcagattagctgaacttctgcaaagcagtgtacagcagctcactacctcacttgaacagcagcccatggcggttgcaggcagttataagtccgacggaaaaccgagtaatgtcgagaagatttctttcgaacaaactcttcgagatgctgatctgtctgaagaggatatcgctacattaatggaagaggacatttaa

SEQ ID NO: 234211 - DNA, 3390 bp, Klebsiella pneumoniae
gtgcaagccgtggaattggcccgcgaggccgctgctgttctacataatcaagctgtagctgccggacatgatccgtggaaaccatacgagtttgctgttgcagaggcagttagaagaggatttgacgtagagagcacaaagaaaggctcacctagtctgagaggcgcgcgagcacgtttttttccacaggagaagttcattctccacgaaaaatgcacaaccctttttgaacaagcgttcctcgttgctcatgaaatcggtcacgctgaacttggcgacggtattgaagaggatgaccaaggctatacgatagatccagcaagaaccgcagaagcttctccaatgggagctgaacgggttgtagactatagtcgcaggcagcgtcgagaggtccaaatggatctatttgcgcgtgagtttctgcttccccggcatgtagtaaaagcgctttatctggatgggatgagtgcgttaagtattgcagagaagcttggtgctccattcgatgtggttgcgcaacagatctttgatgcattgttactaccaccacctttacctgaagatacagaacccgcgattgaatacccattgaacgcagagcaggagaaagccgccgcccatcgaggcccggcctttctgcttgaggccgggcctggtacgggcaagactcagactctagtgggacgggtaaaaggattgctctccgatggcgtagatccacgaaaaattcttttgctgacgttctctaacaaagctgcgggagaaatggctgaaaggatcgctcgcgttgacacggaagctgcagctgcaatgtggattggcactttccactcattcggcctcgatctggttcgtcgatttcacgacgaactgaatttgccgctcgaccctcgcctgctggaccggacggaagcagtagaactgttggaacatgagtttcctgtattagatctggttcattatcgcaatctttacgatccaacccgggtgattgcagacatcctcaccggcatctctcgtgccaaggacgaggtagtcgatgcaaatacctacctcgcgttggcacaggccatgcgcgatagagctgttggtattgaagatatagcaacggcagaaaaagccattgaagtcgccaaagtatacgccacttacgagaccctcaaaaagcaggctcgatgcattgactttggggacttggtttcattgccagtgacgcttcttgaagaaaatgaagccattcgatctcacatccaatccacttatgagcacgttctagtcgatgaatatcaggatgtgaaccatagtagcgtacgactgctaaaagccctttgtggcgatggcgaaaacttgtgggtggttggagacgctaagcagtcaatctatcgcttcagaggcgcttcgtcattcaacatgactcgttttgggaatgaggatttcccaggcgggttgcgatatcgtttaaaaacgaactaccggtctgtacccgaaatagtgtcggcattttcaaattttgcgctgaatatggctgtaggggatgctgacagtggcttaaacgcagaacggacaagtgatgcccagaaacctgagctgcgctgcgtagatcaaggatttcttcaaacaccttctattgcggacgcgataaaggaaatgcagaactccggttacaaatacagtgatcaggcaatcctgtgcacaggcaatgagaagctttcagaaatcgggcaacaactcgagctcttaggcatccctgtactttacttaggaagtgtatttgagcgccccgagattaaggattggctgacactgctctcactcttagtagatcgtcgtgcaatgggcttggtgcgaatagcttgcttacctgagtttacgatgtcactagatgatgttggcagtattcttacacatctgcgtgaagatgaaaccggaagtgactggagaaccaaaatcgatgacttccagctctcagacgatgggcgcataggtttagttcggcttgtcaaaacactgagcggctttagcgccaatgactctccttggaacgtcctggcaacggtacttttagacaggacgcgaatcgcagcccgtatggcaacagcaacggattgcaatatccgctcccaatgtatagcaacttggcaattgctcaattttttacgagcacaaccctccagtggtgaaggggtatttatcactcgtacattagatcgtatccgccgtttggttcggctaggagatgatcgcgatcttcggcagcttccggcggcagcacaaagcatagatgcagtgcgcctcatgaccattcatggagcaaaggggctcgaattccctgtaattcatgtacccggcatgaacgctgacactttaccaggtaatccgcagaagcaagtttgtccgccacccaatggcatgattgcggggagtggatccaactccaaggagcaatttaatctggagtataaggcggagagagaatgcttattctacgttgccttatccagagctgaagatcggctatttctctatgctactacgcggaacgctgctggtagcgcccgaaagttatccgactttttaaaccgtattgggcccagcccggttcaaaataacgtgaaacctcaacatgcagtaatcgaaaagcccgaatcattaccagtggactgggttgtcagcggagacctagttctaagtggtgctcagatttccctatatgagtcctgccctcgccgtttcttctatacacatattctccaaatcggaggacgacgaactccaactccattcctaaagatgcacgatgcagttcgtaatgtattccaagagttggtcaacaccgctcccataaaaataactgacatagaagacagagtcacactggcatttgctgtcgaaggcctagctgaacacggttacgcttctgaatttaagtcactggctattggtatggttagttatttcgcttcgattagggaaggccacagctctgaagcaacttgtgcctttacaatgaagtttgggaaaaccgccatcaccgtacaacctgacgatgtattggtttatccagatggacgcaaaacatttcgccgtgtgagaacaggacataaaagagataaagaagaatttgacttaggcgcggctgcctttgtactcgcagcacgacaggcttttcctgatgcaatagtggagctagtacatctttctgaccaaacagtgaccccaatcattctgaccgctaagcagttggataataggcataaaaaaatccttaacacccttgactcaatagctaaaggagtatttccagcagaatcatcatctcgagtatgcccctcctgcccggcatttttcatctgcggattgcttcctgcaggcgtgctaaaaaaatcttaa

SEQ ID NO: 234212 - DNA, 756 bp, Klebsiella pneumoniae; identical to SEQ ID NO: 160344

SEQ ID NO: 234213 - DNA, 1176 bp, Klebsiella pneumoniae
atgtcagccgcaccattcaatcttaatagcgaccttaagcgcttgcgtgaggaaggatactacgtacaaatcgtgggtggcttcttggtgatgcgtgaagtgccgtatgttaacgcgcagttagaaattaagaccggcacactcatctcaagcctttgcatgtctggaaacgtaactcaaaagccagagccgcacacgattcacttcgatggagactatccgtgcacatctcagggtacgcccatccaagctattgcacatcagagcgtagcggtggatctgggacatgggttgagtgctcagcacatgttctccagtaaacccgggcctgagggttacagcgattatcatcagaagatgatgacgtacgcgacaatcatttctggccatgcagctaatctcagacctgacgctactccgcgtgtgtttaaaaaacccgacgatgaggatggctgtgtatttaactatctggaaactgcttcggaccgggtgggaataggggcgttgaccgcacgacttgaaggtcagcgtatcgctattcttggtactggtggaacaggatcctatgtgctggaccagttggcgaaaacgccagtgagcgagatacgtctcatcgacggtgatgatttccttcaacacaatgcttttcgtgccccaggcgcaccgtcgatcgatattctccgtgaggtaccaaagaaggtggattacctggcgggtatctacagtaagatgcaccgccatatcgtgccacatgcggtgcagatgaacacagataacctccaccttttggatggaatcaactttgctttcctttgcatggacgcaggcgagccgaagcgcctggcggtgcagaagctagaggatatgggagtatccttcgtagacgtgggaatgggccttgagcttgtaaacggctcgcttggtggtattctccgtgtgacggcaagtacccccaataagcgcgatcacattcgcaagcgcgtgtctttcgaaggtgggggagcagaaaatctttacgcgtcaaatattcaagtcgctgaactaaatatgatgaacgcggcacttgccgtaattaaatggaagaaactcctcggcttttatcgtgacttagaaaacgaacatcactgttcctatacgaccgacggcaatatgctgctgaatggtgactcgctatga

SEQ ID NO: 234214 - DNA, 1152 bp, Klebsiella pneumoniae
atgaacacaaaaataacatcacttcaacaatacaaagacattaaaaaagagttacacaaattagaaagtttaccttacaggcgtggggactattcaaccgccttaaaaatttcaaacctacgtaataaattaggacaatactcacctgatacaaaaagaaaaaaaacaataaaaaaaataacaaaaataaaaacaaaatcatccaaaaatgtctgttgtattctttgtaaaaaacctgttcatgacgataaaggacttcttacgcatattaaacataaacattgttctgcttctgatatacaaacattgttatcgttaataaaaatggttgacgctcctgctcctgctcctgctcctgctcctgctcctgctcctgctcctgctcctgctcctgctcctgctcctgctcctgtcaaagaatttatagataacagtaagaatgaaaccaattcatcaacacttacagatactgagaaaaagataactggcatcacggatttgtcagcattaaataaaaagaataatgtaaaatttttcgatgtggatgtttataatcttgcatgccgttcattaactaaagcagaggcgataagaattgccaaaagtgaacttctgtcaagacagttttccgaacaacaaaacttacaacaaaattcactacaaatagcatctttaaatcaaaaagaatttaaaaccgaatttacatctttaaagagtgaaggtcacattcacaaccaattagtttcacaaagagactccgcagagcagattgattttaaaaaaagagtaatgagaaatttttcgaacgtatgtgctataacaagaagtaatctaccaattttacaggcttgccatctagaaccattttctctcaataaaaatcacagtactaataatggcataccactggagccaacacttcatgcgatgttagatagaggattactggcaattcatccacataatatgacaatacatttttctatagaatgttattataaaaaaatttatgaaggaaaaaagattgcgccgcattacattgaattggataaaaaggccttgcacaaggtatggaaaaactatctgctagtcattaaaacaacacgaaaacagcttgatgataatggcggcactttggcggcagagtattaa

SEQ ID NO: 234215 - DNA, 909 bp, Klebsiella pneumoniae
gtgcgcgacgatctgaatgcgatcccggtatttgtcaccgtggtcgagagcggcaactttgccagcgcggcggcgatcctccatgtgacgcgttcggcggtgggaaaaaccattgcccggctggaagcgcgtctcggcgtggcgttattccagcgtaccacccgacggcaactgctgacggaagagggggagcaattctatctccagtgccgggaagcgctggagcgcatccgcgaggccgaagagacgctgcagcgcggcaaagatgaggtgcaggggcggctgcgggtgtcgctgccggtgctgtttggccagcgctgcgtggcaccgctgctgttccgcctcagccagcgctatccgttactgaagctcgagctccactacagcgaccggcaggtcaatctgctggaggaggggtttgatcttgcggtgcgtatcgggagcctggccgataccgggtcgctgcgggcccgggcgctgggagagcatggcatggtgctgtgcgcggcggcggagtacctgcgccagcagccagcgccgcagactattgccgggttgaacgagcaccgtaccctcggctatctgcacaacggccagctgcaaaaatggcaactgtatgacccgcagcagggcgaagtgcgcttcagtccgcagacgtggctgatacaggatgattttgccgccatcgcggcggcagtgcagcaggggatgggcatcgcctggctgccggactggctggtggcgcaggcgcttgccgatgggacattgcagcaggtgttggcgcccagcgctcaggtgcgtttcgccatccacgcggtatggccggaggggccgtggctgccgcaaaaaacgcgggcggcgatcgatgccctgcgggaagggctacctcttaccgcaacacatggttag

SEQ ID NO: 234216 - DNA, 606 bp, Klebsiella pneumoniae; identical to SEQ ID NO: 137661

SEQ ID NO: 234217 - DNA, 546 bp, Klebsiella pneumoniae
atgaccatcgccaccttaactcccgccgaggcccaggcgcagattgcccagggcgccagactgattgatatccgcgatgcggatgaatatgcgcgcgaacatatccccgatgccgagctggtgccgctcgccactctgaccagcggtgcgcccctcaatgcccgggccggagagacggtcatctttcactgccaggcgggttcccggacgcagaataatgcgattcgtctggccgcggccgccgcgccggcgcagccctgcctgctggcaggaggaattcaggcgtggaaagccgcggggttgccggtagtggaagattcatcgcagccgctgccgctgatgcgccaggtgcaaattgccgctggcgtcctgattttactgggggtgctgctgggctataccgttaacggaggctttttcctgctcagcggcgcggtcggcgccgggctcaccttcgccggcgtaaccggcttttgcggcatggcgcgtctgctggcgaccatgccgtggaaccggcgccagggggttaaaacgcactccagataa

SEQ ID NO: 234218 - DNA, 123 bp, Klebsiella pneumoniae
atgttattagctctcttgttaaatattcatttttataaccaggagctagaaataggttggctaattgaaagtctgaagatcttttcacatactcagaagcacttactagttcatcatttttaa

SEQ ID NO: 234219 - DNA, 579 bp, Klebsiella pneumoniae
atgattaatccgtcggaagttgggaaaaatggtgagatggttaggcttcgcactctggaaagtatctggattcaagggaagctgcgcatgtggggccgctggtcttacatcggcggcggtagtggcggcaatatgtttaaccagttactggcctccgggaaaattaccaaaacagccatcaacgaagcattacgccggatgaagaagtccggcatctcgaagccagagcttgaggcgttctttcgtgaaatactcgcggggaaaaacaaaagcggtcttgctttctgcacagacgatgaaggactgcggattgataaggtactgggggtagtcctcattacgggtggtcacaaagaactttaccacctgctggtggagcattaccggttacggaagagcaaacgccgcatagcggaagagctccatgaaaagcatcccgactggtgctttatgacctgtagacgcagagttgatacgtggctaagtttggcagaatcgatgctgtacgcaccaatgtatgacacattcgacataaatggcgacagattttacttgcaaagtgagccagaaactgcttga

SEQ ID NO: 234220 - DNA, 642 bp, Klebsiella pneumoniae
atgaattacgatcttatctactgtgatccgccgtgggaatacggtaacagaatcagcaatggagcggcctgtaatcattacagcacaatgagtattgaagacctgaaacggctccctgtctggtctctggcggctgagaactctgttctagcgatgtggtatacggggacccataaccgcgaggctgtagaactggctgaatcatggggtttccgggtcagaacaatgaaaggctttacctgggtaaaactgaatcagaacgccgctgaccgcttcaacaaggcactaaacggcggagagctggtggacttcaatgatcttcttgagatgctggaccgtgagacgcgcatgaacggcggcaatcatacccggagcaatacagaagatgtcctgatagcgaccaggggaaccggactaacccgcgccagcgcatcggtaaaacaggttgttcacacctgcctcggtgagcacagcgctaaaccgtgggaggtaaggaaccgactggagcaattatacggcgaagtgaaacggatcgaactattcgctcgggaagagtggaaaggatgggaccgctggggaaacgaatgtaacaacagcattgaaatgattacgggccagataaaaggagtgaatgtccaatga

SEQ ID NO: 234221 - DNA, 528 bp, Klebsiella pneumoniae
atggtcgatgaagataatttttcaaaaaaaataaatttacacgctaaagaaaaagaatcaaatttaaaggaaagtgaggcccaactcaaagcaatatcagataagatatcccaaggtatttcattgtactcatctgctattgatcaacttatagctgatattgcaaattgggtttctgatagtcctataacgctagaggtaaataaggaaaccacatccgatttattagtttctgctaatggaaatcaggaggttaaattctatcaggcttcattttttacacttcgctattttgatgttgaaataattttctctcctgatggttttattaaatataaccatctgcatgatggtttaattaaaatagatgtaaataaagcgagggttttaaaagcgtatgaccacatttttctgatacgtgataaaaatggaaacgatagttggtttttttccgataagaaacaaagatacgctctggatgaaaaatcatttaaagaatttcttttgaaaacacttggtattgaatga

SEQ ID NO: 234222 - DNA, 243 bp, Klebsiella pneumoniae
atgcattccttaaaccaaccgaatgagaaagtggtgacgtgtcttgaattgttacatttcaattctattgagatgtctcattacggtttattcctccttcctcaatccaacgcgttactgctcgacgactataacgggttgggtatgttaaaacaggttttggaaaaccatgttcttttcgtaaacgccatacagctgtttttttctttcccagtaattcgaatacttctttctcttccataa

SEQ ID NO: 234223 - DNA, 174 bp, Klebsiella pneumoniae
atgctcggccagccacagtttgccatcatgagcctgtactatctgacgcgcaacatacagtccgagaccggtgccgcctggcaccggctatgtgtgctcgccgcggcggtagcgctcaaagatcagttccgcctgtccggcggggagtcccgggccgtggtcgcgaatgcgtag

SEQ ID NO: 234224 - DNA, 657 bp, Klebsiella pneumoniae; identical to SEQ ID NO: 119515

SEQ ID NO: 234225 - DNA, 297 bp, Klebsiella pneumoniae; identical to SEQ ID NO: 26486

SEQ ID NO: 234226 - DNA, 489 bp, Klebsiella pneumoniae; identical to SEQ ID NO: 119516

SEQ ID NO: 234227 - DNA, 852 bp, Klebsiella pneumoniae
atgcaattacgcacccggcaaggtgggccgattcccacacgacagcagcgcccggcaaggtgggcggatttccacacggcagcggcgcccggcaaggtgggcctattcccacacggcagcggcgcccggcaaggagggccgattcccacacagcaccggcgcgcggcaaggtgggccgattcccacacgacagcagcgcccggcaaggtgggcggatttccacacggcagcggcgcccggcaaggtgggcctattcccacacggcagcggcgcccggcaaggagggccgattcccacacagcaccggcgcgcggcaaggtgggccgattcccacacgacagcagcgcccggcaaggtgggcggatttccacacagcaccggcgcccggcaaggtgggccgattcccacacggcagcagcgctcggcaaggtgggccgattcccacacggcagcggcgcccggcaagatgggcggtttcccacacggcagcggcgcccggcaagatgggcggatttccacacggcagcggcgcccggcaaggtgggccgattcccacacgacagcggcgcccggcaaggtgggccgattcccacacgacagcggcgcccggcaagatgggcggattcccatatcgacatgtatgtagcttgtgttatccgtggattgtgcagctcagcgggtcgcttgtcgtatggcgtagtgtcccccgtaaccggccgcgtgcggccgctaacgcgcagtacggcgccgcgacccgaaggcgggccgccgttcccgcgcgcaggcgcgcggcgcccactgcgcacccccgtgggggacgtacggcagctgtgtggcggtgagcgggattag

SEQ ID NO: 234228 - DNA, 240 bp, Klebsiella pneumoniae; identical to SEQ ID NO: 111900

SEQ ID NO: 234229 - DNA, 690 bp, Klebsiella pneumoniae
gtgctgatagctgtgccggtggtggcctggctaaccggttggcactggcaggcggaagcacaatcgccacaactcggttttttctacttactcacacagacggtgagcaaccccgttggggtgttcactgccgtcgtgctgttggctgcgttactgtgggtactgaaaccgggtaaagcgcatcggtggaaatgcgcattgctgattatggcaccgattgcgttgggacaggtggcggttagcgtgttgaaacgagtggtacaggaaccacgtccctatgtgatgtggctgaaccatgatcaaccgcaggcggttgcgcaattttacagtgaagaaccggcgaagcgaggtatgaccgtgctgaatacgctgcatgataaccacgcgatccctagctggcagcaagatcactgggcgaaggagagcacctggtcgttcccgtcggggcattcgatttttgccgcggcctgggcgctgctgggcgttggcgtgctgtggccgcgaaaacgctttcttgctgcgtttatcctcaccgcatgggctgccggcgtactggttagccgcctgtttttaggtatgcattggccggtggatttactggcgtctattggcctggcgtttatcctcactcgtccgtcggtggttgcgataaaccgctatttgccgccaccgggcgacaacattctgtaa

SEQ ID NO: 234230 - DNA, 141 bp, Klebsiella pneumoniae
atgatcaagtttgccgctcaggcagacgcgattgatgaagacaaagtggtgctggaaagcctcggcgccatcaaacgcgcaggggcggatctgattttcagctatttcgccctcgatcttgccgaacgcggcaccctctga

SEQ ID NO: 234231 - DNA, 1950 bp, Klebsiella pneumoniae
atgcaaaagaatcttccagaagaatcactacttgagaaactaacaaaagaagaacttcttaagctagttaaagagatgcatgaagataaaaaaatgcacgctattttctctacggacgctgatttgtatgctaatgatgcaactctaatgtggcagggtcggaacagattcttggctgaaacagtaacaccagtcacgataaaaagcgatgcgaaaaagagtttccctgaaaaggtcgggggaaatcatcgcatcattgatggtgataatttagctgtgatgcgctcattaattaatgaattccgtggcggtccgaacactggattcgatgtggtatacatggacccgccatataacacaggaagtgatgcatttatttataatgataattataggttttcaaaggcagaagtagataaattaaaagatgctattggaagagttgaaaagggtgtttcacttgatgacccatcccgacatactaagtggataaatcatattgctcctcgtctttgggcagcaagaaaattactaaagcatactggtgtgctaataatttctatcgatgaacatgaattaccaagactgtggatgcttctagaagaaatgtatggtgaaaaaaaccgtattgccacacttatttgggaaagatcgaggaaaaatgacgcaaattatatttctgaaggtcatgagtatctattagtttgggcccgtgacaaatctgctctcgattcaaaaatgaaagaacttgctaagaataagaaatgggagagatacaaaggtaaatggagaaagcctaaagaaggtgcagaagatatactaacagcatactctgatgctaaaaaaatatttttggatgatattcctaaaatccaaaaatatatgaatgattttttcaaaaatctgccagaagaccatcctgcaaagaaaattcgttatcggaaagtagacaaaaatggcgtctataatgacgacggtaatctaaactggccaggcggtggtggtcctcgatatgatgtattacacccaattacacataaaccatgtaaagtcccagcatcaggctggaggattgctaatcctgaggtaatgcaagctttaattgatgccgataagattgctttcaaaagcgatcataatggtattccgagaatgaaaacctatttacatgaaatggaatcagaagtcgcaacttcggtgattaggagaatgggtcaaagagcggtagaaaccgtaacaaatattcttggaaaaaactcattcgataatcccaaagatcatgaaatgttggcagaactcttcaaccttgttacttggagagatcccaatgcaattattttcgatccttatgctggaagtggaactactggtcatgctgttttgactatgaactctgaggataatggccagagaaaatttattttagtagaaaatggtgatccttctaataaaaaaatcaaccgtgatcactatgtgaataatataacggctgaacgaattagaagagtcctttccggtaattgggctgacaaatcccagcatccaaaaatcaatgaaggattcaatttctatgaagctaaaaagactgtcagcaaaacagtcatcatggaatctaatagagaaaatttggctgatattattttacaggttgttgaagatgattctaaccgtttagattgtcgcatggatggctataaatatctaattggaaagacaaaacttggctttggaattgcgttggtgtgggaagcaggcaaagccaatggacatcagcccttaacaagagaaatccgttcagtaattatggatgaggctaagaaagcgaatgtgaacagacctgtttatatttatgctgtagccaatgtatctccgttgaatgatcagctttaccgcttccagcagattcctgattcaattctggcgagattaaatttactggaagaagagtaa

SEQ ID NO: 234232 - DNA, 192 bp, Klebsiella pneumoniae; identical to SEQ ID NO: 98356

SEQ ID NO: 234233 - DNA, 1110 bp, Klebsiella pneumoniae
atggagaatcttatcagtaaactttctcctacttatattgatgataaggttctaattgaatatcaaaataagcaattatcaaaagccccagcatcatttcgcgttttacgaccatttttgattaaatggtttgagtttggatatcctggaatagatgaaagtgcagtagacctgttaaagcatttggacctaaaaataaaaaaatctggtcagtctgttttacaagatgatccaacaaagggcccactaactaaagaggaacatacttccttgaacacggctatgaatcatgcatatagaataggtgtactgtcactgtcagattatgcaatatcgctattaatgagtctgacaggtagaagacctcagcagttagttatgttgaaatataaagaccttcttcaaaagaacttagataatggtaaagtagaatatttaatttcagtaccacgagttaaacaaaggggtaaacaactacaatatcgagaactgccaataatctcagaggttgcatcaattgttcaactgcaagctaatcaatccgtgaggtttgttgagcaaacccttggtaaaactcttgatgattataacaaaggcaaggttccagttttcttgaacgaggaaatactgcttgatttagccataatagattctaatttcctggagtctaataaaatatatgcaaaaccaacaattgctaatacagcattgaagaacattattaatactgagaacttaatttcaaatcgtacaggttctctacttaatgctactcctcgcaggcttcgctatacgatagcaaccatgctggctagagagggacataatgccaatactatagctgaattgttggatcattcttctacttcaagtacgggaatttatattaaaaatcttgctggaagtgttgaaagaattgattccgctgtttcagaacaattgtcatttgtcgcggatatttttatgaatggaataaagtctaaagagaaaaaagatttcaaattttgctcttcgagaaaatgcgaaagtcagaatttaaatgcaagtttcccttgtgataaatgtgttttctttatgccagttgatattgatgaggtaaatgcccaatga

SEQ ID NO: 234234 - DNA, 387 bp, Klebsiella pneumoniae
atgaataaatttattgtaacctcctttttcattgcaatatttttaatttctggctgttcaacatcagggaaccaaaaaatcaaaaatgaaacggctcaaagccttcaatcgaaaataattaaaaacaaaacaactaaggcagagctacttgttcaacttggtgagcctgacaccagaacgactcttgacgatggcaacgagcaatggagatatttcatgtataacaatcagttcaatgcctcgacttttatccctgttgtcggtttgctaactggcggttcccagactcagtctaaaactctcgaaatcgacttcaatggagaaaccgtaagcaagtggacattctctactgataataacaatacaaaatctggcattcttaattaa

SEQ ID NO: 234235 - DNA, 156 bp, Klebsiella pneumoniae
atgaagaatgctcttaccatagcttcgcagaagctctatgaaccttctgataaatggaatccagccgatgagcctgagatgcttttgctttttgacggaatttttttgaagaatcttttctacgatttcattccgtttgtcttctctgagccgtaa

SEQ ID NO: 234236 - DNA, 1530 bp, Klebsiella pneumoniae
gtggctcgtgctggtacagcgacagatgacggcggcaccatctgcgtaccgactggctcatcaacgtggtactggcagcgggttggtgttgtcgatttcgacgtaacctggttcggcgcaatcggtgactcaaacaccgctaattccgcgacaaatactgtagcaattcagcgagcaattgatgccgccgactccgccggtattgccagtgttacatttccaaaatctgctgggttctttgcctgtggcacgatatatatgaagccaggcgtttctctcgtgggtgcaggacgcacaagggggctgcttggggcgatagtgtatttaagagctggatcgaatgccgttatcgctccggagatcaaaggtctgtggcataagcaatgccatttttatctctgggacccagactctcccaacaccatggttagcaatatcaaaatacaaggttgtcttattgatgggactaacctgtccggatctgggaagttttccggcgatgctgttgtgataaaaaatacgactttcgacgtacatatccgtgacacctatatccagaattattcaggaaatggactcagcataataacagacaatgcaattaccggttatttggctacgggggttttcacgactctcaatgtggtaaaaatattcaactgtgggatgggtatatatatcaaaaatgctccggcggactctcttgatctgcatctggttgaagttttgcttgaccacaacggttctaatttattcctggatatgagtggcagggttactggaatgggagaggcgcacgtgtatgctcgcgcctgccggttcgagtgggccacgaattacgcgatctacaactacggtggcttcattaacttcgatggatggtcgctcgcgccatcctccggcgggcagaagatttttaccagttctaatggtaaaacgttcattaacgggcgcttgtctggggttgctgaaggtgaggatgcctctcttgacggaaatcttgtcgcacaccctgggatagtttcaaacctgacgtatgataaagctaaccccgtcgtttctttgatgctggataacactacgcgcggatcgacactgaagttacaagcactgaagctcagcttccagttcaatggggcatcaggttttacatttcaaaatttagtgtcgtatgcctcgggtaacgcgccaaggtttggcattggcggactgtacgatacttctgtcagccaggctgtcgtagatgcaactccagtttcggtcggtagcggcaatgcgtctattacatcatacacacagaattccagcattagcctgatttttggtggagggaaaaaattcgcgtttgttgggatggtctcagttaaccgcaacaccgctgggcgcgcagttaccgcagctatacaaactgatgcaaccggtgggattatcgccattgttctccacgatgcaaccactggcgcattcgtcaacccgctgacactgacaggcaatatacaggtcagttttgtaatgttcgctgatttataa

SEQ ID NO: 234237 - DNA, 264 bp, Klebsiella pneumoniae
atgaatatcgaagaatttgtgagtgaagataaccatatgtgcaatttaggcgatgatcttttttacaagatcttcgagttggaggcaatctatgatttacctgataatgaatttaacagaaagattgtttactggttaagccagtatttagtagggaatctaaggaaaccgttagatgagatctctgagcttaatgcttccaaacggatatttcctgattcttatctattgctttcgaaaactcataattccatgtatgcctga

SEQ ID NO: 234238 - DNA, 1530 bp, Klebsiella pneumoniae
gtggctcgtgctggtacagcgacagatgacggcggcaccatctgcgtaccgactggctcatcaacgtggtactggcagagggtaggtgttgtcgatttcgacgtaacatggttcggcgcaatcggtgactcagacaccactaactccgcgacaaatacaacggcgattcagaaggcaatcgacgcagcggcaagcgctggcctggcaaacgtagaatttccgcaaacatccggattttatgcgtgcggaacgatctacgtaaaacctggggtttcgctggttagttccggacgcacgcggggattactgggcgctacggtttacctgcgtgctggtgccaatgccgtcataaaccagaagtttaaaggcctgtggtgtaagcagtgccattttaacctgtgggatcctgattcacctaacactatggtcagcaacgtcaccttcgatacgatgttaatcgacggtacaaatttggcgggtgctggaaaagtggccggggatggtattctgataaaaaataccacattcgacgtacatctagaaaagacctatatctggaactatctcggttatgggtacgggattattgtggataacgccagcacttcctatctggccactggcgttttcagcacagtatcacagagtaagattttcaactgtgggtatgggatatatgtgaagggtgccccagctgactctatggacgtacacctggttcaaaccctattggaccataacggctctaacctgtatgtagatgcgagcaatagagcgcccgggatgggcgaggtaaacgtgtatgctcgcgcctgccggttcgaatggggaactaattactccatctacaactatgacgcatacgtcaactttgacgggtggtcgctcgctccatcatctggtggacagaaaatttttaccagttctaagggtaaaacattaattaacggacgcctctctggggttgcggagggtgaagatgcctccgtagacggaaacctcgtcgcccaccctggcatcatatcaaacttgacgtatgacaaagccaacccggtagtttctttgatgctggataacaccacgcgcggatcaacggtcaaattacaggcgctaaaatttaaattccagttcaatggtgtgtcaggttttacattccagaacttagtatcttatgtctcaggtaatgcgccaagatttgggattggtggtctgtacgatacctcagtcagtgcagccgtcttagacacaacgcctgtttcggtaggtagtggaaattctgcaatctctgcaaccacccagaactccggcatcagcctgatttttggcggagggaaaaaattcgcgttcgttggaatgccttctattaaccgaaatactaccggaacggcagttaacatatctatacaaactgataatacaggcacgattataggtattgttttctttaatgctgcaaccggggcatacgttaacccgctatcactcactggtgagatccagtttagttttgtaatgtttgcagatctataa

SEQ ID NO: 234239 - DNA, 267 bp, Klebsiella pneumoniae
atgcctttttcaattaaaaaaactgtcactgtgacgcgaaccacagactccgggattccgctaagcccagcaagtgaggatatagacctgatgtttaaagtttcgggtttaacaatctcggaagcaggtaaaaccgctgtggtaatggtgagcgctgacgctggcgagtcatatcaattctttgagaacgttagcattgaggatgattcgattacatctcttgaaggtgcagagaaatatatacgaacaacatcaaagtatcagtaa

SEQ ID NO: 234240 - DNA, 231 bp, Klebsiella pneumoniae
atggctggagaaatgaatcaactgacagaaaaagaacagattgtattgtctttaatgaatttactggggatggatacgaatctgacagagcaggcgatggagtttattggcgacagtgttctcaattatcagctgctcatcagatattttagtgtcagtagtttaactgatgatgagtctaaactaacggaggcgatagaaaaaacctctaatgcgaaatccttattttaa

SEQ ID NO: 234241 - DNA, 231 bp, Klebsiella pneumoniae
atgactacggctattggtaaatggggtaatggcgctgctttgcgtatcccgcagccgttcatgaagcagcttgggcttagtatcggtgatgttgttaatttccgcgtcactgaaagggatttagtaattactaaagctggcccgacgcttgaagaactgctcggacagtgcactgcagaaaatcgccatcacgagtatctatgtgactctcaaggtaaggagatgctgtga

SEQ ID NO: 234242 - DNA, 141 bp, Klebsiella pneumoniae
gtgttcaatttcctgtttcagatgacgaataacctgttcattctggtcagcaaaggctgtatcacgctgttcagagacctgtccagaaagatgttcacccttaggttgctcaaaggaaccaaagacacgcaaaagctctga

SEQ ID NO: 234243 - DNA, 219 bp, Klebsiella pneumoniae
atgagtcgcagggaatttctggtttggctcaagtaccgtgagaagtacggaccgttcaatatcatgatgcgtaccgagtggggggcttcgctggtggcttctgtcctggctaacatcaataaggcaaagaacacgccgccgttcaaggtaagtgactttgcaccgcacatcaacgaagcgccattatctctggaagaggccatgaaagcctggaactaa

SEQ ID NO: 234244 - DNA, 2436 bp, Klebsiella pneumoniae
atggctggcaagtccctcggtacgttaacaatcgatctgatcgctaaagtaggtggatttgttcagggcatggataaagccgaaagatcttctcagaagtggcgcgaccaggtaaaaaaagacgctaaagaggtaagttcgtcaatcattgctgttggggctgcggcggctacagcagctgttggcattggtgctgctgggttagccattgttaaaaatactgcacagcaggttacagaagctgatcgctgggcaaaatctcttaaaatgtccacccaagatttgttatcctggcaatacgctgctgaacaagccggtttaaccggtgacaacatagccgatattttcaaagacattaatgataaggtcggcgatgcggtcctgaataaatcaggtgaggctgctcaggcgctggatactttgggtctttcagctcagaagctggctcaacaatccccagataagcagctgattgcaatcagtgaagcattacagaaaatccccactcaggccgggaaaacaaatattctcgaaagtctgggtaatgatctgtcaaaaatgctgccgttgttcgataacaacaacgaaaagctgaaacagtttatccagctatcaaaagattttggtgtcgctccaccgcaagaagatattgataaccttgttaaggttaatcagttctttcaggacatagagactagcgcccgcggccttaaaatggaaattgcttcggggctggctaaggttgaccttacaccattgcaggatgggcttgatgatattcgtgacgtcttcaccgatcctgctgttcttcaggggctatcagacctggttggtgaagccataagccttgctggggttgtggggcgtattgctggtggcctgggggccattgcaacttatacccgctctcgtatcggtgctgtatctggtaattataacgctgctgatgaaagtgatattgcacagcgcattgaattccttaacaaacgagggaatcaaagtaaggaacaaaaagacgaattagactttttaactaaacgtcttcaatttcttcgcgcgataaagtcaagcatgactccggagcaggtagatataggagcgaaagggctcacatctctactttctgatcttggcattgacacttctaaagataatgatttttcgttgggcaaaggggagtctaaccagaaccagccaaaaacaaaacccaaaagcaatcctactgacaatgctttcaaaaatagactgcttgatttacaaaagcaggccgccctaattgaaacaacaggtaaaaaaactgcagaagtaaccgaactggagaagattaattttgatataaccagcggaaacctgaaaaaattatcagaagggcagaaggaacaacttcgaactgcggctaaaatccttgattccaagaaggaagagttacggcttaatcaggaaaatgcgaaaatagctgaatatgtttcagatctcgaaagacagaataagttagtccgccaagggtttgataaccaaatagtaggccgttattctggtagtcgtgaacgttcacgcatgcaggataataatgacattcagcaagattttgctgctcgacaggaagagattttaaatcaatttcagtctggagatattgataaaagtctatacgataaaaagaaagaagcgcttcaaaactcgctgaatgaaaggctaagaattcaagaggaacattataagaagttagatgagttacaaaacgatggtgttgcaggtttcgtttctggaatatcagatcaagctgctgcatattcaaacctatatgcaaatatgcagcaagtaggtgcccaaacgtttagtagtttaactgatatggtaattaactgggcggaaaccggtaaattaaacgctcaggactttgcggcgacattcattcaatctgttggggctgcattactgcaatatgcggctgctcaggtagcaatggcagcgttgagtgccttcactgcctggattggtgttccctatgtagggcctgtggtggcgtcaacccaagcaatagctgcggcagctgctgctggtgtgttcatgactgctatcggatcggcgcttcagggccaggctcatgacggtatcgactctgtgcccgaaactggaacctggctcctgcagaaaggtgagcgcgttacgacagctaaaaccagcgcaaaactggatgccactctggatcgagttgcaaaccagtcaacaggtggcggcgcgatttattcgcccacaatcaatatccccatcaatggtaacccttccgatgcaacgttggcgctggtccgtaaagctgcagatgagggggcagaaaggggataccggaaggcggttaactcagtcgcaagcggtcagggtgatttgcataaggctctgatggggaaaacgacctctgggaggaaaattagctga

SEQ ID NO: 234245 - DNA, 666 bp, Klebsiella pneumoniae; identical to SEQ ID NO: 217982

SEQ ID NO: 234246 - DNA, 177 bp, Klebsiella pneumoniae
gtgatcctgatcgggctgatcgccctggcgcgtaaattcgtgatcctcgacccggagaccggccccgccaaggtcgcggcgcttgcaggcgcgacactggccctcggggcgacttactggctgctgcgcgagcgcgatgaccggacagccggggaaagctcagatgatcagtcgtga

SEQ ID NO: 234247 - DNA, 585 bp, Klebsiella pneumoniae; identical to SEQ ID NO: 162037

SEQ ID NO: 234248 - DNA, 708 bp, Klebsiella pneumoniae
atgctgagtgattcagcctttgaactgattgcggaatttgatggtaccaaacagcttcggccagatgttcagaaggccgtttggcacaactcgcttcgaatacccgatggtgaatcactaacggctgaacaatggtccagcatcgcagatgactatatgaggagaatgggattcagtgatacccatctccgttgctatgtcttacatgacgacgatggccagcacatacacattatcgcaagtcgcatagatctcaatggtgggaagctctacttgggtaggaacgaaaacctcatcagcacacagatcatcagtaaactcgaagtcgctcatggcctgacagtgaccaaaacggcatctcccccctcgcaagcacaaccgaagcggaagagagtgtcccgtaatgagaaaatgctatcggaacgaaccggagtgctttcaccaagagaagccctgcagcagatacttgataaaagtttatctgataagccggaccttctaactttcacaaaacgactggaagaagcagaagtcggctggacggcgaatgtcgcttcaaccgggaaaatgaacgggttctcattctcctaccgcgatatagctttcaaagcttcgcagttaggcaagggttactcctgggcaaatcttcaaaagcaacttaactacaaccctgatcaggctttgttgaataaatcgaacttttgctga

SEQ ID NO: 234249 - DNA, 213 bp, Klebsiella pneumoniae; identical to SEQ ID NO: 209046

SEQ ID NO: 234250 - DNA, 585 bp, Klebsiella pneumoniae
atgaaggaattaatgctgttaattcctctgggcagcgctttgctcttaaccgggtgcgcgggcacagagactgaatttcaatgtaatgccacgacgtcggatacctgtatgacgatggagcaggcaaatgaaaaagcgaagctgaaggaggaacgcagtgatgcaaagccggctgcggccgggttgccacaactggctgagggtaatttcagaaccacgtcagttaattcgtacccgttgccgcctcaacccaacctgaaccgggccagagtggcagcggagagagaacgagcacgtgcagtgtacctaaataatccaacggcaaagaatgaggcaatatatttcgaaaccgagaaaaggctccagtctttgccggtagtgaaaatgtctttaccagtagtggcgtcaacgtttacgtcaccgtcaacaccgccaggtaattatccccggccattaagaaaaggggaggagacaacgtcattgtggatagcgccgtatgtggattcagatgatgtatatcaccagccagcaacggttctttttgtcgtaaaaccatcggcgtggggacagcctcgccttaattga

SEQ ID NO: 234251 - DNA, 483 bp, Klebsiella pneumoniae
atgacaaggcttaacaggctctatgccagcagcgggccggaggtgatcattgaaacgctgcagatcaccgttggctcagatgttcactacctgtgccaggggtatgaggatattacggcgacgacagagagcggcaataccgtaacgtttaccgcctgcgcgattgacattgcgctgccggcgcgcaacgcggacggtacgcaagatttgaaatttgccctgtgcaatgttgatggtgttgtgtccacgacgatccgcaatgccctggctaacaggttgtctgcatcgctgacataccgcagttttatctccacggatttagcggcccctgcggaagtgccgtatacgctgaaaatcaagtctggttactggacggcgacagaggcgcagattaccgcgggttatatgaatatccttgataccgcctggccgcgttaccgctacacacttcctgtattccccggactgcgttatatcagctaa

SEQ ID NO: 234252 - DNA, 381 bp, Klebsiella pneumoniae
atgtttaaccctgataaataccgttcagtcacctggctgaagggcggtcgcgtatatccgcaactcgactgcttcggcattgtgaacgagatacgccgggatttgggcttgcctctctggcctgattttgccggggtcacgaaagacgacggcggcctcgaccgggaggcgcgtcaaatgatgcttaccctggagcgctgcgacccctgcgaaggggctggcgtggcttgctattccggctcagccgtcacccatgtggggattgtcgtcagtattgatggcctgctgcatgtggcggaatgcaatccgggaacgaacgtcacctttctgccgttgccgcggtttaagcgccgatttgtcaaagtggagttctggcaatga

SEQ ID NO: 234253 - DNA, 933 bp, Klebsiella pneumoniae
atggatgttagtacatttaataaccaaaaggaacttaaaacatatcaacaagcaagcgaattttttagcattatttataagatattacctaacattcctcaaatggaagactttgtccctgaacaagactgggggcaaataaaaatgccatggggagacaatatttatagaattttttacggtagctcagtcgaacgcttatatgattatattcaagcttttggaattagatacgcagaatatccaattatccttaagcaaatggaaaatgttcttattttacaggaccagtttctatcaagcctaaatccagttgatacactctcagagttctctcccggccatgtcgaaatccctccagaaacattctggaaaggttgccatcaggctttaacggatgcctgtcatgtgtttgagaaaataagaagtcagacggaaaaaatatttattaaaaaagcaggggaatttagaagcattaactctaccgctgaattatcaaatataataatggagggcgtagcactccctgctattggtatcaacattggtgatcgtgtttatccattgtcattcaggaatatggcaaatgtaattattgagcactatgcttccaaaaaaatggatatcgattgttcagatgctatttcaaatttcatatctcagcgttttgaaagcataattgaggaaccatttctgctcctgagcagaaaaaaggtcctaccttataaattctcaggattattacagggtaatgataagttttatttatttgctctttttgacattgattcagcaagtaagttaaaagatatagaagaagacgttttcgaactttttaatcaaggtgaatgggctttatcaccgatttcatcatcacaactattaggcattcgaaatcgctcggggaaacagctatcaattgatgatatttaa

SEQ ID NO: 234254 - DNA, 768 bp, Klebsiella pneumoniae
atgcgtaatacttggctacgaaactttatgattaagggctttcgttacgtatcagtgatcccaactctccgtggaatgccattagatagtaccgatatgtcgtttatttttagccatgaagtaatgatttttcgagtccagcaaaatttggcaaaatggtcatcacggattctgaaacgtttatttgatatcattggttccatttttattatcataattttatcgccagcattactttatatcagtcgtaaggttaaaaaagatggtggacctgcaatctatgggcatgagaggattggcaaaggagggcgtccatttaaatgtctaaagtttcgttcaatggttattaattcgaaagaagtccttgaagagttattaatttgtgatcctaaagcgagacaagaatggaatgcaacgttcaaattaaaaaacgatcctaggattaccaaaatcggagctttcctacgcagaactagcctagatgagctaccacagttgtttaatgtattaaaaggtgatatgagtttagttgggcctcgtccgatcataacagctgagcttgaaagatataatgatgaagtcgattattatcttctcagtaaaccaggaatgaccgggttatggcaagtaagtggtcgtagcgatgtagattatgaaactcgagtttatctcgatgcttggtatgtaaaaaactggtcgatgtggaatgatattgccattctgtttaaaactattagtgtagtactgaggaaagatggggcctactga

SEQ ID NO: 234255 - DNA, 894 bp, Klebsiella pneumoniae
atgagaaaattaatcgtagttgcttctgttgctgccagtttactgctcgggtgtgaccagaagagtactgacaagcgtgaaaccctgtctgaagcgcttgttgctaagtcactctctaacatggttcccgttcagggcggcgagtttttaatgggggattttggaccattagtcggtcaaaaactacctttcagcataaaccaggatgataaggtattacataaggttgtattaagcgatttttcgatatcaaagtttaaagttaccaacgatgattataataaatatctgcagataacaggaataaaaaaacctcccattaatattctggtaaaagagtacccatccttgcaaaaagatgattactctgttggtgtgacctggcaacaggcaaaagattattgtcagtggctaggtaaggagtccgataaaaatattgatttaccgacagaagcacaatgggaatatgcggcaaggtcaagagggcagtatcttcctttttcgactaataatggaaatttcgagcttggttctaatatacctgaacaaaagaaattagatgaatacacagatggttatggttttcctatttatccaattgggaaatatcctccgaatccgctaggtttatacgatatggggctaagtggagccgaatggagtaatgattggtattcaactgattattattcccactcccctgtttatgatcctcaaggtccagttaagggtaatgaaaaagttttaagggggtatgttggcggagatcgtcagtatgccttgactatattcaggcaatcgtcacaacctgtgccaaaatttgctgggcgtgatgattatcaaaagtttggagttagtcctctttttgtatttcgttgcgttattaataaataa

SEQ ID NO: 234256 - DNA, 123 bp, Klebsiella pneumoniae
atggtggtggtgagtttattgcagttaaaggaggagctcgtgataatggtggtactatctgttctagaagtcttacaggtgagtttcattgggaaagaagattcattgattcattcgacgtga

SEQ ID NO: 234257 - DNA, 570 bp, Klebsiella pneumoniae; identical to SEQ ID NO: 164822

SEQ ID NO: 234258 - DNA, 291 bp, Klebsiella pneumoniae
atgtgcatcagcctgcggtgccggctccgcctcctgattctgagcctgctgttgcccgttcttttccgcttccagttcttcaatcgttttcagctggaatccatcctggaacacgacggtcacttcgttgccggcaccaatcggaatgaccgggtgatactgctcggcccttttgatgtagtactcgctcagcgtctgcgcagctttagatgcaccaccgccgacccccattttcagaacgtcaccggcgccaacagatgcggttgcccccaggccaacagccggctgtga

SEQ ID NO: 234259 - DNA, 162 bp, Klebsiella pneumoniae
atggcgtggattatcgttgccggcatcatcataacgctgatgctgcaggggaaagagccgggtgacgaatttcgtgccctgatcaccgttttcgctttcctggcttctgcctggtactgcgttgttcagtacagaaaagagaagggcgaatctcagtcctga

SEQ ID NO: 234260 - DNA, 312 bp, Klebsiella pneumoniae
atggctgaataccagttaagttttgatgggtttgtacgacttttttttgcaatggcaatcattatctgtggttacggctatgtaattattggtgtttttataagagatacgcttgcctgtattttaatgttgtttgggcttacaggtctcagtgctttattttcttttatggtgtttaaggataaaaacatatgggcggactctcctgatttgacgctgtcagtaataacgggattttttacagccacagtgatcttttatatgttttatgtcttgatttattactttgatcggatgggggcaggtgaatag

SEQ ID NO: 234261 - DNA, 429 bp, Klebsiella pneumoniae; identical to SEQ ID NO: 219416

SEQ ID NO: 234262 - DNA, 558 bp, Klebsiella pneumoniae
atgatggagggcggcacggctaaaatctatcactgcaatgattcggataagtgtcttaaggtcgttgctgatgccaccgtgaccatcacctccagtaaggcgctgaaaagccagatttccgctttgttaagcagtatccagaataaagcggtggctgatgaaaagctgacggatcaggagaaagggtttatctccagcaccaccattccggtattcaaatacctggtcgatccgcagatgctcggggtgtctaactcacttatttaccagctgacggactatatcggctacgacatcctgctgcagtacattcaggaacttatccagcaggcccgggcgatgatctcaaccggtaattatccccagtcgacaatggatatgatcatggaaaacctcaaccaggcgagtgtgcagattgccgctttccagtcccgcgttcaggttcagcaggacgccttgctcgtggtggacaggcaaatgagttacatgcgccagcaggtctctgcccgcatgatgacccgctaccagaataactatcattttggggggaatcagtaa

SEQ ID NO: 234263 - DNA, 354 bp, Klebsiella pneumoniae
atgcaacttactctcgatacgttaaaagaaaccggtgcttttaccgggcgtcccgtggaaaaagaaattaagtggaaaggccgtgacgggaaagagcatatcgcaaccgtctatgtgcgcccgatgggctaccacaccactaaagctgaactgctggcgtacaacgggaaatcggacccgattgctgagcgcattgcggcgcatatttgcgatcaggacggcgccccagtgtttaccgcggctgacattcttggaactgctaccccagatcgtggtgcgctggacggtccgatcgttatggccctcctggctgcaattcatgatgtaaacgaactgggaaagactacgagctaa

SEQ ID NO: 234264 - DNA, 300 bp, Klebsiella pneumoniae
atggacaatggttttttctggtttctactttttcttgcgtcagctggatatttttttgtgcagtatgaagattttcgcgatatgcagcccgccactccagaacaactgcaaagtattattcatgatgcgccttgtgcgggtgaggcttttcggatggttcttcaaactaatactgtgacttcgtcagcgacattaacttttggtgacgcaaaaaagatggcatcagaatgcaaggataaagaagaaattaaagcagtacgtgaaaaacaacttaacgcactgaacgatatgagcaaataa

SEQ ID NO: 234265 - DNA, 291 bp, Klebsiella pneumoniae
atgaaagtaaacgtcgcgagcgcggttaaaaacattgttaactgggcctttccactcttttttttgggtggtctgctgtatcttgtttacgatgattacagagataacggtacagcgactgaagaacagttattaatgatttctcatgaaataccctgtgccggtgaggattttcgaacggcactccgtaatagcccgggaccattaacccttcgcgatgcgaagaaaattgccgctaaatgtaacgagaaatataagcaacttaacgcactgaacgctataagcaaataa

SEQ ID NO: 234266 - DNA, 312 bp, Klebsiella pneumoniae
gtgccgccccttaaaccgctgccggatgtgctgcccttcccgtataccggtaataccctgcatccgacgcagaaaccggtggaggcgctacagccgctgattgagtcatttagcgccccgggcgcgattgttctcgacccgtttgccggaagcggttcgacctgcgtcgctgcataccgtgccggacgccgctatatcggcatcgaaatgctggcgcagtaccaccgggccggaaccgaacgactggccgccatgcaccgggccgtcaataccccggcggcgaacgatgaatggctcccggaggccgcgtaa

SEQ ID NO: 234267 - DNA, 231 bp, Klebsiella pneumoniae; identical to SEQ ID NO: 222286

SEQ ID NO: 234268 - DNA, 753 bp, Klebsiella pneumoniae
atgggtattactcttttcactaataatgcgttttcgtctgtttcagaccctgacgaatattcgccaggttttgatacaacatctctccgccgggctgaaatatttacttatacagggattggtaaaaaccttatgccgggggaaggcggacccactgtagttggcaccccgacgtttatcaccgactcgccctttgttcagttctcaaataacgcgaatgtggcacatttgaacctgggaattaatgatgccgcccaacaaacctggtttttgctctttgatccgaataatgactcgacgcaacgaattatcgcaggaagcttttcgggaacagctgcatctacacctcctggggtatctgtgattgtagatgaatcaggagcgctggcagccatgcagggtgtgcactacacggacactaatacttacggaacggcgcgcgcaactctgagtgcgttcaataaaacaaagccgatgctgatctgccttacccttgacgggcagaccaccaggctgaccgacatgaccaacaatgtttcagcatctcttaccctggcagcaggtcgcgagcgagcaccgactaccattcgcatcggcaagggaggcgttacgtactggggatcaacctcagcaactagtcgcatcggagcctacatggttttcgaccgcgtattatctgatgctgagaaaggttctgttcgtgactatttgctccgttgcatacaggcaaaatatccgtcattgattttctga

SEQ ID NO: 234269 - DNA, 2256 bp, Klebsiella pneumoniae
atggcagaagtaccgttaccaactcccacagataacgctgttccgagcacggatatccgggatgcagtttatgctggctccatgctggataaggttgtcaccagtacagagctgacatacaccgatcgccttggcggtgagcactacaccgtagatggaatgaaggcagaaggggataaagttgtcgaagagacgcggcagaacctgatccctcttagtcgtcagtatatgactctcgaagctgctcagaacgatatcgcgaatatcccggcaggctctaccacttattaccgtagcccggatgacagcgccctcgcgatcgaggtcattaacgttggcgggacgctgcagcctaccgggcggaaaatgccgtcacaggcaggtgttgaatcactggtaaccatgactgttggggagcttctaaagcatgacgatgctgcagatttaatatttcaacttgtagatatccttgggtatcgccagttttacgcactgacatctggagagttcgggacaataaagacgatggtcaaacctgatggcattgaactggagggatattcactgaccgtatcggatgacaatggaatatatatcgaaaatattctcggtcaacgcgtcgtattagttgatgaatatgggaatgtggcaccaaggagtttgcgcgctgcgcgagatggttcgttcggcacagatgcggcaatggtatcaggcaatggccttaattttaactcaggtggctctcgaattgatattacaggtcctgagtttttaaaggtctctgattttcttggccggtctaaaacaattattgatgcgagcgggaatctggtcggcggcggtagcggtggcgatataacgctgcaggacagaattaacattctgaacgcggaaaacctgaactattacagtaaagttcgcagtcggtataacgctgacatagagcgactggtgttcgctctgtcgatgatcatctggtacgggcagtctctttccaccaaccaggaaggttaccctgcgctcagcaaaacgccgtacagcaatctgggcaatctgatgctgggaaactcacctcgaccaaatacccggacaggggcaggattcaccccggtggggtcagccatcctcaacccgctaaaggccgtcgttcagtcaggtgacgggtcttatgtgatgagcgatgccgatgttgctgcactgcctgccgggtcgggtaatgagggtgaaggggccgttgctgcggttaacatgctgcgcacgctgtttctgcgtcaggcagcattgctaaccgacccgtcgcgcctgcttgttctggcaagctgtggagtcaacgggaggaccgttgaggcgctgtccaagggggccgatccggagctgtataatcgcattcgtgaagctgtgtctaaaataaaggccatcgcggatggcgaaagcaagacattcggcatcggtgctttctgtttcctgcagggagaatggaattacaaccctgggtacggcggggactatacgcgggagggctataaagcgaaggtgcgtcagctttatagcgatgtgattgccgatttttgcgcaggacagagaccgcctgcgatgttcacctatcagactggcggcacttacaccattgatacctatgagctggcgatcggcatggcgcagctggatatggcaacggagggtgggaacatctatggcgtctgcccatcgtatccattccccaataaggatagcgggcacctgaccagtaatggttatcgctggatggacatgtttttcggaaaggtgatgttccggactcttgttcttggtgagggatgggagccgttacactgcacaggcgttgaagttcaggatgattatgcactccttaactatgcagttccgtatccgccactgcagtggggtacaccatatgatgggcgaacagctaaaacgtatgctgataaagggtatcgggcgactgatgcaaatggcgcgctggacgttactgctgcagagattgtcgccgacactgtggtaaaactgacattctccagacgtgtctccgggacaatcaaaatctggtacgcagataaaacatcacataacgggaatggctgcctcaaggacagcgatccattcctggcaactgaaaattacgtgtataccgcaggcagcggccaatatgctgacgaaaatattcctgaacttgtagacaaaccatacccgctggaaaactgggcatgggcacaaattatcgagacaactgtatag

SEQ ID NO: 234270 - DNA, 2484 bp, Klebsiella pneumoniae
atggttcgatatgagctgcagcgcctgcctggcgcgccgaaacagcatggaacgaccgcacccggtactgagttgatagcgttactggactcactcaggctgcacaataatgtgaaggtgcgcctgaatggtcgcgagctggacgatgactttgatttatcgtttaagctgcgcgccggcgacgtcgtagcagtattcgatcagccagaaagcggtggcctgataaagacacttctcaacccggtggagcatctcaacccgatccgcttcaccaaaaaagtaatgtcagggctaaccgggcaacagaccgcatcatctccttccatttctactggtgaatcaccgaataacgatgccacggggcagaccaaccgtgcgcggctgtacaaaggaaggccgaatatttatggtcagtgccgggtatatccggatttgattcagcaggcgctgtttgaatacgtcgacaataacaagtacataactgaatggttcgaagtagggtatggcaaatacactatttcctctgttcgttattcagagtcgaacctgggcagccttgcgggggccagctatcagattttcgaccctggcgcgacgataggcaccattgatgttggctatcagtttgatgatgtcgataacgaagaagtgcctgggttgaatgaaagcgaggatttccccgcccagtcagcgacgacgacagcgccgacagccatgctgatcgaaagcaaccagctgaaagcgacagtcttgtcgaatgacgataatttctcatacttcgctgcgcttgccgtcccacacccggtgacttttgttatcaacgcgacatggaactcaggcggcggcccggtgacgaggaacgttaccggcagcggaaatatcgtctactcagaaagttatatcggagaggatacgcagtcttacaccatgttctatcttggcgatatgacgggggagatcacgacgctaccgtctgacgccgcgctgaacctgacacttttcaccctcaacgaccagacaccgctggttatagggccatcggtatcaccgcttgcgtccacgcagatttgggtgcatgtcatggttcaactgggagcgacttcgggcacttctcgttatcgaattcggttctggaaggtggatgacaacaacaaccagatcccgggtactgctgagcagtacgattatttctttgataacgattttcaggtgactacacgttatttccgcacaacacataaattctcacctgccgccggcgcaggtcgatatgcggtaacgatcgagcgactggataacagcaatgatggaaacgtcgtgacgttaatggcaattcacgccgtcaacacccgcgtggatgttgtttacccggatgacacgattgccagagtgaccattaaggggagcaacaacagcaacagtaaccgcgagcagaaatacaacatgctcgcacagcgccacaccatcagctatgaccggacgaccggccagattgactacacgctgcgtccaagccgctcatttgctgacgccgtactgcatgaatgggtggttatcggtaagcaggatgtgtccagtatcgatgttgcgacgctgtacgcgattgccgactcgatatctgtgccagagctaggctatttcgattacaccttttcagatgagaagctgtcactcggtgagcggatcgggattatctgcaatgcggcgagggtggatggaaacaacatcggtgatgtgctgacgttctggcgcgatgaaaaggtcagctatcctgatgcggtatttgcgcgctcaaacatgttctttgacgaatataaggtttcatggcagatgtcgctgccgggaggatatgacggtgtcacggtcgattatgtagacccgctcaccaataagaaatcctatgtttatttgcagattgatgccggcggcattcaggaagtcgaagacgcaacggttaacgccagtcagattagcctggacggttgccgcaatcgaagccaggcggttgatcgggcatggcttgaggctcagcgcattatgtattcacgaatgagcatgacggtcaaggtgctggagactgagcaggtggtgcgtggcgccgttgttcagtgtccggatatgtacgacaacaggcagcagaacggttatctcactggccgcaatggcgatatcttcacaacgtctgaacgcatagatttttcgtttggcgatatgtgggtcgtgatgacagatagtctgggtaattttcgtggccgctggcgtgcctatcctgtatccggtactgccaaagcctttcaggcagccgctgatgctttcgatctgaatatctacaatggtgctgactgccaggtggccagtcgctactttattgcaaccgacagcgaattaaactcgactatctggcgtgtagaaacagccaaacccaatggcgattacacacagactattaccttgtctgaatattcagactcgatttatccgtaa

SEQ ID NO: 234271 - DNA, 396 bp, Klebsiella pneumoniae
atgacgcagagcgaatttatacggcttgtgaacggcaagccgtgggttaaccgtgcctgttgttttgagcagatggattgttgggggttggtggtgctgtattaccggcatgttctcggtctggagttgcatcacatcgccggctacgaatcgggcgccgacttcatcacctgctattcagaggagtcagcccactggcgaggggttcctgtggcatctcctggctgcctcgccgtgttttattacgcagatcgacctgttcatgtgggcgtaatgctggacccggttaaatgcctgcattcacgcggtgagtccggatttgtgcgtgctgacagcatggtcatcctggcgaaaaaattcaacaaagtggagtatctggttcatggttcgatatga

SEQ ID NO: 234272 - DNA, 471 bp, Klebsiella pneumoniae
atgcctacattgagagagtggaaagagcggcggccggccagcgatatcaagcagactattgagttttatcacccggcgtttggttattaccgggtggtgaataagctgtttcgtgaagcaacgtttggcggcaacatctatcaaccagcggcttttgatatcaccgaaccaacacagaacgggtcagccataatcaccatggggatcaccttcctgcaaggggctgaagaggtcagaaacacactaaaagcgtggaaaggtgccgcccgcatgacggcgataacctgcaaatatcagcaatggagtgcgataggtgatgccgatcctttgaagacgtggtctctgttcgtgaaggatgtaggtgcagacggcacaaacgtcacagtaaattccggcaagactaatccgctgacgctggccaaccccattatttacaccacgaaagactatcccggactaattaccgtatga

SEQ ID NO: 234273 - DNA, 477 bp, Klebsiella pneumoniae
gtggcaacagtttcatacccggaatttctaccccttccgcagcgtccaagccagaacatgacgcaggataccggttggcagacaacgcagccggcagtcggaccagtcatttttacccctttcaccactgacctcaaggctacctggacgctgcagtggatattcacgctgcagcaggccgagcggtttaagtcatggctgcggtctcccacgtactgtgaccgcgggcgtaactggtttcagatgccgatcgacctgggtgatacgcagggtgttcagctgcagacgcttcacttcatcaatatgccggtgcaaaccagcaaaaatggcggaacggtcacctggaccgccacggtcatctgcaacggtatcaaggacattaccgaggactatgacgactggatcgttgaggcccagcctggatatggatactggctggattacttgatcactgaagtgatgccgagggccgactga

SEQ ID NO: 234274 - DNA, 543 bp, Klebsiella pneumoniae
atgaagaggattgtatgtgttatttttgccattttgcttctttcagcatgtgactcaaagccctcgcaacgtgaaattgaatccgcggccaataaaggcgattcatcagctcaatatgagttatataggctttactctactggaaaggctactgaaggcaaaaatgatgatgtggctataatgtggcttgagaaggcagcagaagaaaataactctaatgctcaatatatgctagggactatttacaatattggtagtcaaggtgttattaaaaatagccaaaaatctgcatattggcttgagcgttcggtaaaaagcggaaacgagactgctctttttttaacggccatgaactattggtatggctggggcgttaataaagatccagttaaagcatatgcctatttgcttgttgctcaatcatttgacaacgaacacgcaaaaaaacaagacgttgagtttagatatgctatctctcaggagcagagggaagaagctgaaggaatggcgatcgcgattaaggaaaaacacttcaaaaaataa

SEQ ID NO: 234275 - DNA, 714 bp, Klebsiella pneumoniae
atgaccccgattaaagaattaggcgaatgcgttatcggtaccggtgaccgggaattctttttccgaccgtcgtttcgcaacatggcgcgaatcggtgagcccgaggagattgtccagacgttctatgacctgtgcaatgatgaggcgacgccattcgcgcagcgtgcgatagaggcctatatccgcgatgagtacagccgccttcctgattgcgtcctgcggtttatgcaaagcgggcttctgtcacgcaaagcgatcatggccgcgcatacggtactgacagcatgttgtgacgatgatatcggcgacctggttggctggatgaagccggggaaatcacgcaagcgtggcttcgtctggcgcccgggcagcatgccgccggaaagtatggtcatcgtcgcgcaaaacctgatgatgcacggcatcatcggtaaagcgaaggtgcgcaagctgcagcgttacgaaacgaatgagacaaccgcagaattccgcgcagccgactacatcatggcggcccgcaaccatttcggcataagccgggaagaggctgagaacctcacgatgacagagttcggcatgatgattaacgccaaatacccaaatcagaacggcttcacgcgcgaagagtacgacacggtcatggacgaagacgatcgccgctggcaggcgatgatggagcaggagcgatccatgacaagccgcacgaagaaataa

SEQ ID NO: 234276 - DNA, 639 bp, Klebsiella pneumoniae
atggcaatgatgtccatcgatcgtagttgccctcactgcttaaaagaaaaagctatgttgacatttattaaagaggcgcatttaaaacctcgatttttctcactcgttttccaatgcaactcatgtttcaggctcgtgattgccgaagttgaaacgactgtttacggtggtcctgaggcatatgcaaaaggtcagctttaccctgttattgtcaataaacacccagagttcaaggtgtcactgtgttatccatcgcaaaaaccgatttcagctccagagtccacaccggaaagggctgccaagttttttatagaagccaaagaggattttgccagaggccgttatgaaactagcgccatgaactgtagaaaagtaattgatattgcgacaaaatcccttcaccttggagatgaagacaagcttgttcgccgtatatctgcattacgagcaacaggcttgattactcaagaaatggcagattgggcgcatatcatacggattgatacaaatggagccgttcactctgatgaagaattcacaaaagaggaagtagatcagcttttgaaatttacagaagtattcttgacttactcttttacattgcctgcgatggttgcaacaaagcgagaaattgaatag

SEQ ID NO: 234277 - DNA, 615 bp, Klebsiella pneumoniae
atgaggtatacgccaatattcagcatggttaacttcattgatgatgctcatttccgccgcgtatggaaacacccaaagaaaaccatcaactcgcgccagaaggcatgggttcactacatgcttcaggtatggggcaaggtcaacgccggcgatgattcccccggcggtgcaattaacgttatcggtcgcctgatgattcgcagtcaatggagtgatgacaaggcaaagcagattgagtctgtcgtcatgcgcctgtacgaagaggatgggctacgtggagacgctctctatcagaaagctcgcgaactggtcatccctcaatcatcgttcagcaacatcatcgctctcgccaaagaatccgatgatgctgctttcgttgaacgtgtgatggtcaagacgtttcaccgtgaaagccccgtccgcgatgtagctattaagcgatattgcaatcgcaattgcacgcaagacatcgccaggctgatgaatgctgtcactggaatggatatccagtcatgtaggcgcagggttgtatggtgtgagaatgtactcgattcagaaatcttttatgcaatgaagcgagagatagagaaggagtttccacaaattgcagcttag

SEQ ID NO: 234278 - DNA, 183 bp, Klebsiella pneumoniae
atgtgctcaataactaacatccagcaagccaaatggcagcgccagcgtgatatgcataacgagcaggtgttgatcggcaaagagcaagagcttgagcgcagtcttgcttatgtgcgcgagcaactgcaggaagtgcgtaaccgactgggcactaataagcctgaaggcccggaggttgcatga

SEQ ID NO: 234279 - DNA, 138 bp, Klebsiella pneumoniae
atgagaaaaatccaatacccaatgaccacggcggcaatattcgatgatgttgtctatccgctgcatttcgacaacgccggcaaggttaagcaggaaattgaaggcgctgttaactggttctgccggtggtgcaactaa

SEQ ID NO: 234280 - DNA, 366 bp, Klebsiella pneumoniae
atgaatgaatataacttcatcctgccctggcctcccagcgtaaacacatactggcgacggcaaggaagcaggtattacatcagcaagaaaggacagcagtaccgcaaagaagttatccagattatcaaaagcctcaacctagacatcctcaccaaatcacgactccgcataaaaatcatcgccgcagtgccagattcccggcgcagagatatcgacaacattttgaaatgtctcctcgactcacttgtccacgcctcattagctgaggacgacgagcagtttgatgatattcgcgtgattcgtgcggcaaaagtgaagggcggtcaggttgaaatcaagattacagagctatcggaggcgacatga

SEQ ID NO: 234281 - DNA, 291 bp, Klebsiella pneumoniae
atggcaagccttcgtaaagaagcgcgtggcagggagtgtcaggtgcgtatctacggtgtatgcaatcacaatcctgagaccactgttcttgctcattatcgaatggcaggtttatgcggtactggcatgaagccagacgacctcctcgcagcatgggcgtgtagcagttgccacgacgagatagaccgcagaacgcacatcatcgaccacgaatttgcaaagatttaccacttggagggcgtgatgcgaactcagggtattctgcgcaaggaggggaagataaagacatga

SEQ ID NO: 234282 - DNA, 186 bp, Klebsiella pneumoniae
atgcttagccataaccaaattcaatcctacgagcagcagagtgtacgcagagcattatgtgccggctgcacaaaagagctggcgccagaggaaacatacgcgtgttctgaatgcgtggatgaatggttggtttatcgtgatccaaataactcaatgacggaggaggaagatggcaagccttcgtaa

SEQ ID NO: 234283 - DNA, 171 bp, Klebsiella pneumoniae
atgacgcgatgtgatcgctgtggagagcgtaaagatgattaccggttcaggcccgggcaaccttactggcacaaatggtgtatccgctgtgagcgctcaccggtaggtgattttcctcttccgcaaaccaaggaggacgtgtggcacgacgaagcgcaacgcaaatcgtaa

SEQ ID NO: 234284 - DNA, 411 bp, Klebsiella pneumoniae
atgaagcaaacaatctttctcagaagtaagcagcaacagcaatcagcaataaactccattctcgcagcgcctctgaacaccgataagcccgtcaccatccgcatcaccgaatataaacgcaacctcgaccagaatgctcgctttcacgccatgctgggtgatattgcacgacaggttcattggtgtggaaaacagctaaagccggagcaatggaaagttttgctgataagtggtcatgcagtagccacaaagcagcaggccgagattgttcccggccttgagggtgaattcgtcaatatcagagaaagcagcgcagagatgagcgtaagccgcatggcgagcctgattgagtacaccatggcgtgggctattggtcagggcgtcagattcacagacaggaggtatggatga

SEQ ID NO: 234285 - DNA, 603 bp, Klebsiella pneumoniae
atgactgaaataattaaacagcgcatcatccagttcatcagagaaaatcagccagtaaccgaagaaaggatgcgtactggattgggattgtcagttcaccagtgccgtgcgtatcgaaagcagatgaaggcaacaggtcagctctttatcgccaacggttccggctgctttatctcgcaagccgatttcgaggactggctccgaaatggtggcggtcacgagaaaatgaaaagtattgggagaatgggagggcgcggacagacacctgaccgagaacagagacggcttatcatcgagtacctctcaaatcagacagaaccatccacggccaaagaaatctacaaggcatgccacatcaaccagaagagcgcatatcgaatcctcgcgagtcttctggaggacggaaccattggtagcgacggtaagcgcgttggccggcggtacgttctggatgctgacagtgcctattgcgacttcgatgacagagacaagccggttaaagcgttcgccaaatacaaccccaagcgaaatggtgttgttcaggcttatctgaatagcccggcacgacagaggctgatggctgtatacgtgaggattggatga

SEQ ID NO: 234286 - DNA, 1368 bp, Klebsiella pneumoniae
atgaggcaggatatcgaagccagcgtgattggtggcttgctggtcggagggttaacgcctgcagcgagtgacgtactggcaagaacagatccggatgcgttcacaatcccgctctaccggaaagcctttgaggttatccgcaagcaagccagaaacaagaacctgattgacggactgatggtcgctgaggaatgcggcgacgagcacgccaccgatgtgatgatgacagctcgctcttgccccagcgcagccaacctgactggatacgcagaaatgctcgcggaacagcatcagaagaggttatttctgcatgccattgacgagatgcgtggtcaggtaagcaatggctctctggatgcttctggtgaggcaatggacgccttaatcaagcgcctttcaaccatccgtaagccaaagcaggaaatcaaaccggtacgtcttggtgaggttctcaacgactatgcagagacgctggaaaaacgcctgtgtaacggcgatgagtcagacacgctgaagactggaattgcagagttggacgcaatcaccgggggcatgaatgcgcaagacctggttatcatcgcggctcgccctggcatggggaaaacagaactggcgctaaaggttgctgaaggcgtcgcaagcagcgtaattcctggctctaacctccggcgcggcgttctgattttcagtatggagatgagcaatcttcagattgtcgagcggagtattgccggcagaggaaacatgtcggttagcgttctgcgtaatccggcaaagatggacgatgaaggttgggcaagagtttcagaaggtatctgtcatctgaaagacctcgatgtctggatggtcgatgcgtcgaatctcagcgttgaggaaattcgcagcattgcggaacgtcacaagcaagaacatccacagctatctctaatccttgtcgactacctaggtctgattaaaaagccaaaagcagaccgcaacgacctggcaatcgctcacatctcaggaagtttgaaggcaacagctaaagacctgaagactcccgttatctctctcagccagctttctcgagatgttgagaagcgaccaaacaaacgaccaaccaacgcagatttgcgcgactctggaagcattgagcaggatgcagacagtatcatcatgctctatcgcgaagctgtgtataacgaaaacagccccgcggctccattcgcagaaatcatcgttactaaaaaccgcttcggaactctcgggacggtttatcagcgcttcatcaacggtcacttccattcatgcgaccaggaagaggcaaggcgtatatcaaccacgcaacaagcgctaggtaaacgctatgcgcagggagcagacgtatga

SEQ ID NO: 234287 - DNA, 834 bp, Klebsiella pneumoniae
atgagtaacctagcaacagttacaccaatcaggccgtctctggcggctgtggagcgtcaggtggccgatattgatgacgggtatacccgtatcgccaacgagctacttgaagctgttatggccgcagatttgacagccagacagctcaaggttgcgctggcggttatccgcaagacttatgggtttggcaagaagcttgaccgaatcactaacactcagatagctgcaatgacaggcattcatcacacgcatgtttgcaaggcaaaaaacgagatgatcgccatgaacatcatagtttcaaacggtcatgcaatcggtatcaataaggttatttctgagtgggatttcagcattagccatatcagcaaaccattagccgaaacagctaataaatgtttagccaacttagctaatgggtataagccaactcagctaaacacaaaagaaactattcaaaagaaagaaataaataatacccccttaccccctaacgggggcggcgatgggcaggaaaagcttgaacgtcgaaaaccagagcgaattgactacgaatcattcctggaggcctacaacgcagaggtcggtgacaaacttccacacgctgttgcagtcaacgagaagcgcaagcgccgcctgaagaaaattattccccaactcaagaccccaaacgttgacggattcagagcttacgttcgggcgtttatccatcaggccaagccgttttactttggcgataacaataccggctggacagctgatctggattacctgctgagagacgacacgctaactggcgttcgtgaagctaagtttgctgacagggggatggcatga

SEQ ID NO: 234288 - DNA, 147 bp, Klebsiella pneumoniae
atgcctaagaaaactcgattttaccaggcgtcagtacacaaaaatattgctcgtgaccgattcattaagtcgtgcaacccagaggttggcataaagctaagagccatcctggaacaattcaaacgcaaggagaacggtcatgagtaa

SEQ ID NO: 234289 - DNA, 300 bp, Klebsiella pneumoniae
atggaaacttcaaccaaccgcaacatctcagaggctcgacgaatcgaatcgtggcttcttaaccgcatcgccctgaagggtggaaacaatgtcgccaaggcgattggcgttgataaagcgcagatctcacgctggaaggaaagctggttgccgaagatggcaatgctcttagctgttctggagtggggcgttgttgatgacgatatcgcaaggctggcgaaggaagtagctgcagttctcacaaagaaaaaatccccggcggcaaccgaggattctgagcaaatcaccatgcaattctag

SEQ ID NO: 234290 - DNA, 711 bp, Klebsiella pneumoniae
atggaaaataaagacattcgacgcgctaatttgaaagcgcttatagagaagcatctggagaagcctggcaatactaaggctagctttgccattctttgtggaatcgctccagctcagcttagtcagttgactggtgacaaatcagttcggaatatcggtgattctattgctcgcagaattgagggcgctaaccatcttccaaatggctggatggatatgattcatgacgctaatcggcattatggtgatgccgagcagttaagttacgtagggaatttaaggccagggttggttagagtggttggagaggctgttcttggggttgatggcgcgattgaaatgaccgaagatcgcgatggctggctaaaaatccatagcgatgacccagaggcattcggcctaaaagtaaaaggtgatagcatgtggccacgcatcaagtcaggggaatatgtgctcatagagccaaatactgaggtttgtgctggtgacgaggtgttcgtaagaactaaagaaggtcataacatgatcaaggtgctcgggtacaagagggatggtgaataccaattcacgagcatcaatcaagatcatcgcccaataacactgccatatgaagaagtgtcaaaggttgagtatgtagctggaattttaaagcaatctagacaccttgatgataccgaggcgagagagtgggctataaagagttttaggtga

SEQ ID NO: 234291 - DNA, 324 bp, Klebsiella pneumoniae
atggatgcacagtcacgccgccgcgaacgccgcgcagctaaacaggccgaatggaaagcagctaatcccctgtctgttggggtaagcgctaaacctgataaccgccctgttctgtcgctgaatcgcaagcctaaatcacgcgtggaaagcgcaatgaacccgattaacttaacggtgctttcagagtatcgcgagcagctggaaagccgcgcggaagccgttgagcgcaagaaccataagctttggtacaaacagcctggcgagcgcggcattacctgctcaggccggcagaagatgaaaggaaagtctattccattgatatga

SEQ ID NO: 234292 - DNA, 543 bp, Klebsiella pneumoniae
atgagtacatcaccttttgacttttacgacctgggttcgaagatagttgtaggtattgccagcggaggatctgctgcctggtttgcatcaaaactagcgttgaagaagttctatagggagaaatggtgggataagaattatgaggcatatctctctctgattgatgaccttatctatatgcgtgactcatatgcaaagctttattcttttgaagaagacaaacaccatggatatgccagggaagatgacaggccagagatagattgggacaaaatggctttgattgggaagcgtatggaaaagcatttatacacggctgcattgactctcagcagaaccacgagcgaatcaatagaagagtttactcataaaacgaaactaatcgataagcaagttgaggaaggcagtaagcatgtatttattgcctacgacgagttgagttttattgctgatgatttacttaaaaaagtagttaatgatgcaagagaaaacctcggactgataagtttaaaagaaaaaatagagtcaatggaaagaatttga

SEQ ID NO: 234293 - DNA, 243 bp, Klebsiella pneumoniae
atgagcagagaaacaggcggatatgcatttcctatcccaaatgctgatttccaaactttcctaccaagcaccgttgatgaatataaaaggattcagtctggcatgacgctacgcgattacttcgcagctaaggcaatgcagggccgattggcaaatcctgactggttggcaagtgatgaaaaaacggcggctgatgcctatcagattgccgacgcgatgctgaaagctcgggaggtatcatga

SEQ ID NO: 234294 - DNA, 309 bp, Klebsiella pneumoniae
atgcgcctgagcatgaatgataaaaacgaaattaagcagattatcgccggttttaccgatgctgattatcaggaaatagacaaagaggttgagcggctgtgtgcatcagcgcagccgctttttaaccttctcgaagaccacaaaccagatgagcacacaaagtccgcaactgagtggttaagtgaagaagactgtgattaccaggattatgccggcacagcgatgtgggacttgtttcggcctcgtgtagtggtcgagcacgcaatagcggcattcattcgccgccattcgtttgaggatgcagcatga

SEQ ID NO: 234295 - DNA, 822 bp, Klebsiella pneumoniae
atgaaacccggcatatattacggaatgtcgagcgaggtctatcacgctgatgaggccataggctcaacgaccgtaaaagccatcagcgttagtcctgctaaccacttcttcaacaaattcaccggcagcaaatcagcgcacattggaagtgcgattcatgcggcgctgcttgagcctgatatatatcagtaccggtatgcaaagcgagaagatataacctctcgcgcgagcaaagaatacaaggaacttacgaagcaatttcctgcagagcttatcttggtcggtagcgaggtagatactgttcagcgcatgtacgaatcatcccgcatgaacgatgacttcatggactacatgaacaccaaaggtaactccgaagtgtccatgtttgctgaatgtccagaaacaggcctgatgctcaagtgccgattcgacaggctatctgacactctctcctaccctctcgacgttaagagctgcagagacgcttctgaacgcggattcagcaatgcttttggtcagtataagtatcacatccaggcggccttctatctctacgttctcaagctggcaactggcattgaatataaccagttcgccttcttcgctatcgagaactcaccgccatatcgcaactgcatgtactacatcggcgatgaatctctggagcttggctatcgagaaatgtacgcagcattagacaagcttgttgcatgcagagaaaacgaatcgctgaagtacgaaggaattgtacttccatccaatgaaattaacgttccgtcctacttgctggataacgaatacgatgatgaggtaattatctaa

SEQ ID NO: 234296 - DNA, 570 bp, Klebsiella pneumoniae
atggacctttcacgcacaatcattccaaagtcagaccaaattaacttcgaggatgttcagtcacagagcatcacagcggttattaaagcagttcgggcaggcaactcagagcagccggtattcatcgaccttgaaggttttgatgggcgtccttacaagccgtctaaatcaatgcggagagtgctaattggtggatggggtgctgatggtcactcatgggttgggcgttctctgacgttaattggcgacccgtcagtaaagttcggtggcgtagctgtaggtggtattaaaattttcgctatgagcgatgttgagtctgatttctcaatgatgctttcagtatcacgcggcaagagacaggagcacagggttagaaagctggaagttaagcaacaggcaacacctgaaaccgcactggcatggttttctgctaatgcattaaatatggattccgcaaagcttgaaaatgcctataaccgagccaaaggcgttatcggtaatgattcaacgctaattaaaaaactcgacgaaatttaccgcctcagtaaacaggatttagagggggcataa

SEQ ID NO: 234297 - DNA, 300 bp, Klebsiella pneumoniae
atgaaatgcattccctgggagtcgtgggaagaggatttcctgcgagaagtatccgccaccatgcctgccgagttgatcgccgaaaagctcgaaagaactattccggcaatatggggcaaggcatcaaggatgggagtcaggcttacctaccacatgaaaattaagccatggactgcgcaagaactatctctctttaagtcatcaactgcggaagagatagccaaagtaacttcccgaagcatttattccgtcaggtctaagcggtatcagttaggcctgctatcaggagccaatcaatga

SEQ ID NO: 234298 - DNA, 258 bp, Klebsiella pneumoniae
atgtcacagtggaacatagcggcaaaaagcccggaagagcaggacaaggtcaatgttgacctggcagcctccggcgtcgcctacaaagagcgcctgaacatgccggttgtcgccgaagtggtggccagagagcagcctgagcatctgcgcgagtattttatggaacgcgtgcgctactacagggaaaagagcatcgagctaccgagagcaagtgaccctcggtatattgaaatggctgagcagaacgtcaagaagtaa

SEQ ID NO: 234299 - DNA, 273 bp, Klebsiella pneumoniae
atggctaagttacttacgttacttcaatgggcggatgcgaactacgaaacgcctccttcattgtctacactgcgccgctggacacgtgaggggcggatttatcctgctcctgaacttcatggcaaggaatacaaggtgattccagaggcgtgctatgtagatccaagcaagaagaagttgaagcctaaaccgaagaattttgatgtgccgaggaatggtactttactggagagactgactcatggcgaaaaggcccgctcgttacgacgctaa

SEQ ID NO: 234300 - DNA, 1086 bp, Klebsiella pneumoniae
atggcgaaaaggcccgctcgttacgacgctaatctgccgagaaaccttacctatcgcaaaagagacaggctctacagttggagaaacccgataaccggacaggagatttcccttggacgtgttgatcgcaaggatgctgtagcccaggccattgaggccaataactacatcgatcagaattacctaccatcctccctgcttgaccgcttaaaagatgttcctacttttaccgtctccgcatggcttgagcgttacgaagttattcttgaacggcgcgagttgaagcctaacacgatgaaggtcaggcgcaatcagttagccactatcaaagaagagttcggcagaatccccctggcttcagtaacaactaaggacattgctgaatttctggaggggtatattgtctgcgataaaaagagcatggcatcgggactacgatccgttttactggatgtattcagggaggcaattgtcgaagggcatatcgacagaaaccctgctgagcccactcgcacaccaacgccgaaagttaagcgagaaaggctcctgttagaacaattcaccattatccgtgatgcggcctcttcccattctgactgggcgagaaacgcctgcgaccttgcgcttgttaccggacagcggcgagaagatataacgctattccgtttcagcaatgtaaaggaagagaggttatttatcactcaggagaaaactggccacaaactggcggttccccttgatttgaaactggacgccgcagggcttatgctgcacgatgtgattgagagatgccgggaaggaaacccatcagacttcatggtttactcaccagttcgtcgaggtggtaggaagcctggtccactaacaccggatggacttacccaggcatttgcagatatcagggattcaacagacttaaagtttgggccaaatccaccctcttttcatgagatcagaagtctggcgagcaggctctatgaaaatgaacgtggtgaggagttcgcacagcgattgcttgggcacaaaaatttaacaatgaccaaaaaatacctggacgcacgaggtgcagagtatgttatggtttag

SEQ ID NO: 234301 - DNA, 1080 bp, Klebsiella pneumoniae
atgagcattatttcagaaaaaatatcatcaagaataaaaacattaaaacaagagtttgctgtaaataaaaatgtaaaacaccaaggggtgaagggtggtttgaatgaagaagagttgataaaaataataaaagacgtcattccaagaaagtatgagatttcaagaggtataattgagaactcacgtggagagcaatcaaatgaaagtgatattattatttatgataatgaaatcttaccgccttatataaacaatgatcttgcctttgttcctatcgaagcagttagatataacattgaggttaaatcaactttaacagcgaaagagctagagacaacaattcaaaaatttagaaaatttcgatcaattggtggaaaatctcctactgttctatttgcattttcaagtaatgccaagaaaagcgaactgagcagatattatcataacgatactaatttcttgtcaaatccagccattggcgtactctgcatttctgataagtgttactactacaaacacacagagattaaatatttaaaagaccaccttagcaattctgatattcttaaaagtttcatgaacgatgataagttcaaaatatcaaatttcacagatgtccttcaagacactttaaaaaatgatgatcttctatctagtttaacgagatcagagtttgctttattattgcaatcttctattcaagccaaaaaaacagtttctgattttgacacaaaaaaaatgacaataaacggaattaattttaatgaaataacttttaaaatacatcaatggattggagttgagtgcaacgataatgatgttgagttatcacttttttctggaatatcaaacacattatctaaagaatcatttggtaattatttacttaacgaaaggaaagcagaacccaaggttttttcgatatgctgtgaggatatgtggggtaatttaagttgtcagaaatttgatgaaaacggtctgggtgacgaatttaaaaatttcagtttcagttttgaaagctcagctgaagaaagtaaaataaccttttactttaaacaaaacccaccacaggaagaataa

SEQ ID NO: 234302 - DNA, 594 bp, Klebsiella pneumoniae
atgcaggaaataatgacaagaattgagctttctggaattcttggcaaaactttcgggaaggttcatcatcggttgatttcaacagtccaagaagcaggaatagcgctggctgccaccatccctggatttgaacatttcatgaataacagcaaagaaaaagggttgacctttgctgttttcaaaggaaagaaaaatattggcaaggatgatttaggattccctgttggtggtgaagttatccgaattgttcctgttttaattggtagtaaaaaggcgggactgcttcaaacaattcttggagcagttattattgttgcctctgctgtcggctcttactttgttcctggcaaccccgtgtcagcatttggttataaaatgggggctgcgatgatgctcggcggtgtcgttcagatgctttctccacagccagcaggcctggcccgaaaagaatccgctgacaataaagcgtcctacgcctttgggggcgtgacgaacactgcctctcagggatacccagtccctttgctttatggcaaacgccgaattggcggcgccattatatctgccggtatttacgtagaagaccagcaataa

SEQ ID NO: 234303 - DNA, 165 bp, Klebsiella pneumoniae
atgctctgcgaattgctgaccacctcgttgccaatctggctgacattcgagctgagtacgccggctgcgtttgccagcgcggaaaccccgagaccggagtacatctcggcaaccttgtctgacagcttcaggcccaggttgatatacgcctggccggtccactga

SEQ ID NO: 234304 - DNA, 1035 bp, Klebsiella pneumoniae
atgagaataaagtttgaagttctgcccgtccgcgccggcagccgtcaatccggtttcccaggtgatggtttgccagtcagtggtcagcgtgaccgttttatcctcatacgtactgtccgtctggccgattttgttctggcgacggatcagcagactcatcgcgccggaaacacctttggccttcaccaccacgcggtacttgcgctggccattcagcggcaccggcttgttgttgttggagaagatccccggactggtgttagtcgtccggttcagccggacccccgctttcccgtccccgaaatcgccaaaagtcacaccggctggatactgaatatcccaggcagtgctgccctgcagaaaatcaaagttcgggatcaggttgtcgccggcgttgcgggtggccgtcagcacattcgccagatttgtcagctgctggctctgtgtggtcagtttcccttccgcctctgtcacccggttatcgaccgaagtcagtgccgttgcatcggccttcttcgacacattgctgttggtcgtgttcaggctgttctgcaggttcgtcagctgctggctttgcgaggtgatagccccttccgctgtgctgacccggctcgtcagtccggtaacggcgccggcggtggcatcgatgtccacccggtcggtaacgtcagtgacgtaaaaatcatcgaagtagcggctgccactaatcagatagttgctcagcgtcaccggcaggctggctgtctccgtcgctttccagcgaccggaaaccagggtccagtttgtccccaccgtgccgctgttgtacggacgctcaaagaccggctggccggcagagttaccgatccgcaacttgttgttccccgcgccattatccgtcgtcgctccgggttccttgacccacaccccgatttcataggttcgcccctgaacaaacgggatgtattgccccggagacacgctccccggatcaaccttcagcgcccgcgtcccgctgtgaggagcggaaacctccaccacactggtcgcggttga

SEQ ID NO: 234305 - DNA, 531 bp, Klebsiella pneumoniae; identical to SEQ ID NO: 226842

SEQ ID NO: 234306 - DNA, 732 bp, Klebsiella pneumoniae
atgaagcttaataaagtcatggctgtgatggtcgtcagctctgcgctggtgttatctggatgtagtgcaatgggaaccgccattaaaaagagaaatctggaagtaaaaacccagatgagcgaaacaatctggctggaaccttcaaataataagacggtttatctgcaaatcaaaaatacctccgataaggatatgagtggcctgcaggcaaaaattgccagcgccgtcacttcaaagggatatcaggtcgtcagtaacccggatacggcgggctactggatccaggcgaacgtgcttaaggccgataaaatggaccttcgtgagtctcagggctggttaagccggggttatgagggcgctgtgactggcgccgctttaggggcagggattaccgcttacaactccagttctgcaggggcgactctgggtgtaggacttgcagccggtctggttggtatggctgctgacgcgatggtggaagatgtgaactacaccatgatcaccgatgttcagatcgcggaaagaaccaaaactcaggttcagactgataacgtggccgtattacgtcagggaacatccggcgcaaaagtgcagacaagtactgaaacgggtaatcagcacaaataccagactcgcgtcgtctctaacgctaataaagttaacctcaagttccctgaagcccagcctgttcttgaagaccagctggcaaaatcgatcgctaatattctgtaa

SEQ ID NO: 234307 - DNA, 213 bp, Klebsiella pneumoniae; identical to SEQ ID NO: 25793

SEQ ID NO: 234308 - DNA, 963 bp, Klebsiella pneumoniae; identical to SEQ ID NO: 104004

SEQ ID NO: 234309 - DNA, 561 bp, Klebsiella pneumoniae
atgcaaggaacgtttataggttttaataccgcaggaattacctttgaagagcgatttttagcgttgctgctgaaagttaagaaggaaaatggcttttgcgagatttactatcttcaggcaccggtgctagctgatctgctcctgatactgcagagcagaatggctgtgattttccagcggcttgaaaaccagggagaggcctataaagatgagcttatcacgtataatgaggcacttgttgccaatattcctcaggttgagacggctgaaatacagcaaccatcccctgagcggcgaatcatgtccattacgctcaaacctggcgaaacacagtcaacgttaattcttgtatttcaggatgaacaaattagtactttatgtattgacgatctgcaaatcgaagcattaattatcggtattcaacaagcattaaaaacagtcggcgaccaggaactggttcagtatttaagttcaaatatgggtaatgactccaacttactgatagtgttttatgttcagataatgcccgatgaccttgtcatacagctccaccgattttga

SEQ ID NO: 234310 - DNA, 1026 bp, Klebsiella pneumoniae
atgatcaagtactgctgtgcgagctgttttggggataatggtttaaagaaaaatatcataccttcactttccccagattttggcgattgttcgtattgtggtaccaaaggtattgagattattgagcctcatgctttatttgatcactttagttcattgataaacatctacgaaaattatccggatggtaagagcctagtggcacatttgaaagaggattggaagctattttcacatcctcttttagatgaggctcatgccaaagagttattaggtgatatacttgatgatgggaatattgttagaaaaaccttcgtactttctgatgattataagagtgaatctctcgcattatgggatcatctttgtcaggaactcatgtatgaaaatagatattttctcaataaatcacttgatacagataggcttggcgagttattaagtttccttgctttagatgatttctctaaaacttggtatcgagcccgtatttatgcagatgatgctgcttttacgatagaccaaatgggggctccccccaagagattagttagtcatgggagagcaaatcctacaggtataccgtatttatatcttggatctaaaccagatacagctttgtctgaaattcgacctcatacaggtgacagagcttgtgtcgcagagtttactttaaaagataacctgactcttatagacctaagaaaccctcgtgaaaccgtttcaccgtttttattaaccgatccaggtgaaatgggtaaaatgcttgcagatataccttttcttgaacgacttggttatgaactaacaagacctgtattacctaaaagtgcagcccttgattatattccaagtcaatatatatgcgaatttattaagaaaactggctttcatggagtactttatagtagttctgtaagtgaaggaatcaatcttgctctttttgatccgttaaatgcgactggaggcaatgtaagtatttatgatatagataaagtcgaagttagtgtaagcaaacaagattaa

SEQ ID NO: 234311 - DNA, 807 bp, Klebsiella pneumoniae; identical to SEQ ID NO: 225300

SEQ ID NO: 234312 - DNA, 198 bp, Klebsiella pneumoniae
atgttctatcttatttttatcgaagggatcatcaggactacctacaggatactcttttgcaataaacgctcttttctgacaggtaatctgcacagtatgtatattatcctcacccttatcattaaccggttttgtctgcgcctttgtctcaaaataacaaacattttcacgcttatttttagaatatgcttgccctga

SEQ ID NO: 234313 - DNA, 153 bp, Klebsiella pneumoniae
atgaatccagttaattcgtattacattatagtagaagtatttttaacagacattgatggcaattctccttcatggcaaactcatctctttgacatgcggttaaaattgtgcttccatctgaaattagagattcaccacctcttaaattcctga

SEQ ID NO: 234314 - DNA, 162 bp, Klebsiella pneumoniae; identical to SEQ ID NO: 196661

SEQ ID NO: 234315 - DNA, 246 bp, Klebsiella pneumoniae
atggagtggtgggtaaaaaaagtacgaaaaaattcaatgaccagctcctgctgcgtcgtgctgcagagcggtgcgctggagatgattgcggaaattgaagcttgtcgcctccacctgcaggaaggcgataaactcactccactggccaatgctcgttattgtctgaataataacccggcgcagacgttgaagatcctcaaagccactcattatagcagtgagcgctgggccaaactcggcggataa

SEQ ID NO: 234316 - DNA, 576 bp, Klebsiella pneumoniae
atgcacgttgtaagccgctacaccgccgcggacgcggcggggattatcgagccgcgtggccgcgccatcgccctgagcgtggcttttgccgccggagtcttgctgttaaacatggttcccgttatcggcgtgaccggcatgctgagtctgctgacggcactgagcgccgccttcggtgccgggtggggatccacacgtgggcagtcctggctctatcgctcgcccctggcggcgacgcgctgggcctttctgctgtcggcggccggctggctgctggcgctggtggcctggtatggcgggcaggactggtccgccatgctgccgggcgtggcgtgcggcggggcgggggcggctgtcgcctggcggattgcggcgggacggtcggcgcagtgtgggcccagagtcgatggcgcaacgctgctgagcgtggtcgttgtcatcgcggcgacgctgttggcccaacataccgccggggccgggcgcagcggcgtgtgcttcgccttcgccgtgctgctggacctgtcgctgctcggcgcgctgatcgtgcgtatcaggcagcaggagagtgcggcgtaa

SEQ ID NO: 234317 - DNA, 336 bp, Klebsiella pneumoniae
atgaacagcgaaaataaaggctatgccttggcagttgagaatggccagcgtcaggaaaaacgcgaaaaaatatatctcaaaccgatggcgctttatattccgcagcacgcggtggaggcggtaaatagtctgctggatgacctgccagctgctaatgaagaagaggagtgggtgttaaccgtcaccaataataataacggcgtctcggttgataaaaccttttcctcgctggcggcgctgcgcgacccgctcaccgccgctgatacggtgaaggatctgatcaatatcgttcgcggctacgagtccgatgaagagaccaacgtttgcggctggtaa

SEQ ID NO: 234318 - DNA, 633 bp, Klebsiella pneumoniae
gtgacagcggggggttgggcgcatcaggaaatgttgtgcttgttgcccgccgaccccgcgggcttttttttgcccccgcagaggcatccgttctttcagcaaggcaagtgccgcaggacagggacaaaagtgacagccgggggttgggcgcatcaggaaatgttgtgcttgctgcgcgccgaccccgcgggcttttttttgctcccgcaggggcatcctttctttcagcaaggcaagcgccgcaggacagggacaaaagtgacagcggggggttgggcgcatcaggaaatgttgagcttgctccccgccgaccccgcgggcttttttttgtccctgcagggggcatcctttctttcagcaaggcaagcgccgcaggacagggacaaaagtgacagcgggggggttgggcgcatcaggaaaattggcgagaacgcaggcgcgcatccaggactggccgccaggacggcggccagagggcggtcgagacaaggatgtcgagtccgcccgttccgccagatgaagccggagtggagcggaccgcgcagcggcaattttcagcgccatgcggggggtcatggggggcgggcgaaacgccccccatgccgttcacccgcagagggcgcaatgaaatag

SEQ ID NO: 234319 - DNA, 1260 bp, Klebsiella pneumoniae
atgaagtttgattgcgcgattatcggcggcgggctcgccggcctgctgtgcgggctggccctgaatcagcacggcctgcgcagcgtcatcatcagccgcgggcagagcgcgctgcatttttcctccgcgtcgttagacctgctctcggcgctgcccaacggcgataacgtcactgacgtcgcacaaggtctgcagcagctcgctgaacagcttcctgaacacccttattcccggctcggcgccgaggcggtactcgaatacgctacgcaggccgaagccctgctggccgcctgcggcgcggtgatgcagggcgatgcgcgccggccgcaccggcgggtaacgccgctggggacgttgcgcccggcatggctgtcgccccttgaggtgcctgtcgcgcccctgtcgtcgcagggcgcctgtctggtggggatcagcggctttgctgattttcagccgcatctcgccgccgccgcgctcggtcaacacggagttaccgccgcggcggtggaaatcgagttaccgctgctggatgtgctgcgtgacaacccgaccgagtttcgcgccgccaatatcgcccgcgtcctggatgatgagaatatgtggccggccctgcatgcagcgctgctaccgctggcgcagcagtatgacctgctgatcatgcccgcctgttttggcctcgccgacgatcgcctgtaccactggctgcaggcgcgtctaccctgcccgctgcgtctgctgccgacgctgccgccttcggttcccgggatgcgtttgcattctcagctgcaacgccagttcattcgcgagggcggcgcctggctcgcaggcgatgaggtggtgaaaatcagccatcgacagaacgccgtcgaggcggtctggacgcgcaatcacggcgatattgcgctgcgtccgcgctttaccgtgctggccagcggcagctttttcagcaacggtcttgtcgccactcgcgatagcgtgcgcgagccgatcctcggcctcgaccttcaccagaccctgccacgggaaagctggtaccagcgcgatttcttcgcctcacaaccgtggcagcgcttcggcgtgaaaaccgatgccctgctgcgccccctgctgggcgggcagccgttccataatctgttcgccatcggctcattgctcggcggattcgatgccattcagctcggctgtggcggcggcgtctgcgccgttaccgcgctgcacgccgccagacagatccatgccattgccggaggccggccatga

SEQ ID NO: 234320 - DNA, 2415 bp, Klebsiella pneumoniae
atgaccaaccactgggttgatattaaaaacgccaacctggtcgtagtgatgggcggtaacgccgcagaagcgcatccggtggggttccgctgggcgatggaagccaaaattcataacggcgccaagctcatcgttatcgatccgcgctttacgcgtacggcgtcggtggctgatttctataccccgattcgttccggtaccgacattaccttcctgtcgggcgtgatcctgtatctgctgaataacgaaaaattcaaccgcgaatacaccgaagcctacaccaacgccagcctgatcgtgcgtgaggactatagcttcgacgacgggctgttcagcggctataacgcagaaaaacgccagtacgacaaaaccagctggaactatgagctggacgaaaacggcttcgccaaacgcgatactacgctgcaacatccgcgctgcgtctggaacctgctgaagcagcatgtttcccgttataccccggatgtggtcgaaaacatctgcggtacgccgaaggccgacttcctcaaagtctgtgaatacattgctgaaaccagcgcgccggataagaccgcatcgttcctgtacgctctcggctggacccagcactccatcggtgcgcagaatatccgcaccatggcgatgatccagctgctgctcggcaacatggggatggcgggcggcggcgtcaacgccctgcgcggccactccaatatccagggtctgaccgacctcggcctgctctccaccagcctgccaggctacatgtcgctgccgaacgaaaaacaggccgacctgcagacctacctgacggctaacacgccgaagccgctgctgaaagaccaggtcaactactggggcaactatccgaagttcttcgtctccatgatgaaagccttcttcggcgacaaagccaccgcggaaaacagctggggctatgactggctgccgaagtgggataagagctacgacgttctgcagtacttcgagatgatgaatcagggcaaagtgaatggctatatttgccagggctttaacccggtcgcctcgttcccgaacaaaaacaaggtcgtcgcttccctgtcgaagctgaagttcctcgtgactatcgacccgctcaataccgaaacgtccaccttctggcaaaaccatggtgagtcgaacgatgtcgatccggcgaaaatccagaccgaagtgttccgtctgccctccacctgcttcgccgaagagaatgggtctatcgtcaactccggccgctggctgcagtggcactggaaaggcgcggacgccccggggatcgccgtcaccgatggtgaaattctcgccggtatcttcactcgcctgcgtaagatgtatgccgaagagggtggcccggcgccggagccggtgctcaacatgacgtggaactactccacgccacacgagccggcatcggaagaagtggcgatggaaagcaacggtaaagcgctggcggatatcaccgacccggcaaccggcgcggtgatcgtcaaaaaaggccaacagctgagctcctttgcgcagctgcgagatgatggcaccacctccagcggctgctggatcttcgccgggagctggacgccggaaggtaaccagatggcgcgccgcgataacgccgatccatccggtctcggcaataccctgggctgggcctgggcctggccgctcaaccgccgcatcctgtataaccgcgcctccgcggacccgcagggtaaaccgtgggatccgaagcgtcagttgctgaaatgggacggcgccaaatggggcggcgtggatattccggactacagcgccgccgcgcctggcagcgacgtcggtccgtttatcatgcagccggaagggatgggccgtctgttcgctatcgacaagatggcggaaggaccgttcccggaacactacgagccgtttgaaacgccgctcgggaccaacccgctgcacccgaacgtggtctctaacccggccgctcgcgtcttcaaaggcgatctcgagcagatgggtaaggccgagaagttcccgtacgtcggcaccacttaccgtctgaccgagcacttccactactggaccaagcatgcgctacttaacgccatcgcccagccggaacagttcgtggagatcggggaaaaactggcgaataagctcggcatcggccacggcgataccgtgaaagtttcctccaaccgcggctatatcaaagccaaggcggtggtgaccaaacgtattcgcacgctgaaagttgacggtaaggatatcgataccatcggcattcctattcactggggctatgagggcgtggcgaaaaaaggctttattgccaataccctgacgccgttcgtcggtgatgcgaatacgcagacgccggagttcaaagctttccttgtgaacgtggaaaaggtgtaa

SEQ ID NO: 234321 - DNA, 930 bp, Klebsiella pneumoniae
atgagtattcgcataatcccgcaagacgagctgggttcgagcgagaaacgcacggcggaagcaattccgccgttactgttccccaggctgaaaaatctgtataaccgccgcgctgaacgcttgcgcgagctggccgctaataacccgctaggcgattacctgcgctttgccgcgctgattgcccatgcccaggaagtagtgctgtacgaccatccgctgcagatggatctcaccgcccgcattaaagcggccagcgaacagggcaagccgccgctggatatccacgtcctgccgcgcgacaagcactggcacaagctgttgcactcgctgattgccgagctgaagccggagatgagcggcccggcgctggcggtcattgagaatctggaaaaagcctctgagcaggagctggagcagatggccagcgcgctgtttgtttccgatttcgcctccgtcagtagcgacaaagcgccgtttatctgggctgcgctgtcgctctactgggcgcagatggccagtctgatcccaggaaaagcgcgcgccgaatacggcgaacagcgccagttctgcccggtgtgcggctcgatgccggtctccagcatcgtgcaaatcggcaccactcaggggctgcgctatctgcactgcaacctgtgcgaaactgagtggcacgtagtacgcgtcaagtgcagcaactgcgagcagagccgcgacctgcactactggtcgctggacaacgagcaggcggcggtgaaagccgaaagctgcggcgactgcggaacctacctgaagattatgtatcaggagaaggatccgaaagtcgaagccgtcgccgacgatttggcctccctggtgctcgacgcccgcatggaacaggagggcttcgccagaagctcaattaacccgttcatgttccccggcgaaggggagtaa

SEQ ID NO: 234322 - DNA, 555 bp, Klebsiella pneumoniae
gtgaaagatttgcctatccatctgtacgatctgggcaccggcaaccaggtgaagatcccttccgaggtgatgatcccggaaacgcgggagtttgagttcgccagcctgggctttatcccgctgtcgtactacaaaaatcgcgattacgcctgcttcttctcggccaactccgcgcaaaaaccggcgctgtacgataccgccgacgccaccgccaacagccgtatcaacgcgcgtctgccttacatcttcctgctgtcgcgcatcgcgcactacctgaagatgatccagcgcgagaatattggcaccaccaaggaccggcgtctgctggagctggagctgaacacctgggtgcggagcctggtgaccgaaatgaccgaccccggcgacgagctgcaggcctcccatccgctgcgcgatgccagcgtggtggtggaagatatcgaggataacccgggcttcttccgcgtgaagctgtacgcggtgccgcacttccaggtcgaggggatggacgtcaatctgtcgctggttagccagatgcccaaagcaaaagcataa

SEQ ID NO: 234323 - DNA, 438 bp, Klebsiella pneumoniae
atgaataacaaactctttgaaacgattattgcaaagttaaatttttcgctaattaagaaaacaccggtaattttacaatcagaatcagcggaatgtggtatcgccagcctggcaatgatctgcggacactatggattagatatagacttattcaatttccgccaacgcttcggcagcccatcgcaaggcgcttcactgctgcatttgagcaaaaccgccgagcgtgctggccttaaaaatcgcgcgctttcattagatttagatgaaataaaacagcttaagctcccttgtattctccactggggaatgaatcattatgtcgttctaacgaaagtacgaaaatctagctatgttgtgcatgatcctgctttgggtaaacgtataattggtttgcaggagatgtctaataatttcaccggcgtggctctggaactttga

SEQ ID NO: 234324 - DNA, 819 bp, Klebsiella pneumoniae
atggcgatctattccctctggcagtacgcgctgatcgtccacatcattacggtgctgatcattgccatcctgcgggtgcgtgctgaaaaccgccagctggagcagaagcagcgcctggcgcgcgaactgcagattgagcgtgaagccagcttccaccagcggcagtttatgggcatggtggcgcacgaattccgcaccccgctggcggtgatccaggctgcgctggagaatcttcgcctctcggcggcctcgaccagccaggaggcgcgcttcgatcgcatcggccgcgccgccacccgcctggtgcagctcaccgataactgccttgccgacgcccggctcgcctcccacgatctgcacgtcgagcgccagcagaccgccctgctaacggtgatcaacatggccgcctcggtggtggccatctcccatgatcactacctgaacatccgccagcacggcgcggtggaaagcccgcagctgcaggccgatgccggcctgctgtgcatcgccatcgctaatctgctggataacgccgtcaagtattcgccccccggtgaaatcgccatcgatattcattccgatgccgggcaaacggagctacgcattcgcgaccacggcccgggactccccgccggacaggcggaactgatctttgagcgctaccgccgcggcgagcacacatcgccggtgccaggcggcaccggtctcggactgtatgttgcgcgtcagatagtgcaggctcatgatggcaaactgtggctggccgagcatggcccggacggctgcacctttattctcaccctccccacggttgcttaa

SEQ ID NO: 234325 - DNA, 846 bp, Klebsiella pneumoniae
atgattaaaaaattcaaattatctccatgctgtttagctcttataagtatcggtgtgttagccatatcttctgagctatatgcaagagaattttttaaccccgcatttcttaccgatctaaacggttcagacgtgagtccggacctttcggcttttgaagtggcaaattctcaggcccctgggaaatatcgggttgacattatcatcaatggtaccgtcgtcgataccaaagatgttgatttcttttctacggcagaacaaaaagcaagctatcttaacgaggcgggagaagaacttaaactatacccatgcttatcaacagaggaattaagtggttatggtattaaggtaaaagcaatctcttcattaaaaacaaacgctaatggttgcgtcattatcagttccattccagaagcctctgttgattttaactttaacttacagaaacttgagttaagtgttccgcaggccgcagtatcctcaacggttcgtgggtatgtttcacctgatgaatttgacaatggtattaacgcgttctatttaaattatagatataatggaaccagtagctacgcacgagataacggatcatcagatcaagagaaccatagtgtcaacttactaccaggcttaaatatcggaccatggcgtattaaaaactacaccacgtggaataaagatagttatgataatgatagcaatggtaaatgggatactatttatacctatgctgaacgaaatattatttcacttaaaagcctgttaacattgggtgaaagcacttcagatgctgatatttttgatagtgtgccatatcgtggtgcgcaattaaactcagacgattag

SEQ ID NO: 234326 - DNA, 3639 bp, Klebsiella pneumoniae; identical to SEQ ID NO: 134322

SEQ ID NO: 234327 - DNA, 1695 bp, Klebsiella pneumoniae
atgttcgttgtggcggggcaaaatacatcaataattccctttcccgagcgcctgcaaaaagccatgggtgagttacgggtacattcggccacagatccgcgacaagtgttactgtccgcactttccccggacacaataaacgcattagtcgtacgcgctgatacgccacgcttatgtacctttatgggtactttggtcggcatggatattcctgacagtatcagggcggcgctaagcaatttaaggcctgattgtgatgcgatcaacctcagcaacgccgcagagttactgggcgctgcgcgacttatcgatccacaaattgccatattctggggagcggatgatgttcgtgaacggttattggcacgcctcacagctgaaattccgtggacggataaaattgaggttgaagcgcccaccggaggtcgtttgctgcgtagtcgcatttttcacgtcgcaccttctgtccagagcaatgtgcatgaagaagtcgtgcaactttgtgagctattgcttggactagatcctactgcagcagtagtcgccgttgatgccattgctgccgataaccttccgtcaggtctgtcggaatacgctgttgctaccaaacgcatacatcgagaaaacctacccaccaaggctctgccagaatggaataagcgctggattgccgcagcggcaaaactggttggaacagaaagttactccgcttacctgcagcgtgcgtacgctttgctggaacagcttatgccagtattggagcgtattgtagactgtgtactacggggcaaggtaccaccaccaaaaattcttgatcgtttcggtgaggtttttgagggggcttgtaacctgacttcaccacaggaaggtctttcaactggcgaggcgccggagcagcatgttaaaccgttacaaaatttactacattcctgctcggctgatttggtcaggcgctttaaccaattaccagaaggttatggtgcattcgtcatatggacaggggatctgctaaaaaatgtctgggaagcacgcagcgaaccgtggtcaatcgtggggatggaccctgagccattattgatgcggttggaaaatatccttgcctctttgcggttgttagccgccgaggctggtagcgaatcttcccatccaacaaagatgtggatagcgaaaacccgcaatgctcagcttggaaatgcactgcgtctggctaaagttgaagctgaacagcagttgaaaacgcgttccggcaggtacttacgccaaaccgaagccagactgcaggcatccggcatcgaattaacgctttatactcgtccggattggaagtccctcctgccttggccaaatgtagaacttcttgcagtggtcgacctggaaacgcctgctgattggctgatctggttcaatgagcatgcagcgcagattcgtgctgacgttggtgaaagtcgccagatgtggattatcccacgcatcgctggatttgcgatttcaaaattaacagtcggcggtatttccagtttcttttcctcgccacatcgtgttgatgattggcttgatacgctatccattcctcagctagacgatgccttggtgaagtggtttactgaatttggccacctgaacagaggtgatatgctcacctcagaacaacacaggtgtcataatgaaaaaaagaaatttcagcgcagagtttaa

SEQ ID NO: 234328 - DNA, 4350 bp, Klebsiella pneumoniae
atgaagacattactaacatcacggtgtattaatcaacggggagcaggtcacagcttccgtctatttgtgctctccaaaccaaagataacactgggcagtatagatgaaacctattcacaacatatttatcgtgaattagctgaactatctcgtcatgcaccagagcattcattacagtcctggctaacactgcgctatctcgcccggtcaggagagcgtgatgaacttctggcgctcgcaacgccagcatattttcgacaccagtttgcacatggacgttcctgttcagagattgatgcggacatccacttggctctgattgctgcgcgttccacgtatgatggtgtaattgccacacggttgctactttgccgtgatgagatatccagacgaactcaagcactggagcatgccaatgaacttccgcgcgcgatgttaaaagttggcgatattgatgcggcgatctctttcgtccaggactttcccaatgcgggctatgaagttgttgacctgcttttggaacagggtgattttgaccgcgcgaaagaactgtttgagcaccttgaaccattgtctcaattgcatacccccagattcgagcactatggggattcgcataatctacaagaattcaaaaaatgggcaaaacgagtttttcacttccgcgacgctgagcaaattaagcaggcaatagactatttgaccgttgaggggttaaaacacgccacaagtttatcaacagatgaaaatattacctctattcgcgaacagttaaagtggacagtagtcgaggcaattgttaattggcaagcagacgttaatattcaggatacctgcaatcagtatggcattcatgagcaagagataccggttttgatgactcaggctggatttactgctaaagacagaggaaatagtaccttagcattggaattatttaagactgtcatggagttgcctgattttaatgatgtttctaatggcgggcgaagatcgattgcattattttatgccacctcgggttgcaccgatctggcttcaatattattcgaaaacctttttgcacctgcaatttcaatgggagacaatgaattagaatcaacaaaagcactgacgcttgcagccatggaacatgcgcaactttgcgttttgctcggaaaatccctgcccgacgtagtcacctccacacacgctatcttacggccgctgcagacacatgcttcagaaacgggacgcttgttggggctgtccataataaatgcatcatgcattccttctggaaatattcaaatggtctgtcgcatggtgatgagatatgtaatgcaactcaacagccattctggaaacgatacctatcaggctcaattggcattgacagctacatcaccactgatttgtacattaattaaaatttctgcgctgtgtggtaaggtcgaatataattcagtactaaatgaaattgataatgtaatgcctgctttaatattaaaaggcaatacactactccggcgtgaaatagcattggcaatgtatcaggctgacggtgaccgtgaaagggcggccgccagacttgagcctatggtaaacgagttggtagaaaatacacctagcgaacaactcgagaccctgtcagttctggcaaacagctttgctgcaattggcgatgttgatcgggcactaaacttgcttgcttcgatacatgaccactgtttaggctacgctctggcagcgcgtaaggaccctttatactctgtttggaaagacatattgattttggccaatgtggcagacccagaacaccgtgctcaacgaataggtcagttgatacaacaggttgatggtatgaaggaaaccgagggggcatctgccgcgtatcgtttgacagaagtgttgatcaatgaagcaatgcgtataaatgcgcacagtggttatatcgtggcacagaaactcagcaactgggggctgattccatggccaaaccgggtaaatgaactgattattggtatgctagatcgccgtcctgaaatggtgtttctctgtacaccaatttggtgcggactatgccttccattctacattgaaccctattatcgtgaccctactcatataggcaattatattgacgttgctgcaaatgcagcggggccttcatcaattgccaaactggtatcaattctattaccggcaatccaagttcatagtcgagcccacgagcgcctcacgctaataaatcgcctgagcaaagcggcattaagacacggttatactgataatcaacttgataatgccattactcgatggacttcagaggcccccgaagcccgccgctcctacacgccacaaaagtacgacgaggcttcaacccttgacgaacttcaacaggcatttgaatcaaatgaatcagatcctgagtatcatgcgccttatcgtttttgtgagcttgcagagtccgccgcattagacaaggtggtgcaaatgtatgagcgctggcattgcctgcagtcggatgcacgttgtcgttttttggttgcagagcggctagttaatgcgggggacacgacgttagccagaaaattagttgatgattacgataccagtagtgatcgggagatgtcatggagccaatggttaggaggaaatcgattccgtctcttccacgcgcgtaagctactcgatggagcagcaattcatcatgaagcatatgaagacttcatcagttcaattgtggctgggaaagagagcaccatgtcattgctaacagatatggcagacattcttcctgtgatctgtgagtcgccagactggcccgccgtctggtctatcctggcagagcagatgtctttcactcgcgaacaccgtattggtgaacttttcgaatttggaaatgaaaatatgaccgacgaagagttacttgcggaattgctccatttttcattacgattgcctatcaccgaagctcgacgacattcagagaaaactgcactaattctggcggtacattcaacaggagggcaaatcgtatttgagaacaccataacacgactcctgaccggcacccttgatgaaccattccaggcattgcaaattttgcttttgctaaaacagaaccactttgctgctaaatttggtgatttagtctctggccttacgaatcatcgtgatgtagctgttgctgaagctgcgtgcttgttagcacaatattggcagctacctgtatcgattgattttcatccgttgccgttgacctatcgattggcactcgacggagaccctgatcatgaaaatgctctgttagaccctgtgagtggggcaatgcgtattgaagtcgacttaggatggacacaaatgcttcgtcccgttgcacggagacttgcagagttggctgattgtgaggaaatgaacatacgccagcgtgccgcaacgtttattcagcaatggggagggctggcagcctttggtcctggagcaacaaaaaaaatcgaatctcagttacgcacactctcaatgcaaatcacctatcttaagccccatgcttacattggcatactggcacttcgtcatgtcgctggagagctgagcttggcaggcttgctctcgccaagggataaaccatcgctactggaacaaatggatgcagtacttccgccaactcctcgccctgaaatgcaaatccggccaactggcattaggcgaccgcttaaagtcaaggatgccccgtggagtgaagctgaagaaatgtggacaaatttggttgacgaggatgttaaaccctggatagatcgtgccgacgaattcgtaatagccgaggtttcacaattcaaaatgcatgatacccggcgtgctgaatatcaggtctatcgtattagcgcacctcaaattcatatttctgttgccaaattcatggcatggtatcaaagtttgcccgctgtcgtttggctgggtaagatgatcccactcgacgaagacctcgcaccgacaatagtcagacgtgtagtaagctccatcgggacaatgtcttcgccgggatatgccattacattatgtcctaatatccagatgcttctgggatggcatgaatccagcgagatgcctaatatttataccgacaaggactcaacaatcgtagcaagattagtgaactggcgagacgctgggccagtggatattgatgatgattatatatggggggaaggttgctatctgacgctttccaaagcaggcctgatacaaatcaagactctgttcggcgaattcaccgtgcgtaatttcgcaagcagggctgttcggcaattgcgacaaggcgaagcgcaaatgataaagacagctcagaatcagttcccgataccgtag

SEQ ID NO: 234329 - DNA, 1701 bp, Klebsiella pneumoniae
atggacgctatctttgacagagtcgtaagggaattttttccaaatacaaccatacctttttggaaaaaatggctgttcaggacggcatttggcaataaggtattttctcgcttaatatataacgagcgactcgttaataaaaatggggtcgagtgggttaatgcagttgttgaactccttgagttgaaatgtgaaagcgaacaccaccaatttaacaacatacctgagcatggggctacggttgttatttcaaatcatccgacggttatcgatggacttagcttaatacatacggtctcccgagtcaggagtgatataaaaataatagccaatcacgttttgccaattatattcccccaggtatcggaacttaccattggaattgagaatatggccggtaagatgagccataaaaaattccgcgagatgaacgatcacctgcgaaaaggaggcgtattgattatatgtcctgcgggtaagctggctaactggtctctttccgggttacaggagcataagtggaaccccggttttttacagcttgctatgagaaataatgcagcattggtaccaattcatattacgggagcaaacagtaagatttattatcttactgcaacattctggcggcaactgtcgaatatgatggttattcgtgaagctctccgccatcatggcaagaccatgaaaatcaatataggacagcaaatagccttatcctcgtttaaagaatacaataaagatctttctgccgcggcaaatgtatgtttgacgcacctccagagtatagcgaagaatggcccggctatgttagatacgattgcgccgcaagaattagaaccaggtaaaaaggagctaattagcgcaatagaggagtgcgaaatattaaggcagtttgaagacggtagaaaactagtgatatatcgctgtaatactaaccgaacctcacctattattgatgagttagggcgcttacgcgaacgctgttatcgcgatattggtgccggaactggtaacgaccgagataacgatgtttttgatgaaagttattatcatatcattttgtgggatccttctgatgtggaaatcctgggagcatatcgtgttatgcccgttggcgagcagctggcccaacatggtgtaacaggcctctatagcaacagcttgtttaaataccatgataatgcctattcctgtttagagaagtgtgtggaaattggccgcgactttattcagaaaccttatcaaaaaagtaaggtgcttgattatttatggcaagggatatttgactttataaaaagatatccggactataaatacttgctgggtgtgctgaccattcctggagcttttcctgaaaaagtacagaaactcatcatcagtttctataatatatattttccctcgacagctgatttttgtacgccgatagcattgttcactgccgaaaatgtacaggatgatactccattttgtggcgaagattttagagcagactggagcatgcttaatcacctgctgagagaagaaggttatgaacttccctggccttttaaacagagtgctaaatggttctccccgggcggatcgtcgattcttgcattcacaaaagattattcttttaattcgatagctgggttaaatctgagctctatagataaattgaatgaaagctacgttaagcattatttaagagattaa

SEQ ID NO: 234330 - DNA, 231 bp, Klebsiella pneumoniae
atgtcaccaggattcagaaatgttctccgtctcgcccgcattcccgtcgacagcagtgaaccggtgcgcagaaaatttggcagccggctgattggcattgtgacggtatgtctgcttccgcttctggttttcgacgttccgcagtgggttttcattttgtcgcagatcatctggggggcgggcgtctatattggcctgtctgtggccggggataaatccctgaaccgctga

SEQ ID NO: 234331 - DNA, 402 bp, Klebsiella pneumoniae
atggccagagtgtctattagtgaggctgcccgactgacgggtaagagtagaacaacactgcacaggttaattaaagcaggtgacctgtccacctgtagcggtgaacgtaatgcaaaaatggtagatacttcagagcttttacgtgtctttggcccctttgaacaactgaagggtgaacaccattctggacaggtctctgaacagcgtgatacagcctctgctgaccagagtgaacaggtgattcgtcatctgaaacaggagattgaacacctgaacaccttacttttgtccaaggattcgcacattgacagcctgaaacaggccatgctccttcttgaaaatcaccaggcaaaattaactgaatccccggcgccatggtggaaattctggaaaaaatcctga

SEQ ID NO: 234332 - DNA, 351 bp, Klebsiella pneumoniae
gtgaaaaaagagatctcccgcaacccctctttcacaccttcgcctaagctgcgagcacatctgaactcccacagggaaggggtgactgaacggctgaataatatctttgatcgctatgcgcatctggttcgcgcctgtgcccttcctctcgataaagacgaaacacaggttctgcttaatgtgctgaatggctccgttgtcgaacccgcctttattgaatatctggctcaggaaattcgggactcggatgattatctggaagggatacccgcagctaaatcactgtacgaaaagtgtcagtcagcgacctatccgcaattgctggccaccgtcgaacggctcaatcgctga

SEQ ID NO: 234333 - DNA, 273 bp, Klebsiella pneumoniae; identical to SEQ ID NO: 219271

SEQ ID NO: 234334 - DNA, 1926 bp, Klebsiella pneumoniae
atgttaccagatagtcagccatcgtcagcgccggaaatggcattgttacaatcgaggatgattctggggaaaactgtagatgacctcaatttgcaagcgcaaattacgcaaaattatatccctataattggccgaggattagcaaagttatcaggggataaaatcggtgatatacaaatatcacacttttttatgcctaaagaatggggggcggaagataacaatgaatttacgctaaccgttattgataataataattataagattaccaataaactcgtggatttacaggggcgagtaggagagctgttagataaagatggcctcttattaaatattagtaatattgatgctgaaccagggacgacctttacaatacgtcatttgacaaaactgcaagcaataggtcaattgcaaaaatcgtttaccgtggcagatatgggtaaagatagcgggattatgcagttaacctatgaagatgctaatccagaattagccgcacgagtactacagagtataagtaataattatttggcacaaaatgttgctcgacaggcagctcaagatgaaaaaagtttagagtttttaaatagtcaacttccgaaggtaagaacagatttagatcattctgaggatttattgaatgattatcgaagaaagaaagattctgttgatttatcaatggaggctaaatcagtacttgatcaaattgtaaatgttgataaccagttgaatgagttgacatttagagaagctgaaatatcgcagttgtatactaaagaacatccaacctatagggcacttattgaaaaaagaaaaacattacgtaatgaacgggagaagttagataataaagtttctgctatgccagaaactcaacaggaagtacttagactaagtcgtgatgtagagtcaggtcaggcgatatatatgcaactgctaaacagacagcaggagttaaatatcgccaagtcgagtgttattggtaatgtaagaattattgataatgctgtaactcaaccaaaacctataaaaccaaacgctattttggctgtttttattggtatagctttaggcattgttttttccttagcatacgtattagtgaaagtgtttcttcgcagagggattgagtctccggatcaacttgaagagcttggagttaatgtttatgccagtattcctgtatcagaaacgcttgccaaaatatctttgaggaaagggaaaacaagcattggacaggggcccttggcaattgaaaatcctgtcgatttagcaattgaagccatccgtggattgagaacaagtttgcattttgcgatgatggaatcaagaaataatgtattaatgatttctggcgctactcccggagtaggtaaaacttttgtcagttcaaacttggcaataattattgcggtaactggaaagaaagtactatttatagatgctgatatgcgcagaggctatgtccataaattattttcccaacgaaatgataaagggctttccacgtatctttccggcaaaactgcacttagcgaagttgtaaaacatcaggtatttgaaaatgttgatttcattacccgcggtgaagcaccgccaaatcctgctgaactgctaatgcataaccgttttgaaaaaatgatagagtgggccaacgaaaactatgatttaatcatcatagataccccgccgattctagcggttacagatccggtcatcattggtaaatatgcgggtacatcgcttcttatctcacgctttgaacaaaatacaatcagggaggtagaagtgagcataaaacgctttgaacaaaatgggattactattaaaggatgtatccttaatggtatgcataaaaaagctagtagttattatggttatgggtataaccattatggctatgactatacgggaaaagaataa

SEQ ID NO: 234335 - DNA, 642 bp, Klebsiella pneumoniae
atgatatcggtaataaaggacctatttagtaaccaagtggtttccgcagtcattcttactatcattggagcgattacaaaaaagtatattcagtttcatcgcagagactttttttcacgctcatcctccgagcagataaaagcagtcgaatggcttagaacctcttctgtacccatctccgatccgttagcaaaggcggaacagcagttccgcctacagtcgttcggactgcatagagattggcatttatcttataaaatcatatgcttgagttccgattatgcacagtcattaattccgtccttgaaggcagtcttgcgttatcagggcatgtacacaattactaacgggaatatataccctcataaattccataagtggataataccttttgtgttaatatcgttgctattatatatcggtgctgagatatacagaggttcttcacagagtgatggtatagagattttgaaatctctatacgtcgttattgtggcttttatagtatggtgttgggtcgctgcttgtgctctgagagtatcaagcatcagtaaaaagctcaatgcctatatcccacccgcaaacgattttaaatccaagacatacgatttcagttcaatactcaataatagatatccctag

SEQ ID NO: 234336 - DNA, 228 bp, Klebsiella pneumoniae
atggccagagtgtctattagtgaagcggcacggcttgttaaggttagccgtcccacaatttacaagatgattaacagtgggaagttaagttacacctctgttgtaaagcacgggaaggctattaaagttattgatacttcagagcttattagagtgtttggttctcttgatggtgtcatcgatactgtaaaatatgtgacctgctccccgttgattaatacaccgtga

SEQ ID NO: 234337 - DNA, 1125 bp, Klebsiella pneumoniae
atgaccgtgaagaagtatactgcaatcactttagacaccactgtttttgatgggaacggattgaggctggacaaaggcttacttgctagcatggttcaattcaaaactgccccgactacttttgttttgactgatgtagttgtcaacgaaattaccagtcatattgaagaaagaataaaaaagagcaaactttccctcgaaagatcattggatagtattagagagcacaatattgttgaaagtgcagatgtagaatctctaaagaataagctggggtcggcaaaagattgtatagaattagctaaagaaaaggtttcgcaatttattgagtcaactggtgctataattcttgatacaaacgaatatgtaacagtaaaagaccttacgactagttatttttctcaagaaccgccatttgcagctgtaggtgagaagcaaaaagaattccctgatgcaatttcgttaatcgcattgaacaattgggccggaaaaactggtcaggtggtttacgcgatatctggtgataaggattgggcttcttactgtaaatcgaaagaacttattgattgttatgaagatctttctgaggctttaaatcacttcaaccgtgcgcacaaaccctatgcggtcgttagtaacttagaatctcgtatcgcttctggcaactgtctatcgttcatgacccagttgtccggtcatttaggctacgtctttgatggtgtggatgttatacaagaagctgactcttcattttattgggagcctgaaggatgtgaggtacaatttataaatctgaactctattgatgataacttgagggttatcagagatactgaagatagtattgttattgaagccacattgaatatctcattggaaataaatggtatgttctcattatcccattttgattcaatagatcgtgattatgtcagtatgggctctgtggaaagaagtgtcagtaaagattttgatattaatatgctgattacattaagcggtgattttgatgaggccaaagataatgttgatgccttggaaattgatagtgttgaaatgattgatggtcttgggccagtatattttggtgagttggaaatggattacgaacctgactatgagtaa

SEQ ID NO: 234338 - DNA, 579 bp, Klebsiella pneumoniae
atgagaatagattctttaggatggagcaacgttgatgtactggatcgcatctgcgaggcttacggatttacacagaaaactcagctagctaaccatttcgacattgcatcgagctccctctctaacagatatacccgtggcgctatttcgtatgactttgcgacacattgcgctcttgaaacaggggctaatctgcgctggttacttacgggagaggggcaaccgttcacatcgtctatagtggccgaagactcaaagagcatcgaattattcacattaagtgaagaaacactcaaaagtgatggttctcttaaaatcgatgctcattttttcacaaagccgattgctgatgcgatggctgtaaaagcggaaggaaaactccattttattgataagcaagcatcactttctgatggcctgtggttggtagacatagaaggtggaatcagcattcgagaattatcaaagcttccgggcagaaaattgcacgttaccggtggaaaagttccctttgaatgcggcatcgatgacataaaagtagtgggtcgcgtcgtgggtgtatacagcgaggttaactaa

SEQ ID NO: 234339 - DNA, 264 bp, Klebsiella pneumoniae
atggcttctgaaatcgcaatcatcaaagtgcctgcccccatcgttactctgcaacagtttgcagaactagagggggtttcataccgcaccgcgcgtcgctggactaccggagataacccacgtttacctatcgaacctcgcgttatccgtaagggctgtaaacgtgctggcggtcaagttcgtatctactacgcccgctggaaagaggatcaaatgcgtaaggcgttgggtcattcccgttttcaacttgtcatcggtgcgtaa

SEQ ID NO: 234340 - DNA, 1257 bp, Klebsiella pneumoniae
atggacgagttagacaaccaagaaagcaatattaatgccgcaattgactataggcaacaaatacaatcgagacacaacaaaaatgtgattataaataaagaaatattagttggaggatgcgagcacgtaagaaaagtatttccaaactcatttgataacgatgatttcccaatggctctcctaagagactttttcgtagaaaaagatataaaagaaagtctaagcattcaagagattgaagaaataatcaataaagaaataaaagatgagagtcatccattacgagttttgtttagcgacagggatactgtttttgatgatttcattagtactggtgcaacaagagactacgtcaatgaaataaatagagcttgtgagagactgggttttgatctccgggatggcgtaacctgtggagtaacccatgaaaaaataattcaagcagaacaacaaactgtctttcttacagatgctagtataattaatattacgagtaacttatatcttttagctcatcgagcatcaaaactccttgctaaaagcattgcttttgaagaggtcaaggggaatcaatatagactttcaaataatctaaatgattataaaaagaaattattagaaaatacagaactccaaaggcaatgggattttttcttcgccgatcatgcattaaacaataaaaatccagatataggtgagattgtctatgttggcgacatacatattcaaaactgttattttgacatgaaagaatccatgctgttatttgtgattggacatgagttcgggcatcatatcgcaaaacattcctcgatggaaattgggaaacaactccctggtgataatttttcaatggagcatgaggcagatataattgcttcaattttaaccatggatataggaagaaagaatgatgattttaacttttttgctgctgcaaacctaggtgcattttgcatcctcaaaatactagattttaattcaagagcgtatgagatacttaacagaaaccaaaatagcggtaagaaagatctttataatgaccaccctccaattatagatcgcctaggtatgattagagcatatataaagaactacgaatacgatgaaacaagtggtaacgtcattctaagcctgattgatttgtttaatgatttaatggattttatttggtcaaactcatttagatttattaacactatgaaagaagcgggtatgaagtcaactgaacaaaacgaaaaacaatggctaccatga

SEQ ID NO: 234341 - DNA, 2265 bp, Klebsiella pneumoniae
atgaccaatattatcgaaactcctaaatggggagaggttccacaaattgcccgtaccgataaggttgaaggggggcgaggtggcgcggcaaatattcaggctcaggaactcgccaaccgcacgttactgttaatgcaaatgctggaaggttattccgtaggtgaaaaaccttacgataacgaatcagaggcgcaggcggatatttatagcggtttaattaaaccggatgccatctttaccgtgcgcactgatgatgctgattactggctggatgaatataaaaatattaacgggattgccacacctaccgggaagaagttacccagcgataaaatggtgcaggaaattaaaaacaactttttccaggctcgtcatgatggcgatgtgatgctggattttgttgatgatgactggttttcttttttccgtgtcatggcaagcggagcattcggagcgattaactgcatgattgccccggatggtctgtatgtaaaggatatggaaatctctcacgaagagggggagccgggactgatttaccgtgacccggacgggtttacagtgacgattatcgggccggaaggcatcggtcagcgtccgggtacactgaacggcggcggcaaattccacaccgaaaccaccgatggagcatggctgcgcctggaagatgtggacggattttattctgatgtggctgaccagtccgggaagccggccccgcacgcactgagtggtgacggtaaatttacgacgaaagccggcggcacgggatggctgaaccttgaggatgaggaagggtttttcaaggctctgacggacgagaaaggcgaactcatcggggtgaaagaaagcccggatgaaacctttgacctcaccgccgccgacgcacaaaacaaggcgtattcgcaaaacgtccgcgcccgctataacgcggctgtgcagcgactggtcagtgggctgaatcacctgattatctacagtcaaagtctcggcacgcagcaggagggatggcccgcactgagcaaagcggcgatcgaggaatacgataacctgatgctgggtaattccattcgcccggccagccggactaatgcggcattttccccgctgggcggcgctgcgcttaaaccattgcgggctgttgtccagtccggcaccggtaatgagctgatgacggatgcgcaggttgctgcccttgctccgggggcaggcaatgaaggcgagggcggcgtggcgatggctaacgcgctgcgtcgcctgtggttacagcgtaattgtctggagcgtgacccgacacggcgctttgtcctgtccagcactggcgtcaacggacgcagcattgagcagttatcaaaaggggcatcccctgagatttaccagcgcccgttacaggccgtgcagcaggtgaaagcgctggctgaccagctcggcgtttcgtattccatcgcggccattctctggatccagggcgagtggaattacctgaaaatgaacggctcaaacgacaaggcgacgtataagctcaatctcggaaaactgtacaacgacatgattgcggatatggcagtcggtattgccggacaaaaagcccctccagccttgtttatgtatcagaccggcgcaggatatacccgggatgatgcggatttgtcgatcgggatggcgcagtgggagttttgccaggaaaacgaaaacgcgtatatggttggccctgtctatccctacccggacaaaggcggtcacctggggccgaacggctaccgctggtttgatatgaaagtcgctcaggttaagcacctggtattaaatgaggggcaaggatgggagccgctggggccgataaaaatcatcatcatcggtcgtgaaatatacgtgttttatcacgtgccgtcaccgccgctggtattcaggcagacctatgtcaaatacaccgcgaccatgtacgccgataaagggtttcgggtgactgacagcgccgggacggtggcaataaccggggttgagattgtggcagacaccattatcaaaattaccttgggccgtgatatcggcgggggcgcgaaactctggtatgccgaccagaccgcgcacactggaaacggcaacgtttttgacagcgataattttaatgcgctggatgattttatttttgaagcaggaacgggccagtatgaaacggaaaatattcctgagctggttggcaagccatacccgctaaataacgcctcagtgcagttttgtctgaacattccttacggagagtaa

SEQ ID NO: 234342 - DNA, 738 bp, Klebsiella pneumoniae
atggttatggttattaaatctaacgtcccgtcgaatactatcgcaaacccggacggatggaatccgccgtttaatacggatggtatgttatatgtgggtatctacgggcgtggcattgctaagaatttcgcaaaaaatgggggtgatgctgtcgtaagtggttcgcctgttgtgaataatcattttgcaaaatttaccgcaaatgattttattgatacgggaattgaaaataccaaacaggcaaccttaatcaccatcgcaaaaaggaaggttgaggcacgtcgtcaatttttaatttcgagctacaagggtgataaagcgtttggccgctcggtgctgttcggatcgggggccggtgcattaaccatgtattcgcattacgctggggtgaatgcaagtggcgaagagtcgaatgtttctttttcgacgtattttgtgccatcacttctggatggaagtccggcatttatttacggaaaggataccgggaaagtgctcacaatcgcggatatgacaggcaatacacgcaacggcgccaccgcaacggctacgatggaatcctttgtcacgccggggctgacgtacatgattgggcgcagccacaacaacgcggaaattccggccgataatgaaatcgcggccgcgctgatttttgaccgggcactatctgatgccgaaatagcggcgatttatgcctatttccagggctattttgcccgtcgcggtatcagcatttaa

SEQ ID NO: 234343 - DNA, 204 bp, Klebsiella pneumoniae
atgcactacttcatttatccgtcaacgtccaaaatcgctgagggtgaggcagttttactggaaataaccagtaaggaacgggatgttcagttattcgcagagtttgactgcgaggatattctggacgttgttttaaccgggcaggctgccttgtttagcgctgggtttgataccccttgtacagttctgaccctggttgattaa

SEQ ID NO: 234344 - DNA, 270 bp, Klebsiella pneumoniae
atgagcaagtcattcatcgtaattatccggcgagcctggtgtaacgaaggtgggcacggtatcgaatattcatccgacctcatccactacgagacccgcaatggagccatatcacacggtttccgtactgtagatagcgacgatttcaacatcggagttatcgagcgcggccatctgatttcgtttgactggatggataaaccggttggtgaaagcgaggacacgctggcacagattgccgagctaatcggtctggaggatgcagcatga

SEQ ID NO: 234345 - DNA, 282 bp, Klebsiella pneumoniae
atggctgagttacgcgcaggtgggctggcaataattattcggtctcgtttccctgagaatgttggaaaaactgtcaggctggtacgatttataggcgaggtgcatcagtccaccgggtatggaatttattgggaggtgatagctctggcaggtctggcagggacgcgaaagcgtgtcaaacctggctcagccggtatggcacagtctaaaaacctgatgccgatcgacggcgacgacttcagcaatgaagacgagcgccagaaggagcgggagcatgcctaa

SEQ ID NO: 234346 - DNA, 138 bp, Klebsiella pneumoniae
atgcttttgctcttcattctcctgtcgatatggctctgtcgactgttggagaagcctggctggtttaagatcagccatattatctcaaagctgacgctcgaagatgagcatccggcacgcagtaaggggctgcgctga

SEQ ID NO: 234347 - DNA, 603 bp, Klebsiella pneumoniae
atgttcgccatcatctgcgggatagcttttttctcggtccatgagtcaccggtaaaaccgacctttaattttgatgtaactgataatttgtattttgatttcgccgttctccatcgccacgcggtccttgcatccgtatatttaagtggcttctggaaaacaccagaaagtgctgcagagataatatctatcagggatgatcccaaccccctcgcaacaaaatcaccattttccagccaaagcgctacgtttccatcaatatcctggaccaaaggtataagggaaggagcgacttcctcagatggaagcattgcaactttctcaggcaaaattgttcccgatgtcgcaactttatcagaggtatcatcagaaattccctttactgccagatctccattttccagccaaatagaaacttttccttccgcatcctgtacaactggaaccagttggggggttaccgattccgaaggtaccatttcagaaattcccgttacaatgctgctggcagcagcagatttatccgcaaattcacgcgatacccctttgccatttaaatctccgtcttcaagccacaaggccaccttccctaccgagtcctga

SEQ ID NO: 234348 - DNA, 243 bp, Klebsiella pneumoniae; identical to SEQ ID NO: 119133

SEQ ID NO: 234349 - DNA, 204 bp, Klebsiella pneumoniae
atggtaactatcacaaaaggcgtccaaacgtttgacgggaaaatccccgttacactgttagtcgacgacgtcgaaacagccaatactttagtaaaaatggcgaaagatgccaacgtcactgttattgaacaagacgaagacttaaataaatctacaatcaatccggtgttcaaacatcttgatcggattgcatctaataaataa

SEQ ID NO: 234350 - DNA, 1470 bp, Klebsiella pneumoniae
atgcaaaaaacggaacaatcactaaaactaaaaatcgttaacgctatctgtggcagtggcaagagttacaaactcaaacaatatataaaaaccaatcctgataaaaaggcgctgatcgccgtcccaactcacgatttagcttctcaaacacaatcagatcttcagaaactcggcatccctgcatatcataatcaggtagataagggcgagagcgcaacacgatcattaataaacgcgctggatgatgattttgggcgaaacgttgttattgtgactcacgaatgtttgctacatttttgtctatatgcctaccgtgatgagaaaacccagaataaattaagtctgtttgacatctacattgatgagattccctctgcctggtacggggctgagattgattataaaaatgaggaatatcgaaactccaacttcccatttctcggatggttagaggaacgggacggtctacgttttgttcgtgatgaggatagagaaaaattcctcgcctattacgattcagaacacgctaatagcaaacttttgaaacaagctctgttctctatgctaacagggcagggaatgctcctggagcaggacaaatattttttctcatttactgctaacccaatcctgtatagcgccctgtgggccaaatcgttcaccgtgttaggcgctaacgttgggattagtgagtttgcctacgctgctaaaaccatcctgaatgcagaaatctcgctggctgatgatgacttgcagcctgatctggtgcgccgtgtccataccgatacaaaacggattgagttaatccctgtgtttagtcagaaatgcaccaaaaaactattgagtgagtattacagcgacatcctgaacgggacacgcagagcactgagggacggttttatctataccagcaacaacgatgagcagtacagcaacggtttctattattcctcacgtgctgacgacgtgttagagagtggtgagcgtgtttcgatggcctcctatggtttgaaccattaccagcacctgcataaagcggcgtttctgggatgtgcaaacctcgacaaaacaacaatcggacattggcgcacatattgcgatctgaatggctgggactggcgggagttagaagagaaacggcaggcagcactgaactatgaaaaggtttatcagtttgtttcccgctgttctgtccgtgtcagagggaacaacaataaacaggtttatatcgtccctgatgtcggatgtgcggaatacctaaaacaacactattttcaagacgctgtgatcaaaccagcgatgataaaagctgaacggaaaaagagagatacatctaaaggagattcgaaacttcagttaatcaagggactattggacgaaggttataaacagagtcagattattgcaatcacaggtttaaaagaaaactcagttaagggatacctaaaaagaatccgaaaagcagcttaa

SEQ ID NO: 234351 - DNA, 192 bp, Klebsiella pneumoniae
atgaaggtaaattttaaatctgaaacttttgatgtgttgattcaggtatctcaagacaaaaaaatccctattacaaaactggtagaaaccattgtgaaccatattgcagcagacaaaaataaaatagataaccttattgaagaggaaaaaaatgcaaaaaacggaacaatcactaaaactaaaaatcgttaa

SEQ ID NO: 234352 - DNA, 174 bp, Klebsiella pneumoniae
atgcgtaaaccaaaatggcaaaccgtagagcaaattgtagccgctctgcatgatggaacagcacgactggcaaacattgaaaacctttattatgcggcgatccgcaacaactatccagaacgtttagaactatttaaaaaggctctggaacaatataagaaggagaaaaaatga

SEQ ID NO: 234353 - DNA, 741 bp, Klebsiella pneumoniae
atgactgagcgcgggatgatttttaacgctgagatggtgcgggccattctcgacggccggaagacgcagaccaggcgggttatgaaggtgcagccggaatccagccagcttggcttgctgcttatcactgactcaaccaagcgtagtgacattggcaaataccactgggcggaatctaacgctactggtaaccatgtgcgttcaaagcttttctcatgcccgtttggcgccgttggggaccgtatctgggtgcgtgagacgtgggcaatcttgggtaacgaagatgtatgctgtatcgactgggaagaaaaactttgcaaagcggatgaacgctcagctgcgaggatttaccgtgccagctgcgagcagagaccaggtaattacggcctgtggtctattcctgatgatgccgactggaagccccataccaaagactatcagtacgaaggtgcatggcgcccatccatccacatgccgcgctgggccagccgcattctgctggaaatcaccaacgtgcgggttgagcggttgaacgctatcagccaggccgacgctattgcagaaggtgccccaccgagtcatccatccatcgactgtgtttcacaggaatacgggttccctgacttctctcgctcatggtttgggcagacgtggcaacacatctacggcgaagagagctgggatgcaaacccctgggtttgggttattgagtttgaacgcgttgaaggcggtgcagcatga

SEQ ID NO: 234354 - DNA, 297 bp, Klebsiella pneumoniae
atgaacccagtaataccctttaacacccttttccgtgccaggctgaagtatcgatattttcttttgatggaagcagtgtgggcaggcattcaccgtaaactgcacaccgttgtgcgttacctgtgccgaatacacgagtgttccactttccattttgtaaagcgcataactttcagattgaatcttgaagtcttcgaactctgcaattttagctttgagcgctacggcttcttcctggagcgttcgtgcaagctcaacgagagatatgcattcgcgctgtacagacgtaagttttga

SEQ ID NO: 234355 - DNA, 417 bp, Klebsiella pneumoniae
atggaaatcaaacacgagcacgttgaaatggtcctgcttgcatgggcttcgaaagttggtcaggcgtttgcggcaaatgctatcgctgaagaatatgcacgtattggcggcgatcaactgcgcctggtgccggggaaaacctggagtaaccagcagaacattttccaccgctggctgaagggtgagacagcacagcagcgtaaaaaaattcgtatgttattacccgcaatattaaccgttttgccaagcgaacttagtgctcggttagttctggctaactccatggaatatcgggcgctacaaatggcaaaagaagccgtgaatgaagcagctgaagcctatgtggctgcaacggtggtcgatgtggttagtcagcttaatggcgtgcctgattttgttccgcaggttttgcactga

SEQ ID NO: 234356 - DNA, 882 bp, Klebsiella pneumoniae
atgaaaccatctgacattattcgcggctttgggcgcccggttgcgtactacccggaactggctaatcatcttggcggggtaagctcgacggttcttttttgccagatgacttactggatggacaagctcacttcggatcttggtgtgcataagacatctgatgagatacagggagaaaccgggttgagctacgaagagcagcgcacagccaggaaaaaacttaaaaaacttggggttctgattgaaacagaaaagcgccttgagcaccggatttatttcaaagtcgacttccagcgtttagatgaaattttaacgcaagtatttgaaaaagccccaaatggggaaagtccatttcgggaaatggggaatgtccattccgggagcttgggaaagtccattccgggaaatggggaaagtccattccgccaggaggggaaagtccattccgatcctacagagattactacagagattactacagagattaaaaacacttgtcaggttgaacctgacgatagcgaggatccggctgaaatagttcttgctcatttcaaccgagtaacccgttccagttaccgggatgggaagaccacgatgggatatatccgtggtcggctagcggatatgtactccgccgatgatttgatgctggtagctgattatgcgacagccaaatggcttaacgatccgaagatgtgtgactacctgcggcccaagacgctttttggtcctgagaacttccaggagtaccaccagaaagcgatgaaatgggccgagtccggcaggccgcagtgtgtcaatggtcgctggctgatgccaggccgggatattaatcacgtttcaacgcctgacaatttcgtaccagcaggttttagggggtag

SEQ ID NO: 234357 - DNA, 741 bp, Klebsiella pneumoniae
atgcaaaacacaggttcgttacttgagcggcttcgccgggttattccggctggtattgagccgaaatttagcagcgctgaagagttgatggcatggcatcgcgaagagggcgccaggcgagcggcggaggttgacaagattaaccagcaagctcgcgcagaaaagattttcggtcgctcaggtattcagaacctacacaggggatgcacgtttgccaattacgaagttattactgccggacagaaacatgcactgacgatggctaaaagctatgcccaaaacttcggctctggtttcgcaagttttgtctttagcggaagtcctggtaccgggaaaaaccatctcgctgcggcaatcgggaatagtctgctgaaagacggacgcacagtgctggtggtgaccgttcctgatctgagcacaagagttagggcctgttatgacgagggtaaatccgagtcggctttactggacgacctgacgcgcgtcgatctgctcgttctcgatgaggttgggatgcagcgggacagcaagagcgaaaaagtgcttctgaatcagattatcgatcgccgccttgcagccatgaagccagtaggcgtcatgacgaacctgaactacgagctcctcacagaaaccctgggagcgcgaattcttgaccgtcttcagatggacggcggcatgtgggtgaactttgactgggacagctaccgctcaaaagtcagccatttacgtattgataaataa

SEQ ID NO: 234358 - DNA, 171 bp, Klebsiella pneumoniae
atggtagaactcggccatgccataaactacgaaccccaaaaagcaatcccgtttgagggcgaacgacacaacgcacttgccgatgctattcaccaggcccggtatgtttctgcaatctggcagcgcctcatcgaaggaaatcaagtgctgcagaaactaactcaaaactga

SEQ ID NO: 234359 - DNA, 285 bp, Klebsiella pneumoniae
atgcatcggcagcaacacgctggtgatggctggcgtaactaccagcccggaaaaactcggcaggaacgtggttatggtcgaccgtgggaaattaaacgggcccgtatcatgaagagggataaatacctttgtcagaactgcaggcgagacggtattgccacgaaagcctcaagtgtcgatcacatcattcctaaagctcatggcggtaccgatgatgactttaatctggagtcattgtgctggacctgccacagcaagaaaacagcaacagagagaacccgatga

SEQ ID NO: 234360 - DNA, 294 bp, Klebsiella pneumoniae
gtgtcgtttgaatacatccctgtctttatcgtgcattcctgtcacgccacaactacgacacacccattacgcgaattcttccaggatcaggatgccatccgcgccatcgccgccggtataagccgtgctggtaaacccgaggtcatacgcgccaccaccaccggagccgggagctgcgccagcaataacggcccgatcgtcacgtgggcgactgataaggaaatcgccaaagaatttgtcgagaccactcttaaagacgcctgggagacggctgacgactggtttgtgcgttga

SEQ ID NO: 234361 - DNA, 465 bp, Klebsiella pneumoniae
atgagcaagctatcgaatggatacattcttcgcgctgtgtggcacgcagtcctaaagcaacttccagttcgcgtaactcttaactatttcggcgatgggaaagttgttggtctttgccgtaatgaacacttctggatgcgctcaagtacggaaatttgcaccacaggccgcaaacactctatagggctacctcttagcgatagccagtccatgaaccgtattaagcgccttgttgacgatggtcgtcttgagcgtgagaaggtgactgggggtgcattttatttctggcttcctgaccgcctgaaccaacccgcctttgagcgttgtcttgagcttatgcgggaagaaggcctcacggagaaagccaccaatatcaccaattacgatgaaatcgtggagagagtgagggaaaaactcatggctgagtttggcgccgtcgatttgaaacaggagcgtgcagcatga

SEQ ID NO: 234362 - DNA, 10104 bp, Klebsiella pneumoniae
atggcaaataacatcattaaagggcgcaaaggtggcagttcaagccaacgtacacctacagaacagccggacgatttacagtctgtagcaaaagccaaaattcttatcgcattgggtgagggtgaatttgcgggtggtttaaccgggaaagatatttatctcgatggtactcctcttgagaatgccgatggttctcaaaacttcagcggagtagcctgggagtttcgtcctggcacgcaggcgcagagttatattcagggtattccaggtaccgagaatgaaattagcgtagggacggaagtttccagccagaccgcctggacccacacgtttacgaatacccagctttctgccgttcgcgtccgcctgaaatggccctccttgatgaagcaggaagacgacggcgatgtggtggggaataccgttaaatacgcaatcgatttacagacggatggcggagcctggcagaccgtactcgagaccgccgtctccggcaaaactacttccgggtatgaacgtagccaccgcatcgatttaccgcaggcaggcagcacctggacgctgcgtcttcgcaagatatcgccggacgcgaacagcgtgaaaatcggcgacgtcatgacgctgcagagctacaccgaggttattgacgcgaagctgcgttacccacacaccgcgctgctgtacatcgaattcgactccagccagttcaatggttccatcccgcaaatctcctgcgagccgcgtgggcgtgttatccgtgtcccggataactacaacccggaaacgcgcgaatataccggcacatggacagggggcttcaaatgggcatggactgataacccggcatggatttattacgacattgttgtctctgatcgtttcggtcttggcgatcgtctgaccagcgcgaatatctccaaatgggcgctctacccgattgcgcagtattgtgatcagttggttcccgatggcaggggcggcgatggcatggagcctcgttatatctgcaatgtctatgttcaggagcgtaacgacgcctacaccgtactgcgcgatttcgctgctattttccgggggatgacctgctggagtggtgagcagattatcgttcaggccgatatgccgcgtgatgtcgatttcaactatacgcgcgcgaatattcttggtagcccgcgatattccagcagcaccagtaaggcccgctacaccaacgcgctggtttcctggtctgatccggataacgcctatgccgatgcgatggagcccgcatttatcccggaactggtttcccgatacagttttaaccagctggaagtcacggccattggttgtacgcggcagagtgaagcccatcgtaaagggttgtgggggatccttaccaacaataaggaccgcatggtcgaaattgatgtcgggctggacggcaggatcccgcagccgggttacatcattgggctgggcgacgaacggttggccgggcgagttaatggtggtcgtatcagcgcggtgaatggacgcgtaatcacgcttgatcgtgatatcgatgcaaaagagggcgaccgcctgcatctgaacctgccatcgggtatttcgcaggcacggaccattcagtcggtaaacggtcgtcggcaggtgacggttacaacggtatacagtgagacaccagaggcggagtgcgtctggatcgtcgaatatactgacctggtgccgcagcagtaccgcgtcattggtgtaaaagacaacaataacggcacgctcaccatcaccggcgtggcacatgacccggataaatttccccgcatcgataccggcgctattatcgaccagcgtccggttagcgtattgccggcgggcaaccagtcacctcctgacgatattgtcatcacatcccgctcggtcgtgaatcaggggatcagcgtcgaaacgatgcaggtcaactggtcagcggtcagcggtgcgatttcctatgaggcgcagtggcgacgaaatgagggaaactggatcagcgtgccacgtaactcaaccacttcgttcgaggttagcggtatttatgccggccgctatctggtgcgtgtccgcgcgatcaatgcggcggagatttcgagcggctgggcgtattccgaagagaagaccctgaccgggaaagttggtgaaccgctgccgccgctggcgttaacgacggcatcactgaccgcgggaattgagatccgctgggagttccctgagggggcggaggatacccagcgcactgagctgcagtacagccctgatcaggacggtaaaggcgcgctgccgctgaccgatttagcgtatcctggtaaaaagtaccagcagatggggctgaagattgccacacagttctggtatcgcgcacgcttgatcgaccgcctcggtaatgcctcgccatggaccggctgggtgcatggaatgtccagcgataacgtcgatgactattaccagcaactcgatgatgcgattaaagacacggatacctacgaagagctaactggcggtattaaagaggtttcagacagcgcgcaggctgctaaggatgccgcacaggctgcacaggtgactgctgacggcgctgtagcaaccaacaagcagcaacagcagcagctgaacgaccagcttgctgatatccggcagaacgcgaaggacatcaccgacgctgcgaacgctggcgccgctaacgccggggctattgctcaggagatccttgatcgtaaggctggcgacatcgccaccgccaataaggcggccagtgacgtcgcggacgcaatcaggaaggcagagactggcgacgccgaagtggctgcgcaggcggcggccaacctgctgacggcgaaaaacgaagtcgaagcgcagatcagcaccacgaacaccacgatgcaggacggcttcgacagcctggcgcagcaaatggcttccctctccgccggcactggcgagcagttcgacagcatcgcgatctggtacttcgacaacgaccctgaaggctgggcatcgaacgacaacaacaccaacctattgccggtggatcaggatggctggatttacccggctggctccacgtctaccatgcgctcgccgaatccgctggcaatcgacggtcagagctataagtacatacggcttcgcatgaagcgcacaggtaatccgacatgggctggcaagctgtactggatcggcgcagaggaaaccggctggtcgaacgaccgctcttttaccataccggcgcctgattttgacccggctaccggggttaccgtcctgtccattcctgatctgctttgggcaacgtccggtaccatccgccggctgcgcctggacttctccaccaaccaggacgccagtaactactacgccgttaactggatggcagtcggccgtccgacacccggcgcatcgcaggcgcagattcaggatctccgcacggccatgaccgctgcggattccgcagaggctgcggaacgtaacacgctggccgttcagcttcgcggcaactatgagggaaccgacccggccaagctggtgacgggcattatctacaacgaacgccagacccgcgtcaccgcagaacaggccatctcaagcgacgttaacacgctgcgcaccgactacaacgccaacaaggccgcagtcacccagcgccttgacacgctgaccagcgagaaccaatcgcaggcccaggctctcacgcagttacaatccggcctgactgacgctaacggcaagatcggtgcgaacaccaccgcgatcaatcagctgaaaaccgacgtttcagacattgacgggcgcgtgacggctaacagcagcctgatcaccggccttgagagcacgatcaacaacgacgccatcgcgctggccgctaacccaaacaatctgctgacgaacaccggtttcgaacgtgataaggcggcctggactggctttaatgcttacgcggatatttacgcggctcaagtcccgcattcaggggctaaaatcctgcgcggcaaggctggcggcattgctggcatcactcagttagtggctaatgtcaagaaaggtcgcatctaccgcttcggcggatatgttaagcgcagttcagacatgaccgccggggcagtaggcaataacaaattcagactgggaaatgcggatacaggcgcaggcccattgtcagaacttaactacactcagagcaatgttggaaccaactggacgctgcttactaaggactatgtcccgtcaagtgacatgacgcttgcattcagcattaactggattcttaactctggtgagatctactttgatgatgttcttttcgtcgacgtaacagacgaaattaacaacgccgcgaacgccagcgccatttctggactgactacgcgtgttacggccgccgaaggcaagatctctactaacagccagtcgatcacccagctgaaaggtgacgtaagcaccttgcagggccagattgcgaacaaggccgatgcaagcgcgttgcagcagctgcaaaccactgttatccagcagggtgacaagctggcgtcgcagggtagcgccatcactgaattgcagaacacggcgcagaacggtaaagccaaatactggctaaccaaaatcttcgacattaaggtgagcggtagcgggtacatcccgaagctgtcagacctgtccggtgttccaccgctggccgtatccgagatggccgacgcggccaagctggattttcagtcatacggcgactacaaaatcgcctacgcgaagtcgctggtttacctcaacgccgacaagaccatcgagatcgcccctgggtcacgcatcgttgacgacaccggccgcctttatgtgaacagcgtcgagactgcatcacttggcgcgagcaccacgaaatactcacttgctcttaaaaagggctggaacaccatcgagttcgtcgtggctcagatgaccggcggcttttacatcaacttcggcctcaagctgtccgacaacgtcgatcaattgttcagtggtgccggtcagatggctgcggcgtccgctgcgcaggttatttcctcccaggtagaacagaccgccgggaaggtcgacgcgaacagcagcgcaatcctgaccctcaataactcggtgaaggatatcaacaccgcgttaaacaataaggccgacgcaagcgcgttgcagtcgctcacaactcgcgtaagcaatgccgagggcaagatcacatcccagggcaacgccattacccagctcaccaacgacctgtcgacggcgaacggcaagatcacagccaacactggcgcgatcagcagcctgacctcgcgtgtaacggcggccgaagggaagattgactctcaggctgaatcaatcacctcgatcaactcatcgatcaaggggattctgacgcaggccgccaacctcatcccgaacccgacagttgacccggcatacccgcaaatggggatgaccgtggtatctaccacgtcggaaggcgtcccggctggctgtccttatgcatgggcgatcaagtgccagtatcgtgaccatgtgccggtgatgaataacattccttgccatgaggggcaggtgttcgagatctccgtactggcagcgtgcggcaccggcacggcaccattccagcactacattgggacgtcaacgcaggcagctggcagtatcgggtcgccgcaggcgaacggcggccagatctcagcggctaccggcgcgcagtggacgcgaaccacctggcgattcaagccgaacgccacgcacgcagcaaaaggctatttccgcccgttcctgcaaatcaaccagtccggcccggacttcggcactgtatggtatgcgaccgactggcaggtgcgtgacgtcaccgcagccgcgaacgcagaaggcaaggccgacgcgaacgctacggcgatcagccagctgaccactcgcgttaccaacgcagaagggcagatcacatctcagggccaggcgatcaccaaactgaccagcgatctgtcgacccttactggcgttgtgaacagcaaggcagatgcaagtgcgcttaactcactgacaacccgcgtatccaacgcggagggcaagatcgcatcgcagggccaatcaatcacccagcttaccaacagcatcagcaacaccgagtcggccatggacgcccaaggcaagatcccggggaacctgctggcaaacgcctcgtttgaacgcggacaggttgcttttgatggatggtcggatctaacggatgttattgatgccactaacccgcattctggagggaagatccttagaatgaatgctggcgctggcgtcaaaatcggccaaagcattgaggttacacaaggccgccgttatcgcttcggtgtgttcgcaagacagaatgctggaaccgagattcaagatcctgctaacactaaattccgcattgctgacggttcagacaacctactggccgccgtcaattacgggccgtttaccaatacgtggcaacacgtatccatggactggacagcgtcaaaaaacaccgtcgcaaaattccagctcactgcgtttcttaaaactggctcgatgtactttgacgacgtctacgtggtcgatatcaccaacgagacgaacatcaaagggaacgctgacgcgatcacctctctgaacacgaaggtgacgcagcagggcaacgacattacgtcgcagagcaacgcgatcaccaaccttactaacagcctaaaaactcagcagtattcgaacagcaacccatgggtagacgggtcgtttgaatcatacgcagatgggcagaccatcggcggggccaatgctgccgtaaccactgaatacgcattcagcggatcgaagtcactcaagtgtcgccgtgctgacggtgaaaccggcaactccgacaagatgtttggttatgagaccaccatccgagaagacgccgtttatcgctatgagtgctgggcaatgatgccggaaggcgagacgccgccgaatggctggggctgtaacgtcgggatgatcgttcgcaccgcagcaggaaccgcagcatggccgactgcttttgccatcaatgaggcagcgctgaccgctggcggcggacgtggtaaatgggtcaagttctccggcaagttaagtgcgggaggctctcagaagactcgcggtcgtctgtggatctccactcgcggcaccgctggcggcccagggtatcgtctttatatcgacgacctcgttattaccgacgtgaccgacgcgcacgcagcgcagaccaccgcagacgcgaactcttcggccatctccggcttgaccagtcgcgtgacctcagcggaaggcaaaatcaccgcacaagctgactcgatcaccaagctaaccggcgaaatcaacaccattaacggcacgttgagccagaaggccgacgccagcgcggtaaacgcgttgcagtctcgcgtcaccaccgcagaaggcaagatcgagagccagggaacagccatcacccagctgacaaatggtcttgaggcgtaccgccgtaccggcgaaaacctcgttcagaacttcgactttctgcaaggcgacaccgcctacaacgtgcagaacgccagcaaggtgactttcggcgactatggcgacggcaaagttggcgtgcgtatggtgcgcacagacggcaactcgcctggcatcttcgccaacaacaagaagccgatccctcagaacgggcagcgccgctaccgttatgttgtgcgcgcgaagggtgtaagcggggctatgaacctgctaatgcgtcgctggaacttcaacggcaccgtagaaggccctggcgtagacaaaaacttcaccctgacgaccagctggcagaccctgacatgggagacagatcttaccccggccaccggcgttgatgggtcggcttttggtctctactgccacccgtcaaacgcggagatctggatcgactccttcaaggtttacgacattaccgaagaagtgacgatcaaggcgaacagcgacgcgttaagcacgctgaccagcaccgtgacgcagaacgggaaagatatcgcagcacaggcgaacgctcttactcagctgaaatccagcctgacgaatgacgcggtagcactggctactaatcccaacaacatggttgcaaactctggttttgagcgtggcactgataactggagtggttttaacgcttacgcggatatctacgcggctcaatcgccacgaactggcgcatacattatgcgcgggctttctggcggaaacgtggccgtgtctcaggtcatcctcggaatcaagaaaggcagaacctaccgttacggcggatacatgcgccgcgattcaaacacgaccatcggaaaccaaggcaataacaagttcaggatcggcaatgccgacaccggagctggcccgattcatcaggtcgaatactcgcaaagtaacgtagggacaagctggactcttattactggcgattgggtgccagcaagcgatcaaaacatcgctttcagcattaacgtgcttttgactgccggtaacttctactttgacgacattttctttgttgacgtcaccgacgagatcaacaacgcagcgaacgcgacggccatcaccaacctgacgacccgcgtcacgttggcggaaggcaagatcacgtcgcagggtacagcgatcactcaactgaccgcagacctaagcaccgcgaacgggaagatcacggcgaacgccaacgctatcaccagcttgcagtctaccgttacccagcagggcaacaccctgaccactcaggggcaggccatcaccaagctgaacagcgacctttccgacctgtccggcgtggtcgacacgaaggccagcgcgtcggctgtatctcagctgactacccgcgttaccaacgcggaagggaagatcaccgccaactccacggcgctgaatagcatcacttcccgcgttaatgatgcagagtcggcgattgacggcctgaacgagacgacagcggcgaacgggctggcgatggctaacggcttccagcaactgcgcgcgcaaatcggtgacaatcaggcggccatcacgcagacgaacaaggcagtggtggatcttgagtctgcaacggcgcagcagatcgacacgatcaacgcgtcaatggatggcatgagcgctaccgtacagcagacctcaacggcggttgcggatatcaacggcaagctgtcggcgcagtggggcgtcaaagttcagactgacaccggcggcggcaacccgcgcattgctggtattcagcttggtatcgacgcaagcggctcatctcagttcctggtcatggccgacaccttcgctgtgtacaccggcgggacgaacaaaacttacccgttcgtggttcagaacggcgtggcgtacatgcaggaagcgctgatccgcgacggttcgatcaccaacgcgaagatcggcaacgagatcaagtcgaacaacttcgttgagggatcgtctggctggcgcatcggtaaagatggcagctcgcagttcaacaacgttatcgttcgcggcgctgtttatgctactgacggttggttccagggcaccgtatacgcgaaccgtattgagggcgacattggttccttcgccatcaacatcgcacagcaccgcacgcgtaaagtgccgaaggcaacatggcaatggttcgagctggcccgattccgtcgccagaactttgaccaggtgatcaacattcgcggcggtctattgcagaccgacagcatcaccatcgacggcggcgcgaaactccgggcgggtatgtcgtattctcccggttcagatggcggccttgatccaggcttcctgtcctacgccatgttgttgcgtggcactggcgcgacttctggcggcggcagcatggagatcggcgtggaacttgcctatgaaacaggtggcgctactcgccttctgaccgcacaggagtcgatgaatgtcgaaaacatgtcgttcgtcgtccctgctggcaccggtgatgcgatcctgcgctacggctgttaccttgaccgcaacggtcagatggttttaaccatcctttcacggtttgacgctttctcagcgcgcaacaacaacgtaattcgtggatcgtccacgccgtaa

SEQ ID NO: 234363 - DNA, 1218 bp, Klebsiella pneumoniae
atgagccaggttgcttcagcgatttcgcaaaaagaaactcataaatcaatgccctggcgttactctctgaccggggatcgcgacctgcgtatcgactttatgcgcggtattgctcttgtgatgatggtggtggcgcataccgaagtgatgtcgatatttaatattttcagctgggaacgatttggtttgaccaccggtgccgagggctttgtgatcctgtccggcttcatgttagggatgctaaatcgtgtcagattacaaaaggcagtattactgacggtgagctgggggctttatcttcgcgcatggaaaatatatcaggttaatattattattattgtctcttttcttttgctgagatatttgccttatcttaatgtctatgaagtcactcattttaccgaccgcttttccgggaccagttggtcgctctatccgctaaccccgcaaataaaagagacgtggtttaacattatcctctatctgcagattggcccgcatcagacgcagatcctcggactctatatttttttgttattgctcagcccgctgtttctgggaatgctgcaaaagggtcacgtctaccccttactgggcgcctcgctgctgatatacggctgctggcaacgctggccgatacgggtcacgccctgcgaatttgaattcgcctttcccctgctggcctggcaatttatctttgtgctgggcatgtgctgcggctggtacaaagcggaactgatctctttcgcccgcacgccgcccggcaaagtcgccgtggcggcgctggtgttcatcgcgcttatccttgcgtttgtcgcccagaaccataccaatccttttatgccgcccgcgctgctgatgcacgtaatcccgccggcggattttaacgccttttaccatacctgggcggcgaaaaacggcctcggtccggtacggatcctcaatgatatcagtctgatggtcaccatttatctgctattgacctggtgctggcgcccccttaaccggctggcaggctggttcctgatcccgctcgggcagcgttcgctctacacctttattttgcatgtttacatcgtgctcgccgtaagccagctggttaccttcgatctgtggcgccaggcgtggatagagaacaccttgattcatgccgccgcgctgggcgtactgtggctgatggccaaataccgcgtcgccgcacgctggatacctaactaa

SEQ ID NO: 234364 - DNA, 318 bp, Klebsiella pneumoniae
gtgacattaacactcgaagatgaaggtaaaactgactgggtattccccaattcgatgccatttagtatggaaccggtgatgacccaattgtgggttagagagcgtttcgggttgcccatgatttacgctgatgcggaaatcatcatgactatttatataggggtaaaagaggtctatgctctgcctgcccctcatcaatatatcgctgccgtgtttacctataacaaagatttatttgtagaaaccgtaactttttacccactggaacgagccaaagagattcaggcagtactggagaaaaaacgattagagagttaa

SEQ ID NO: 234365 - DNA, 186 bp, Klebsiella pneumoniae
atgactacgaatgattttatggaagagcaggaagtattcgacctgctcaaaaagaaaaaaacggctgtttggcgtttaagaaaggatcacggattccccgaccctgttctcacctacccttccaggtatagccgtaaagctgtaatgaaatggatagacgagggcggcgttaatcgagctgtttaa

SEQ ID NO: 234366 - DNA, 252 bp, Klebsiella pneumoniae; identical to SEQ ID NO: 230627

SEQ ID NO: 234367 - DNA, 372 bp, Klebsiella pneumoniae
atgactaatatcaccgagcttactagcgtacaaaaaaacgcaaatattcaccgtttatccaggctcattgcctatgcatctaacgacgaattgcgacaaatggctgttgaagttgagcattacacggatcagctcatagaggcactggagaaggcgcaggggatggaagcctactggaaaactcaatgccgggggataacggaccattgcgaggagttgcaggcgtgcatcgctgagctggagtcccgcaccgtcaccgtgaggctgccgcgccctggtttcgtcactatctccggcgagcgcacggctgtttatttgaaagctgatgttgatacggtgctggctgccgctggcattggggaggctgagtag

SEQ ID NO: 234368 - DNA, 654 bp, Klebsiella pneumoniae
atgatgaacatgagcgaccgtatccgccaaaggcggaaagaacttaagctgacgcagcaggcactagcggagatggctggtgtgaatcgtgtcacggttacgggatgggaaaaggacgactatcaaccgaatggtgcaaaccttcagtcattagcgaaggcgcttcaatgcgatccgctctggcttgtatcaggtaaaggtgatccaaaacctaagctcaacctgaaacctgaaatatttaatgtaaaacaagttccgctaatatcgtgggtgcaagccggttcatggacaagaactgatccaggcattcgagctgacgatgcaaaggaatgggtttataccactgcgttagtttctgatggtgcctttgctttacgagtacgtggcgattcaatgacaaacccatcaggtgccccatcaataccagaggattcggtgatcatcgtagagccagacatcatggatattgaggctctgaatggaaaaatagttgtcgcgtatcttgatggtggtcatgaggcaactttgaaaaagtttgtcgaggactggcctcatagatacctggtaccactaaacccaaactacaaagccatagaatgtggtgaaaattgcacaatcgtaggtttggttaaacaagtcataatggatttctaa

SEQ ID NO: 234369 - DNA, 198 bp, Klebsiella pneumoniae
atgaggaaatccgaagttattaattatttcggaggtgtctgtaaaaccgcattagctcttgggattaagcatccgtccgtatccgaatggccggaaataattcccgaagttagggcttatcagattgaaaaaatcaccaacgggcatttgaagtttgatcagtcgctttatcaaaattctactgattcagctgcgtaa

SEQ ID NO: 234370 - DNA, 351 bp, Klebsiella pneumoniae
atgcccgcattaattcctcgtgcatgccgtaagcgtggatgcgcaggcacaaccaccgaccgctcaggctactgcgagaagcaccgtaatgaaggctggcaacagcatcaacagggaaagagtcgccacgagcgtggctacggtagccagtgggatatcaggcgtgcgcgcatcttgaaacgcgacaaccatttatgccagaactgccttcgcagcgggcgagctgtcgcagcaaagacggttgaccacatcaaggccaaggctcatgggggtaccgatgacgattcgaacctcgaaagcctgtgctggccctgccatcgaacgaaaaccgggcgcgaacgcatcaaatga

SEQ ID NO: 234371 - DNA, 192 bp, Klebsiella pneumoniae
gtgaggcacaaacttgtaaaaattaagaatatgctgcgcacgcggttcgctgaagtaaatgccacgttcctcgccgaatttcagatcatcaaggaatcgctggcaagcgaggcgaacaaattcgcaggcaatgatatttcccgccacgacacgctctgcgtagcgtatgccatctgcaactttagccattag

SEQ ID NO: 234372 - DNA, 873 bp, Klebsiella pneumoniae
gtggaagcggaggacctctggttgctggatagcgttgatactgaaggttatgtgtgctggggatgtggtataaccatgtatcctgctgcatgggaaaaagataaaaaagtcagagcttattttaaaaagaaacgccatatccatcatcagcctgaatgtgatgctgatgccgaaagcatagtaattcgacagggccaaaaggagagtgtccgcaacatactggacagtgctccaggtttaatcccttcgggattaaagttgattgaacaacgcccggttgttgagccaggcattgcaggtgatgaaatcaagtccagttcgacgagttcagcatcctcagggtctggtgaaggtcattcacccgaacgacaatcccggcgtcaagtgcatactatccgcaatatttgccgtgcgttcctccgcttcccatatgatcgaggaatgtcgctaaacgtccctggtattaaggggcgaacttactcagaggtgtttaaaaagctccaaagtaaaattcagccctacccggagccaaagatcttttatgctgaactactctggaataaatttattgaagatgatgaaaaactcatcatcccgttgtctggcgagtggacggaagatgaatccggaaaacgtaaatcatcccgaagttaccagatccacataaaatgggctgggtggtcaaaagccaagcgtacagtggtgcgcaaagagttggaaattgctcggacagaggcacaggaagctaaagcaaaaagattgaaagataaggccaatgtcttctttatcggtgagcaaagtgctgataacccggagatgttctacgtcactgattatcgattaatttgtgcgatcgttgggcattttacttaa

SEQ ID NO: 234373 - DNA, 867 bp, Klebsiella pneumoniae
gtggcccagcgagagcggctggcctacatcgattttcggctctatttcttcggtgagatcggtcgcccagatctgattgagcgcttcggcgtggctccagcaggggcgacacgcgatttggctttgtaccgggaaatcgtgccgcataacatcaccttcgatggtagcaacaagatctatcgcatcgggcaggcgttttccccgttgttcaaacacgcatcgcagcgtgttctgtcggcgctggctttcggctttggcgatggcgtgaacggctcaatgcaggcgctgctaccatgtgaatcccccgcagccctgtgcatccccaagatggatgtgttagcagcgatttgccgagccatccacgccaagcgacctgtcgccatccgctaccactcgatgagcggcggcgagtccgagcgggtaattgtgccctttgccttggttgataccggcctacgctggcacgtccgggcctttgatcgcaagagtagagagtttcgggatttcgtcgtcacccgcatcgaagcaccaacattgctcgacgaggagccacaggccaacgaacgacaggataacgacatccaatggacgcgcatcgtcgagctggatttcgtgccgcacccgaacgttgatcggcccgatattatcaagatggactacgggatgacagatggttcgatcagaatgcgcgttcgcgctgcggtggtgggctatatgttgcagcgctggcgggtagactgctcacccgatcattgccttcgcggaccggagtaccggttatggctcaaagatcatctcgcaatttacggcgtaaaaaatgccttactggcaccaggctatagcgccactaagaaggctgactattaa

SEQ ID NO: 234374 - DNA, 3279 bp, Klebsiella pneumoniae
atggaactgatcgacaatatcaaccgtctgctcggagacgacctaaagcagacgctcaaacctggtgctcgcctgaagatcgccgcctcctgcttttcgatgtacgcgttcgaagcgctcaaagcagaactggaaaaaatcgacgagctgcaattcatctttacctcgccgacgtttaccgctaacgaggttaccgacaagattcgcaaggaacgcagagaattccacataccgaaggctgaccgcgaacgaagcttgtacgggagtgagttcgaaattcagctgcgtaacaaactgacccagcgcgcaattgcaaaagagtgcgcggactggatgcggcgcaaggcaacattcaagtccaatcgcagcaaggcaccgatgcagcagtttacttgcattcaggctgctgctgcagatactgcctacatgccactgcacggctttaccgccgtcgatcttggctaccagcagggcaacgctgtctccaacttcgtcaacaagatggacgagccgacatttacggcgacctacctcagtctgtttaaccagatctggcaagaccccgagaagctggaggatgtaacggcgcagatctgcgaccacattgcatccgtctaccaagaaaactcgcctgagagcatctacttcctgatgctctacaatatcttcaatgagtttctggacgacatcaacgaggatgtcctgccgaacgaccgcacgggctatcaagacacgctcatttggaacaaactctttaattaccagaaagatgctgccaccgggatcatcaacaaacttgagagctacagcggctgcatcctggccgacagcgtgggcctgggcaagactttcaccgcgctggccgtgataaaatattacgaactacgcaacaagtcagttctggtgttatgccccaagaagctggcggacaactggctgaactacagccgtaacctcaagaccaacatctttgctcgcgaccggttcaactacgacgtgctttgtcataccgacctcagccgtacgagcggtgagtcgttcggcacaccgctgaatcgcattaactggggcaactacgacctcgtcgtcatcgacgagtcgcacaacttccgcaacaatgacgcctataaggacaaggaaacccgctaccagaagctgatgaacaaggttatcaaggagggggtgaaaaccaaggtgctgatgctttcggccaccccggtgaacaaccgcttcaatgacctgcgcaaccaactggcactggcctacgaaggcgattccgaaaacctcagcaagaagctgcgtaccagcaagacggtagaggacattttccgtggtgcgcaggccagcttcaatgcatgggcaaagcttccaccggaagagcgcacagcgcgggccatcctggattcgttagacttcgacttcttcgaattgctcgacagtgtcaccatcgcacgctcgcgcaagcatatccagaccttctacgataccacggaaatcggccaattccccgagcgacgcaagcctttgtcgttccactgtccgctcacgccgcgaacggatgtgatgagcttcaacgagatcttcgagcagctgtctttgctcaagcttgccgtttacgctccgatcagctacatcctgcccagtcggctcaagaaatacgaggagatgtatgacactcaggtcgcaggcaaaggcaagcttaagcaagtcgaccgcgaaaagagcctgcaggcattgatgacgaccaacctgctcaagcgcttggaaagctcgattgagtccttccgcttgacgctccagtccctgcgcgcgaaccacacgaatacgctaggcaagatcagcattttcaatcagactggcggcctcggtggcattgacagcagaataaatgacctgaccgaccagttagaaaacctcgatgcggacgacgacttgcctgacattggcgacagcgagattggcggcaaggtcaagatcagcctcgccgatatggacttaccttcatgggagcacgagctgaaggtcgatctggaaatcattgatgccttgctgacgtcgatgaacaagatcacggctgccgatgatgccaaactgcagcatctcaagacactggttctggagaagatcgccgcaccgctgaatcccggcaacaagaaggttctgatcttcaccgccttcgccgacaccgctgactatctgtatgccaatttggctccggaattgctggctacacagaccttgcacagtgcaaaagtcaccggcaaaggggtaccgaagagcacgctcaagaagagctatgacttccaggaactgctcaccctcttctctccacactcgaaggagaaagccatcgtgctgccaaatgaggaggcagagatagatgtgttgatcggcaccgattgtatctctgaaggccagaacctgcaggactgcgactatctcatcaactacgatatccactggaaccccgtgcgcatcatccagcgcttcggccgtgtggatcgcatcggctcacccaacagctgcatccaactggtcaactactggccagacatctctctcgacgaatacatcaacctgaaggaacgggttgagagccgaatgatgattgccgatgttacagccaccggtgatgacaatgtgctgagcgcccaagccaacgatgtgtcttatcgcaaagagcaattgcgacgtttgcaagaggaagtgattgagctggaagacctgaaaaccggagtgtcgattactgatctcgggctcaatgacttccgaatggacttgctcaactatgtgaaggtcaatggcgaattgagcaacgtgccaagcgggatgcacgccgtagtgcctgccaagtcggagatgggcctacgcccgggtgtgatcttcacgctacgcaaccggaatccaagcgtcaacgtcagtcaacacaaccgcctgcacccttattacctcgtctacattaatcgcgagggggaagtcattcacgatcacaccgaagtcaaacgtttgctggatctggttcgcacctgctgtaagggacaagcccagcctattacagatgcctgtctcttgttcaataaggaaacggccgatggccgcaagatgcagatgtattcggacctgcttggcaaggccatccgctcaatgatcgaggtgaaggaagagaaggatctggacagcctcttctgcagcggaaagaccaccgcgttggtcaatactatcgtcggactggacgacttcgaactgattaccttcctcgtgattcaggaggccggatga

SEQ ID NO: 234375 - DNA, 702 bp, Klebsiella pneumoniae
atgagtcagtctgcgcgatttgagtcgaataccgccttcattaactatccgaagcaggctgtctttggtcgtaccctgccaaagaataagatctacgaacacagcggcgctaatacaaggctgaaggacttgttcgtcgagcaggtggagcaaatcgtctggcaatacaagttggccccagaaacgatcaacctacccgccaggccgggagtaccagagcttcagattttctcaattcagctcaagacattggagctgaatatggacgttttgcgttgcatcgatggcgcggtgcagtttcccgtcatcttcgagctgagctttgatgagcgaacaaaggtgatcgctgcatacaaacgccccaatgagtcagacgccagtcgttgggtcttgagtgactactttgccacagcctggttgtcgagtgactatgagcgcgccgccatgcccttagcactcgacctgggcagcttgtatgagcaggtgcttcaccgtctgatccccacgcctgcgcgcccacaagaaactctcgctgacttggtttcacgcgtggaactggttgcagccaaggagcgtgaggttgagaaagctgccagcagacttgccaaagaaaaacaattcaaccgcaaagtagagatcaacgcgcacttgcggcggctcaaaaatgaacttgaaaaattgactgggagagagagtgcatga

SEQ ID NO: 234376 - DNA, 2703 bp, Klebsiella pneumoniae
atgacgcaaagtttgaatgaagagtcaaggaaacacattgagcaattcgctgatgaagcgttggcgcaactcgaaagcatcgctgaaactgccaagggtaaactgtacgatgggcggacacttggttccgatgcgctggcaaacatcaacacaatgacggacagtccaaccatccaaaggctggataagataggtcaggagaaccatgaaagctatcaggtactagtggcggagcctgccatcgctcgtgttgtggtggtcgatgaagagggtgaagagaaaacctactacatctgccgcacgacgccggtatcgggcttccccaatttggccagctaccgcgcaccggttggacgcttggcctcgttggcaataggcacagagttcacgcttcccaatggaaccgtcgttgaggttcttgagcgagctcagcttcggcccaatgcgcttgccggtgggtgggattcgcgcgacaccgtagttgaagccgagcattttgggccgttcactatcgagtcgctgcgtgcgctgctgaccgaggttgcgggagaagaagtcaccgaagacattcttggccaattgctggccgaggagtcagtcaagtccaacatcatcgacggcgttcgccgcagcgtcatcaccaagatggaactgcgtgatcagcctatcctcgatcaatatcaagatgagattttccgtcgccctattgacaatcgccttttgatcctgggcccgccaggtacaggcaagacgaccaccctgatccgccgcctcggccaaaaactcgacaccgcctacctggatgaaggtgaacaacgtctggttgaaacaatcgcttcagcccaaggcattacgcacgccaacagctggctgatgtttacgcccacggaattgctcaagcagtacctcaaggaggcttttgcgcgtgaaggtgttcccgcctcggatcagcgcatcagaacgtggcaagactatcgacgcgagctggcccgaaacgcattcggcgtcctcagaacggcttcaggtggaggtaccttcgtcctgaaagacggactgaccaacctgaccaatgccgcactagagctccccattcaatggtttgaagatttcgatgcatggcagcgcaaggcctacgtgcaggagctgcgtgaagccgcagcccagctccacgatgccaaagctcccgaagccctaagtcttggtgcacgactgcaagacatcttgtcgcgggcggccgatggtgcactggctgcaatgtttggctcgctggcggtggagattgccaaagtgcagacgctcgtcagcagtctcaaggaaggctctgacgccaagatcaaagccgcactcaacctgcagctcaaccgcaaccgaggttttctggatgagttagcccgcgtgatcgatagcctgcaacaagcgcaagcgactgatgcagacgaccaggacgacccggatgccgatgaagaagaagacgtcaccgcaccccgcacaggccgttccgccgcgctcaatgcctacatgcaagctgtacgcgcccaagcccgggcagcagcatccaagcgcacagtcaacaaagcctctcgcaatggcaaaatcatcgagtggttgggagagcgtgggctgacagaagcgaatcgtgctgaagtaggtgcaagccttctggtgcaggccagtgcccgccgcttcgttaatccggtcaagcgctacctagacggcatcccgaagcgctaccgtgcattcaggcgcgaacgccaaccggcaaatacctggtatagccacgaagactttgaggcgcgcgacatccatccactggagttggacatcgtactactcgcgatcttgcgcgccgcaggcaacctgctcagtcggcccaacgttcagcgcgacattgatagtcccgcctggtcatcactccagcccatactggggcattactgcaaccagatcctggtggatgaagccactgacttctcgcccattcagctcgcgagcatggcggcacttgcgcatccacgactgcgctcattctttgcctgtggtgactttaatcagcgtctgaccatctggggcacacgctctgtcgacgacttgaagtggatctttgaggattttgatataaaggagattacgatctcttatcggcagagcaagcaactgaacgatctggctcgcgccatgatccgcgctgtcggtggcaccgagcaaaacgccagcttgcctgcgtatatggacagtataggcgttgcacctgccttgctggagcacgcgaccaacgcagaaaccattgtcggttggctggcggatcgcattcgcgagattgagcgctttgtcggtcagttgccatctaccgccatttttgtaaataccgaggacgacgtagccccggttgccgaagcactcaacacagccttggcggagcacaacatccaggtcatcgcctgccgagagggccagactgtggggcaggaaagcaacgtgcgtgtgttcgacattcagcacatcaaaggcctggagttcgaggcggtgttctttgtcagcattgaccagctcgccacgctgcacccggcattgttcgataaatacctgtacgtcggcaccacccgcgcggccacctacctgggcatgacctgccagagcagcttgccatccgccatcgaaagtctgcgcccgcacttttgccaggactggcaacaaggcgactga

SEQ ID NO: 234377 - DNA, 2016 bp, Klebsiella pneumoniae
atggaaaaactaaaaatgcattcacccgatctcacgcaggacaacatcgcccacattcgcgatctgtttccaggttgtgtcaccgaagccaagggcgaggatggcagcgtaaagctggcggtggatttcgaccatttacggcaagagttggctgagtcgattgtggaagggccgcaggaacgctaccacctgaattggccgggtaagcgcgaggcgcttttgacggcgaatgcgccgattgccaagactctgcgcccggtgcgagaggagagcgttgaattcgatacgaccaaaaatctgttcatcgagggcgataaccttgatgcactgaagctgctgcaggagacctatctcggtaaggtcaagatgatctacattgaccctccatacaacacaggcagcgatttgatctacgaagactgctttgcatcagatcttgataagtattttctcgagtccaatcaaaaggacaagcaaggcaatcgactaactgccaacaccgactcaaacggccgattccattcggattggttgagcatgatctattcgagactgaagctgtctcgcccacttttgagagatgacggatttattttcatctccatcgggaatgatgagatatcaaatctaaagaaagtttgcgacgaggtatttggagagcaaaatttcattgagtgtatatcttggaataagcgcattccaaagaatgacaaaggaatcggcaacatccatgacttcattctgatatacgccaaggatgccaccatcccccacgaactcgtgatgcgcaaagatggcctcgaagatatttacgaaatggtcgagaagctcaaaaaggccaaaacccccattgccgaggccgaaaaggaaataaagaagctctacaaaaaacaaggctacgaccgtggaattacgctctacaactcctttgacgagaactatcgcctctggggcaagataaacatgagctggcctaatgcgaacacattcggcccgcgctatgaagtgccacacccaatcacaggaaatcctgtggcgattcctgatcgcggttggcgctggaaaaaggaaacattttgggacgcagcaaaattcaaggatggcaaatacgagagtatcataaagctccatgatggaagcgtgatgtgtgggcgaatttggtttgccaagaatgagaccacacagcccagctccataacgtatcttgatgatgtaaatactttccttctacggtccattctttcgttgaaaagtgacggaggaattgaggtggagaatatctttgaaggaaaaagctatttttcttaccccaaacccacatcactgctgaagattcttcttagctcactcaaactgagtgatggcgatgtggttctggattactttgctggatcttcaacaactgcgcacgcggtaatgcaggtcaacgccgaagatggaatcaatcgcagattcgtcatggttcagctggccgagccgtgcaacgaggacactgaggcctataaggcaggatttaagagcattgcggatataagcaaggaaagaattcgtcgctcaggcaaactggttgttgctgatagcacccattcttcatggagcaaggatgtcggattccgtacgctcaaaatcgacacatccaacatggccgacgtttactacgcgcctgatgcgctcgacaaagccaagttcgacctgttcgtagacaacatcaaacccgatcgcacacccgaagacctgctgtttcaggtaatgctggactggggtgtcgatctggccctgcctattaccaaacagtccattcaaggcaaagacgtgttctttgtcgatggcaatgtgcttgccgcctgcttcgacgccagcggcagcattgacgaagcctttgtgaaggaactggccaagcatcagccgctgcgtgtggtgttccgcgacgagggctacaagaacagcgcggtcaagatcaacgtcgagcagattttcaagctcatgtcgcccgccaccgaagtgaaatgcatctga

SEQ ID NO: 234378 - DNA, 3072 bp, Klebsiella pneumoniae
atgaagcttaaattcaaacatcagccctatcaggctgccgccgtgcaggcggtcgtagatatttttcaggggcagccaccggcctctaatgcagccatgagctatcgccttgaccctggtaataccaaaaacggcatgggtgatctgtttgcggtagataccggttttaaaaatgctgagctaaccctcagtgaggttgcattgcttgataacatccaacaggcgcagcgccagcaaaacctgccgttgtcggagagcctggtcaagaccaaggtcgccaggctaaatcttgatatcgagatggaaacgggtactggcaagacctattgctacatcaagacgatcttcgagttgaacaaacagtacggctggagcaagttcgttatagtggtgccgagcattgctatccgcgagggcgtggccaaatcgctggaaatcactgccgaacactttctggagacctaccacaagaaggctcgcttctttatttacaactctaagcagttgcaccatctggagagcttctcctccgatgccggtatcaatgtcatggtgatcaacgtacaagcgtttaacgccaccggcaaagataaccgccgcatctatgaagcacttgatgattttcagtcacgtcgcccgatcgatgtgatcagcgcaaaccggcccatcttgatcctcgatgagccgcagcggatggaggggggcaagacgctggattccttggctaacttcaacccgttgatggtgttgcgctattccgctacccacaagaccacgcacaacaagatccaccgcctggatgcgcttgatgcctacaaccagaagctggtgaagaagattgaggtgcgcgggatctcggtgaagggactggcgggaaccaacgcctatctctatttacaagccatcgaaatctcaaacaaaaaaccgccagtcgcggttatggagttcgaacagaaactcagcggtggtaacatcaagcgcgtcacccgcaagctaggcaagggtgataatctgtttgttgtatcgaacgagctggatcaataccgcgatgggtttgtggtatcggacatcaatgctaatacggacatcttgagctttaccaatggcatagagttgacggtgggtgatgcgactggtgatatttctgagatagcgctgcgtcgcattcagatccgggagacgatcaaggcgcactttgataaggagatggagctctttgataagggggtgaaggttctctcgctgttctttatcgacgaagtagccaagtaccgggactactccgctgccgatgaaaagggagagtacgcaaaaatctttgaagaggagtacgctaagcaccttcaagaagcgtttgatactgggtttatgcagggggataccccttatgctaaatacctacgccacattgcggcagataagacgcatagcggctacttttccatcgacaagaagagcaagcgcctcaccgatcccaagaccgttgcgcgcggtgaaaatgcgggcttgtcggatgacgtagatgcttacgatctgatcctcaaagacaaggagcggttgttatcattagctgagccggtgcgttttatcttctcacattcggccttgcgtgaaggctgggataacccgaacgtgtttgtgatctgcatgctcaagcatagtgataacaacatatcacgccgccaggaggtcgggcgtggcctgcgtttgtccgtcaatcaaaatggtgaccgcatggatcacccgtccattgttcatgacattaacgtactgactgtcgtggccagcgaaagttacaaggacttcgtgaccgccttgcagaaggacattagcgactccttgtctgctcgtccgcgtgtggcggacaaggcctacttcacgggcaagatgctgaacactaaggaaggcacgattacggtatcggacgaccaagccacggacattgagttttatctgatccagaacggctacgtcgataagaagcgcaatatcacggagaaataccaccaagctaagaaagacggcacgttagaggcattgccggacgagctgaagccctatgcagagcaggtattccagctgattaacagcgtattcagcgaaagccagctcatgctggtagaagatggacgcaagcccaaaagactgcagaccaacgccaactttgaaaagcaggagttcaaggcgctgtgggggcgaatcaatcgcaaagctacctacagcgtactgtttgatgatgttgagctagtgaacaatgcgatcaaggtgctcaatgacaagaatgctgggttgcgagtgacgccgttacaatacaccattcaccgtggcgagcaggctgatacggcaacttacgatgacctcaaaaagggtaatgccttcgagctgaaagttaccgaaacagaatcgcacaacgcttccatccactccgctgtgcagtacgatttgattggcaagttatcagagggaactttgcttacaagacgaaccgttgccgaaattctaaaaggtctcaatgctgacgtcttcgcgcaattcaagagcaacccggaaagtttcattgccgaagccattcgcttggtcaacgaacaaaaggccaatgtcatcatcgagcatctggcctatgacacgctagaagacaagtttgatttggacatctttaccacgggtcagagcaaacaggatctcagtaaggctgggaataaattgcaaaatcacatctatgattacgtgcttaccgactctgcgattgagcgcaagttcgtcgaagagttggataccagcaaggatgtggtggtatatgccaagttgccacgtggttttctgatcccaacccctgtcggcgattacaaccccgactgggctatttccttcaaagaaggctcggtcaagcatgtgtatttcgttgctgagaccaagggctcgatgtcgtcactggatttacggcctattgaagccaccaagattaaatgtgcccgtaagttcttcgatgagatcaacaagaagtttgctccagaaaacgtgaagtatgacgtagtggatagcttcggtaagctgatggaagtggtgaagtaa

SEQ ID NO: 234379 - DNA, 339 bp, Klebsiella pneumoniae
atggctgttagaggcaccggctccggccccccatccaccaccgttattccggtacatcatgtcattggtgaggccttcaaactcattactgccaataatgccgacacccgtggtgaagtcgctgtaatcataaattgcccccggcgcggaataaaccctcaaaaacgacgggattttgacggtttttttattcatgtaaaaatccgtcataccttcagcattggggttcggtgggattcttatctcagcatccacgccgcccgcaacgtagccacgggaaattactttgttaaccttatcctgaataatcatattcaggcagtcggcaaggttatttag

SEQ ID NO: 234380 - DNA, 204 bp, Klebsiella pneumoniae; identical to SEQ ID NO: 230628

SEQ ID NO: 234381 - DNA, 687 bp, Klebsiella pneumoniae
atgaccaataaccagttagcagaaaatagcatcatccagcttttgaacagcgtcaaactggcgcgcgataacgcagaacgcgccgacaatcgagttgaccactcgttttattacgcgctgacgattgctctggaagagctacaggaacgccgcaaggccgcaatggacagcgagtctgggtatttgcctctcgactacctgcagggacacaaagacggtctggaatgggccgcccaactggcagaagccaatcaccctgaaacaggagactggctttacgatgaccctatcgagctggcaaaagctattcgcaaaggtccagatatgcagccagtgcagccggtagcggacagcgagccggtgattgttgttggcgatgatggaggggatgcgctttcttatcgccgccttatccagtcctttgagcctggcactaagctctatcgccacgcgcagccagcaccggtagtgcctgatgactaccaacgtctaagagagctctaccacgcgcaggaaaagcgattgttcaaaattgcacagcgcatcaaagggccagctttcgacaaatactcgcactcgccatcgcaggctatcgatgtactggaaggtgcaatatttggcgaggatggcgcctgccgcgccgccatgctcgcagccgccccgcaaccggttaagggtggtgagtga

SEQ ID NO: 234382 - DNA, 840 bp, Klebsiella pneumoniae
atgatgtttgataaggaaaatttactgtcagtcaggaaatatattagcgaactggaggcacagggcactgcttccccaacggatttttatattcgggaatttgctacggaacctggcttattgaccctcattctgaatggcggttttttgaaagaagaatggaaaaatttctgtcgccatgaaaaacgatttattgcccggctgtatgaacagtattacgtctggcgatattttttgctcgaaatcagatcccggagtaaaacatcaaccagcattactccattgcaacggataacgattgaaagccaatgggatgcgaatgattttttttcctatctgttggaagagattataacgctcgagcaaatatcagaagggttggatcacattaaggatagaaagagatatcaaccagcggatgcatttgaggtctcctgttatctcttccttattgcttaccgatatctgagagatgagagtattcttgatcaatatcaaaacgctcttgctgaagcgcttgaacatcagggggagtttcggggctgggctgcagcaatgctttataaaagtgagctgtatgagaaatttgagaggaaagacagggacctaggtatatttaagatgaaagctgttgatcaacttgaagattggtacgcttgttctggtggtgagatgttcagtacagatacagaggttcagaacaggctgaacgataagctaattgaattcaataaaacaataaaatccgggcgagaagatttttctggctcaattaaaaattggtatgatgccaaagatcccgaatttaaaatgctgataaagagactggtgaaaaaataa

SEQ ID NO: 234383 - DNA, 378 bp, Klebsiella pneumoniae
atgcataaaccccatagtaaaaatatgcgtatgagcgagctggcatcctctgccatccgtcagtttcaaacaacggattcagtctcacaccaggaaagcaatgtaaacctcctcttatcaggtaatgtggaaaagattgcctttcagggaaagaaaaaaacgggtgctgaaaatagcaatggaatcacaccacctaaggatgaagaccaccttgtcgatatgaaatacattacgacccatagtgggttgagtgataaatttttttacgcccttatcaggcgcggagcattcccccgcccaataaaattaggacggacctcccgctggaagatgagtgagtttaaacagtggatcgaagaacgcgctgctgcaaggtaa

SEQ ID NO: 234384 - DNA, 1566 bp, Klebsiella pneumoniae
atgtctttaaataaaaatccagagaaaaaaagcgggacaactttccctttacactgtttacctgagcaattaaaagagacagttgaacgtgtaaatatgtttacaggaatgtcaatggaactgatggtaaacattattttcaccatgctttcaattatatgccagtaccttgtcggtgttgtatcgccttactcaagtatgtctgggccatgctctttataccttcttacgcttgccgagtctggtgagggtaagacatttctgtcacgactgctaatgagacccgtttatagtcgattcgagaaaatgcagcttgaatacagagaccgacttgttgcctataaaagggagcatctgatctggaaaactattttacagggactcaatgccaatcagcggcaggctataaaaaagggatatggtgtcgaggatgctcaggctcagctggagcagcattataaacgtgaacctaaacgtcctgttgagccaaagttcatctatcaggatgtgacatttaaagctcttatccagggcttaagcctgcatgctgaagctggcatcatcatggatgaagcgatctcttttttcagaagtgggttgaaaaatcacctcggactgttgaataaaggctgggatggagggaaatattcatttgacagaacggatggcgagaactatgaactcccattatgtctgatgctttcactaatgattcagcctggcgtatttactaattatttagaaaaacatggcgagatggttaaaagtagcggtttacttgcccgcttccttgttatgaaggtaaaaagctcaatagggcaacgtaatagtcgtattgatgaagagggggtgaatgcagtattagctccgttttatagcaaaatacaggggctgttaagtcttcttgaaacccgattttatgatgacagcataccgaaagatcaactaagactgtctgatgatgcaaaaatggttcttcaggaaagacagaaagaaattgaaaaggctattttacctggcgggcgctttgtacatatccgagattttgcgtcaaaagcaatagagcaggcactgcgactggctacaataatgactttttattcaactaaacctacaggagacagttcagccgctgatcttatttatacaaagattatcgatgcacgtcaaataagcaatgcactgacaatggtggaatggtatttgcaacaggcgagcgacttattttatccactgtcagagcgataccagtttgaatgcgatgtccgaagcctctggagctttattgttaaaagactgaacaaaaatcaaggtataccatttcctaagtatgaactgcttcagtctggtccgggtcgtctcagacacatagataaattaacgcctgcgttaaatcagctaatcaatcagggaatgtgttgcattatacggttcaatggctccagtgctttgtacatcgcgggtatttataacggcaatgtatgtttaggcggcgtaagagagcagtatgcgattgtacagataagaagcttcgctgacgaaaatttctggcaagttgatttgtaa

SEQ ID NO: 234385 - DNA, 1257 bp, Klebsiella pneumoniae
atgactaaatgcaggagagatcattgcgataaccttgtttccagactcagaccagcactacaggaacggttatgtgatggccattatttgatttttttatccggagccaacaggcgtaaagggagagaaaatacccgatgcggatatcctccttgtaagaatacgttatcaggaacaaggaatgaaaaatattgcagtaaagtttgccgtcaacgtgattccaggaagttcgataacttcaatgctttcagcattctgagctcatcgtactggacgcatatgggaaactcaatcaaacggaatctttattttttaggatcagtttcggatatgagagatataataaattactatcatctgtatatactcaagtctcgtcaccaacgaagttatactcctccgccgagtggaggtgttgaaaaaatgacgcttgagcaattgttgtttctggatatctgtcatttgtatccgaatgcaaagggcggagcaagttccgctgagaatcttattatagcgccttcatttattaatcgcagaaataatgatgctatcccgtatcagggacatggtttcggggggattcagtcaacgggtgaattgttcccttttaacggcagtctgtatgacagtttaattgtgcgatttggctcagaggatgtgaatgcggcattgagagaaataactccggccaaacgtttttatggcaatgttcctaggaagattgagtttgggggtatcgagcaacagcttcccttgttcactttacttcatggggagttgtggcgtcttgggcatcacagggtttcagaatgtttgatggaaataaaacaactattccctgaataccctctctatctggagttgctggcaattgtgggcttccatgcggtgttatctggcgatcctgatcgcatcatggcgcttttatgccgtgtttttgataaatgctttaatatcaactcgtcattacgtgagccacacaagcagtgtatctgtctgatgtatcgtttactgagtaagtatcttcgacgctacttcagtattgatatagacaacagggaggctgtggtggtgttctacaatgggttctattcacaggagataatcgcgcctggcgattctgaagatgaagtcgtgtgttatcgctatttcactggcgtcagacgttctgctaccacctttttctatgtaccaccacagaagaaggaacctgtcgatttatggcgtcttatgggggcagaccttacttttgaataa

SEQ ID NO: 234386 - DNA, 945 bp, Klebsiella pneumoniae
atgcagcctaaaattgatgtcagcgccattatcccggtcttcaatgcgcagaccaccatcgaccatctggtgaataggctcctcagcgagcaaacactcagcactgaggtgattgttgtggatgatggctctaccgacgaaacgtcgaccatactcagcaccatcgaagatgaacggctggtggttatcagccagcagaaccttggtgtatatgctgcaagaaatgccgcactggcagtgcaccggggtgaatgggtggtttttcttgatgcggatgaccggattgaagaaggttttctccgggagagactgaaaagcgcacgagcggcccaggccgatgttgctcttttcaatggctggtacaccgacagcagttgcctgcaactaagacctgttcatcgtaagcaaccttatgctcaggcactcaacgggcatgcgtggatacaacattgcgtggcacagaaagaatggccgcattacctgtggctacaaatggtgcgctcgtcctatataaggaagaataatctgcactttcaggaaggaaaaagccacaaggacatcctctggacgattaacctcgccgctgcaaatggccagttttatttcgctgacaggaaggactatttctacatcacaaacccggcatcgattacccaccggcaggactactacgatatccgggcgcacagctacattgatgttatcagcgacattctcgttctttcatccttgccacagcaccatgaaatcaaaacgcctctgagaaggcatgcgctggttgagtgtcgccattttctcggcttgttccggcgaaagattgcaaaccggcaggcagcccgacagttgttcaggcaacgaatcgtattgcgtcagttggttgcaggggtcagcggtctgagcgacctcttttttgtgctgaaactcgtgagaaagatttatctgtag

SEQ ID NO: 234387 - DNA, 1182 bp, Klebsiella pneumoniae
atgaaaaaataccgtccacatcagaaaaccttgctggctgttgtgctcagcatggcggcgtttaatgcttctgccgcatggaccgtcaatggtaccttctgccagtcgtacagcgatgacggtcaggttctgctacgggttaagccgtcaacgattggtatcattgagaataagccacagtgcggcggtcgtggcaccactgaacttaccggtagtaatttcaggattaataacacttcttatccatccagtgtgatgtgtaacagccagtcccaataccagtcagtgcagacaaccgtggcaactagtgatattcagtcagttattaattcattgaaagaaaacaaaaaagccaacatgagcacgtttggttcttcttttaccttcagtacctctgattttgccagcgtgtgcggctcagtgattaatctgaaggtgactgatttcgatccccagtcggaatacaaacagggcatggcaaagatgggttacaaacagggtgaaaacggccaatggcataaacagtcaaagcaggcattttcacgcgaggctgacccggaaatagctgccagttacaatccaaaagcgggcgttgctgaaggctctggaaaaggtgggttccatggagagggagccagtaaaaatctttatggcccgggtagcctggcgcaaaaggatgcagaagcggcaaacgaagcccgccgcctcgcggcacaaaatcgtgtgtcgaaaactaccccaaaaataacagaaccagagaagcagacagctcagcagcctgcggatctcccggtgaatgcgttctgtaccctggataacgggaaaaatgtgggggtctatgccgccgcagggaaggattatcgctacacctacacggataagaacgataaacccgagctggagttaacggaagggctgttcggtgtgaaagccttccactaccacgcaccgctgggaatggggtcggccagttacatccgctttaacaaaggggtatatgactacattctgctgaataaagacaccggtcatgaagagtttcagggcatccgggtgtacaaaaacggggatctgatttcggctcatgaatgtaaaacccgtctgacgctcgatacccgcgagcttccccaggacagtcacgttgacaacgaaaaaatgggtgaacacttcaccctgaactga

SEQ ID NO: 234388 - DNA, 672 bp, Klebsiella pneumoniae
atggaaaataacgatgatattgacgttgagtatgacgatgagatgccagcagaagaacacaccccccgcagcattcaggcgatgatgggctggctctatgacaaagccgtcagtgggattgccgggatcgagtcggctgaaaccctggcagaacgctatctcacggatgcggagggggatgtgacaaaggccgctcacgcgatgatccgctgggagagcgttaaggcgggcagtaccggctttttatccggagtgggcgggatggtggcgatgcccgtcacgctgcccctgaacatcaccagcgtactgtttctccagacccgactggtggcagccatcgcctgccttggtaaacgcaatctggctgatgaacgtatccgggcacttgccgggctgtgtctgtgcggtaacgctgccaaagcgctgttgcaggaagtggcgttacaggcgatggagaactggacccggcccttcacacggaggattgtggagaaaaccctggtgctgatggctacccggacaggcatacgcaccggcggtcagtttattcgtctggtgcccctggccggtggtgtggtctgcggggtggtggatgtcaccaccacccgcacaattggccgcattgcctgcaccacgtttctgccaccttatccggggcaacggaaatcatga

SEQ ID NO: 234389 - DNA, 252 bp, Klebsiella pneumoniae; identical to SEQ ID NO: 100793

SEQ ID NO: 234390 - DNA, 819 bp, Klebsiella pneumoniae
atgcgattagccagccgctttggccgaaccaaccagatacgccgtgatcgtccactaacccacgacgaattacaccagcatgttcccagcatttttggcgaagacaagcacgaatcccgctcggagcgctactgctatatcccgactatcactctgctggagaaccttcatcgcgaaggatttgagcctttctttgcctgtcagactaaagtgcgtgatcagagcaagcgtgagcatacgaagcacatgctccgtctgcgccgtgccgggcagataaacggtcagcaggtgccggaaatcatcattcttaattcgcacgatggcgcatccagctttcagttattaccagggatcttcagaagtgtttgtacaaactcgctcgtctgcggtcagtcgtttggcgagatccgcgtaccgcatcgcggtgatgtcgttgaaaaagtgattgaaggcgcttacgaagtcctcggcgtgtttgaccgggtggaggagaaacgcgaggccatgcagtcactgctggtgccgccacccgctcagcaggcgtttgcgaaagcagcgctggcctaccgttttggcgaagagcatcagcccatcaccgaatcccaggtactgacgccacgtcgctggcaggacgaaaaaagtgatttgtggacgactttcaatacgcttcaggaaaatttgagtaagggaggcttaaatggtcgctccgcacagggtaaacgcagccgtacacgcgcggttaacggtatcgacggcgatatcaagctgaaccgagcgctgtgggtgatggccgaagaattacaacaggcactgagctga

SEQ ID NO: 234391 - DNA, 480 bp, Klebsiella pneumoniae
atggaaacacagttaccgctgtttgccgccaaattaccggcatccgcacagcacaccatccgtgaggctctaaccctgctggagcgtcagttacgtgaacccggtgcgtcatttacctccagccacaccgtccgggactggttacgcctgcagcttgccacgcaggagcgtgaagaatttattgcgctcttcctggataaccagcaccggctgattgcgcatgaaaccctcttcaccggcaccatcaaccatacgcaggtccatccacgggaagtagtgaaggctgcactgaaacataacgctgctgccatgctcgttgcacacagccacccttcagggcacgcagagcccagcgaggcagacagacggatcacagaacgtcttaagcaggcgctggatttggtggacatccgtcttctggatcacctggttgttggcgggatggagatcgtctcgctagctgaacgcggctggctgtaa

SEQ ID NO: 234392 - DNA, 375 bp, Klebsiella pneumoniae
atgttcgatactgaaagtaccgatgtcggggcgatacctcagcacacaatcgcttccccttggtgggggctgaagtgcgacaccacaccctgttttggtacccgcctggtccaggagggcaatcagctacacttcctgtctgaccggagcaatttcaccggaacatttcacgaaagcgaagcattgcagcttaatcaggcttttcccctgatgctcaaacagcttgagttgatgttggtatccggtgagctcaacccacgccaccagcactgcgtcacgttgtatcacaatggtctcatctgcgaagcggacacactgggcagttgtggttatatctacctcgcgatttatccgggggaaccgccagcagcgtaa

SEQ ID NO: 234393 - DNA, 378 bp, Klebsiella pneumoniae
atgcaaacccaatctatacaccctgtacgggcgacggcgtcacgcccatctcctgtcgatatctggcaaaccctgttgacgtacctcctggagcaacattacgggctcacacttaacgacaccccgtttggcaacgacatggtgatccaggagcatattgaggctggtatctcactgtgcgatggcgtcaattttatcgtcgaaaagtacgaactggtccgtatcgatcgccacggtttcagcacagaaacacagtcaccgcttattggcagcatcgatatccttcgtgcacgaaaagcgaccgggctgatgacccgcaacgattacaaagtggtcaccgacatcaccaccggcaaatacagcggggggacacgatga

SEQ ID NO: 234394 - DNA, 492 bp, Klebsiella pneumoniae
atgaaactctccctcacagtggaagctgatactgtcaacgtcctggccctcaacatgggccggatttccgtggatatcgatggtattgaactgaccgagctgatcgatgtggtctgtgataatggctattcgcttcgcattgcagacgagcccggaaaactgctgattgaagatccgcttcctgccagcgcccgctaccatggcattcagtgcagcacggcgcatatcacctgcgatgacaatgatctgctgtatcggctctcgcaacaacgggaagctcacgaggatgcggagtggatttgctacaccggatcaggctatctcatccgtctggatgcgtgggcttttccggttctgcaactgaaacgatgcggactgtcgaaagccggtcgccggttgattatcactctgatgcgtcgctacccattgagcatcattcacctcgatgcctttggtgaactgctaccaggctttgagatcttcgactggtaa

SEQ ID NO: 234395 - DNA, 204 bp, Klebsiella pneumoniae; identical to SEQ ID NO: 100787

SEQ ID NO: 234396 - DNA, 846 bp, Klebsiella pneumoniae
atgtccgaacaatacacccacactgaatccgatgttctgacaggccataccgagcttatcagctccaccagcattgaacgtatcgttgtcgggcgcaatgccgcactggaacaaatcaaagcgatgatccatcagctcgctgatatctctgcgctaaccgagagtattgggggtaaaacagccattgactgggcaatgcgtcaggaatttcgccgtggttgctggttacttgagaaagaacaaaccgccatgaacgtgatcacctgcaatctcgaccgtagcatctggcgcgatttgatgaagaaatccggcatgattgcgctgatggatgccgccgctcgcgacgaatggaatcgtaatcttgagcaggatgatatccccgccatcagcgaagagaacattatcagtacctttaagcaactgcaccacagcaaagacgatgtgtttgagcgcggtatcatcaacgtatttaagagcctgagctgggattacaagtcgaactcaccgtgccggtttggcaaaaagattatcgtcgatggactggtgaattatggccgttggggatttagattacttcacgggaaacgacgggctcagttggcggatctggatcgcatgctgaatctgctcgatggtaaacctgttcccgaaaaccgtcatgatcttagcatcagattagatgatcacataagcaagcaacacagtaacgtatacgaagatgagtacgtgtcgatacgctacttccagaagggctcagggcacattactttcaaacgccctgatttggttgagaagatgaatgacattgttgccaggtattatccggggatgctggctgctaagtaa

SEQ ID NO: 234397 - DNA, 1479 bp, Klebsiella pneumoniae; identical to SEQ ID NO: 121753

SEQ ID NO: 234398 - DNA, 693 bp, Klebsiella pneumoniae
atgcatctcttatacgttgatgagtctggtacaccatcagaccctacacttaatcattttgtcctttctggtatctcagtgtttgaaaagcagactcattggatagagcaagagatgaatgctatcgcagccagatttaatactgatgatccgtatgaaagagaattgcatggttcgcctatgagaggtgggcgagatggctggaaaaattttcctttcgatgacaggaaacaagcgatcaaagattgcctaacactcctgactcaaaagcatcgggatatccgtatatttgcgtgtgttgtacccaagggatccttaggtggaaaggacgtaataacagaatctttttatcagatatcgtctcgtttcgacatgtatttgagccgattacattaccaaggagcaacatctcgaggggtggccatttttgataaatcgtcaacagagaaaagtattcagtctcttgctcgtacgtttaaagatactggatatggatatggaaaacttcgtaacttctctgaagtgcctttgtttttggattccaaggcgtcaaggttgattcagcttgcggatcttgtatcgtactcaattttcaggaagtttgagctcaatgatgatgagttctacaagattattgagcattcctttgactacaataatggtaaagttcacggactttacgtagctcactaa

SEQ ID NO: 234399 - DNA, 309 bp, Klebsiella pneumoniae
atgaccgagaaactgaaaggaacggctagtgttctgcatgaaaccaaaacttatgaggaattggttgagaagcattcagtagaagtcgctaacggcttgctggcaaatgcgatcaatactgctttgcctaacgcaggaataacttcaaatgacgtcgccggattcagcaaggtgacgatagccttgcgcacaggagaagttgatctagccaaaacagcgaaagaagcgaacgctgatgctgcagctgtttcagcaaatattattgcgggattgaaagcatcacaaaagagcaaggatgaaataaagtga

SEQ ID NO: 234400 - DNA, 858 bp, Klebsiella pneumoniae; identical to SEQ ID NO: 152541

SEQ ID NO: 234401 - DNA, 228 bp, Klebsiella pneumoniae
atgaaagaagtcatgacgcgtattgaactaagtggaacgctcggtaaaaagtttgggaaaactcatcatcgccttatttcatgcccccatgaagcaggaatagcactggcgagtaccattcctggatttgaaaaattcatgattaccagcgaagagcgtggactaacctatgcggtatttaaaggagaaaaaaacataggggtagacgacctaaatagctgcgcctaa

SEQ ID NO: 234402 - DNA, 711 bp, Klebsiella pneumoniae
atgcgccagaaaacgattatggcgatacaggcccatgctgccgctgattacccgcgtgaggcatgcggcctgattgcccaaaaggggcgagtggagcgctatttcccctgcagaaatatggccagtgagtcgaatgataattttgtaatggcgccagaagattacgcagcggtagaagactgggggacgatcatcggcattgttcacagccatcctgatgcgaccactcaacccagtgaactggataaggcgcagtgcgatgccactctgctcccctggcatattatcagctggccggaaggcgatctgcgtaccatccacccacgcggagagttgcccctccttgagcgtccgttcgtgcttggtcattatgattgctggggcctggtgatgagctattttaggcaaatccacggcatcgagctgcacgattaccgcgtcgattatccgtggtgggaaaaggagtattcggacaatttttatcaggactgctggtatgaatgcgggttccgggagtttgatggtccgccgctaccgggtgatatggtgatcatgcaggtgcaggcggataagtggaaccatgccgggattctgctggaaggcaacatgctgttgcaccacctttatggtcatctcagccagcgcgtgccgtatggtggatactggttagacaggacgatgaaaatcgtccgatatcgttctctgtgttaa

SEQ ID NO: 234403 - DNA, 756 bp, Klebsiella pneumoniae
atgagtcttcacgctgattatcagaaactggagccgggagatgaaatccggatttttgaaattgatggtagtgcttttaacatgggggatgttttatatttccacggatataacattcctcatactgaagcggaaattttagccgctggtggcgatgaatcgaaattgcccgctaaaagtatctggtggcagggaaccgaatataaagcgtggccgtgtgaattagaggggatcgaatcctcgacttcaggaagcgacgcgcagccgacactgagggtgggtaacattgatggttcgatttccgcgttgtgtttgcattatgacgatctggcgatggctcgggtcattatccatgagacacaaaagcagtatctggatgcacgaaacttccctgaaggtaatgccacagcagacccgacgcaggaaaaacggcatctgtattttatcgacaccaaaagccttgaaaccgatgaaatagtggagttcacgctttccagcccgatggacctacaggggatgatgattccgacccggcaatatcattcggtttgcacctggtgtattcgcaataaataccgtagtggcgatggctgcgattatgcagggacaaagtatttcgacaaggataacaagccggttgatgacccatcgaaagacgtctgcaacggaacactcactgcctgcaaactgcgttttggtgagcataacgagttgccgtttggcggatttcctggcacgtcgctgataaggagctga

SEQ ID NO: 234404 - DNA, 204 bp, Klebsiella pneumoniae
atgaccgtgtattacatcagtaaagaggaggacggcgtttacgccgtctccacaaccgatattaacagcatcatttctggcgactggcctgacgctgagtattttgaatacgcgatggcagcactggtttcttatctgtcgtctcagccagaaggtgaaggttatgttctggttgatagaacaaaatcagcgccagaaaattaa

SEQ ID NO: 234405 - DNA, 489 bp, Klebsiella pneumoniae
atggcgcagatgtaccgcaaatgggccgaactaggaaaacttgagcttaccgatggtgatgttatcgatcatgcccagataaaagcggattttctggaatggattaacggcgagaatctgaaagaaaccggattcgatccgtggagcgcaacgcagttcagcctggcgctggcagaagaaggcgtaccgctggtggaggtccctcaaaccgtcagaaacttttctgaatctatgaaagaggttgagtcgctggtctacggagggcgtttccaccacagcaatcacccggtaatgaactggatgatgtcaaacgtcaccgttaagccggataaaaatgacaacattttccctaataaatccacgcctgaagccaaaattgacggtcccgctgcgctgtttaccgcaatgagtcgaatgctggttaacggtggtggtgaagttgacttcctgtccactatcgaccctgacgaagaccttttacttctatga

SEQ ID NO: 234406 - DNA, 162 bp, Klebsiella pneumoniae
atgaaaactttaatcactgatgctatcgggcttaccgggtttggttcgctcgctgcaggcgtatatctgcagttcgggctggcgccgtctctgatgatgtccggtagcctgttactgctttatgcgctggtggcggcaatgagggggaaaaatgctgcttga

SEQ ID NO: 234407 - DNA, 396 bp, Klebsiella pneumoniae; identical to SEQ ID NO: 101138

SEQ ID NO: 234408 - DNA, 468 bp, Klebsiella pneumoniae
atgaagagttcagggcagctgttatcgctggcaggtataattctcgcggtgtactcattgttctttatggatgtgagtgttgaggttggcgatggtacaagagttaataatattgggctaatggctcaacagcaaaactatttattagttgcggttgttctttttcttgctggtatcttcatttctttctcagggagaaagaagtcattacaagaggtagattttactaaaatagaatctttctcatcagatgactttgtttctttgaaagatggtgaaccatgccttaatatattggctgtagacaatcttgcaattatgtttttaaaaaaacatggttcaaacagtgtaaatgatatcctttttatgaatatgcctttaatcgataggctagaacaaggtctccctgaatcactaaggaaagattttaaatctacccttaaaaagaggttaaaggacaattgttaa

SEQ ID NO: 234409 - DNA, 270 bp, Klebsiella pneumoniae
atgcgaatgataaccaggaagaagcccgcatttacggagctttatcaaaccggcgtattaacgcgcatagccgccgtaaaaagtcccgatggcggcggctggcgattgttcgggttatggcgggggaaggatatagctgtgtttgtggaggctgctcgcggagggattcgcgagtggtctggcctggactaccttgccaacttctgcgcgagctgtggcattagcctgtgggaggttcacaacaaggtcacagaaaaaccgccgcagtga

SEQ ID NO: 234410 - DNA, 168 bp, Klebsiella pneumoniae
atgagcgaagaagaattattagaggcgatccgcatacctggcagttacgtactggatagcctacctggtggcgtttacgttattactccaatggagcctggggaaataaagaatacggagagggctcacgaggaatgcaaaagctactttctgaaagataaacactga

SEQ ID NO: 234411 - DNA, 594 bp, Klebsiella pneumoniae
atgagagacccccgtcgcagatgcaaagcacccggctgcggtgcctggttcaatctgacctattcgaatgtttactggtgctgcgaagagcataagctcaagtacctggcatttcagcgtgaaaagcagaaagccaaagcgcaagaccggttaaaaaacaaacccgttcaccatatccgccctgaacgaacgacggcggaaaaatccctcagccactggcttgaagtcaccgaacgcgtggttaacacgctatgtcgtgagctggcccttgccaatggagaagggtgtatttcctgcggaactcataacgcagccgtctggcatgccgggcattatcggactgttgctaaagcgtctcaactgcggtttacccgcatcaatatcaatctccagtgcgatgaatgcaacgtcggcaagtccgggagcattaaggcctaccgtataggtctggttgcaaaatacggtgaggctatagtgcaggggcttgataacgacaaccgaatccatcgctggacgattgaagagctggaagccatccgcgccgaagcatacgccgatctgcgtgcactgaaaaaagctcaggaggcagcatga

SEQ ID NO: 234412 - DNA, 516 bp, Klebsiella pneumoniae
atgaaattttacactatatcaagcagatacattgaatacctaaagggattcgaagacaaagttcccaatagcgaagatcctacctatcagaatccgaaagctttcattggcattgtgttagagattcaagggcataagtatctagcccctttaacatccccaaagccatggcatagcactattaaagaatcatcgcctagcttctttaagctccatgaaaatggtgtccccgaaaatcagctcggattgattaatctgaagttcatgattccaatcatcgaagccgaagtatccttgcttgatttgaacggtatgccgaatacctcctacaagagaatgctctataagcagctccagtttattcgtgtaaattcagacaaaatagctgaaaaatcagagcttttaagaaatctagtcctgcaaggaaaaatgcaaggaacatgtaatttttccctgttagaagaaaaataccgagatttcggcaaagaagctaatgacatggaagaagacgagtaa

SEQ ID NO: 234413 - DNA, 129 bp, Klebsiella pneumoniae
atgtttgagaagggcgtgtgtctggctgagaggcttgcgaaagtcgcagtagtaataactaaccttgtgctctcactttctatattgggattggtctatttcatctttcaaaacttggccttgaggtga

SEQ ID NO: 234414 - DNA, 711 bp, Klebsiella pneumoniae
atgctgtactggaaaaaaatgccttcactatggataggaaacaggatcgctgaattcagcgatcttgatacagcaaaagccatagcggcgttaaaaatttatttaacattctgcctgttttgcaaagagtcagactctggccacagaacggttgagctaacctttagcaacctttgcgagatggcgtcattaagccgttccctggtgaacgaaggccttaaaattctttatgcaaaagagctgataaaaaacatatcgccgactgcacgaaaaaagatttataccgtggatgtgctagaaaatcatgatgatggatggtgcaagcttccatttaaaggagttgtcgacgaggacaaaaaaataagtgcatttcaatccatgcacaacagatatccctttgagttactagccttgcaaacttacatgtatcttctttacgctcgtgataataacagcgaatacacactggctaggaaaaagaccatatgcaaaaaattgaaatgcaaattacctgaactaaacaaagcaatcacctaccttatccatataggtttgcttgatagaattgtgaaaaaatccatagaaaacatacctctagatatgtttcatgactcgtactatttctatgtaaaaacaggcagtaagagcgctctaacctacaaaaggaaatcagaaccgccagttattccagaagccgacttaccattttga

SEQ ID NO: 234415 - DNA, 192 bp, Klebsiella pneumoniae
atgacgaaacaacagaaaacagcgctgaacatggctaaattcatccagaatcagtctctgctcctgctggagaagcttaacgagcttgatctcgatgctgaggccgacctttgtgagaaactccacgatgatgcggagcatcttttccgtacactgtcctcgagactggatgaattactggatggtaactga

SEQ ID NO: 234416 - DNA, 507 bp, Klebsiella pneumoniae
atgatctcacaaagtgaattgaagaagttgatacactacaatccagaaaccggtatttttacgtggattgttaacggattgaatcggcgcaaaggcagggaggcaggtaatgtctgtccttttcacggctacgtcagaataggaattaacaggaaattatataaagcacagcaccttgcgtatctttatatgactggtgagtatgcagaaaatgtagatcacagaaatggaattcggcatgataaccgctggcgcaatatcaggaagtgcacaatacagcagaataacatgaacatgccaattcgctctgataataagagtggtgctcctggtgtgaactggtatgaaggtcgtaaaaagtggcgggtaacgttaaggattgatggcaagttcataagtcttgggtactactcagactttgaattagcggctttagtttctgaagaggcgcgggacaaattctttggtgattttgcctcatcgaagcggggcacaatttcccggtga

SEQ ID NO: 234417 - DNA, 1344 bp, Klebsiella pneumoniae
atggacctgggcgagatcccgacgccgcgactgcatgaaattatggaaaagtatggtttctctgattatcacggcattggcgatgtcatcgggaaaagtaagggcggctatttctttgattcagtcaccacggggcagaccattagttggctacgtaacaccggccgcccgctgaatgatgaaaataaaccctggttcgcggcagtaaacctggttaacccccacgatgtcatgtttatcgacaccgatgagcatggtgagcaggtgcagtggaaagggccaatggataaagaaaaccacaccctgctgccaacccaacccccgcacaaccaaatctatcagcaaagctggccagactatccgctgcctgcaaaccgccaccagccgctcgatgagcctggcagacctgccgcccataaagagtaccagaatgccagggcggtgatggagggacagttccccgatgaagaccggcgctggcgcaaattactggattattatttcaactgtattctcgataatgaccagcatcttgaggcgattctcaatgagctggataacctgcagctgacgcaaaatacgattatcgtctttaccgccgaccatggggaactcggtggctcccaccagatgcatggtaaaggttcctcggtgtacaaagagcagatccatgtgccgatgatcattcgccatccggcgtatccgggaaatatccgctgcaacagtttgaccaatcatctggatttagtaccgaccctgattggtctgactggacgcgatcgctcgctgcgagagaaagtcctggagggcagaaaaggtcgggatatgagcccattactggcgcatcctgagcaagcgggcttaaatgcgctgcgtccgggttcgctttattgttacggcatgatcctgtatatggatgcgcaatacacggcaaaattcagaaagctggctggagaaaaactcccgcacgatcaatttaaaaaagcgatcgcgtcactccatcctgatttttcccatcgctcagggatccgtatgatcaacgatggacactataaatttgcccgctacttttcgctcaagcagcatcatattcctgctaccctggccgaactgctggagaataatgatgttgaacttttcgatctggttaacgaccccgaagaaaatcataacctcgcccgggagccagagaaataccgggatctgttaatgactatgaacgataaactcaatcagctcactgccgctgagattggcgaagatgatggcagctatatgcccccgtttgaaggaagccagtgggatctgacggcggcccagatgcatcaatatatgcgcgattag

SEQ ID NO: 234418 - DNA, 525 bp, Klebsiella pneumoniae
atgaaagaaccaaataaaatagatggaaatcgccgcgatctcctcaaaggtctggggattgccgctgtcgtgagcctgttaccagagacgggaaacgccgcacaaaataatgccgccccgaaagcggcatgggatattcctttcaccggcgaaatccctgacacactgcccgaaggctacaatattttactaataacctgcgatcaggaacgttatttcgagcggtatccctttccggtgccgggccgggaacgcctgatgaaaacgggtatcacttttaccaatcatcagaacacggccaacgtttgtacgccatcgcgctctgtcatgtacaccgggctccatatgccgcacacccggatgtttgataatcttggcttcccctggatgaattacgatctggacccggaattacgtaccgtgggccatatgatgcgtgaactgggttattacacggcgtataaaggtaaatggcatcttacccgggagatcgatcagccggtcgctggtaaatcggtagaataa

SEQ ID NO: 234419 - DNA, 435 bp, Klebsiella pneumoniae
atgcagcctgtctgtgggcagagtttactggtggagcaaaacggcgatgtctacagctgcgatcactttgtctcagcggaatataagctgggtaatctgaagcaagatgctatggcagtaatggcgagctcgccatttcagcaacagttcgggaagcaaaagggccaactctctgcccgctgtcagagctgccactggcgctttgcctgccatgggggatgccctaaacaccgttttaccatccatgacgacgaagcacagaattacctgtgcagcggctatttaacttttttcggccatatcacgccctatatgaacgtcatgcgaaggcttttattaaattgccagccgcccgcgctcattatgagtcttatcccggagattcggcaaaatatattacaattaacggagtctgaagatgaaagaaccaaataa

SEQ ID NO: 234420 - DNA, 345 bp, Klebsiella pneumoniae
atgattatcgggaccaacgactaccggctggggcggacactatcgaacttctacacagcactgacttcatgggtgcaggcttataaagcggcgcttcctgatactgctctggtcctgatcgccccaccgcaatgtaacgcgtcaggaagttatccgctttcctcataccgcgatgtgatgcggcaggtagcgaacgagaaccacgtcgagttcttcagcctctatgatgacttccctgcagcatatgcaacggcgaatacctacggcctgtggaatgacgctttgcacctgaacaacaacggggcagattttctggcccgggaactttataactacttcctctaa

SEQ ID NO: 234421 - DNA, 1083 bp, Klebsiella pneumoniae
atgaatctacctgttgttcccccattagatgttattcaggaaaggttacctttaatttttcctgaaggtactgaaaatcgtggatatctaatccgagagatagctgcaaaaactatttttgtcatgttttatgtcggagctgttgacgggcttgagcgatggatccggcctagccaggtcgtaagtatgggggattcacaggctagtctcactgatgatgtcagtcgagaaagttgggtgaagatgactttctcaaaacataagacaagacctactgatgcatggtatgcagagaatacgcgtgaaccgattcgtgacgagacgatcaaaaatggtttcataccgtgtaatgcaattgttgagcgtaaaggcatacccaccacatcttctcaaccacgttacagcttgaatcgatcttttgccgcgctttttgatacgaaacttcacggtgatgaacttttgagagcaattagtaactggcaagaaagtcatttgaacaaagcagcccttgccagattacgtttattgaagtcaggtgcagcgattgccgatgatgcaatagttgtgacttttccaaatggggaaaaaagaactttagctcctggtccatcaagcgtgatagctaaagctgttatcgaggtttttgctcccaattttctgaagaatccaacagtactctggttgtctgagtccgggaataaagttgttgctcaggacgaagtattagcgcaggcactaggattaaacattgatgcttccaaggctctacctgatattattttggttgatttgggagaagatcgaacaggttctgatatgcttgtcgtttttactgaggttgttgcgacggacggacctatcaacagggaaagaaaagttactctcactcacttagctattgatgctgggttcagcgagaagaaccttgcatttcttacagcatttattgatagaagtgcttcgtctttcagaaaggctatccctgaattagcatgggggtcctatgcttggtttgcgtcagaaccagaacacctgattgatctcagagatggttctccggtaaagattagtcagagggtttga

SEQ ID NO: 234422 - DNA, 1797 bp, Klebsiella pneumoniae
atgaacgtgcaacattttgatttttttacagatagtgatttatctaatctggaacgatatcaaacttgtaaagccatggctaagggttatgccagcacctacaagacggaacagtcaagattaatgcaggctcgctcattctgctcaaatatcgtatccgcatattgggatacattggcaagaaagctaaaaagcaacattaaaatgcgagcagtaccacatacggtctacatggaagatattttatgtgatgcgcgtgagcttgctgaacgaaccggcgaacttattgctcgatttccggctgaggatgctgggtatttgattggctccatttatacagtaatgctaccttcggcctaccgtgctgaaatgggagcttattatacccccccgcctttggtatcccgtctgttggatttggctgaacaatcaggtgttgatttctcgcacgcaaccgtgattgatcctgcgtgcggcggcggggcgtttttagcacccgtagccataagaatgttaaaaaaagataaaggctcttctcctgaatggattttgcggagaattagctgtcgattgaaggggatcgagattgatccattcgctgcctggatgagttcggttttacttgaatcagtgttaatgccgctttgtgtaaaggctaagcgtaggttgccccatgatacaattattgttggggatgcgcttcagcaagaacatatttttggttatgaccttgtgattgggaatccgccttatgggcgtgtaactctcgatattaaaatgagagaaaaatattctcgctcactatttggtcatgcgaatctatatggcctgtttaccgacttagctattcgcatggttaaagaaaatactggggttattgcattcttaacaccaacttcgtttcttggcggacaatatttcaccgctctgcgtactcttttgactgagaaaactactccatttgctttcgatttcgttgctgatagagatggtgtatttgacgatgtccttcaggaaacaatgttgacggcatttaaagctggagatcataaaatccgggcgttagtgtcttcgcttgttcctaagggattgaataaagcaaaaatcgagaaaataggtagtgttgaagtagaaaaaggaggagcaacatggctcttgccgaggggtaaagatgatgcgcgttttctcaagatgctgaaaagcatgcctatgcggttagctgagttgggttactctgtttctactggcaaactagtctggaatcgattcaagtcacagctgcgtactacgaaaggaaagaatagctatcccttagtctgggcagagtcgatcacttctgctggttttcgttttagtgcagatagaaagaaccatgttccctatattgatatagtaccgcgacaagatttccttgtgacaacttctgaatgtgttctggttcaaagaacgacatcaaaagagcaggaacgaaggattttggctgcgatactacctcagaaatttatagatgaaaatggtggtgttgtggttgaaaaccatattaatattgtgtattcaaacggattgttctctgcggtccgacccgaggttattgaggtgctgcttaactcgcatgtggttgatcgggcatttaggtgcataagcggaagcgtagctgtttcggcatatgaactgaattcgattccgttgccttctctagagcaggtgatggagattcaagcgctactcgatgccggtgttgaccgccgaataatagagaggacaatcgcaggcttctatggagtgatgtttgcatga

SEQ ID NO: 234423 - DNA, 150 bp, Klebsiella pneumoniae
atgccgtttggctgcggtaacccgatccgaatgaggttcgaacagttgctacaagaataccgtttagaggcgcagggaagggggcgagtgactatcacggaacaacaggattgcatcgctgagcggaggcttggagtgattaataaataa

SEQ ID NO: 234424 - DNA, 1146 bp, Klebsiella pneumoniae
gtggcagagatcactttaaataatgttattgtccatgaacttctcaaagaagctaagaagcctatgaatccggccaaaagggtgaaattcagagatacaactctcgattcgtccaacaaaatagtcctcaaactcattaatgaaattaatgagttgtatggaaaaaaaggaaactctgcatattatggagtttttaaagaagagttaacagaacgtggacctgtacctgatgcaatcgagcgctatacttctttatcaaagccctccgctcaaaatttcatagatcttagtgtaaatataatgaacaaactggctgatgagtctgaaaagcaattatggtcatctggtggggtgattatttttgcagattatttacgcgatggcattaacttctttttggttactatgataaaacagaaagaaggcatacgattaagttcgaaacttgaaccagaactgctcgaacaactcgatttaacaaaaatcaatcaagctgcacgtatcaattttgataaattcattcaatatcaaaattcatcagcaattgaaaagcaagatttaagctatttaagtttcattagcacgactacgcaacaaacggcttctggttatttcattcttgctctaggatgtgacaaaggcattacatccactaacgcaacaaaaagtcttccaactgaagtcatgaagttttttgagaagcatactgaaatcaaaagccactctcggattttcaaaaacgaagttataagctatattgatcatcaattcgattctggtaagcctgcgaagttatcggacatttcagcaatggcttataaacacatgacttacgtcgacgagcaaacacgagaaaaactttccaatgagttaataacgtatttgaatagtgaagagattcgtatccctgttgaatttaatgtcagccgttcaggcttgaaccaacttttgaatgtcaaatataaaggcgatggttatagttttaattttgagaaagcacttctaggcacgacgggtgatgctgacatatgttataatactgaaaatcaaagtttaacattcactaagctaccgaaagacgcagttcagagcattgagcgtgcattaaaagaaaaatcacaaacaggtgacggagatgacaaataa

SEQ ID NO: 234425 - DNA, 1227 bp, Klebsiella pneumoniae
atgacaaataacacacaattaaggactcttattgagctatatagaatagctggcaaaccagctatttctggtgtgtatttgcctttgcaatttgattactccccacatacagaaactcttctcagagagcttattacctctcctcgtgcagctcaatacattgttgcagatgaattaaccgtcgacggcactcatttacagagccttactcttcccatcgactggaagagcgtatctataacattaaaactacctagagacagtattcaacgcttccataactccatagatgatttaattaaattcccatcagtaagaaatggcgaatttcctacagacttctatatcattgatatagattatcatccgggagatacaaccataccaccagcggttcaacaaattaaaaatatttgcagattgattaaagcattatccaagctcgcacactaccatgacaaaaaagccactgacggagaacctcgtctagttttcattcaaggttctgatggcaagtcaaaatctgcaatacttcagccaacaataacgaatgaaatgttaggctacgccgatattgattgtaatatagtggagcagttacaggatgattatgccattaatgacgtaaatcaccacatcgaaaagagatgcatatttcgtaatactttagttgagtacgttaatgaaaataactttaatttccagcaattaatcgaacactggacagattttcgtttagcctacgacaacaatctttctgtataccttagtggttttaacttccacaaagcaagaaaagacgtcgccgcagctgaattagaattttctgaaaaaacatcaaagaccatcagcgatttaactgccaaaattttagcaattccactgtcattactagctgccataggcatatggaaactaaacgatttaacagagcaatttgtagcattgacaggaataatctttacttcattaataattactttaattatttctagccagtggaaacaattaaggagaattattcatgcaaaagaaatgattttcaatccgttcagtcaaaagctcaaaagttaccctaaagaacttcaaggtgacattgaaagtgcaatagccgaactgaaaaaaaatgaaaggttctcattcggaatattggtatccttttatgtactatgttggataccgaccatagtcggcatcgccgttatactttataaagaaatttcatga

SEQ ID NO: 234426 - DNA, 510 bp, Klebsiella pneumoniae
atgaatattgatgtcgaaaaactggtaaaacaattaggtaagctctatcaggatattcttaaaaacggcttgattccttacaaaactgaaccctacggtgcagtcgatgatgatgaatctatattaaatatgaaacgtgaagggatgtttttggtctttacgaatgatcctgataaaaaatttaaagaaatatctttaaagttagaagatgaaggaaaaactgattggttgtttcctaacccgatgccatttggtctggagccggtgatgacccagcagtgggtgcgtgcacgcttcgggctgccgatgatttatgttgatgcgaaagtggttatgactctctatagaggagtaaaggagttttatccgctattagctcctgatcaaaatatagttgcgtcgtttagctataacaaagatttctttgtagaaagtgtgactttttatccgctggaacgagcaaaggagattcaggttgcgctggagaaaaaacgacttggtggcaaatga

SEQ ID NO: 234427 - DNA, 378 bp, Klebsiella pneumoniae
atgaggcgagaaggaatatttttatcttttatcaataaccaagaaaaaaatcttgaagaagtgactttgcggttagaagatgaaaataaaacggattggttatttcctaatccgctgccatttggtcttgaacctgtaatgacccagaaatgggtaagggacaaacttggccatccaatgatttacactgatgcgcagataatcatgactatttatgttggtgtgaaggaattttatactttgccggctcctcatcaatatatcgttgctgcatttacctataacaaagatttttttgtacaaaaagtcacattttactcaattgagcgagccaaagaaatacaagccgcgttagagataaaacggttgggtgggtaa

SEQ ID NO: 234428 - DNA, 528 bp, Klebsiella pneumoniae
gtgtggtgtatttatcaaatgagtattgatgttgaacagcttattaagaaaattagtcggccttatcaggaaatagttgatcaagaattgattccctataagaaaagaccacacggctcagttgatgagaacgaagcctatctggatatgaaacgtgaaggagtacttttagtctttgtaaatgactcgcagaaaaaacttactgatgtagagttaacattggaggatgatctgaaaactgactggatatttcctaatcctatgccatttaatcttgagccggtgatgacccagcagtgggtaagggaacgttttggtttgccaatgatatattctgacgccgaaaaaatgatgtcattttaccttggggtgaaagatgtctacacattaccttccccaaatcaatatttggctgctatgtttacatataacaaggaactttttgttaaatctgtctgttttttttcactggaaaaagccaaaacaatccagacagcagtggagaaaaaacggcttggtggcaaatga

SEQ ID NO: 234429 - DNA, 510 bp, Klebsiella pneumoniae
atgaatattgatgtcgagaaactggtaaaacaattaggtaagctctatcaggatattcttaaaaacggcttgattccttacaaaactgaaccctacggtgcagtcgatgatgatgaatctatattaaagatgaaacgtgaagggatgtttttggtctttacgaatgatcctgataaaaaatttaaagaaatatctttaaagttagaagatgaaggaaaaactgattggttgtttcctaatccgatgccatttggtctggagccggtgatgacccagcagtgggtgcgtgcacgcttcgggctgccgatgatttatgttgatgcgaaagtggttatgactctctatagaggagtaaaggagttttatccgctattagctcctgatcaaaatatagttgcgtcgtttagctataacaaagatttctttgtagaaagtgtgactttttatccgctggaacgagcaaaggagattcaggttgcactgaagaaaaaacgacttggtggcaaatga

SEQ ID NO: 234430 - DNA, 507 bp, Klebsiella pneumoniae
atgatcattgacgtcgaaaaactggtaaaacaattgggtaagccttatcatgaaatttacagtcacgggttgattccttataaaacaaaaccttatggccctattgatgaagatgaagctgaattagatatgaaacgagaaggaattcttttggttttcaccaataattccgagaaaaatcttactgaaattacattaaggttagaagataaaggcaaaacagactgggtattccccaatccgatgccatttggtatggaaccggtgatgacccaattgtgggttagagagcgctttgggttgcccatgatttatgctgatgcggaaatcatcatgactatttatataggggtgaaagaggtctatgctctgcctgctcctcatcaatatatcgctgccgtgtttacctataacaaagatttatttgtagaaaccgtgactttttacccactggaacgggccaaagagattcaggcagtactggagaaaaaacgattagagagttaa

SEQ ID NO: 234431 - DNA, 378 bp, Klebsiella pneumoniae
atgaggcgagaaggaatatttttatcttttatcaataaccgggaaaaaaatcttgaagaagtgactttgcggttagaagatgaaaataaaacggattggttatttcctaatccgctgccatttggtcttgaacctgtaatgacccagaaatgggtaagggacaaacttggccatccaatgatttacactgatgcgcagataatcatgactatttatgttggtgtgaaggaattttatactttgccggcccctcatcaatatatcgctgccgcatttacctataacaaagatttttttgtacaaaaagtcacattttattcaattgagcgagccaaagaaatacaagccgcgttagagaaaaaacggttgggtgggtaa

SEQ ID NO: 234432 - DNA, 342 bp, Klebsiella pneumoniae
atgccgctaaaaggtaatggaaataaattcattaacaacggtatcggcgttcacaacgaagcccaagtcagtgtggagcttaatgattctacttttgaaaataataaaatagggtacttagagggtaagctcgatcgcatagatgaactcttcaaaaatgaaacgccggaactcgctaaaaaagagttaatagaagagcttagcaaggctataaagcgtggggagtcagaaaaagcagagtctattttcgaaaaattcgactttcacaagtggatagcctctggcgctaacattgcaaagatcgttgagtcgctagcgtctgctatgaacattcattcgtaa

SEQ ID NO: 234433 - DNA, 567 bp, Klebsiella pneumoniae
atgaacgaaaacctgactcagcagtttgcgaactttgttcagcatcgtgctccacaggatgcagaagccattctgaccaataccagttctcctgaaattgcggcgcagcgtgaagcactggcgcgtgaattcgtcaaagagcaggttgaacccagggttgatgccgcgtatcaacaggggcgtgaaagcatcggacagaatatggctggggtgtcaggtggtggtgacaatggttcggtaatggctgactacggacaaaattctggtcgtatcgatgccatgacgcaagatgcgggtattaaggataatgtgggtcagaaagtggatgggatgattgcagagaataaacaacagcataaggaaacccgtgaaaacatacaacagcaaggcgttgaagtgaaaaaagagaatgctgaactggaaaatgaccacaaaacaaaaggaaatgatttcaaaaacacttataataacaaaaaggaaagtcagactaaattacctggcgcagatacaacaaaagaattgttggataaggcaagaaaattagaaaatgagacatcaaagagatag

SEQ ID NO: 234434 - DNA, 339 bp, Klebsiella pneumoniae
atggctgttagaggcaccggctccggctccccatccaccaccgttattcaggaacatcatgtcattggtgagaccgtcaaactcattactgccaacaatgccgacaccagtggtgaagtcgctgtaatcataaatcgctgccggtgcggaatgaaccctcaaaaacgacgggattttgacggattttttattcatataaaaatccgtcacaccttccgcgttggggtttggtgggattcttatctcagcatccacgccgcccgcaacgtagccacgggaaattactttgttaaccttatcctgaataatcatattcaggcagtcggcaaggttatttag

SEQ ID NO: 234435 - DNA, 372 bp, Klebsiella pneumoniae
atggctggggtgtcagatggtggtgacaatggttcggtaatggccgactacggacaaaattctcgtcgtatcgatgttatgacacaagatgcgggtattaaggataacgtgggtcagaaggtggataggatgattacagagaataaacaacagcatcaggaaacccgcgaaaacatacaacggcaaggcgcagaggtgaaaagtgaaaatgctgaaatggaaaagaaccataaaactaaagcaaatgagtttaaaggtgattataatgaaagaaagagtaaggtaaattctttacctggagctgactctcaggctgagttagaggaaaaagcggcgaaaacgcaaaaggattttcttgatgggaaaagatga

SEQ ID NO: 234436 - DNA, 483 bp, Klebsiella pneumoniae
gtgggacgtataaccacgcccgagccgttatccagctctcatcagctggctgagttcgtcagtggagagacagtcctcgatgaatggctaaaacagagaggtttaaaaaatcaagctcttggcgctgcccgaacgttcgttgtttgcaagacgggtacgaagcaagtagctggtttttactctttggccaccggtagcgttaaccatacggaagcgacaggtagtcttcggcgtaacatgccagatcctataccggtgattatactcgctcgcctggcggtagatgtctcattgcacggaaaaggggttggtgccgatttactccacgatgcagttctacggtgttatcgcgtagctgagaacattggcgttcgtgcgataatggttcatgcgcttactgaagaagccaaaggtttctatgctcaccatggatttaaggcatcacaaactcatgagaggactctgtttctaaagcttccatga

SEQ ID NO: 234437 - DNA, 501 bp, Klebsiella pneumoniae
gtgggtcagttcatcgagaaaggctaccgtaccgcgcgtcgacataccggcgcatacatcaccatcacgcagaacatcgtcgacttcgactccccgaccgcctccagcgccgcacgtgcagcgtggggtaactcatcgtacaaggccattctgaagcagtcagccaaagagtttgccaagtataaccagctgtacccggatcagttcagcaagctggagaaagacatgattaacggcttcggctcggccaaagagcagtggttctcctcctttatgctgcaggtggaagcgaactgctcctggcaccgcctgttcgtcgacccgctcagccgggcgatgtactcctccaaaggcccggattttgagtacatgcaagcgcgccggcaggagggggtcgatatccacgatgcggtgtacggactggcgtgccgcaactttaaagacgaaatggctgagcttgaatcccgaataccggtgaatgacatggaggataaacagtga

SEQ ID NO: 234438 - DNA, 525 bp, Klebsiella pneumoniae; identical to SEQ ID NO: 234418

SEQ ID NO: 234439 - DNA, 345 bp, Klebsiella pneumoniae; identical to SEQ ID NO: 234420

SEQ ID NO: 234440 - DNA, 204 bp, Klebsiella pneumoniae; identical to SEQ ID NO: 230628

SEQ ID NO: 234441 - DNA, 567 bp, Klebsiella pneumoniae
atgaacgaaaacctgactcagcagtttgcgaactttgttcagcatcgtgctccacaggatgcagaggccattctgaccaataccagttctcctgaaattgcggcgcagcgtgaagcactggcgcgtgaattcgtcaaagagcaggttgaacccagggttgatgccgcgtatcaacaggggcgtgaaagcatcggacagaatatggctggggtgtcaggtggtggtgacaatggttcggtaatggctgactacggacaaaattctggtcgtatcgatgccatgacgcaagatgcgggtattaaggataatgtgggtcagaaagtggatgggatgattgcagagaataaacaacagcataaggaaacccgtgaaaacatacaacagcaaggcgttgaagtgaaaaaagagaatgctgaactggaaaatgaccacaaaacaaaaggaaatgatttcaaaaacacttataataacaaaaaggaaagtcagactaaattacctggcgcagatacaacaaaagaattgttggataaggcaagaaaattagaaaatgagacatcaaagagatag

SEQ ID NO: 234442 - DNA, 741 bp, Klebsiella pneumoniae
atgcaattacgcacccggcaaggtgggccgattcccacacgacagcagcgcccggcaaggtgggcggatttccacacggcagcggcgcccggcaaggtgggcctattcccacacggcagcggcgcccggcaaggagggccgattcccacacagcaccggcgcgcggcaaggtgggccgattcccacacgacagcagcgcccggcaaggtgggcggatttccacacagcaccggcgcccggcaaggtgggccgattcccacacggcagcggcgcccggcaagatgggcggatttccacacagcaccggcgcccggcaaggtgggccgattcccacacagcaccggcgcccggcaaggtgggccgattcccacacggcagcggcgcccggcaagatgggcggattcccacacggcagcggcgcccggcaagatgggcggatttccacacggcagcggcgcccggcaaggtgggccgattcccacacgacagcggcgcccggcaagatgggcggattcccatatcgacatgtatgtagcttgtgttatccgtggattgtgcagctcagcgggtcgcttgtcgtatggcgtagtgtcccccgtaaccggccgcgtgcggccgctaacgcgcagtacggcgccgcgacccgaaggcgggccgccgttcccgcgcgcaggcgcgcggcgcccactgcgcacccccgtgggggacgtacggcagctgtgtggcggtgagcgggattag

SEQ ID NO: 234443 - DNA, 525 bp, Klebsiella pneumoniae
gtgtggtgtatttatcaaatgagtattgatgtcgaaacacttgtgaagcaattaggtaaaccttatcaggatatttatgatcaaggtttaattccctacaaaacaaaaccaacgggtactgttagtgatgatattgccaggttgactatgaggcgagaaggaatatttttatcttttatcaataaccgggaaaaaaatcttgaagaagtgactttgcggttagaagatgaaaataaaacggattggttatttcctaatccgctgccatttggtcttgaacctgtaatgacccagaaatgggtaagggacaaacttggccatccaatgatttacactgatgcgcagataatcatgactatttatgttggtgtgaaggaattttatactttgccggcccctcatcaatatatcgctgccgcatttacctataacaaagatttttttgtacaaaaagtcacattttattcaattgagcgagccaaagaaatacaagccgcgttagagaaaaaacggttgggtgggtaa

SEQ ID NO: 234444 - DNA, 357 bp, Klebsiella pneumoniae
ttggttttcaccaataattccgagaaaaatcttactgaaattacattaaggttagaagataaaggcaaaacagactgggtattccccaatccgatgccatttggtatggaaacggtgatgacccaattgtgggttagagagcgctttgggttgcccatgatttatgctgatgcggaaatcatcatgactatttatataggggtgaaagaggtctatgctctgcctgctcctcatcaatatatcgctgccgtgtttacctataacaaagatttatttgtagaaaccgtgactttttacccactggaacgggccaaagagattcaggcagtactggagaaaaaacgattagagagttaa

SEQ ID NO: 234445 - DNA, 378 bp, Klebsiella pneumoniae; identical to SEQ ID NO: 234427

SEQ ID NO: 234446 - DNA, 468 bp, Klebsiella pneumoniae
atggcagcacgtggcgttaacaaagtcattctggttggacatctgggacaggatccggaagtgcgttacatgcccaacgggggcgcagtggccaatctgacgctggccacgtctgaaacatggcgtgacaagcagacgggagagatgcgcgaaaacaccgagtggcaccgtgttgtcatgttcggcaagctcgcggaagtggcgggcgaatacctgcgtaaaggcgcgcaggtctacattgagggccagctgcgcacccgcaactggcaggacgatgccggagtcacgcgctacgtcaccgaggtactggtcgggcagaacagcaccctgcagatgctcggcggccgccgtgaagccggtgtgcctgagagcgccacgcagtcgcagagtcctgccgccccgtctcagcaaccgcctcagccactcccggatgatttcccaccaatggatgatgaagcgcccttttaa

SEQ ID NO: 234447 - DNA, 552 bp, Klebsiella pneumoniae
atgctgattggctacgcgcgggtgtctaccggcgatcaaaacctcgatttgcagaaaaacgcgctggttcgcgcagaatgtgagcagattttcgaagatacagcgagcgggaaaaatgccagacgcccagggctgaggcgtgctattcgtcgtttaaaaccaggtgattctcttgtggtctggaagctggatcgccttgggcgtagtgttcgtgacctcattactctggtctcagagctgcaggacagaggtattcactttcgtagtctgaccgacagcatcgataccagtacgccagcaggccggtttttcttccatgtcatgagcgccctggcggaaatggagcgcgagttgatcgtcgagcgtacccgagcgggtttagcggcagcgagggagcaggggagagtcggcggtcgccgccgggtaatgactaaagaagtggtggagcggtgccgcaggatgctggatacgggcgctacgcggcagcagatagccgatgtgataggtgtaggcgtgaaaactatctataggtacctgcctgcttctgaataa

SEQ ID NO: 234448 - DNA, 885 bp, Klebsiella pneumoniae
atgagcgtctggcacatgcaaccggatctcgccgccagccggcggcagcataagcagctctatcaggtccaggggcgctacctgcgctacgtcgggctggtggcgctagcctgcgtgctctattacgtctggttttttctgcagtttggcatcagcggcgagcaactgaccaccggcctgcagcagattggccgctacctggcgcggatgttcgtctggcacgacttctggaactggccgttcggctattactttacgcaaatcggcgtcaccctggccatcgtcttcgccgggacgctgaccgccacggtgctggcgctgctgctctccttcttcgccgcccgcaacatcatgcgcggcgtggtgctggggaccctcgccctgctgatgcgccgcctgtttgatgtgctgcgcgggatcgacatggctatctgggggctgattttcgtgcgtgcggtcggcctcgggccgctggccggggtgctggcgatcatcatgcaggacaccggcctgctgggacggctgtacgcggaaggtcacgaagccgtggaccgatctcccgggcgcgggctgaccgccgtgggcgcgaacggcctgcaaaagcatcgctttggcatttttacccagtcgttcccgaccttcctcgcgctgagcctgtatcagattgaatccaacacccgctccgcggcggtgctgggcttcgtcggcgccggcggtatcgggcttatctatgccgagaatatgcgtctgtggaactgggatgtggtgatgtttatcaccctgctgctggtggcggtggtgatgatcatggacaccctttccgcctggctgcgccgtcgttatatcggcggcgccgcggtgccgctgtatcagggcggacgctag

SEQ ID NO: 234449 - DNA, 873 bp, Klebsiella pneumoniae
atgaagacgacccacaccgaatttgaacgctattaccagcaggtacgctcgcggcaaaagcgcgatgccgtctgctggtcgctgctgctgctggcgctctattttgccgccggcagcgccgcggaatttaatctgctgactatctggcactcgctgccccatttctttgactatatggcagagaccattccgccccttagcgctggcaacctgttcgccgatgtgcagaccaaagggtcgctggcctggtggggctatcgcctgccgatccagctgccgctgatctgggaaaccctgcagctggcgctggcctcgaccctggtggcggtcgccatcgccacggttttctcgtttcttgccgccaataacgcctggaccccggcgccggtgcgctttgccattcgcgtgctggtggcgtttttgcgcaccatgcccgagctggcgtgggcggtgatctttgtgatggcgttcggcatcggcgcgatcccgggctttctggcgctgatgctgcataccgtcggcagcctgaccaaactgttctacgaggcggtggaaagcgcgcaaaacaaaccggtacgcggcctggcggcctgcggcgcgtccccgctgcagaaaattcgcttcgccctgtggccgcaagtgaaaccgctgtttctctcctacggctttatgcggcttgaaatcaacttccgttcgtcgaccattctcgggctggtgggcgcaggcggcatcggccaggagctgatgaccaacatcaagctcgaccgctacgatcaggtgagcatcaccctgctgctgatcattctggtggtgtcggcgctggacatgctgtccggtcgtctgcgcctgtgggtactggaggggaaaaaatga

SEQ ID NO: 234450 - DNA, 729 bp, Klebsiella pneumoniae
atgaacagctctcttgccgcggtggccgaaactgatttccagccgttcaccgatcccgctgccggccggcagcggaaggtcttaagcgtgcgtaatctgagtaaagcttatcaagcccagcacaaggtgctggacggcatcagctttgatctgcacgccggggaaatggtcggggtcattggccgctccggcgccggtaaatcgacgctcctgcatgtcctcaacggcacccacagcgccagcggcggagaaattcttagctacccggaagtcggtaccccgcacgatgtctcacagctgaaaggccgcgcgctcaatgcctggcgtagccactgcggaatgatttttcaggacttctgcctggtgccgcgcctcgacgtgctcaccaacgtcctgctgggccgcctcagccagacttcaaccctgaaatcgctgtttaaaatctttcccgcagccgaccgggcgcgcgccattgcgctgcttgagtggatgaacatgctgccgcacgcgctgcagcgggcggagaacctctccggcgggcagatgcagcgggtggcgatctgccgggcgctgatgcaaaaccccgggatcctgctggccgacgagcctgtcgcctcgctggatccgaaaaacactcagcgcatcatggatgtgctgcgcgaaattagcgagcagggcatcagcgtgatggtaaacctgcctcaacgccgcctgcttgccccagggtaa

SEQ ID NO: 234451 - DNA, 543 bp, Klebsiella pneumoniae
atggaatataaaagctgttccgataagtatatttggtctgccgatgactcctatttctataaaggactgtccgaactgattgtagacatcgacgaattaatttatctctcactggagaaaatcagaaaagattttgtgtttatcaatctcaatacggcttcattaaacgaatttatcaggcgcgacagcgaatggctatccgcggtaaaggggaaacaggtcgtattgattgcggccaggaaatcagaggccttagcgaactactggtattacaatagcgatattcgcggcgtggtatatgttggtctgagtcgcgatattcgaaaagagttggcctatgtaattaatggcaggtttctccgcaaagatattaagaaagataaaattacagatcgggaaatgaaaattatccgcatgaccgcccagggcatgcagccgaaatcgatcgccagaattgaaaattgtagcgtgaagacagtgtatacccatcggcgtaatgctgaggccaaactgtattccaaaatatataagttagttcagtaa

SEQ ID NO: 234452 - DNA, 588 bp, Klebsiella pneumoniae
atgaaaaaaaaggttctggcaatagctctggtaacggcgtttaccggtatgggcgtggcgcaggctgctgacgtaacggctcaggctgtagcgacctggtctgcgaccgctaaaaaagacaccaccagcaagctggttgtgaccccgctcggcagcctggcgttccagtacgccgaaggcattaaaggctttaactcgcagaaaggtctgtttgacgtggcgattgagggggacacaacggcgaccgcctttaagctgacctcgcgtcttatcaccaacaccttaacccagctggatacctccggctccacgctgagcgtgggcgtggattataacggcgccgcggtggaaaaaactggcgataccgtgatgatcgataccgccaacaatattatgggcggcaacctcagcgcgctggctaatggctacaacgccagcggccgtaccaccgcgcaggatggtttcactttctccatcatcagcggcaccaccaacggcaccaccgccgtgaccgattacagcactctgccggaagggatctggagcggcgacgtcagcgtacagttcgacgccacctggaccagctga

SEQ ID NO: 234453 - DNA, 636 bp, Klebsiella pneumoniae; identical to SEQ ID NO: 186046

SEQ ID NO: 234454 - DNA, 204 bp, Klebsiella pneumoniae; identical to SEQ ID NO: 230628

SEQ ID NO: 234455 - DNA, 1293 bp, Klebsiella pneumoniae; identical to SEQ ID NO: 227647

SEQ ID NO: 234456 - DNA, 1341 bp, Klebsiella pneumoniae
atggagagcattaataatcaagtgcagtcggtacgccagttgctggccattccccaactggccatcccaagctatcagcgaccttaccgctggggctccaagaatatctcggatctctttaccgatttggcaacccatcaggacaagagcgcctaccggctgggctcggtggtgtttcatcagcacaccgatagtgagcagggcgagatgcttgatatcgtcgatggtcagcaacgcaccctgaccctgatgttgaccgtcaaggcgctgatcgaggtgctggataacgaaaatcgcagtggcaaagagaagagtatccggtttcaacgtcaggatctgcgtgagcaattgcaggtcttgcgtggacctatcgatgcgtttatgcagcgccagcgcttccccagccgggattcggagttcaacctcagacgcaactatctggagttgcgtcggctggtggcccgccctgagtttgacgagcagcaaattgactttctgctcaaccgctgtcaggtggtctgctttgtgctgcaggatatctcggaggcgttccagttcttcgattcgcaaaatgcccgggggcgcgatctggctcctcacgatctgctcaaggcatttcacctgcgcgagtttgccggtggcaagtcggcccgctactttggcaagggggaggtggatctcttcaagggggtcaacctagatcgggtagggcattatccttacgtggagtcgctgcgcatcgcccaccactttgtcgatgagtacaacagccagtaccagcgcaagattgacggccagtacatgacgtttccctttcatctcgaccagatgatcatcaatggtcggcgctttttcgagatggccgagtactaccagacgcgggtggccgccatcgtggccgaggagtctgattccggcaaggcgcaatctgccaccctgctcggcgaaacgctgacaccgatggccagcaaggtgctatcgaccctgggcagttacgagcgacgccaccgcaccggggatcgttatgtgcgggccatgttcgactgcgccctgatcttctatatcgacaagttcggcagccaagggctgtcactggccatcgagaagtgctttatctgggcctatcgctgccgcatccgccagcaggtagtgcagttggcaaccatggataactatgtgctggagcacaatctgatccgtgccattcgtgatgctcgtctgccgggagatctgcacggcttccctttgcctagcatgagcagtcgagagaacaagaacaatcgcaatggtgccgaagatgagctggtcgggctgtttcgggagatgaaatattatgaatga

SEQ ID NO: 234457 - DNA, 378 bp, Klebsiella pneumoniae; identical to SEQ ID NO: 234427

SEQ ID NO: 234458 - DNA, 510 bp, Klebsiella pneumoniae
atgaatattgatgtcgagaaactggtaaaacaattaggtaagctctatcaggatattcttaaaaacggcttgattccttacaaaactgaaccctacggtgcagtcgatgatgatgaatctatattaaagatgaaacgtgaagggatgtttttggtctttacgaatgatcctgataaaaaatttaaagaaatatctttaaagttagaagatgaaggaaaaactgattggttgtttcctaacccgatgccatttggtctggagccggtgatgaccctgcagtgggtgcgtgcacgcttcgggctgccgatgatttatgttgatgcgaaagtggttatgactctctatagaggagtaaaggagttttatccgctattagctcctgatcaaaatatagttgcgtcgtttagctataacaaagatttctttgtagaaagtgtgactttttatccgctggaacgagcaaaggagattcaggttgcactgaagaaaaaacgacttggtggcaaatga

SEQ ID NO: 234459 - DNA, 123 bp, Klebsiella pneumoniae; identical to SEQ ID NO: 102185

SEQ ID NO: 234460 - DNA, 1149 bp, Klebsiella pneumoniae
atggctgccctgaaggttgaagaggcccgggcccagttcaacgtcacggatgcagatcgttatccccaactgaatgcctcatccgggatcacatacaacggtggtctgaaaggtgacaagccgaccacacaggagtacgacgcgggtctggagctcagctatgagctcgatttttttggcaaacttaagaacatgagtgaggctgatcgccagaactactttgccagcgaagaagcccgtcgtgccgtacacatcctgctggtctccaacgtttcacagagctatttcagccagcaactggcgtacgaacaactccgtattgcgcgggaaacgctgaaaaattatgaacagtcctatgctttcgttgagcaacagctcgtgaccgggagtacgaacgttctggcgcttgaacaagccagggggcaaatcgaaagtacccgcgccgaaatagccaaacgagaaggcgatctggctcaggcaaacaatgccctgcaactggtgctgggaacgtaccgcgcacttccgtcagaaaaagggatgaaaggcggggagatcgcaccagtaaaattgccaccaaatctatcttcacaaattttgctgcagcgaccggatattatggaagcggaatatcagctgaaagcggctgatgccaatattggcgcagcgcgagcggcctttttcccctccattaccctgaccagtggtctttccgcaagcagtacggagctgtcaagcctgtttacgtcaggaagtggaatgtggaattttatccctaaaattgaaattcctatttttaatgctggcaggaataaagccaatctgaagctggctgaaattcgccagcaacaatcggtggttaattacgaacaaaaaattcagtcagcctttaaggatgtttccgacacgcttgcgctgcgcgacagccttagccagcaacttgagtcacagcagcgttatcttgagtcacttcagataactctccagcgtgccagaggattatatgcaagtggtgctgtcagttacatcgaagtgctggatgcagaacgttccctcttcgctacgcagcaaaccattctcgatcttacctattcccgacaggttaacgaaattaatctgtttaccgcgctgggtggcggttgggtagagtaa

SEQ ID NO: 234461 - DNA, 564 bp, Klebsiella pneumoniae
atgcctgatgcactcaccgtaactctgccttattcgaaaaagaaagattttggcatccccgccaaccttcatatcataggcaccatgaataccgccgatcgatccatcgcattgctcgacacagcattgaggcggcgattcaacttccgggaaatggctcccgacgcgaccctgctaagtgaagtagaggggatcgatctcaaagccgttcttaccaccatcaaccagcgtattgaatatcttataggtcgggaatatcgcattggacacgccttctttatcaattgtgaatccagggcacaagttgaagatgcagtgcgcaataaggtcataccgctgttacaagagtatttcttcgaggactggagccgaatcgcggcagtgctgggcgatggttttatgcaggaagcgcagattttaccgccacccggaatagagggggaaccattatcaagctggtcggtacgtgcaccgttcagaaatgacgcctttgatcgactgataggcaaaaccagaacgttaaatgtcaccgatcttgaggtggctggtgaatcgaaagaatga

SEQ ID NO: 234462 - DNA, 825 bp, Klebsiella pneumoniae
atggaatgtgatttaaatttagacaaaaatcggattgttaacctttataggctctgtttagatggtaaaaaatataactatgttaagattggtgagcggttaattgattgtattccatcattttctctttcccgtaagcaattaatgaggtgtcgcgagagaaatgcatttggaaaagctacgctatccgcgatacgtaattttttgaaaatagaaaggaagactaagatatccgaaatgttattacaaggatttcttgaatcgtacctgcatgcgcctaaactttattcatttgatgaaataaataatgcaggttttcatggcgcccatgttaaattcaataagaataggaatgttgagttaatccattcggctgcatttatatctaattcgttatcggatggcgtttcatatgcgatagatgttattcttaaagcatttcctgagttaagatcgttggatggtttgcttggtaatacatttttagaaacaaactttactgaagatgagtgccaaatcctagccagtcttcttatcccgggagagtcttcgtactcgcagggttatgaagacagattggctatatttattggctataaccataagattgaagagtcactcatatatgagaatgcatctaggtttccgtctttgcttgaacaaaaaattattctcaatgttcagcaggcactagaatatcggaaagaggaaatcaataagttatcaatagttaatgcaactattgattgtttttttgttccgttcgatgatgtgaataaatttaatgacgagttcattgagagtctgaaaaatgaagaagattga

SEQ ID NO: 234463 - DNA, 381 bp, Klebsiella pneumoniae
atgaagcatgagggtatatatttagcatttgttaatgatcttgaaaaaaaaatgaaagaagtaacattaacgttagaggatgaaagcaagagtgactggttgtttcctaatccgatgccttttggtctggagcctgtgatgacgcagccgtgggtacgggcgcgttttgggttgccgatgatttatgttgatgcgaaagtggttatgacgctctatagaggagtaaaggagttttatccgctattagctcctgatcaaaatatagttgcgtcatttagctataataaagatttttttgttgaaagtgtgactttttatccgctggagcgagccaaagaaattcaggttgcgctggagaaaaaacggcttggtggcaaatga

SEQ ID NO: 234464 - DNA, 525 bp, Klebsiella pneumoniae; identical to SEQ ID NO: 234443

SEQ ID NO: 234465 - DNA, 174 bp, Klebsiella pneumoniae
atgactatttatataggggtgaaagaggtctatgctctgcctgctcctcatcaatatatcgctgccgtgtttacctataacaaagatttatttgtagaaaccgtgactttttacccactggaacgggccaaagagattcaggcagtactggagaaaaaacgattagagagttaa

SEQ ID NO: 234466 - DNA, 540 bp, Klebsiella pneumoniae
  misc_feature (466)..(475): n is a, c, g, or t
atgagtaataacatcatcgatgccgtcactcaggctgtgaattcactggtatcagcactgaagctgcccgacgaatccgcgaaagccaatgacacgctgggcagcatgaatttcccccagttcagccgtattctgccctataaggattatgattccgcgaccggtctgtttattaataacaaaaccgtcggttttatgtttgaggcgcgtcctttacccggtgcggataaaagtatcgtcgccacactggagcatttactgcgcagcaaacttccccggggcgtcccggtcagttttcatctggtctccagcaaactggtcggcaatgatatcgactacggtctgcgtgaattccgctggagtggtaaacaggctaaaaagtttaacgccattacccgcgcctactatctccgggcggcggaaacacaatttcccctgccggacaatctggatttacccctgacgnnnnnnnnnnctcctgctgcgtgccccggaagaagaactccgccacgcaaattgtggagatggagaaccagataa

SEQ ID NO: 234467 - DNA, 900 bp, Klebsiella pneumoniae
ttgctgattggcgttgctacctccagtctggccctgcacgcgccgtcgcaaattgtcgcggcgattaaatctcgcgccgatcaactgggtgccagcgtggtggtgtcgatggtagaacgaagcggcgtcgaagcctgtaaagcggcggtgcacaatcttctcgcgcaacgcgtcagtgggctgatcattaactatccgctggatgaccaggatgccattgctgtggaagctgcctgcgctaatgttccggcgttatttcttgatgtctctgaccagactcccatcaacagtattattttctcccatgaagacggtacgcgactgggcgtggagcatctggtcgcattgggtcaccagcaaatcgcgctgttagcgggcccattaagttctgtctcggcgcgtctgcgtctggcgggctggcataaatatctcactcgcaatcaaattcatccgatagcggaacgggaaggcgactggagtgccatgtccggttttcaacaaaccatgcaaatgctaaatgagggcatcgttcccactgcgatgctggttgccaacgatcagatggcgctgggcgcaatgcgcgccattaccgagtccgggttgcgcgttggtgcggatatctcggtagtgggatacgacgataccgaagacagctcgtgttatatcccgccgttaaccaccatcaaacaggattttcgcctgctggggcaaaccagcgtggaccgcttgctgaaactctctcagggccaggcggtgaagagcaatcagctgttgcccgtctcactggtgaaaagaaaaaccaccctaccgcccaatacgcaaaccacctctccccgcacgttggcagattccttaatgcagctggcacgacaagtttcccgacttgaaagcgggcagtga

SEQ ID NO: 234468 - DNA, 243 bp, Klebsiella pneumoniae
gtgaccgtcgtgttccaggatggattccagctgaaaacgattgaagaactggaagcggaaaagaacgggcaacagcaggctcagaatcaggaggcggagccggcacagcaggctgatgcacatcatcagtcaggcggcggtatgaacggattcaatactgacgagatgctgaagaagctgggcaaacttgatccgcgtgagttctctccgggcgcagcgccgcagggggaaaataatggctag

SEQ ID NO: 234469 - DNA, 261 bp, Klebsiella pneumoniae
atgatactcaacgaaaaagtggtcactgccagcatactcgatgccagtatgttcagaatgttatcgactgcttccgcaccaaccttcacggaaaccgactcaggtatcattgatttaaaaagaattgataaaagggccgttattatcgcgacaatggcgaataacgttgccctgaaccatagctttttaactgtctgcttcagaatccatttccagcgtgaaatcattctgcattcctcatattgcggccgggataaataa

SEQ ID NO: 234470 - DNA, 213 bp, Klebsiella pneumoniae; identical to SEQ ID NO: 165256

SEQ ID NO: 234471 - DNA, 204 bp, Klebsiella pneumoniae
atgattaacccagcgctgttggtggttaatcgtgcgctcatgacagcggatcgcaatatcacgcgcctgttcaaaagtaatgatctcctccgacagggcagaatggagagacatcgagccctcatactggcttttctctgccgggcgggggtatttgtcgagcgtgaagcaggcatgaatatgatcataattactgaccagtaa

SEQ ID NO: 234472 - DNA, 510 bp, Klebsiella pneumoniae
atgaatattgatgtcgaaaaactggtaaaacaattaggtaagctctatcaggatattcttaaaaacggcttgattccttacaaaactgaaccctacggtgcagtcgatgatgatgaatctatattaaatatgaaacgtgaagggatgtttttggtctttacgaatgatcctgataaaaaatttaaagaaatatctttaaagttagaagatgaaggaaaaactgattggttgtttcctaacccgatgccatttggtctggagccggtgatgaccctgcagtgggtgcgtgcacgcttcgggctgccgatgatttatgttgatgcgaaagtggttatgactctctatagaggagtaaaggagttttatccgctattagctcctgatcaaaatatagttgcgtcgtttagctataacaaagatttctttgtagaaagtgtgactttttatccgctggaacgagcaaaggagattcaggttgcactgaagaaaaaacgacttggtggcaaatga

SEQ ID NO: 234473 - DNA, 285 bp, Klebsiella pneumoniae
ttgcgggagagtgcgatcaccgcgatcaggaccaccgtcttgacctggatgatgctgtcccgacgcagcgccacgcgcacgatggaatgcttgaactccatcgcgatcaagagcgtcatgatcatgccgaacacgctctggaataccttgtggtccaggggattgaaggcatcgagaaccagcagcgtgaagacgatggagatgagctggaacagcgacaccacgatgatgacggcgatcaccgccgacagcacgagcgcgacgacctgctcgaagcgctcgtaa

SEQ ID NO: 234474 - DNA, 204 bp, Klebsiella pneumoniae
gtgcccggactccctcagtgcgctgatgatttgccacccgtcgaggaaaggcagcatcacgtccagtattatcaaatcatactgtcccttcgacgcggccccaagaccatcgcggccattattaaagagatcggcctgatagccttcctcaaccagtccctgctgcaggtaacgacctgttttttgttcgtcttcaacgattaa

SEQ ID NO: 234475 - DNA, 486 bp, Klebsiella pneumoniae
atggcgcagcttctgcgcgaggaggtaagtaatatcgagcggcagataaaagcacatatcaaagccagccctgcactgaggcgtgattatacactgctgacctcaattaaatcggttggtccccagctggggatgcatatgctggtcgtgcttcgcagccataactttgtatcggctgagcaggctgccgcctttctgggcgtggtgccgatcgagaaacgctcaggcacatcggtccggcgccggccgcggatgtcgaaaatcggcccccctcagttgagagcgaagctttacatgtccgccctgtgcggaaaaatctacaataagcgaatgcgtaatatttacgatgagatgtgcctgcggggtaaacctaaaatggtggccattggcgcgctgatgcggaaactggtgcactggtgttatggcgtcctgaagaccggaaccgtttttaatgacgaagacctgaaaccggtactgtcaacctga

SEQ ID NO: 234476 - DNA, 297 bp, Klebsiella pneumoniae
  misc_feature (178)..(187): n is a, c, g, or t
atgatgaatagtgaactgttacatctaatcatctgtgacctgaagcgctcattatacacttccatgtattcagaatgcataatgatttgtatattaaaaatcgccataacttacaatgacttattttttgtggcacaattaaagcgcatctgttcaaataaatgtaaagacattaatnnnnnnnnnntcatggtttcttatgaaaaccagtggctgaagaaacgtatggcagttctgaatctgaacaagacgagacggcatgaaaggttcaagaaaattgtccaggaaggtacatag

SEQ ID NO: 234477 - DNA, 297 bp, Klebsiella pneumoniae
gtggatgagcagctcaacacgcgtctgcaggcgctgaccggcagtaagggcgtattcgtattgcgcgtggcgccgggctcggcggcgcacagggccgggctcgtcggcgtcgaggtcaccgcaggcggcatcgtgcccggcgatcgcgttatcagcatcgacggtatcgccgttgacgacgtcaccacattacaggcccggctagacgacaagaacgttggagatgttgtggtcttgttagtggagcgggccggcaagactcgcgagatgcttgtggaactacaaccgggagtttga

SEQ ID NO: 234478 - DNA, 159 bp, Klebsiella pneumoniae
atgttattgcagttttacacctttatttctaaccgattcaataacagacgtcagggtagccaactgataacgaccaaggtcaatattcatcaccataactgttattacaatactaaacatagtcaaaacacagaaaccaacaacattccatccaattga

SEQ ID NO: 234479 - DNA, 324 bp, Klebsiella pneumoniae
atgctccgacgtgctttcagtaacctgctttccaatgcaatcaagtattctcccgataacacctgtacagcgatacaccttgagcgtgacagtgactgtgtgaacgtgatgattacgaatacgatgtccgaccaggttcccgctaatctggaacgtttgtttgaccggttctatcgcgcagactcatcaaggttctacaacacggaaggcgcggggctgggattatcaattacaaggtcgatcattcatgctcacggcggcgagctgtcagcagaacagcaggggcgggaaattgtgttcagtgtgcgtctgttaatggattaa

SEQ ID NO: 234480 - DNA, 228 bp, Klebsiella pneumoniae
gtgactgccagcatcagcgaacttaaaaacgatccggtggccaccgccagtgccggcggcggctacccggtcgcgattattgaccgcaaccgccctgttttttattgtgtgcccgcggctctgtatgaacaaatgctcgatgagctggacgaaaaagacctagtgcaaatgataacagaacgtcaaaaccagccgctgcgtgaagtggatctcaatcagtatctgtga

SEQ ID NO: 234481 - DNA, 228 bp, Klebsiella pneumoniae; identical to SEQ ID NO: 185381

SEQ ID NO: 234482 - DNA, 285 bp, Klebsiella pneumoniae
gtggagcgcagcgatctgccgctactggtcgatttctgggcgccatggtgcgggccgtgcaagatgatggcgccacagttccagcaagcggcgcaccagctcgaaccgaggatccggctggcgaaggtgaataccgaggctgagccccacctggccgcgcagttcggtatccgcagcatcccgacgctcgccctgttccagggtgggcgggagatcgcccgtcaggccggcgcgatgggcgcgcaggacatcgtgcgctggacgtcgacgcaagtgggacgctga

SEQ ID NO: 234483 - DNA, 1281 bp, Klebsiella pneumoniae; identical to SEQ ID NO: 230634

SEQ ID NO: 234484 - DNA, 1089 bp, Klebsiella pneumoniae
atgattcagtacattcgtattcaaaattttcgctcagtgaaggatatcgcgctggagctcgggccgctgaacattgtcttcggccctaacggctgcggtaaatccaatatttataacgccatccacctgctgaccgctgccgctgagggcaggctttcggggtttatcagcgaagagggcggtctggagaatatgatgtggtccggggagcgttcgcccctcgatcgtcacccccgccggctgcaaattgcctgccggaccgacagcttcgattatgagctgcagataggcttccctgaaaaattgccctatccgacgcaattcatgctcgatcctatcgttaaagaagagaatatctggctggccggctactcccgccggccttcctcccgcgtactgcagcgcaagaatcaggcggcgtttctcgtcgatgtcaccggggagaaaagtactttcaccgagagtatttatgaaaatgagtcggtgttcggtcagcttggcgagccgcaccgtttccccgaagtatcgcgagtgcgggagaccttgcgccgttggcggttttatcatgaattcgcgattggccgtcattcgccgctgcgtcagccggccgtgggttaccgttcgccagtcctcgacagcgatggccagaatctcgccgccgcctttcagaccattgtcgagatcggcgcggaggagattttgcatgaaatccttgccgacgcctttcccggctgccagttttattgtgaaaacgagcactcgcgtttcgctctgaaaatgcgtcgcgaagggatccgccgcccgctgctggcggcggagatgtccgacggtacgctgcgctttttgtgcctcgccgtcgcgctgctcagtccgcgcccgccggcgtttctggcgatcaatgaaccggagaacagcctgcatcgcgacatgttgcccgcgctggcccggctgattatcgaggcctcgcgctacagccagatctggctgaccagccactcggcggagctggcggagcttatcgccgccggggcgccttgtcagcgctatgcgctggagaatcgcggcggtgagacgcggattgtcgagtga

SEQ ID NO: 234485 - DNA, 756 bp, Klebsiella pneumoniae
atgggacttcgacaaattattaagggcattgacggttcgcagcagaatatcggttattccgcagtcgttcctgaagggctacagtttattaacttctttggcggtgatgttggtcaggggcgaaatctggccgacggcggtttacctgcccgcgtaattggcgagccggtggtagggagcatgtctcagggggtgatttgcacgtcccatgaatcatatattaagaccggcgttcctcagtcggcaaaaatgactgtcatgggggtgttttgcccgaccagtgacagccgggcctatgcgatttctaatgccagcaccacgcggcctatcggcttttcggtctattcggagccttcagctactgccggagtgcaaaacctgcgtattcagatgggcggaaagcaaagcagtgatggcgcaaacgccgttgcaaccgcagccattgctgccgccattaaaaataatgtaccgatggcttttgccggaacggtggactattcgaatctggatgagacgaaggttgtcatcatgcacctgaaaggtggagcgaagaataacgtcaccacgtcattcacgcaggcgggttccggtttacccggcctgttgattggctctgaaatggatgccgtgacctatgcgggggcgcgggtgctggcgatggcggtatggaaccgcgttttaaccgatgatgaaatcaccgcgcagtatcagcagattcagcgctactacctgggcgttcatgggctggacatttaa

SEQ ID NO: 234486 - DNA, 2244 bp, Klebsiella pneumoniae
atgaatataaatgaattcgtaaaatgggaagaaggtatttaccttatccggcgtaatgacaaagttgagggcggaagggatggggctgcaaatattcaggcgacccagcttgcaaacaggactgcatacctgaaagtgttgctggaaggcagtgtggactttaaaaatctgaccttcttcaggacggataatgatccagatggaactattaccggaaacgctgccactacaagtggccagttataccgagttgctcagggtttaagttcagatacggcatttatttattatctgaataacgacggcgtggcggaagctgttgcgtactcgccatctaatgccgcagtggaaaaaatcaaacagactatttctgacgcccctgaagtgccgcgaattgcacaatgggagtcggagggcggctttgtgctggcctggcttgataatggcgcactgaaaactaccgattttgaggtgggtgctaaaggtctgtctatggatattctggcttttgaagagaatgccaacagcgagcatattacgcaggatgagtacgggtttattctggaaaaacgctcttccggcgatattgagaatatcagcgggaaatatgtagcatcacaacgggaagaaaagacgcttgaggatgagtacgggtttattatcgaacgtcgcaccgctgatgcccgcgaagatatcagcggaaaatacaaaacatcccgcaacaatgatgtcgttattgaagatgagtacggatttcatatattttctgcgatgaaggcaggcgcgccgacagagccgcaggatacaggggctacccgtgccgcttttattgccagtatggataatctcgcgctggcaggttcctcttccatatataaccgtctggtaacaggcattcagcgcccggtgttcgattttaatctgattatcacttacggtcagtcgttatcaaccggaacggaaggctggccggcactgtcggtattacctgtcgaatctgaaaatgtgctgatgtttggtgattccgttcgacctacaacagaccgtgacaccggcggcagtaagtgggtgccgatgggcggggaaaaacttcagccgctgattgccgtcactcagaccaaaggcggcagcggtatcctgaccgcagaggaagtggcgagcctggctccaggggcaacgaatgaaggcgaaacttttgatgtaggtgctgtcaatttctggcgcaagttgcagaacgatttccggggtgtcagcgttaacccggaacggaaaattgtcgtgctgaactgcggcgtgcaggggcgaacggttgagcagctctcaaaaggtaatgcattgaatcactataaccgggtgattgaggccgtcacaaaggtaaaagcctgtatcgcgaatcagtacccggcggcaagtgtaggcatcaccgctattctttatgcccagggagagtggaactactgggttgatggctcaggtacgcatgaccgggcgacatttcttgagctgacaaaaaaactgcgcactgatctgatttctgactgcgcctacggtatctgcggacaatcgctgcctcctgcctgggtgacttatcagaccggtgcaggctataccgttgatacgcaggatttagccatcggcatggcacaaatcgacatggctgataccgtgccggggtgctggatggcgacgccggtctatccggtaacagacaaaaacgggcatctcgaccctaacggttatcgttgggccgggatgcaatttggcaaagttctgcaccgtattctcgacaggggtatggactggaaaccactcaagccaattaaagctgtccggtattctgacaaagaaattattgtgagtttcctgactccctcgccgccgctgcaatttaaagaaagctacgtggtgaatatttccacgcagtatccgaataagggatttctggtaaaggatgcaaacggcgtggtgggtattgagtccgtatccattgtgggacagtccgttgtgtccgtgctgttgagttccgtgccggtgggtgaagtttatctctggtacgcgccgggtactacctatcggggaaacggaaatctttgtgacagcgatttcactgtggccccttacaactacgaatatcgcgctggcagcggacagtatgcatcggcaaatatcgccgcacttgtgaataaaccttatccgttaaataacttttgtgtggcatttcgaattaaatgtgaggatatctga

SEQ ID NO: 234487 - DNA, 180 bp, Klebsiella pneumoniae
atgactaagacgcatagtgacaagaaaacacagaagcattactcagtatctgatgttttcagccgtatgggcgtcgcgatggaagaactacttcaagcggccccacatatgatgcaggactgcaaatttgaaggaaatgagctgcatggcaagctcaaacaaaagcagaaagctgcttga

SEQ ID NO: 234488 - DNA, 588 bp, Klebsiella pneumoniae
atggcattaaaatgttcaaccattgatgctgccagtaaggacacggaattgaacttagaacagattgccagtcaaagtattagcaaccttcagtttcttctcgatacgctgaagatgccgttggctgttggtccgatcagtgatgaggactatgtgatcctgactacaggatatgcccagctcgaatgggattatggtttttctcgttatggtaatcgaagtgataagtttgagttttgcctgaaactcctggctggtccgttaaggcatataccttctggcgctgctatgtgtacctttgatgaggacactggagttatagagatccactttgtggagtctttcgtgaaagatgatgacgtagagcatcctctatacggcaacatgtttatggtgactttgtgggcggtgtatcttttcggtagcgcagtggggtgtcaagagattcgcatccccgaagcactgaatcagaaagttgctgaccactataaaaaatttggttttaaaggtgatatcagcttgctttcagcaccttttgctacaataactgatgtggtaagacgctacattacttctaagaaacagtag

SEQ ID NO: 234489 - DNA, 741 bp, Klebsiella pneumoniae
atggctgtacacaagatctctggcgcgtttttccatgatatgcaggttgagtggccctgccctaaatgcaatcagaaaacactccagatcattaaagaaagtttcgtcttgaatgaaacacatgatacccagaaataccgcagtgaagattggtttgaaccggatatggattcatctattttcagttgcatggcccgttgctcaagaaaacaatgtggcgaagttgtcgcctgttctggtaagagtggatgggaacaaggttgggatgaagaacgaaatgatatggattactatcaatggcacaaacctgtcacctttttcccatctctgcatccttttgaagtgcctaaaaaatgcccagaagaaattaccgaaccactcgaagcttcattttccattttcctaatacagccaggcgcagcagcaaacttaatccgaatttcagttgaaagaatgctgaccgctatggatgtagcagaacgtaatgataatggtaaacgcataactctacaccgccgtttagggatgctacctgcattatacgaatcgttttctaagcctcttatggcaattaaatttttaggaaatgccggaagccatacctacgatgaagtaaaaaccaaagacattgaggatgcttttgaaattatggagtatgtcgtcaatgacttattttccggtcgcaaggaatctgtcgaggtattgacgaaacgattaagtgaaaaattcaaagaagactga

SEQ ID NO: 234490 - DNA, 525 bp, Klebsiella pneumoniae
atgctgaataaagaaagacttgatgagttattagattattcgcctgattcagggttatttacttggaaggttaaccgccggggaaaggctaagtctggatgtatcgcaggaagcaaaaatggacaaggctacattctcataaaaattgacgggaagttttattttgctcatcgcctcgcgtggctagttacgcatggaacattcccagtcaacatgatagaccacattgatggcaacagagaaaacaataaaatcaataacctaagagaagccaccgctgaacaaaatatgtggaatagcgcagccgggaaaaataacaaaacaggagtaaagggtgttagctgggatggcagaaggaaaagattccgggccagcatatccataaaagggaaaaacaaagaaatagggagttatttgtcacttaaagatgctgagtcggcaataaaggattatcggctgaaactccatggcaaatttgcaaataacgaagttattaataacaaccttttggaggggaaaccatga

SEQ ID NO: 234491 - DNA, 129 bp, Klebsiella pneumoniae
atgtttagttcacatggttatggagcggcgattgttatttttgcaatattctgcgcggtggttggctggggaataattgagttcatcctctggctgttctcgttcgttcacatttctttcggaggttag

SEQ ID NO: 234492 - DNA, 480 bp, Klebsiella pneumoniae
atggctgcactaaaaccagaggtgaaagccgccatcgttcaaatgcttgcgtgctatgacaccctgtcgattgtggtcgccgctatccaaaaagattacgggataaaagttaccccgcagcaagtcgaatcgcacgatccgacgaaggttagtggtaagggattggctaagaaatgggtagaccttttcaatgccacccgcgagcgattccagaatgagatttcagatattcccatcgccaataaggcctaccgtttacgcgttctcaaccgcatggccgtaaatgccgagagcatgaagaactacggcatgaccgcccagttgcttgagcaggcggcaaaagaggttggcgatgcctacaccaataagcacaagtttgaacattccggcccgaatggtggtgccatccagacgatcaccatgagcaaagaggaatacaagtccgcacggcaggagatgatggaggatgacgactgctga

SEQ ID NO: 234493 - DNA, 1350 bp, Klebsiella pneumoniae
atgactgacaaattaactctcgccgtcaaccatgcgttgaacgatgcgcggatggcgcgcgcccgtatggggctgatggcgccgacgatggggttggacaataagcgacattcagcatggtgcgagtatggcttccctgagcaggtcacctacgaaaacctatacgcgctgtatcggcgcggtggtatcgctcacggtgctgttgagaaactggttggcaagtgctggcagacaaacccggaactcattgagggtgacgacgccgacgagagcaaggacgaaaccccttgggagaagagcgccaaaaaggttttcactaaacgactctggcgcgcttttgcggaagcagaccgccgccgtttggtcggtcgctatgctggaatcctgcttcacatcaacgattccagaaaatgggatcagccggttgttcgtgggaagtcactcaaaaaggtaacgatcgcatgggctggttcgttaactgtcagtcagtgggtcactgacgagaattcggcagactacgggcagccaaagcagtggaaatacgttgagagcctgccaaatggcgggacaaatcagcgcttcgtacatcccgatcgcgtcttcatccttggtgactattctaatgatgctattggcttccttgagcctggctataacgcctgcgtcagccttgagaaggtcgagggtggttctggtgagtcattcctaaagaacgccgcgcggcagcttaatgtcaactttgagaaggaaatcgacttcaacaatctcgcgtcactttatggcgtgagcattgacgagttgcaggataagtttaacgaagttgccggggaaatgaatcgtggtaacgatgttctgatgacaacccaaggggctacagtcgcaccactggtcacagctgtagcggatccgtcagcgacctataacgtcaacctgcaaaccttcgctgcatctgttgatatccctgtgaaagttctggttgggatgcagacgggtgaaagggcaagcaccgaggatcaaaaatatttcaacgcgcgctgtcagtcacgccgcggcgacctgtcattcgaaattgaagacttcagtgacaagctcatcgagctgaaaattattgatgctgtcagcgagaagacggtgatctgggatgaccttaacgagcagactggcactgagaaactcgccaatgccaaaaccatggcagaaattaaccagacgtcccagggcagcggagagaatccggcattcagtcgcgaagagattcgtacggcagcgggttatgaaaacgttgatgaatttccattaggagaagaggatggcaacgaagaagacgaagccaccgattctaccgcgtaa

SEQ ID NO: 234494 - DNA, 384 bp, Klebsiella pneumoniae
atgtcagacaaaaccagcggtgggaaaatcgacgacgatgccacgtatggcgatgccggtgataggtcagaaacaattcacgttggtgccattcattacgatattgaagtcagcatagctgggcggcttcatatggaagttcgcaaactgattgacgttcacgcttttgagctaactgacaatggcggatttaattatctgttcatctggataaatgaccatggactgaagttcatgggcgttagcctcaaaacctacgaagaagcgaaagagcaccttatcaattatgaccgagagaaaatcactggcccttcaggacgatgtgagcaaattccgggattgataagcgcgatttcacgaaagattgagaggttctcactttga

SEQ ID NO: 234495 - DNA, 579 bp, Klebsiella pneumoniae
atgaatgaccatttaagtcagcgctatcttttagaatgctttgattatgctcctgatacaggattgctttcctggagacgccgtccaatccatcatttcactagcgaagtcgctatgaaccgatttaatggcaggtttaccggaaaggatgcgtccagctcgttgaacggacgatatttatacgtccgtgtgaacaagaagcatcacctctgccatagggttatatggtgcatgcatcatgggttatggcctgaaggcgatgtggatcatattaatggcaataagtgtgacaaccgcatagaaaacctacggtgtgtcaacagaagccaaaacatgtctaatgttggcatgcaaaaaaacaatagctctggttttatcggtgtcttttgggcgtcacgggaagctaaatggatggcagttgttgcgcacaataagaaaaacatacgtttaggtatgttcgactgcccaatacaggcggctcttgcatacaacgcgggcgcgctaaagtatcacggctcatatgcgcaaaagaaggttgacataaacatcaaagccattgagcttgcaagggctgaatag

SEQ ID NO: 234496 - DNA, 2784 bp, Klebsiella pneumoniae
atggcagaagtaccgttaccaactccaactcaaaacccagtgccaagtactgatatcagagatgttgtatttgcaggggcgaagcttgatgaagaaataacaagcttagaagcatattatgtcgatcgcctcggcgggaggcatttaaccagcgtcggaagagatgggcttttcagcgatcagcttggaaagcaaaggtctgactttatttatcagtacaatcagcaggctcaagaatttgacgcacaactggccagtcaggaatcgcgttacgaatctgttcttcagcaggccgggaaaaccgtgcttggccgctacgaggatggcccctggacgctgaccagttataaccagcttgtttcgtatggcggtacgttctggaagctcgcagcctcagttgttattggtgccggctatacaacagctggcacgactggcgcaacctgggatgctactgacagggctaactttgtagatgtagggcaagaccagctacggacggagttgggcactatttttatgcctgccgcatcaggaaattctgcaactgacgtgcagttgctacaggccgcgttaaacgttggtggtcagattagctataatattcctggcgagtacctgtacaacacccatagcgtgattaaatccggtacgtcatttcatactgccgctggtgtgaactggaaacaggtagcaggtaaggttaacccgttcctcgtcaatgaggcattttcagcgtcgcgttatgctgtgaccagcatgacgaaaaacaccactgcggttaatatttacctcgatggctcggatatcaaaagcagcaactacattacggtcgtctgtgaaaatcatccgtttgtgcgcggggactgggcggcatttcatggtgcgaaagaatttggctatgacggcatcatgcgggttatttcagtcgttgatgcgaacactttcattgctgaaagccattcgacaatgaccgctgattcagccacggctaataccgacttctggaacggactgttttgctttaaggcggacaccaatattgaagttgatattcaggggcgaattgacggcaactggcggggaaactccacggcatcaacgacagattttgatgaacgcatcaaatttatgggcatgtcgttctggggagtcaataatctcaccatcaggcttaatgacgcgtttaatatcagaaaatatgccgtgctgttggctaacgttcgaaacgttcacgtccctcgcattaacttttataacttttctgacggcctgcatattcaaccgccttttgtcggtatcagtgtaggcacacttgccggcgcaacgggcgatgacctgcttgcgctgacgaacggtgactatgaggcgtaccagctcagtcggggacacgggtacagcatctatgttgatcacctgatgccgcagaatgcgctgactgcattaaaagcagcaggagcgccggggtataagttctgggatattgatattggctctatttcagggtcggtgcgtctgcagattatctctgccattcgtgatggcattctttcctacactgatattggacgtctccgcattcgctcgtgtgcctgtgtgtcgcagacgaaagatgatttttatctgaatacggataaaatggagagcttcatcattgatgactacgaggtgtgctcgctaaacagcggcacctggtgcatcacgatggggaatcgttacggcatcaccggtaatatcaagcacatcggaattaaaaacattcgctataaagagggggttcctcttaaatctgttgcgtacattggcaataactgcagcatcggcttaatggacctgcattttgcagacgccagaccacttaacggcgctcaggctgttgtgcatacggagcaggcaagaacgcagagcggcgatgcgggcgagtctgccggtggctttattgatactcttaaagtctccggtaaatttaccttcccgaatgtcggtatcggtcggcttatctggatgcgggcgaagtggaatcgcattttcctggataatctggtcgttgagggcggtgagcgcatcattcatgaaaaccttgtcacgggtaataagggcaaggtgttctgcaacaatgttcacgttaaaggggcaagcggattctgcaacacctataacgaaatcgaggcttatcacgcatccactctgctggagacgaccgatatgccttactggctgcgtgatattttagccaggctttatatttatggtgctgtacagaccctgaacaacaatggcgtttgccgcattgagcaggggcaattttacgctaaagggctcgatgtccctgtcaacatgactgattacccgccttcgggcaatcatggtgatattgtcttcaatacaaaccccattggtaacccggtagggcgctaccagttcaacagcgtgaatggcacctgggaactacagaaccgggcaaacatcagtcagcaaccatcagacgcatcagcaacgatctataacccgatatggggccgggggttcaactgggttcagacgttaacgcaggacgttcagttcaccgcatcagcagcaaacctctcaacgctcaatcgcggagataaaatccgtctctacctcacccaggatgctaccggaggacgggtagtaacgttcagtacagcgtttaaattcccggttgcctgggtgagcggtggcaccgcaggccagcacaccatcggtgagtttgtctacgacgggcagttcctggtgctggagcgggctaacgtctggtactga

SEQ ID NO: 234497 - DNA, 1002 bp, Klebsiella pneumoniae
atgagcgagagaaacggaacgatagatatacttaaattacttgccagtttttgtataatttcagtccatattggttactatcaggattatccagttatatttgcagacctttttagagtatcgactcgatgggccctaccattcttcttcgtttcttctggttacttcttaggtctttcttcaaacaccaatgtaatacaacgggttaataaactaataacaatatttctcacggcgtctattttttattccgccgttttattgttaaaaaatcacaacaacatatatgagcaactaaatgagatattatcatttaagcttttgcgtggaatttattttcacctatggtttatcccctcgctcatcataggacttattggagcaagttatcttataaacaacgcttcagttaaaaaatcaatcatactatcatttgcattcattctttttgcatggattgaagacgtttgcgtgtatcttggcaaggatgtagactttatttttgcaagagaattaatgtcaatcggactggtgtatctgggttatgcgactgctaaattaaatttagcaaacaaaataaataaaaatgtttctataagtctttcgataatattcatctgcgcttcattagcagaggtgctggttcttcaggaacttacgggtattagctctaaagaaagacagttcccattattctgtagtttcgcagccatttcaatactcattgcttgcagtaaaatacaaatcaaagaggggctattttctgagctgggaaaaaagtactctcttcctgtttatctttaccacccactatttatatccgcatccagatttgcacttggtaagataggaataaatgatagcttcgctatattgataacaacatttacttcaacactattagtgctgattattacggacagatatctcaatccgttatttagactaataaatggagacatctttagaagaaaagataaagagagagcaattaactcataa

SEQ ID NO: 234498 - DNA, 363 bp, Klebsiella pneumoniae
atggcctggatgattgaccaggccgctcaccagcagctggcgcatcaggcggcgcaggccgtcatcggcatcccgggtgcgcggcgttatctggtaatcgacggcaaaaaaggcattatcgaggcgggccagccagctggcggagagggtgaggatcatcacggcgttggccccggcgcagcgcaggctccagcgacggttgcggttaacgatcgccagcccgtcggcggcgagcggctgcgacgcaccttcggccaccgccagatttacgcttccctccagtacccacagcagcgtcagcagatcgctttccggctgggtcagctgacgcacatcgcgtaccgtgacgctaaagtcgcctga

SEQ ID NO: 234499 - DNA, 210 bp, Klebsiella pneumoniae
atgcaagacctgaagattgaataccgggatggcaagctggtggaactgagcattgatggtgtgagctttctttctgcgcacgccgtctcctttagtcataccgcaaacgaggagccaccaacgattatcctgacaatgtctgttggtgtcggtgagcgactggagcacgccagccttccccgcgaaaaactgcggatcatcgagaagtga

SEQ ID NO: 234500 - DNA, 882 bp, Klebsiella pneumoniae
atgagaagaggagttgtatcactgccttcaggattaattgcctcaagcgatggtatccaagtatcatctggtagacctttaacagttgtggatcttaattattttgcgttgtattgggatgaacttgtagtgccagccagtgattttatatatcttggcattgaaaatgaagattcatttatagattcgggctttttgaaaagaccaataataccaacaacaaatggtgtttttaccggagggagtatactttccatttattctgaagctgttatgtcatttttagatattaaaaggaaagaggatggtgacagtcactggagtctaaacttgctgggtgatgaatttcgtttggatagtgcaagtaatgagcttaaacaatcatttagagttgagttggcaaatgtcataccagtccccgatacatctgtaaatatcaatgatatacttaaattcaaaagtttaagaaaagcggaattagacgctttaaatagctatcttgatgagttatatttagaggttgttaattcgggtgattttaatttatcaagatgcaaggcattgtctagactagagggggcaatattagaccttgagaaattgaataaagaggggtggagaagtccgattcgatttgatacgtctgctttgtttgaagcaaataatggcgacattatggcaggccttataggattgcaagcaatttggcaaggtgcgcagggggatgtcacaaatacaattctttctgggacaacagctctgctgggtgcggggtttgcaagattaaagccttgcttccaaagcatgagacgaaaacccaatgctaatattgcgtatttatcttcagcacataaagctaaaataatcccaagattattttaa

SEQ ID NO: 234501 - DNA, 663 bp, Klebsiella pneumoniae
atgaataatcttcaacaaacaacattagttctctctgctataaaaaatgtgttagaccctgaaattagagtatttagaaaatatatccatgatgatgaactcaagtttactcttagcggtaagttgatgatagatgtttgttcttttttagatgaatggagaaaattaggttccatagcgagagacgacccatatgtaatggaaaccttgagagtatgcgccttaccaatcagaaaaattaaggcatgggatggattaagaagctttcgtaacaccatgttagctcatgggttccgtgatgaagttgctggcaacaccccaacaaatatttcacagcgattttttaacgcaaatgttccaaatcaatatgctgaaaagctattgcttgcgcatatcgcgagtttagtcattggtgtatttttaactaggcatggccaatgcatcgaaccacctacaatggtgcatgatgtttttcccactaaaggtattagtacaagcacagaatttgataatcaacttaatctagtaaaagaacactttgaaagcttcgatagttcttttgccagactatggggagataatgaaactttaagcgagcagtgtttaaggcagttaggtgactataagacaaaaaataattcatatgttcaaagatttttttaa

SEQ ID NO: 234502 - DNA, 864 bp, Klebsiella pneumoniae
atgaaaccatctgaacttaataagctgaacgatttaattgaaaaaattgaaagtggtctttttgattgcaatagtgtagactctgtatttattaaaatgagagagttctcaggaaaaaataacttattcaaggaagttgccaattttatagcccataataaagaaagagatgagggcattataagcgaacatacaaccgcaaactttcttaaattcaaattcactctcagtaaagagatgaaaggacaacaactagatgtagttaaaggttttcccgcctggatatatagcctagtaatgatacagatatctgaattagatgaaggagagtgtaaatctaagtacaataaaacaaaatctagcttaagagagcgagtgcgtcaaatgtttacagttcaagatggaatttgcaagattaagggaaagataaagcgcaatgactttaacacgttcacctctttgcttgattcatttacaatccgtggggaaggtgttttcacgatagatgatcttttcgacgagatggtgctttgtttaaaacaaaataacatatcattttctgaggagaaattaagagcacaaaaggataagataatattaagcatttttctacttatgcacaacactgaatttaagtttaaacaaactctttcagcaagaattgtgattacagctgataacaataaaatttcaattgctgccaagatccctcttgatggtatatatttctcctatatcatacttaaaagtgaattagatgcatctgaatggtgtgatgaacaagcaatagattacttaaccagtcacaatgaactcccagagtcaataaaaataaatagcgacttcaagttatcactaatttaa

SEQ ID NO: 234503 - DNA, 459 bp, Klebsiella pneumoniae
atgagtggatgggggcaaagtaaagaagaacactggtcagcaactcaatttgataaatatggtttccgtcgttctgacttaaaggctattgctgacaaattaggggttaatcttgatattccaatcgaggatattgttacatcaggagaaaataggaagccagaaacattttcggaagaggatataagcgtcctcagaagcgagatttctctcttaaaagagaaaatcaaaaagttaaatagtgaaagaccgactcttttgggcaaatacagaaaagatgatcccctccttctggcgatacagataagaaacactgaatggaacatgtacgatcctgataatgacagagctaccagagggaatcaggtggcaattattcaagaccttgaaggtaaagggttttccaatgcccaagcaaaagcaatagaaatggttgcatgccccatcaagcgtggctaa

SEQ ID NO: 234504 - DNA, 843 bp, Klebsiella pneumoniae
gtgactccgattcggacagcgactctgactccgacagcgactctgactctgacagtgattcggactccgacagcgactcggactctgacagcgactccgactccgacagtgactccgattcggacagcgattccgacagcgacagcgattcggattccgacagtgactccgattccgacagtgattcggactctgacagcgattcggattccgacagtgattccgactctgacagcgattcggactctgacagtgactcggattctgacagcgattccgactccgacagtgattcggactctgacagcgactccgattcggacagcgactctgactccgattcggacagcgattcggattccgacagtgattcggactctgacagcgattcagactccgacagcgactctgactcggacagcgattcggattccgacagcgattcggactccgacagcgattcggactccgacagcgattccgattccgacagtgattcggactctgacagtgactccgattcggacagcgattcggactctgatagtgactccgattcggacagcgactcggatgctgacagcgactccgactctgacagcgactctgactctgacagcgactcggattctgacagcgactcggattccgacagcgattcggattctgacagcgattcggattctgacagcgattcggactccgacagtgattcggattcggactccgactccgactccgactcggacagcgattccgattctgacagcgactccgactccgattcggataccgaaccgcaggcaaataatgatacccatacggcggctatcgataccgtag

SEQ ID NO: 234505 - DNA, 2004 bp, Klebsiella pneumoniae
atgatggacgcgctgcttaacctcaccgcgcaaatggcgcgggaggggatccgtcgcctgctggtgctcagcggcgatgagagctggacgctgcagcaggcgcaggcgctacgggagaggctcggcggcgatggcctgtgggttggccccgagccggtttctgcgccctgcgtggcgcccggcgagctgaaaacgctgctggggcgggaagtgatgcacgcctttttcgatgcccggcgcgggtttgatgtggccgccatggcggccctgagcggcacgctgcgggcgggaagctggctggtgctgctgacgccccccttcgccgactggccgacccgggctgatgaggactctctgcgctggagcgatacgcctgaccctatcgttacccctaactttgttcaccgctgctgttggcagtttatcgccgatccggaggtgttgctctggcggcagtcggaccggccacgtttcccgctggccgccccgcgtccagactggcatcccgccgatggccgcccgcaggccgagcaggcggcaatccttgagcaactgatacgcctgccgcccggtatcgcggcggtgacggcggagcgtggacgggggaagtccgcgctggcgggcatgctcctgcgccagcttgggggcgaggccatcgtcaccgccccaacgcgtagcgctgtcgaggtgctggccagctttgccggggagacgttgcgctttatggcgcccgatgcgctgctggcgtcgaaagaaaaggcggcgtggctgatagtcgatgaggccgcggctatcccggctccgcttctccggcagctggtgagccgttttccccgcacgctactcaccacgacggtgcaagggtacgagggcaccggtcgcgggttcctgctgaaattttgcgccagtctgccccatctgcaatcgttcaccctgagcgccccgatccgctgggcggcgggctgtccgctggagtcagccatcagtcagttgcttatctttaacgatgaggcatttcgcgacgcgccgatgggggagatagccctggaggcggtcaatcagtcctgctggcaaacgcagccagcgctaccggaggcgatgtaccagctattgtccggggcgcattaccgaacttccccgctcgatctgcggcgcatgatggatgctccgggccaggctttccgctgcgctcgcgccggcggcgcggtggcgggcgccctgtggctggtggccgagggggggctttctcgcgaactgagccgggcggtatgggcgggttttcgccggccgcgcgggaatctggtcgcccagtcgctggcggcgcacggcggcagtcccctggcggcgacgctgcgcgggctgcgggtcagtcggatcgctgtccatcccacccgccagcgggaaggcctggggtggaagatgatcgccgatatcgccgccgatgccgctggctatgactatctctccgtcagcttcggctataccgctgagctgtggcgcttctggcaacgctgcgggtttaccctcgtacggctgggtacccatcgcgaggccagcagcggctgctatacggcgatggccctctatccgttgaccgcggcagggcgccagctggcgcagcgggaggcgcagcggctgcagcgcgatgaatactggcttcgcccgtggcgagaggaatccgcgccgctgccggccgtcgcagacgctatgcttagtgatgaggactggctggaagcggcgagctttgccttcgcccaccgcccgctggccgcggcgctgggttgcctcaaccgcctactgatgcaggccgacatgccgttgccggccctgcggggacgactgcagggcaaagaggaggccgcactctgcgccgtgctgcagctgacggggcgaaaagccttgcaggcgagatggcgtcgggaggccgctgacgccttgcgcttccttgatgcagcgcgcgctgatgcgctgcgtcagcaggtggcgcatctgcaatttttttaa

SEQ ID NO: 234506 - DNA, 480 bp, Klebsiella pneumoniae
atgaacccgttccccttgccattactagtacttcttgaggattacagcggcgtatggaatgactattttgaggttgtttataaaatcttttatcaagattttgtcctcacaaagccagttttcagaaaaaagcgattgggtcttaaacgccatccagagtacgaggggaaatcagctacgttctggcatatggtgagcactggagatcaggaagaggaacgaatacctgacatccgacgttgcgaacgaattgcttggccgaaacccatcattgacggcagcgacaccccctgtttaaagatttgggctgagcctaaaggtaaaaatcagagaatccatatatggtttgaagatgaaggttacctagtcgttcttgatgatagaaaggattatatcctgccttggactgctttttttatcgagaaaaatcatcaaaaggataagtacaacaaaagatggaaaagatacggcgcttactga

SEQ ID NO: 234507 - DNA, 711 bp, Klebsiella pneumoniae
atgactcaaatctataacgtatattgtgatgaatcttgtcatctagaaaatgatgaccaaaaagcaatggttctgggtgcagtttggtgcccagttagcaaacgccaaagcattgctaaccgtttacgcgagataaagaaaaaacatgggcttgccacagactttgaaacaaagtggactaaggttggtatgtctaagatcgggttttatatggatcttattgactactttttcgatgatgatgatttgcatttccgtgggctcgtcatacctgacaaagcaacccttgatcatgatagctttggccaaagtcatgatgaatggtactacaaaatgtacttcgtcatgctaaaaaccattttcgatccgggcagtcaatatcgtgttttcattgatatcaaagatacattgggacatgaaaaggttcgaaaattacatgatgtactttgcaataatgcttatgactattcaagaaagacgattgcccatatccaacgaattaactcacatgaagcagagcaactccaactagctgatctactaattggcgcactcagctacctgcaccgtaaccttgctgaaagcaaagctaaacgtcagctgattgagagaatacgagagagaagtggctatcaactaacgcgcaacactctactcagagaatccaagttcaacctaatgatatgggcagctaatggaggctcgaaatga

SEQ ID NO: 234508 - DNA, 963 bp, Klebsiella pneumoniae; identical to SEQ ID NO: 98277

SEQ ID NO: 234509 - DNA, 3525 bp, Klebsiella pneumoniae; identical to SEQ ID NO: 227879

SEQ ID NO: 234510 - DNA, 747 bp, Klebsiella pneumoniae
gtgggagagattaaaccgctagaactgcttaatgtgctgcataaaattgaaaaacacggggcgttagagaagatgcgcaaagcgcgacagcgctgttcagaagtgtttcgttatgccatagctacttggagagctgagtttaatcttgctgcagatctctctagcgccctcgaagtacatcaatctaatcattttccattcctaaaagttggtgagctaccagattttctacgagccttagacagttacgcaagcagtcggcttgtacaagttgctacgaaattacttatgattacgggtgtgagaaccattgaattacgtgcagcattatggcaagaatttgatctggattacgcaatttgggaaattcctactgaaaggatgaaaatgcgcaggtcacatcttgtgccattgtcgtctcaagcgttagatttactcaatgaactgaatatcatggctggggactatcgttatgtttttccggggcggaacgatccgaacaagccgatgagcgaagccagtatcaatcaggttatcaagcgtattggctttgggggaaatgttacgggacatggattcaggcatactctttctagtgttctacatgaacaaggctatgaatcagcgtggattgaaactcagcttgcgcatgttgacaaaaactctattcttgggacctacaatcatgcagtatatctagataagagaaggtctatgttacaatggtatgctgataattttttctaa

SEQ ID NO: 234511 - DNA, 675 bp, Klebsiella pneumoniae
atgagtaacaaatcatcagatgagcaatctcagaaaataaactctgtgatacttggctctaataacagaacaacattaacacaagtagttgttaatgttaacagccattttgttaatcaagaattattggtcgaacaattaaaagaagaaattaaagatgctttggaaaatgagttctctgagtctgatcacaatatactcctttgttacccaaataagaaaatagacaacaaaaccgttagctactcaataaataaaataaaaaaacatcttgaggagaaaggtgctagtgtctatgagggtggtggtaaatcagcccttcctatagagagcgttggatactcacatttatctgaactagaattcatcagaaaaacaaactgtgacacggtgataatctttgcactagacgaattaaccttatcacaactaactcttattagtcatttcaagatttcaagaaagctagaacttactgatgttgtaatcatatcaagcgaagacttcaaaaatagtgatcagtttttgttaaatggcgctttcaaatattgcagcgacaataactgctcagtgatttctttagattcgctaggggataaggaaataaaatctattatcgacagaatcgttaataaaaaaataatccaaagaaaaaatggtctattgggggtctaa

SEQ ID NO: 234512 - DNA, 1497 bp, Klebsiella pneumoniae
atggaagtaaacacaaactttaggttattactttggggggtatcgataatacaaccttcatcccctgatgaagttttaggttatttgaaagctgtcttaaacgatgatggactgcttccagagatagaggttatggaagactactttgataaattaaaaaaaattgggtatattgaacaggtttcgaagagaaataatttattctctattacccctcaaggaaacgaaaaattaccaccaaggttaaaaaaactgagagataagattagaatttttctacttgacaaatgttatatccaaagtaaattagaacggctggcctcaactgaaacagagaaaatgagcggcgattcgccgttcttaacgttaaggcacattttaaaagaggttccgcacccaagcctgccttgggcgaccgggaccctgcccagccgcccaaggcaggcttgggtgcggatctatgagcaattaaagattggttcgacgttcggtgatgaggccagcacttccatcaccgatacttcacctagtgaggtgaagaaaaatattctatctttaaatttttactcttttaataaccttgaacataattatttcaataataatggagttacaattatttcctcctgtatcggggtctctcctggcttactaacctcaatgataaaatcccctgaaaaatattatagaccatttgagttaactaagaaaaatggtaaaaaaagggagatactagctcctagaaaattcataaaagttacgcaatactggatcgcagaccatctcttgaatagacttaaaattcactcttcttgtttttcttatagaaagggagtaggaataaaagataatgcctacaatcatgtcggcatgaaattcgttgcaaatattgatattacagactactttggtacaatcaataaaacaatgattaaaaaatgtcttttagacaataaaattcctataagtatagtagaggttatttcaggtctgatcacttactacggatacctcccacaaggagccccaacaagcccaattatttcaaatgcaatcttgcacgactttgatgagagtatgtgtgaatccgcattacattttgactgcgtatatactcgctattcagatgacatcacagttagcggaaatagcagagaaaaagttttcttgctaaccagagttgcagcaaaattattagaaaggcgtggtttttctataaatgaagaaaaaacgcgaatactctccactaataatcgacaagtagttaccggcattcttgtaaatgaatcattgagacccacaagaaaatatcgtagaaacgttcgagccgcctttgatcaagcaataaaaaccatggatacttcagatgacacattgaatagcttaaaaggccaccttaattatttgaattcctttaaacaatatggttttaaattcgatcatgagaagtatcaactcattattaatgaattgataaaaaacaaagacatcaattaa

SEQ ID NO: 234513 - DNA, 834 bp, Klebsiella pneumoniae
atgcaagttcttgataaaaatggcatggagctgaacgctgaatgcctggtaggtgaagaagatggggtttatggcctgatacttgagtcctggggaccggtacatagaaacaaagattataatgttgccctcgattatatcattgaacgacttattgactccggggtagacaaagtcgttgtatatttggcctcatcaccaatcagaagaaatataccatctatagctgaaagaaaaatacatcctgatgagtatttttctttagtgggaaacaacccttccgatattcgccaagaaatgtgtaggtatcaaaataatttcagcaacactggtaaaaaagatacaccatcagggaacagaaccaagcgagtaatgataaatgttccaggagtcaacaatgctgaattttggaagcctatcgtatacggagatatgtcagtgcatttcgagcctactgatgatgagagtattctaagtaaaagggtcagcaggctaataaagattcctttgaaagagcccgagggatataaaacaccaggaacattagaaagagttcagaaggtttatattcgggatcccgctgttaaagcttgggtattgcaaaagagtaagggcgtttgtgaaagatgtggtgaaaatgcaccgttcttaattaatggcgatactccatatctcgaggtacatcatgtgataccgctttctttatctggtgctgataccataagcaattgtgttgcattatgcccgaattgccatcgggcattgcattacagccaaaattccgaagagttgattgaggaactttatataaatataaaaaggttgcaaagatga

SEQ ID NO: 234514 - DNA, 3114 bp, Klebsiella pneumoniae
atggcgaatttctttatcgatcgccccatttttgcatgggtgctggcaatcctgttatgcctgacgggcaccctggccattttgtcgctgccggttgaacagtatcccgacctcgccccgccgaatgtgcggatcaccgccaactatcccggcgcctccgcgcaaaccctggagaataccgtcactcaggttatcgaacagaatatgaccggcctcgataacctgatgtatatgtcctcccagagcagcgccaccggccaggcgacgatcaccctcagctttaccgccggtaccgacccggatgaagccgtgcagcaggttcagaaccagctacagtcggcgatgcgtaagctgccgcaggcggtgcaaaaccagggggtgacggtgcgcaagaccggtgataccaatatcctgacactcgccttcgtctccactgacggcagtatggataaacaagatatcgccgactacgtcgccagtaacatccaggacccgctcagccgcgtcaacggcgtgggggatatcgacgcctacggttcgcaatactcaatgcgcatctggctcgacccggcgaagctcaacagctaccagatgaccaccaaggatgttaccgacgccatcagttcgcagaacgcccagattgccgtcggccagcttggcgggacgccttcggtcgataagcaagcgctgaacgccaccatcaactcgcaatctctgctgcaaaccccggagcagttccgcaatatcactctgcgcgtcaatcaggatggttcagaggtgacgctgggcgatgtcgccaccgtcgagatgggggcggagaagtacgactatcttagccgctacaaccgccagccggcctcaggcctcgggatcaagctggcttccggcgccaacgaaatggccaccgcggagcgcgtgatcaatcgcctcaatgagctggcgcagtttttcccccacggtctggaatataaggtcgcctacgagaccacctccttcgtgaaggcttccatcaccgacgtggtgaaaaccctgctggaggcaatcctgctggtcttcctcgtgatgtatctgttcctacagaacttccgcgccaccctgatcccaaccatcgccgtgccggtggtgctgatgggcactttcgcggtgctgtatgcctgtggctacagcattaacaccctgacgatgttcgcgatggtgttggcgatcggcctgctggtggatgacgccatcgtggtggtggagaacgtcgagcgcatcatgagcgaggagggcctgtcgccacgcgaggcgacccgtaaatcgatgggacaaattcagggcgcgctggtagggatcgccatggtgctgtcggcggtatttgtgccgatggccttcttcggcggcaccaccggcgccatctatcgccagttctcaatcactatcgtcgcggcgatggtcctctcggtgctggtggccatgatcctcacccctgccctttgcgccacgctgcttaagccggttaagccaggtgaatcccatgaaagaaaaggcttcttcggctggttcaaccgcaccttcaaccgcagcgccagccgctacgaaaccttcgtcggcaaaatcctgcaccgctcgctgcgctggatgctgatctacgtcctcctgctcggcgggatggtgttcctgtttctgcatttgccgacctcgttcctgccgctggaggatcgcgggatgttcaccacctcggtccagttgccgagcggcagcacccagcagcagacgctgaaggtggtgcagaaggcggaagattacttcctcaataacgagaagcagaacgtcgagtcggtgttcgctaccgttggctccggccccggcggcaatgggcagaacgtggcccgtatgttcgttcgtctcaaagactgggaccagcgcgacccgcaaaccggcacctcctttgccattattgaacgcgccaccaaagcgtttaatcagattaacgaagcgcgggttatcgccagcagcccgccggcgatcagcggcctcggcagttcggcaggcttcgatatggagctggaggatcatgccggaaaggggcacgatgcgctgatggcggcgcgcgatacgctacttgagctggccgggaaaaatccgctgttgacccgcgtccggcataacgggctcgatgacagtccgcagctgcaggtcgatatcgatcagcgtaaagcgcaggcgctgggcgtctccattgacgacatcaacgatacgctgcaaaccgcgtgggggtcgagctacgtcaacgactttatggatcgcggccgggtaaagaaagtctacgtccaggcggcggcgaaataccggatgctgcctgacgatatcaatctttggtacgtgcgcaacagcagcggcacgatggtgccattctcggccttcgccacctcgcgctgggagaccggctcgccgcggctggagcgctacaatggctactcagcggtggagatcgtcggtgaggcggcgccgggtatcagtaccggtaccgcgatggacatgatggagaagctggccgcgcagttacccacaggctttggcctcgaatggaccgccatgtcctaccaggaacgcctctctggcgctcaggcgccggccctgtacgcgatttctctgctggtggtgttcctgtgcctcgcggcgctgtacgagagctggtcggtgccgttctcggtgatgctggtggtgccgctgggggtgattggcgccctgctggcgacctggatgcgcgggctggagaatgacgtgtacttccaggtgggtctgttgacagtgatcggcctgtcggcgaaaaacgccattctgatcgtcgagttcgccaatgagctcaacgagaagggccaggatctgctcagcgccacgctgtcggcttgccgtcagcgcctgcgccccatcctgatgacctcgctggcgttcatcttcggcgtgctgccgatggcgaccagcaccggcgccggttccggcagccagcatgcggtcggcaccggagtgatgggcgggatgatctccgccaccgtgctggcgatctttttcgtgccgctgttctttgtgctggtgcgtcgccgttttccgctaaaggagcgtccgcaataa

SEQ ID NO: 234515 - DNA, 1983 bp, Klebsiella pneumoniae
atgaaccactttattttgagcgatagccgaaagtgcatcggctgccaggcctgcgaagtggcctgcgtgatggcgcataacgaggagcaacacgtgctgaccccgcagcgctttttgccacgtatcaccgtgatcaaagcggagggccagcgtaacgccatcacctgccgccactgcgaggacgccccctgcgtccgcagttgtcccaacgacgccatcgcccagtccggcgacagcgttcaggtccgtcaggagaaatgcattggctgtaaatcctgcatggtggcctgcccgttcggggtgatgcaggtggtggtgacgccgcaggccgcaggcctggtgaaagccagcgcgcacaagtgcgatctatgccagggccgcgaggcggggccggcctgtgtggaaaactgtcccgcgcaggcgctgaccctcgccgacgatgagacgttgatcaccctggcgaagcagcggcgactgcgctcggcatgccaggaggtgcagccgtggcagcgcgctacgccgctctgcagccagcccaatgctggcgcgaaggtcaggcaaatggcgatgacgcccccgcgcggggagccggataagctggcggcggaggtgcgtaagagccactttgaggagatctatcagccgttcaccccgcagcaggcgcagcagcaggccgcccgctgtctcacgtgtggggagcacagtatttgcgaatggacctgcccgctgcataaccatatcccgcagtggatcgagctggttaaagcggggaatatcgccgccgcggtcgcgctttcccatcagaccaactgcctgccggagatcaccggccgcgtctgtccccaggaccggctgtgtgaaggcgcctgcaccctgcgcgatgaaagcggggcagtcaccatcggcaatattgagcgctatatttccgaccaggcgctggccagcggctggcgtccggacctttcgcaggttaagccgagcggcaagcgggtggcgattatcggcgccgggccggccgggctggcctgcgccgatatgctggtgcgccacggcgtccagccggtggtcttcgaccgtcatccggagattggcggtctgctgaccttcggcattccggcgttcaagctggataaatcgctattggcccggcggcgggcgatcttcagcgagatgggtatccgctttgagctcaattgcgaggtggggaaagatatctccatggcgacactactggccgattatgacgcagtgttcgtcggcgccggaacctatcgctccatgaaggcggggctgccgaacgaagaggcccccggggtctacgatgcgctgccgttcctcatcgccaacaccaaacaggtgatggggctggcggcatcggcgcaagagccttatgtcaacaccgccgggctgaacgtggtggtgctgggcggcggcgatacggcgatggactgcgtgcgcaccgcgctgcgccacggcgcccgccaggtgacctgcgcctatcggcgagatgaagccaacatgccgggctcgaaaaaagaggtcaaaaacgcccgcgaagagggggcgctctttgagtttaacgtccagccggtgacgcttgagctggacgagaacgggcgggttaacggggtacgctttttgcgcaccgagctgggcgctccggacgccgggggaagacgccgtccgacgccgatccccggcagcgagtttgttatgccggcagatgcggtgatcatggcctttggcttccacccgcaccgcatgccctggctggaggcggcgggggtggcgctggacagccaggggcgtattaaagccggagtggagagccgttaccgttatcagaccagtcaggagaagatctttgccggcggcgatgccgtgcgcggcgcagaccttgtagtgacggcgatggcggaaggccgtcacgcggcgcaggggatcctggactatctggcgcggaaaacgacgccgcttcactga

SEQ ID NO: 234516 - DNA, 597 bp, Klebsiella pneumoniae; identical to SEQ ID NO: 135137

SEQ ID NO: 234517 - DNA, 2169 bp, Klebsiella pneumoniae
atgaattcagtcacaacaaacaaaccggcaacacctgattctgatgagatggatctgggacgcctatttggtgagttaatagatcatcgcaaattgattatagccgttactacagggtttacagtattagcggttctttatgcgttattagctaccccgatctaccaagctgacgcattggtacaggtggagcaaaagcagggaaatgcaatcttaagtagtttaagccaaatgttaccaaatagtcagcctcagtcagctcccgaaattgcattactgcaatcacgtatggtactggggaagacagtggatgatttaaatttacaagcacaagttaaacaaaaatactttcctctcattggtcgtggaatggcacgtataatgggggataaacctggaaatatttcagttagccgtctctatctaccgtccgaagatgatgacagcactccaaaaattactattacagttatagataaaaagaattatttagttgagggcgcagattttagtattaatggtacagtgggtacattacttactgagcatggtatatctcttttggtcaattctattgatgcaaatcctggtgataaatttactgttagccagttaacgcgtctgaaagcaataaccgatcttcaagaagtatttaatgttgctgatcaaggtaaggactctggtatgttagggttaacattaacaggtgataacccagagttaattactcggatactagatacaatcagtcagaattatttagcacagaatatcgatcgtcaagctgcacaggatgccaaaagcctagattttttaaatatgcagttgccaaaggttcgcagtgatctggatatcgccgaggataaattaaatgcttaccgtaaacaaaaagattcagttgatttaaatatggaagcaaaatctgtcctcgatcagattgttaatgttgataatcaacttaatgagttgacttttcgtgaggcagaaatttcacagttgtataccaaagaacatccaacttataaggctttaatggagaaacgacatattctccaagaagaaaaaacgaagcttaataaacgagtaagcggaatgcctgctactcaacaagaagtgttgcgtttaagtcgagatgtagagtctggacgcgctgtatatctacagttactaaaccgccagcaagagttgaatatagccaaatcaagtgcgattggtaatgtgaggattatcgataatgcggtcactgaaactaagccagtaaaaccgaaaaaaatattagtggttgcaataggccttatttttggactgtttgtttccgttggattagtccttttacgagtatttcttcgccgtggtattgaatcaccggagcaacttgaagatattggaatcaatgtatatgcaagcgtgcctgtatctgagtggttggctaaaaacaatcgtaaatcaagcaaactccgtaaaaatcagtcagataccttacttgcattggaaaatccagcggatctggccgtagaagcaattcgtagtctgcgcactagtctgcattttgctatgatggaggctaaaaataacgtattaatgatttcgggagcaagcccaaacgctggtaaaacattcatcagcagtaaccttgcggctactattgcattgactggtaaaaaagttcttttcattgacgctgatttgcgtaaaggctatgtacataagatgttagggcgcaaacaaggtcaaggattatctgaagttttgtctgggcaagttgcagtcgaaaaggttatcgaacatgtcgatgatgcggctttcgactatattggacgtggattaattccaccaaatccggctgaattgctaatgcatccacgttttgaagctttattaaagtggggatcgcagaattatgatttagttgttatcgatacaccaccgatattagcggttaccgatgcagcaattataggtcgctatgcaggtacttccttaatggtagctcgttttgaagttaatactgtaaaagaaattgaagttagtatgaaaaggtttgagcaaagcggtgttgtcgtgaaaggatgtattcttaacggtgtggtgaaaaaagccagtagctattatggatatggttataaccattacggttattcttattcggatcagaagaataatcaataa

SEQ ID NO: 234518 - DNA, 132 bp, Klebsiella pneumoniae
atgttgtttggccattggttggggggaaaagagatcccggacccatatcgcaaaagtgatgaggcttttgattcggtatatcagttaattgatttggccagccagcattgggttgccaagttaggtggataa

SEQ ID NO: 234519 - DNA, 2634 bp, Klebsiella pneumoniae
atgagtgataaaaacctgcgtctgcaggtcgtgttaaatgcggttgataaactcacccgacctttaaaagttgcacaggctggatctaaggaactggcctctgctgtccggcagacccgcgagcagcttaaacggctcaacgatgcgggaggtcagttaaaatccttcgatcagctgtcccggagcctgagccggaccagtaccgaactggaccaggcgcggctgcgtgcgcagatgatgacccgcgaaatgtcagccctcgaatcccccaccaaaaagcagacagcggcgcttgaaacgcaatggcgggccgtgtcgaggctggagcaaaagcaggagcaggaaacgcggcagatggcggcagccagggcggaactgtaccgcctcggcatctctgcgggaggcggtgcccgtgaaacggcacgcattacccgtgaaacggatcgctataacaaacagctggcagagcaggagcggcgcttgcgtgacgttggcgagcgccagcgcaagctgaatgcgatcagggcaaaagccgataagatgcgcgatgtgcgcaatagccttgccgggaacggcgcaggaatggtggctgcaggtgtggcaacgggggcaacgctgatggcacccattcgcgcctactcggaatcagaaaacgccgctaaccagctggcaggctcgatgatggggcctggcggaaaggttgcgccggagtttgagaagctaaacaagctggcaatcgccctgggtgaccggctgcccggcaccacggcagactttcaaaacatgatgaccatgttacgccgccagggtatgtctgcgcaggtcatcctgggagggctgggtgagtcggcggcgtatctcggcgtgcagctgcagatggccccgacggatgcggcagagtttgccgcgaaactgcaggacgccacgcagaccaccgaaaaagacatgatgagcctgatggacgtgatccagcggggttattacgcgggggttgatccgggaaatatgctgcagggttttgcaaatatcagcagcgctatggacattatcaagcagaagggcctggatgctgcgaaaacatttagtccacttctcgtcatggccgatcaggcagggatggccggagagtcagcgggtaatgcctatcgtaaaatttttcaggccacgctggatgccaaaaatattaagagcgtaaacgacgggctgaaaggaaaaggtatcaggtttgatttttccgacgggaaaggcggatttggcggcctggaaaagatgtacgcgcagttagaaaagcttgaaaaattaaatgatgaaacaaaacttgcaacgcagaaagccctgtttggtaacgataacgaggtgctaaaagcgctgaataccatgacgtcaaaaggcatcgagggctaccgtgaaaccgtcgccaaactggagaaccaggcgactctgcgcgagcgcgtcgatgcgtctcttaataccctgggcaacaaatgggaggcggcaacggggtcttttactaatgcgatggcaagcattggggaaactgtctcgccagtgcttaaaacgctatctgactggctggggaatctggcttccgggctggatgggttggttaaacggcacccgcggctgactgctgcaatgtttacagtcgctgcagtattcgcggttgctgcgacagctgcgggcgtggtgtcactggcgctggcatctattctgggaccgatggccgtagtgcgggtaagtgcaggcatcctccagcttaaatttgcttctgtgtttggtctggtcacaaaagttattggcgcagcaggccaggctatcctgtggctgggcaggctgatgtttgctaacccaatattggcggttattggcttgatcgctatgggcgccatttatatctggcagaactgggaaacactggggccaaaatttaaagcgatgtgggatgctatctcatcgggagtgactggtgcatgggcggttattaagcagaccatcagtcagaaatggactgaaatactgagtgatgttgccgcgctgcccgcgaagtttaaagcggtgggaggcgcaatcattgacggcatcctgagcggtatcaatgagaagtgggagacgctcaagagcaagctggcatcggtgaaaagctatctgccggactggatgaccggtggcgacaaatcaccgggaaccccacaggcaaaaggtgtgggtggattttttgccgggatgtatgacagcggcggatatattccgcgcgggcagtttggcattgctggtgagaatggacccgagatcgttaacgggcctgcatacataacgagcaggagacgaacagcagccattgccgctgccacctggctgactctgggagggctggcaccggagacagaggctaaaccactccacccatacagcctgcctgtctccgcatataagagtcagcaacaaaagcccgctatagtcacgcaagccctgcctgcgtcgatagggacagttgaaatccatattcaccagcaaccagggcaaagcccgtcagatgtggcagatgaagtgatgagacgtattgaagcaaaacagagaaaactggcagcccgttcacgtagtaactttagcgaccaggggggatacgatgtatag

SEQ ID NO: 234520 - DNA, 135 bp, Klebsiella pneumoniae; identical to SEQ ID NO: 168788

SEQ ID NO: 234521 - DNA, 312 bp, Klebsiella pneumoniae; identical to SEQ ID NO: 208453

SEQ ID NO: 234522 - DNA, 744 bp, Klebsiella pneumoniae; identical to SEQ ID NO: 208455

SEQ ID NO: 234523 - DNA, 285 bp, Klebsiella pneumoniae; identical to SEQ ID NO: 208458

SEQ ID NO: 234524 - DNA, 681 bp, Klebsiella pneumoniae; identical to SEQ ID NO: 208460

SEQ ID NO: 234525 - DNA, 231 bp, Klebsiella pneumoniae; identical to SEQ ID NO: 208461

SEQ ID NO: 234526 - DNA, 639 bp, Klebsiella pneumoniae; identical to SEQ ID NO: 208462

SEQ ID NO: 234527 - DNA, 1350 bp, Klebsiella pneumoniae; identical to SEQ ID NO: 208463

SEQ ID NO: 234528 - DNA, 1398 bp, Klebsiella pneumoniae
atggcgatcctacatcatcgagcaagatcaaaatccaatgcatcattaatatcaatggtacagcgtttttctgatatcacaattatacttttaggtttgtattgtatatgtttcattcatcagcagtattttggcacaaaggaattgcttataggtctcattgttctcgttatatttcagatgattggcgggattacggatttttatcgctcatggcgtggcgtaaagatatcgactgaattaaaattgctattgcaaaattggacgcttggtttgatttttacaataggcataacatcttttttatcaagttacaattttgcttttgatatttttttgcaatggtatgcagtcgtaagcttgactattgtcttctgtcgtattgcaattaggtttgcagctggtttaattagaaagtttggttataatacgcgatatgttgctgttgctggttccatgccagccggtatcaatcttttgcgaagtttcgaagaagaaccatggttaggctttgtcgttaagggggtatatgatgatcaacctactgacgacgaatcgaatattatatatgccggtactttgtcggatcttatttctgaagctaaggcaggtaaacttgatcgtatatatatagcaatgcggatgggggatgaagaaaaaattaaaaacttagttcgtgaattaacaaatactacttgttctgttatgcttattcctgacatttttacatttaatatattgcaatcacgtactgaagaagtaaacggagttcctgttgtccctctatttgatacccctcttaatgggataaatatggttttcaaacgccttgaggatatcatcatttctttaattattttagtccttatttcaccagttttgtttgtaatagcttgtacggtaaaatgtagttctcctggcccagtactttttcgacaaataaggtacggtatggatggaaaaccaatcaaagtatggaaatttagatcaatgaccgtcatggaaaatgatagcgttgttacccaagccactaagaatgacgttagagtgacaaaagttggtcgttttttgagaagaacttctctcgatgaacttcctcagttttttaatgtcttactaggggaaatgtctattgttgggccacgacctcatgcggttgctcataatgagcaatataggcatttaatcgaaggatatatgctacgtcataaagttaaacctggaatcacaggattggcacaagttaatggatggagaggggaaacagatactttggaaaaaatgcaaaagcgtgttgaattcgatcttgaatatatacgtgaatggagcgtttggttagaccttaaaataatatttctaacaatctttaaaggttttgtgaacaaatccgcatactga

SEQ ID NO: 234529 - DNA, 333 bp, Klebsiella pneumoniae
atgcttgataaaattaacattaatatcaaaaaaactctattggcctttatcatttgtttagtcgctattccgctggctcgttttatttcaccgcaaacgataattgacggcaaccttatttatattgcctggctgccaatcagcgtgatgttttctgttatttttatctttggccgctatgcaattgcgccattaattctcgcgtttgccatcaccaatagttttctcattaaattaacgctgccgcaggcgtttatcttacttttttgtcaactgttcgccgtgtttgtctcctgcgctattctgggtaatgctgccaacttactgatttag

SEQ ID NO: 234530 - DNA, 168 bp, Klebsiella pneumoniae
atgatattcgttctgcgttttaaaggggccagtcaaaaagaccgtaacactgacctgattgctgccagctatttgtatcgcatacattttttcaatgcttttaaacagttatgttcatgttgtataatgacgtgcactttaactaaaaaagagtgcgaccatgattga

SEQ ID NO: 234531 - DNA, 516 bp, Klebsiella pneumoniae
atgctctatgtcgtcgaatgcgcctacaccgatccccaaagcgaagcggcgtggaataccttttacaatcaggaaaaactaccggcgctggtctctgtgcccggtttctacgcctcccagcgcttccgcgctctcagcgagggctgcccctgctacctggcgctgcacgatatccatgatgctaccgtcatcgacagcgacgcctaccgccgcaacggcggcggccattttgcccgctggcaatcggcgatcgccgactggcatcgccacctctatctaacgaataatacgctgcgggaggttgccccggatgaagtgctgctgctgggcgataccgcggaggacttgcccgtcgctgcgccgatactcctgcagccaggcggcctggcgaccgaacaaagccggtatgccgccatcctcccacgagacaacctgcatcacctggccacgactgccgccgtctttatctatcagcccatcaccgcccggttacgcaacccggcgcagcgcgcgtga

SEQ ID NO: 234532 - DNA, 435 bp, Klebsiella pneumoniae
atgactaaaggctataaactacttggctataagttagcggataatattttctactgcctgcatcatcgggaaattatcacgctgcgcgggacacggacgcaagtccagctacgcagcaccatggcctgtttactggagtacctgctggcgcacggcagagaacgtctggtcagcgatgaagagttaatgattaacgtttgggaaaaaaataatctccgcccttccgcgcagcgcctatggcaggttattcagagcttaaagtctcgcttacaccaggctggcgtggagagcgcgttaatcatccgcgttaagtgcgcggggtattatattaataacgtttacgtagccgaaatttattcatacaaaccgccggggatgatgaattatataaacacttcgcctgctgatatgaataagcttctggtacgcagctaa

SEQ ID NO: 234533 - DNA, 2958 bp, Klebsiella pneumoniae
atggcggttcgtcttattttatccgtcgttgtcgggctggcgctgagcctctcgcctgccgcgtatgccatgaaacagctggagctgaagagccattctcatatcgcggcgatcgatatcccgcttagcggtaaggagaaagcatggctggcggcgcagcctacgctgaccgtcgggacctggcttcccgagaggacacccatcgtctatgacggcgacgagaaaagttatcagggcattaacgccgactatctggcgctgatggcgcacagcctcggactgaaggtgattatccgccagtatgacaccgagcagcaggcgctcaccgccctggccgaccgccaggtggataccctgctcactcaggtggcgcaccgggatgcgctcgccccgggcctggatcaatccgcgccgctgcttaaaacctggccgacgctggtcacctcgctgaaatcccctctgccgccgctgaccactgaccgccgcgtcacgctggcctgcacccgcgattgcgcttttttcgatattattcagcaggcgtttcccaacgccaaaatcaccctttatgatagcgactatcaggctctcgcctcggtggtcagcggcgagaatcagtattttatcggcaacaacatcaccactggccactgcatctcgaaatatttctcgcaatcgctggttatcgcgcactattttcgtcagcaggagcaacacaaccgctttgtcacccgtgacgatcggccagagctgcatcaactcttcgaccgttttatccatgccgtcgacagcgacaccgcgatgcggatcatgcaaaactggctcaaccgtggcgatctgtcgtttctcaataccccgcttacctttagccccgaagaacagcgctggctgcagaagcatcgtcgcgtccgcctgctggtgaacccctattttccgccatttaccctggtggataacgaggatgaactgcgcggcatcatggccgatatgctgaatattgtctcactccagaccggcctgcagtttgaccctattctggtgcgcaaccgtcaggctctggcaaagcgcatggaaaaagaggactgggcgatcatgcccgccgccaccctgaccccacagccgcaggcctacgtcaccctcagcgatccgcttattaacgtggcctttgtgctggtcgcccgcggcagcgcccccgaccagcatctgctgaagcgctcggcgcggatcgccctgccggtcgggcctatcgccgcccatgatctgaaagcgcgttttccgctgattaactgggtggaaacggataacgttggcgtcgccatgaagatggtagaggaaggcgaagtggatgccgccgtagcctcggagctttccgcccgctatatgatcgaccactactatccacagggtctgcactacacccgcattgatggactccccgtcgcggccattcggctggccatcccgcgcgatgaaccggtgctggccgccattcttaacaaagcgctgcaggttattccgccacgggatattctgcagatgaccgagaagtggtcgaaaatctccagtcagcaaatagagaactggagccagtacagccgccagttttaccagctgatcgcctttgcgctggtgctgatcgccatcagcctcggctggggactctccctgtgtcgggaagtgcgcaaacgtaaagactcccagcagcggctcgaggaggagctggcgcagaaggaggccctctcctgtgcgctggagcgcgaaaaagacaaagcgattcaggcgacaaaagccaagagccgctttctggccagcatgagccacgagctgcgcacgccggtgagcgccatcgtcggctttctggagctgctggcgaaacctgagctgaacgtcggccagcgtaaagaggcgatcgagctggcggggtcgacggcgcaaaccctgctgggacttatcggcaatattcttgatatcgacaagattgaatcgggaaaataccaggttaccccgcagtggagcgatgtcgcacagttagtgtcgcagcagtgtcataccttcgacgcgctggcgcagcaaaagggcatcgatctgcactaccataatgcgctgcaggaagggaccatgctgtgggtcgacccgcaggcgctacggcaaatcctcaataatctcatcggcaatgcgctgaagtttaccgtcgaaggcgcaattcaggtctcctgccggctgacgccggcgaatgagacacagggagagctggccctcatggttagcgacagcggctgcgggatcagtgaagcagagcaggccaccctcttccaccgctatgcccaggcgcgccagggacgacagcagaccggctccggactggggctggtcatttgcaaagagctggttgcgctgatgcagggtcgcctggagatggtcagccgtccgggcgtggggaccactttcaccatcacgctgccggtcaaggcgagccgctgcgcgatccacgcgccgcaggcgtcgcccgccagaccgcaggctctacccgggctggcgatactgatagcggacgatcaccccaccaaccggctactgctcaagcgccagctcagcactatcggctatagcgtcgatgaagcctgcgacggtgaagaggcagagaataagctcgccagcaaacattacgatctgctgataacagacctcaatatgccgaagaaagatggcctggcgctggcggcctcgctacgccgtcgctatccgggcctggtaatttggggcgtgactgccagcgcgctgccgcagtcgcgggaggcgtgtctggccagcggcatgaatatgtgtctgtttaagccggtgtcggtccagacgctgagtcatgagctcagccgtttagcggtgggccgcgcatcacctcacgctacccggcacctgaagctcagcgtgctgagcgagaatacgggggagaccaggcgctga

SEQ ID NO: 234534 - DNA, 579 bp, Klebsiella pneumoniae
atgagaatagattctttaggatggagcaacgttgatgtactggatcgcatctgcgaggcttacgggttttcacagaaaattcagctagctaaccatttcgatattgcatcgagctccctctctaacagatatacccgaggcgctatttcgtatgactttgcggcacactgcgctcttgaaacaggggccaatctgcagtggttacttacaggaaaagggcaaccgttcacatcttctgcgtcagccgaggacacaatgagcatcgagttattcacattaagtgaagaagtactcaaaagtgatggttctataaaagtcgacgcccattttttcacaaagccgcttacagatgcgatggctatacgaacggaaggaaaactccatttcattgataagcaggcatcactctctgacggcctttggctggtcgacatagagggtggaattagtattcgagagctaacaaaactccccggtagaaaattgcatgttactggtggaaaggttccttttgagtgcggtattgatgacataaagacgctgggtagagtggtaggtgtgtacagcgaggttaattga

SEQ ID NO: 234535 - DNA, 708 bp, Klebsiella pneumoniae
atggaactgaataaaagagaggcatttttcgcagcgatatttaacggttttttatctcataaagaccagtttaatgatgctaatcctgatgaggctatccgcacatgctgggcgatggctgaccgtattatttaccattctgagcgagtggaatcaccacgcgagattgctaacagatggattaataaaaatattgttattgttgataccgaaactacggggctggacagagaagccgaaataattgaaatatcaatcatcgactgcaccggtgctattctgcttaacaccctgattaaaccatccaaagatattccggcagaagctaccgagattcatggcatcactaatgaaatggttgaagatgagccaagctggaaagaaatgttacctcaagtcttggagttaatatcgcgcggctgggttgcttataatgcgaaatttgacgcgagaatgttagagcaaacatcaggctctcgcgttgaccctgattattttggtgtgcccgagtgtgctatgcaactctatgctgaatataacggagagtgggataaaaaacgccgcaaatacaaatggaagaaactaaccgacgccgctacatcgttggatgcgtggccggaagaaattgacgagaatccgcaccgcgcgctttatgattgctatctgacgttgggtgtaatccgttctattgctgggggtaagaaatga

SEQ ID NO: 234536 - DNA, 732 bp, Klebsiella pneumoniae
atggatactgtaatagcatttttatctctggctctctttattgcttttatcgtcgggttaatcaagccgtcactggttcgaatgccgaaccgtaagcgctccagtgcggtttatctcggtggttgtctggcgctgggcgttattggctcaatcttaaggccgactgaaaaaagtcagccggtggcaaaaactgacgcaccggcggttaaagtggaaccggctacgccagtgtttgagtacgcagataaaaccctcaaagaatatcgcaacgagccaaaagaaacccggcacgatatcgttaaaagctatgttggctttaaaggtgtaccggccagctctgctgatgccttttatgcctgtatgagcgagtacacttttactaaagatgatgcgttaaagctcggtgatgtgttggggtggtgtttcaacgatttcgagaaggatccgcaatctctgaataataaaatcaaccttgacgcatttcagggtaattttagcggttgggatggctcttatcgcccgttagagaagctgataaaagccagtatgaatgatgattcctcttataaacatgtttcaacggtctaccatctgattttgaataaagacccgcatgccgttgtaaaaacaacttttcgcggcactaatgcttatggtggcgtggtcaaacagaccgtagcggcacgcgtcaacgtgcgaacgggcgaggtcgattcgatactcgacaattaa

SEQ ID NO: 234537 - DNA, 750 bp, Klebsiella pneumoniae
atgacgagccccgcacagcgtcacatgatgcgggtcttggcctctcaagccgcgcagcgggagcaagccccgctgcgccatgcaaccgcctatgagcagatgctggtaaagctggccgatgaccgccgcacgttaaaaaccattcgttcaaacgagcgtaaagccgagaaaaagcgcgagctgctgccgttctatgcgccgtgggtggccggtgtgctggctgatggccgtggcgcacaggatgacattctgatgactgtcatcctgtggcgtctcgatgccggtgatattgctggcgcactggagattgcgccctacgcgctgaaatacggcctcacctcagaccatcgtcgcaccacgtcttacatgctggttgaggaagtggcgcttgccgcactgcgcctgcgcgatgccggtgagcctgtcgacctcgcattactgctgaccaccctcagcctgaccgacggcgctgacgttccagatatggtacgcgcccgtctgcataaggtgactggcctgaccctgcgcgatgccggtcaggacgccgaagcgctggcgcagtttcagcgcgcgatgcagctcgaccgcaatgccggtgtgcgcaaagagattgagcgactggagcgggcattgaagccaaagccagaggcagcaccccgaaaaacgactaaaccgcgcacgcgcaaacctgccgccaaaccggcggcaaagcgcgggcgtccaccaaaggcggtaaaaaccgccggttaa

SEQ ID NO: 234538 - DNA, 204 bp, Klebsiella pneumoniae
atgaaagtctgggcgatgcagggcgacacccttgacgcgctttgcgcccggtattacgggcgcactgagggcgtggtcgagacggtgctgcaggctaatcccggtctgtctgagctgggcgtcattctgccgcatggcacggcgattggcctgcccgacgtggcatcgtcacccgtaacagaaactatcaacctttgggagtaa

SEQ ID NO: 234539 - DNA, 297 bp, Klebsiella pneumoniae
atgacagaaggggaaaaaggcgtcctgtcactgtttgtgattggcgtgatgattgttgtcggaaaagtgctggcaggtggtgagcccatcaccccacgcctgtttgtcgggcgcatgctgctcggcggttttgtctctatggtcgccggtgtcgttctggtgcagtttcctgatatgtcattgcctgccgtgtgcgggattggatccatgctcggcattgcaggttatcaggtggtggaaatcgccattcaacgccgctttaagtcacagaagggggaaagcgatgccggtcattaa

SEQ ID NO: 234540 - DNA, 498 bp, Klebsiella pneumoniae
atgccggtcattaatactcaccaaaatatcgccgcgtttctggacatgctggcctattccgaagggacggcgacgcatccgctgacgaaaaatagtggttacgacgtcattgtcaccggacttgatggcaagccggagattttcaccgactgcagcgaccaccctttcgcgcatggccgacccgcgaaagtgtttaatcgccgaggcgaaaaatccacggcatcagggcgttaccagcaactttatctctactggccgcactatcagaaacagctcgcattgcctgatttcagcccgttgtcgcaggacaaacttgcgattcagttaatccgggagcgcggtgccattgaggatattaaggcggggcgtattgagcgggcaatttcacgttgtcgcaatatttgggcgtcgttaccgggtgccggttacggacaacgtgagcacagcctcgacaaacttgtcaccgtatggcgcaccgctggcggggtgatggcatga

SEQ ID NO: 234541 - DNA, 450 bp, Klebsiella pneumoniae
atgagtgaattaaccgcgctacaggagcgcctcgccggtctgattgccagcctgtcaccggcggcacgtcgccaaatggcggctgagattgcgaaaaagctgcgcaccagtcagcaacagcgcatcaagcgccagcaggcacccgatggcaccccgtatgccgcgcgaaagcgccaaccggtacggagcaagaaaggccgcattaagcgcgaaatgttcgccaaactgcgcaccaaccgctttatgaaagctaaaggcagcaacagtgcggcggtggtggagtttaccggcaaggtgcagcgcatgacgcgggtgcatcagtacggcctcaaagaccggccaaaccgcaacagccgggatgtgcagtacgaggcgcgcccgttgctcggtttcacccgcgacgatgagcagatgattgaagacgtcattatcaggcacatcggcaaataa

SEQ ID NO: 234542 - DNA, 636 bp, Klebsiella pneumoniae
atgaatacgttatccacgatacaggagctcgcgcgcgcgattcgcaacctcatccgctcaggtgtggtgactgaggttgataccgtgcaggggctgtgccgcgtacaaagcggcgggatccagactacatggctgaactggctgaccacccgcgccggtcgttcgcggacgtggtgggctccctcggtcggtgagcaggttctgctgctggcaatcggtggcgagcttgataccgctttcgtgctgccgggtattttctccgacgataacccagccccgtctgcctcggcggatgcgtggcatgtggctttccctgatggtgcagtcattgagtacgagcccgaaaccggcgcgctgacggtcggcggcatcaaaacggccgacgtcacggcatcggagtccatcaccgcaaccgtgccgctggtactggtgaaagcctcgaccagtatcaccctcgacaccccggaggtgatttgcaccaataagctgacgacggcgacgcttgaggtgcagaaaggcggcaagatgaacggcaatatcgaacattccggcgggtcactgtcgtctaatggcaaggtactccacacccataaacacccgggcgacagcggcgggcaaacgggggtaccgttatga

SEQ ID NO: 234543 - DNA, 981 bp, Klebsiella pneumoniae
atgaccgcaaaatactttgccattctgaccaaacagggcgcagcgcggctggcgaacgcggcggcactcggtaccagactcaacctgacgcaaatggctgtcggtgatgcgaatggtgcgctgccgactcctgacccggcgcagacgaagctcattaaccagaagcgcattgcgtcgctgaatatgctgactgttgacccggccaataccagccagattatcgcagaacagattattcccgagaatgagggtggtttctggatccgcgagattggcctttatgacgacgacggtattctgattgccgtggcgaactgtccggagacctacaaaccgcaactgcaggagggaagcggccgcacgcagaccattcgcatgattctgattgtgtcgagcacgtcggccatcaccctgaaaatcgacccgtcggtcgtgctggcaacgcgccagtatgttgacgataaggttatcgaggtgaaagcctatgctgatgacctgatgaaaaagcatgttgatgccgcaaacccgcacaagcagtaccctctgattgcgaatgcacttaaagaaatggcggacggaggtttagttgatgccgtactgaaaaaccttggactgggaaacattgcgctggcgggtattaatggcggggatatagctgcatctggctatgtaaccctgccgataattatttatggcgaaaagaaaatgctttatatccagtggggaggattttcagggaaaacaggggacacatctacaggtggtgtttacgaaaattccaatattcaggcgacatggccggtggcttttccaaatgccgcattgcaggtaatcaccggcggctcatctgatgttggtggcgcaggacagcaagaaatggcgtggagccttggcaaaacaaaaacctatgggaattttggtttccagtgccgtaccgctaatgctgcaatgacgggttcgtacatcgtaataggatattaa

SEQ ID NO: 234544 - DNA, 477 bp, Klebsiella pneumoniae
atgcgattttcagaaattaaacaatcattctacgatgataattatgagagtaactctgagctgggtgatatcccgaaagatattgtagaaatcaccgatacacaatatcgtgatttttttgtggcaatcaacgaaggccgtaaggtttatctcctcggtggagagtttattgtttctgatgtttgtcctgataaataccatcagtggaatgctattagtcaccaatggaaaatgacggatgaatccgcgcaggaaaaacacaccgacaatatagaagcggcggaaaaacggaaatcctcccttctggatgatgccagtcaggcaatatcaatctggcaaactaaattgcttttagggcgaaagttgacagatagcgagtcagtgcgactgagtgtatggctggattatattgatgccgttaacgccattgatacttcaacagcaccagatatcgagtggccggttaaaccggagtaa

SEQ ID NO: 234545 - DNA, 336 bp, Klebsiella pneumoniae
atggcaaaagcaccacgtaaaacccctgaatttgttgatacggctggcaatgaaattgacaccgtaaacccgaacgtcgtgaccctcgacaagccgattaagcgcgccggtcagacgattgataaagtcaccctgattgagccgaacgccggtaccctgcgcggtgtcagtctggctgcggtggcgcagtccgaagttgatgcgctgattaaagtcctgccccgcatgacctatcccgcgctcacggcgcaggagcttaccgcaatgaacctgccagatatgctgtcgctggccgctaaggtgataggttttttgtcaccggcttcggcggaatag

SEQ ID NO: 234546 - DNA, 321 bp, Klebsiella pneumoniae
atggagaggctccccgccatcgcccttgggatctttgttgccgccttcgtgccgttggccgccgtgttcccggcgctggaggcgaaccataaaggcgcggcgatttcggtctataacctgtcagccgggctgtcgaactttctggcgccagcgatcgccgtggtactgctgccctatttcagcaccatcgggggggtgattgcctataccgccttatatattctggccttatccctgtgcccgttaatttgcgttgaacagccaggcttaaccagcgatcagaatgcgaaaccatttaccgccaacgcggcaaagtcttga

SEQ ID NO: 234547 - DNA, 1278 bp, Klebsiella pneumoniae
atgaaaactaccgttaagctgtcgttcatgatgttcgtagagtggtttatctggggcgcctggtttgtgccgctttggctatggctgaacaaaagcggctttagcgccggggaaatcggctggtcctacgcctgtactgccattgccgctatcctgtcgccaattctggtcggctctatcactgaccgctttttttccgcgcaaaaagtcctcgccgtgttgatgtttgtcggcgctattttgatgtattttgccgcacagcaaacgaccttcagcggattcttccctctgctgctggcatattcgttgacctatatgccgacgattgcgctaaccaacagtattgcttttgccaacgtaccggacgtcgaacgtgatttcccacgtatccgggtgatggggaccattggctggattgcgtccggtttagcctgcggtttcttaccgcaaatgatcggttaccaggacatctcacccaccaatattcccctgcttatcacggccggtagctccgtgctgttgggcgtctttgcgtgctttttgccggatacgccgccgaaaagtaccgggaaaatggatgtcaaagtcatgctgggtctggatgcactgatcctgctacgggacaaaagcttcctcgtctttttcgtttgctcgttcctgtttgccatgccgctggcgttttattacatcttcgccaacggctacctgaccgaagtcgggatgaaaaacgccaccggctggatgacgctgggtcagttctctgaaattttctttatgctggccctgccgttcttcacaaaacgctttggcattaaaaaggtattgttacttggtcttattactgccgcgatccgttacggatttttcgtttacggcggtgcggaagaatatttcacttacgccctcctgtttctcggcattttgctgcacggcgtcagttacgacttctactacgtcacggcctacatttatgtcgataaaaaagcgccggtacacatgcgcactgcggcacaagggctcattaccctttgttgtcagggattcggcagcctcctgggctatcgtctgggcggtgtgatgatggaaaaaatgtttgcgtatcagacgccggtcaatggtctcacctttaactgggccggcatgtgggggtttggcgcgcttatgattgccgtcattgccgtgctgtttatgattttctttcgcgaatcagataaagaaattaccgccattagcgtggacgatcgcgatgtcgcgttgaaacaaggggaaataaaatga

SEQ ID NO: 234548 - DNA, 1005 bp, Klebsiella pneumoniae
atgaaagcagaacgtattctcggtgctctttatgggcaggcgttaggggatgcgatgggcatgccgtcggaactgtggccaagaagccgggtgaaagcccacttcggctggatagaccgctttttacctgggcctgcggaaaataacgccgcttgctattttaaccaggcggagttcaccgatgacacgtccatggcgctgtgtctggctgatgccctgctggagtgtgacggagaaattgtccccgacgtgattggccgccatattctggcctgggccgaacggtttgatgccttcaacaaaaacatactcggcccgacctcaaaaatcgcgttaaaagcgattcgcgacggtatgcctgtcgccgcactggaaaataacggcgtaaccaacggagcggcgatgcgtgtttcaccgctggggtgcctgctgcccgcccgtaaccctgaggcctttattgatcatgtggcattagcctccagcccgacgcataaatcggatctggccatcgccggtgcagtcgttgtcgcatgggccgtatcgcgcgccatcgacggtggaaaatgggcggatatagtcgacgcgttgccagccattgcgcggcatgcccagcaaaaaaggatcaccacatttagtgcttccctctcggcacgccttgagctggccctgaagatcgtccgtcacgccgacggcactgagtccgccagcgagcagttgtatcagatcgtcggcgccggaaccagtaccattgaatccgtgccctgcgccatcgcaatggttgaactggcgcaaaccgaccctaaccgctgcgccattctttgtgcgaacctcggtggcgacaccgacaccatcggcgcgatggcgaccgccatttgtggcgcgttgcacggcgtaaatgcgattgaccctctgctgaagcatgaactggacgaggtgaatcagctggactttacccgctatgcccgcgatctcatgcggctgcgcgagcagcgggaggcgcgatga

SEQ ID NO: 234549 - DNA, 966 bp, Klebsiella pneumoniae
atgaacaccacgcgtctgcaagcactgcttccgcagttatgcacacagcggccagtcacggtggtgggcgcggcggtgattgatgtcattgccgaggcgtatgccctcccctggcgcggatgcgacattgaactgaagcaacaaggtgtgaacgtaggcggatgcgcactcaatattgccgtcgcgcttaagcgcttaggtatcgacgccagcaatgcgctccccctgggtcagggcgtttgggccgacatcattcgcaaccggatggcgaaagaaggattacacagcctgatcgacaacgccgaaggagataacggctggtgtctggcgctggtggagccggatggtgaacgtacctttatgtcctttagcggtgtcgagaatcagtggaatgccgactggctggctcagctgaacatcccgccccacagcctggtttatctttcaggctatcagttagccgccccgtgcggcgagttgctggtgcggtggctggaaagtctggaaaacgtgacgccgtttatcgattttgggccacgcatcgacgatattcccgaccacttaatggcccgcatactggcctgccatcctctggtgtcactcaatcgccaggaagcggacattgccgccacgcggtttgcattacgccgcgatgtgaaagattttggcgccgaatgggttgaacgtttcgccacgccggtggtggtccgccatgataaagacggcgcatggtatttcgacgccgggacttgcggctgcatacctgcttttaccaccacggtggtggataccattggtgcgggcgacagccacgccggcggtatgctggcagggctggcgtctggctggccgctggaggatgcggtaatgctgggcaacgcggtcgcgtcctgggttgtgggacaccgtggcggtgattgcgccccatcgcgtgaggcgttactcctcgcacacaaagacatatag

SEQ ID NO: 234550 - DNA, 747 bp, Klebsiella pneumoniae
atggaacaagcgcatacccagcttatcgcgcaactgattgagcgcatttctgcggcagataacacgccgctgtatatgaaatttgcgcaaacagtgaagaatgctgtgcgcagcgggattctggagcatggcaacattctgcctggcgagcgcgatctcagccagttgaccggcgtttcacggattacggtccgcaaagcaatgcaggccctcgaagaagagggggtggtgacgcgcgcccgcggatatggaacgcagatcaacaatatcttcgagtactcgctcaaagaagcacatggtttttcgcagcaggtggttttgagtgggaaaaaaccggatacgctatgggtcaataagcgtatggtgccttgtccggaagaggttgcgcagcaactggccattgcggttggcagtgaggtttttctgcttaagcgcattcgctacgtcgatgaagatgcggtttctattgaagaatcatgggttcctgcccatctcattcatgatgtggatactatcggtgtttcgctgtatgactatttccgtagccagcatattttcccccagcgcacgcgctcacgggtgagcgcccgaatgccagacgcggagtttcaggcacacattcaaatggacgccaaagtgccggtactggtgatcaagcaggtagcgcttgatcagcagcaacggcccattgagtacagcatcagctattgtcgaagcgatctatatgtctttgtgtgcgaggagtaa

SEQ ID NO: 234551 - DNA, 876 bp, Klebsiella pneumoniae
atgaaaagaggtatcgtatcacttccattggaaattataacaggggtagatggtaggacaatatctagcgggaagtctctgagtaaattggatatgaatttctttgcattgtattgggatgagttaattattcctacaagtaatcttatatcttttgaagttattgaccagaaggatttcatagaatctggttttttgaagcgacctttaataccatattttgatggcgtgtattcaggcgctgatatagctctaatgtattcaaaggctcaaacccagtttttagatcataagagaagaacagaaccatctgatgattggagattaaacataattggcaataattttaaattgtacgagtctgatagtgaggttaaaaatcttgtaaggttagagttggctaatgtattaccagtccctgactcgacggtaaatgtttatgatatattagaattcaaatcaaagaggcgtgaggcatttgaggcttttaatagctaccttgacgagttatatctcgaggtcgcttcatctggtgatttttacttatcaagagcaagagcattttcgaagttacaagatgcattggatgaccttgagaagttaaattctgaaggctggcgcagtcccataaaatttgatacatctgcactgtttgaggcaaataatggtgatttaatgagtggtgccactgcgctatactctatatgggaggcaaatcaaggtaacctgactggggcaattactgcgggtgtggttgcagtgatcgggcaaggttttgcaagattaaaaccgagcattcagagtgtcagaagaaagccaaatgataatattgcatatttatcttccgtacataaggaatatatattgaaaagataa

SEQ ID NO: 234552 - DNA, 954 bp, Klebsiella pneumoniae
atgccaactcgtagaatcgcttatgcatactacgatcctgattggattaaaggcgagcatacgcttctcgccctcaaaaggaatactgtcgagccgcttgcttattcactgtctatgaaaggatatattttttgtccttcttgctatgaacatataactcgagtgcctgccgatcctgacaagggcatgactacgaatgaagttccggcctattacaaacaccttaaagatgataatgcgcctttctgtagtttgagatgtggccccattcagtacaaaaaatacgcatctcaagaggatgcaaaaaaagccgttgaagatgaagagcttatagtcataagcggttttctcgagtctcgtcctgataataatccaaggatcgattctgagggcagtgaggtacctgtcgattctcattttgagagaaaaaatggcaaagaggtttcattgcctatttcccgccatcatggtgagtctttcaaggttccgagccaagtaactagtgtccagtcttcatgcgttaatttcgatcataattattatcgtgagatttaccttgttggcgcagatggtaaagcaaagcgctacagattttgtgactcactaaaagaaatcaatgacataactgagggttcttctgatccagcattcttttttggtacgttttggaaaattgagaagtttacaggccatagtaatgtctggttaaagatcaaccaaggaacatcatttagggatttcagagtacgtatcactaatgatacagctgaagggagaggattttttaatgataaaaatcgtgggaggataactgttttttatagtcgagtagatgaggtcggcatggggtatatgacaccccagttagggtggggggaggtggcacttttgcctgcaaaatatgatgattttttaatcagtgattatgcgtcatctcgtaaggacaatcattaa

SEQ ID NO: 234553 - DNA, 1128 bp, Klebsiella pneumoniae
atgtaccctacatacgtgccgatcctaagagcaaaagctggtgagtttgaagcattgaaaagactgaaacctgtttactcgcaaaaaatttggccattttttgaaattccccaattaactgagaacgataagaaatctaaggccttaagcggctcatctcagatgaaaaaggattttcttactaaaattgcggatggaatcaataacgcgaattcatcatcatcaatatttttcgacttttttgattggaaagcagatagctacattgaaacaggtgagcatgttttgagctacatgtacagagcattagcctcaagtggatcacttgtacatccagttataggattcgaccgttgggatatcctagactatcaaaatgccctgaaaggattagttgtacccgaagggacaatgtactgtttacgtattgattctacatctatagatgatgcttacgacgtagattattttacagatacgattcatgagattctggattcgcttgggctttccggtgctgaagtgatggtaatgtttgattttggagatgttactcataagtctattgtatcaatgcatgccgatatgcagcatctcattaccgccgttgatgagtttggctttgctagtatcatgatagcgggttgctcgttcccaattatcataaatgatgcagtaaaggaagtggattcaacagacctcgttgaacgtaaggaaatgcatgtttggaaggcaatttattctgatatgaaatcaccatttctttttgctgattatggtattcggaatcccaaaggtgctgatggtgtaaaagcaattcatgctaacgggaaaattaggtataccattgaaaataaatattttgttgcaaggggtcactctaagcaaaaaggtaataaaggggcgcaaatgtatgacttggcaagagtcattgtcaaatctccttactatttaggggctggctttagttggggggatgagagaattgaggcttgcagcagagaggaaattaagggtggcccgacccagtggattagctacgataccaaccatcatatgagttttgttgttgaggaagtctcagagtttcaacgcagtcgtattacgccaagaattgttaccgcataa

SEQ ID NO: 234554 - DNA, 1209 bp, Klebsiella pneumoniae
atggatattagagtaattagaacagataggcagcatcaggagtatttggaacgtatacattcgttattagttatgatgccgtctcctggaactgatgaaaatgaggagttagagttacttatcacacttgtagaagcatacgagaactctaaatatcctatagagccaccagatccaatcgatgctattacgttccgtatgcacgagaaagggttaaaacaagttgatcttgtaccctatttgggaacaagaagtagagtttctgaaattttgtcaaggaaaagacctttgactgttccgatgataaaagcactttcaatcggacttggcatttctactgatacgttgataggtataaatgctgatcagaacaaaacaggtgatgataatgttgactggtctaagtttccgattaaagaaatgattgggagaggatggatttctgaagccagtgatacgataaaaaaatccacagaagaactaattaaaggatttattaatcaaattggctggcaaacaggtaatgtcgcatttaagagaaccctttctggggatgcgtattctccttcgacaaaatatgcactttatgcatgggttagtagggttgtgcagcgagcgcgtgaacgtaaaaatctgcttgggaactttgacccagcaattttttctacaagcttcttgagggatttggcacaactaagctggttcgaaacaggtcccttacttgctcttgaatttcttgaaaaacatggaatagccgttgttatcgaaccaagcttaaaaggcactcgcatagacggagcagcattaaaggatattgacggcatgccgattgttggtttgacattgagacatgaccgtctcgataatttttggttcacactactccatgaagttgctcatatatggaaacacgttcattctgaagagacatttttagatgatattgatgctacttctgacgataggcaggaatctgaagcaaaccggcttgctagggaagcatttatacctagggcagtctggaagagaagtgatgcatactcttctccgtctaaagaaaccatcgattgtctttctagggaactgaagattaatccggcaatcattgctggaagaataagacgtgaaagtggtaactaccgcctgtttgctgatctcatagggcaaggcgaagtaagtagaatattaaacgcttcaaacatgaattga

SEQ ID NO: 234555 - DNA, 279 bp, Klebsiella pneumoniae
atggctatgcggctactcggaagagataagttggaagaacttaagcgctatgagccttccagtaaaaactggattgatgcgtggtcaacagagctaagtttaagcaattggaaatcaaaggaagaagtgaaaaagcactttcccaaagtagaaaatattggtgatcaaacctttgtttttaaggtggattgctgtgcttcttatgttgaaacgatcattgatttcaatcggttgttggtttttgttacctctgtgaagggtaatgataatggatattag

SEQ ID NO: 234556 - DNA, 573 bp, Klebsiella pneumoniae
ttgaccactaaccaactgaaagacaataatctgtacttctatctctacatggcagcgccggtggtgttccctataaccttttacttcacgatgcatgaaaaggtggcctatgctgcgttgtatgcggttttgttgttctgtgctgtttttgaccaacgggcgttggtgcgctctggagttgagtccgaaactcatatcgtgggatctgcgctgaggattgttattttgccccccatctatgtatacgctcgcgccagagacgcagggatgaaaaaatggctctggctgttagctttcatcgcgattacgctgggctgtatttttatcagcacaaccatcgatgataacgaagccctgaagacatcggcctgcgagatcaccacttcgatattcaaagacaaaaatagtgatgttcaatgccttgccgtagaggacgtaaagaaagtttcaaataagcattaccgggcaaaagcggtgttatcgaacggggtggacatgccgatcaccatcgtggaacgtgacgacgattatatttatgtcacgctggcaccattgagtaacctgcttgattga

SEQ ID NO: 234557 - DNA, 564 bp, Klebsiella pneumoniae
atgaaaactttcgggtatgtgcgggtaagtagcaaagatcagaatgaggcgcgtcaagttgaagtgctggcgacgaaggctgacgaaattttgatcgataaagctagcggtaaggatgcagacaggccagctctaaaagagctaatgagtaaagttcgccctggcgacacagttcgagttaaaagcgttgaccgtctggcgcgtaatacccgcgatctgctggaaattctggaggaactgaccacaaatggtgtgagagttgagtttatcgataatcacatggtgtttgatgattcgcccaccagcaaatttatgatcacaatgctcggagccgtcggtgaactggagcgctcttttattcgtcagcgccagaatgaaggcatcaagatcgcgcaggcgaaaggagtattcaaagggcgacaaaaagacgacgagactcgcaggaaggtcgctgagtatttggctaaggggacatactctaacgaagagatttataagctggtgggatgtgggcgggctacgtttttccgcatcaaaaaggaactagctgaagcgccgttgtga

SEQ ID NO: 234558 - DNA, 285 bp, Klebsiella pneumoniae; identical to SEQ ID NO: 166121

SEQ ID NO: 234559 - DNA, 492 bp, Klebsiella pneumoniae
atgactacaaaaaagaaatcacaggcccagatttccccggaattgaaaacttatctcgacaacatcgcagcgaagtacaaaccagatccgggggccctaaagcgtcaaattgataatgcggaagctcgctacagccgaacacaacagttttctgacattccagcgcggctggtggttaaactccagagcctgatcctagacggctggcggttttgcccttcagctaattcttcagtgctttccaatgctgcgatgatttctgttaagttgcagaaaccggaggccttgatcgaagaggagttgaagacgctacgctccagagtctccaacgcttaccacgatcaactttttaaagcgatggagcgtgagattgacgaactgatacatgaagcagcacaggacgcacaacagaaagcagttcagcaagcagctgccgaagaagctgcaatgcgtgaccagttgagggctgccctcggtatggtgaaagcatga

SEQ ID NO: 234560 - DNA, 723 bp, Klebsiella pneumoniae; identical to SEQ ID NO: 151514

SEQ ID NO: 234561 - DNA, 243 bp, Klebsiella pneumoniae
atgcaagctgaactgcagacggcgctgttccatgcctttgatacgctgaatcttcagcaaatgaaaagcttcaacgttccgccggtgacgctgcacggcgtcggcgcgctggcagcctgcggtccgcaagcgcagtcccggggccttaggcatctgtttgtcggtaatgactccaacttattgatagtgttttatgttcagataatgcccgatgactttgtcatgcagctccaccgattttga

SEQ ID NO: 234562 - DNA, 1098 bp, Klebsiella pneumoniae
atggcgtactataacatagagaaacgactaaaatccgatggcacaccacgctatcgctgtaatgtgattatcaaagaaaaaggtgttatcacttacagggaaagcaaaacattccctaaacatgctcatgccaaaacatggggcacacagaaagtgatggaattagatctatatggcattccatcatcaaatgcagttgacggacttacagtccgtgacttactacacaaatatttaaatgacccaaatgccggaggtaaagcaggccgtactaaaagatatgtgctggaactgcttatggatagtgacatctccgcgatcaaactatctgaactgacagaaaatgacgtaattgaacattgcaggctaagaaacaacgctggtgcaggtcctgcaacagtcagccacgatgttagttatcttggcagtgttctggatgcggccaaacctgtatacggaattaattacacatcaaacccggcgaaaagcgctcgcccatatctacttaaacttggtttgattggtaaatcaaaccgtcgtaatcgtagaccagcatctgatgaactggacatgctcattgcaggccttcaacaacgatctactcataaatgctcaaaaattccgttcgttgatatcctcaaattttctgtatggtcctgtatgcgaatcggagaagtatgccggttacgatgggaagatctcgaccaggaacaaaaatctatactcgtaagagacaggaaagatccacgcaaaaaggaaggtaaccacatgaaagtagccttgcttggggaagcctgggatatcgtccaacgacagccccaaaaatcggaattcatttttccatataacagcacttctgttactgcgggatttcagagagtaagaagcaaattaggtattaaggatctgcgataccatgatttgcgtagagaaggggcaagtcgcttatttgaggctggttttagtattgaggaagtcgcccaagttacagggcatcgttcattaaacgtgctatggcaggtatataccgaactgtatccgaaatctttacataatcgttttgaagagctccaaaggagcagaaataagacctcttga

SEQ ID NO: 234563 - DNA, 249 bp, Klebsiella pneumoniae
atgcgtattgaaatctgcatagccaaagaaaaaatgactaaaatgccaaccggtgctgtggatgcgttaaaggaagaattaacccgacgcatcagtaagcgttatgacgatgttgaggtgttagtaaaagccaccagcaatgatggcctttctgttacacgcaccgcagataaggattctgcaaaaacttttgttcaggagactctgaaagatacctgggaatctgctgacgagtggtttgttcactaa

SEQ ID NO: 234564 - DNA, 696 bp, Klebsiella pneumoniae; identical to SEQ ID NO: 28004

SEQ ID NO: 234565 - DNA, 429 bp, Klebsiella pneumoniae
atgcttattggctatgttcgcgtatcaacaaatgaccagaacaccgatctacaacgtaatgcgttgaactgtgcaggatgtgagctgatttttgaagacaagataagcggtacaaagtccgacagaccaggactgaaaaagctgctcaggacattatcggcaggtgacacgctggtggtctggaaactggaccgactggggcgcagtatgcggcatcttgtcgtgctggtggaagagttgcgcgaacgtggcgttaattttcgcagcctgacggatgctattgataccagcacaccaatggggcgctttttctttcatgtgatgggtgccctggctgaaatggagcgagagtttattgtcgaacgtactagggcggctttgccgcagcacgacaagaagggaggaacggtgggcgaaagccaaagctga

SEQ ID NO: 234566 - DNA, 594 bp, Klebsiella pneumoniae
atgaaacctgtttttgatgaaaatgggctggctacagtaccgggtaatatgcgttgtttttattatgaggcagttacgtatgaatatactggctggtctgatgaatatattaatactggcgtaagtatgcccgcctgttccactggtattgacccgggcgaatacattccggggaaagtggcagtatttacgggtaagggatggagccatgaagaagaccaccgcaataagactgtttactcaatcgaaaatggcgcagctgttacagtggattatatcggtgccatcaaagacggttatgtcacgctttcaccgttaacgccatacgataaatgggatggtgagaaatgggtgacggataccgaggcacagcatagcgccgcactagacgcggcagaagtaaagcgccagtcgctgattgatgctgcaatggcttccatcagtctgattcagctgaaattacgggccgggcggaagctgacgcaggcagaaaccacccgacttaacgctgtgctggattacattgacgcggtgacggcaacagataccagcaccgcgccggatgtcatctggcctgaactgccggaggtgtag

SEQ ID NO: 234567 - DNA, 585 bp, Klebsiella pneumoniae
atggacgtgacaaacgatgattacatccgtctgttgtcggcactgttgccccccggtccggcgtggtcagccagcgatccggcgattgccggtgcggcaccgtcattaacccgcgttcatcagcgtgcggatgccctgatgcgggagctggatccgcgcaccaccaccgaactgataaatcgctgggagcgtctgtgcggcctgccggatgaatgtattcccgcagggacacagacccttcgccagcgtcagcaacgactggatgcgaaggttaacctggcgggcggcatcaatgaggatttttaccttgcacagcttgctgccctgggcagaccagacgccaccatcactcgatacgacaaaagcacgttcacctgctcatcggcctgtactgacgcggtgaatgcgccggaatggcggtattactggcaggtcaacatgccagccgccaccaacaccacctggatgacatgtggcgatccctgtgattccgcactgcgtatctggggcgacaccgttgtcgagtgcgtgcttaacaaactctgcccttcgcatacctacgtaatttttaaatatccggagtaa

SEQ ID NO: 234568 - DNA, 1059 bp, Klebsiella pneumoniae
atggcggacagtgaatttcagcgcccgacgctggcagaaaatatcagtatgctccgtaacgatttattcgccaggctggacgtcagcgacacgctccggcgcatggatgaagacgtgcgggcaaaggtgtatgcggcggcgctgcatacggtttacgggtacatcgattatctggcaatgaatatgctgcctgacctgtgcgatgagtcctggctggcgcgacatgctgcgatgaaacggtgtccgcgcaagggggccacggctgccagcgggtatatgcgctgggaaggtgtcagcgatggcctgaaggtgaccgccgggagtgttattcagcgcgatgacctggtgcagtacacggcaactgccgatgcaaccagctccggtggtgtcctgcgcgtgccgatcgcctgctcaagtgcaggcgcggtcggtaacgctgacgacggtacgtcattaatcctggtcacgccggtgaatggtctgccgtcttccggcgtggcagatacactgacaggtggatttgatactgaagagctggaaacgtggcgcgcccgcgtcattgagcggtattactggacgcctcagggcggggctgacggggactatgtcgtctgggctaaagaagttcccggcattacccgcgcatggacataccgccactggatgggaacggggactgtcggtgtgatgattgccggcagtgacctgattaaccccattccggaagaatcaacggaaacggcggcaagacaacacattgagccactggccccggtggcaggctctgatttgtatgtattcaggccggtggcgcataaagtggattttcatatccgcgtgacgccggacacaccggaaatacgggctgccattaccgcggagttgcgttcgttcctgctgcgtgatggttatccgcagggagaactgaaggtgtcgcgtatcagtgaggcgatttccggtgcgaacggggaatacagccatcagttgcttgcaccggcagacaatatctccattgcaaaaaatgaactggcggtactggggacgatttcatggacgtga

SEQ ID NO: 234569 - DNA, 426 bp, Klebsiella pneumoniae
atggaactgtggctgacggtgaacggtaaacgcacctgcgccagcgcaccgctggatccgctgacccgcgccgtggtgatttccctgttcacctggcggcgggcggagcctgatgacaacgccgacgtcccgatgggatggtggggggatacctggcctgcggtacagaatgaccgttacggctcccgactgtggctgcttcagcgcagcaaactgaccaatcagctggtgcagacggtaagggggtatatccgcgaatgcctgcaatggatgattgatgacggcgtggtgtcccgtattgatctggatatccgccgcaccgggattaatgagctgggtaacagtatcactctctggcgtcgtgacggaccggtaatgatttcttttgatgatctgtggagtgcgataacgcatggcggacagtga

SEQ ID NO: 234570 - DNA, 549 bp, Klebsiella pneumoniae
atgaggacgattgaagccatgcagcgacaactcctcggcctgattgggcgggccgtggtgaaaagcatcagtgccgccacgaaatgtcagaccgtggatgtgtccctgattgccggtgaacccaaagccggggttgaacatcttgaaccctacggttttaccgcaagggcaaacagcggtgcggaagcggtggtgttgtttccggatggcgaccgttctcatgcggtggttgttacggtgtcggaccgtcgctaccgcctgaaagggctgcaaacgggggaggtggctgtctatgacgatcaggggcagtccgtgacgctgacccgggaggggatcgtggtggacggtgcaggtaaaacgatcacgtttcgcaatgcgcccagagcacgttttgaaatggacctggaagtgaccggacaggtgaaagacctgtgcgactccggcggcaccaccatgtcagcgatgcggcttgcctataacgggcatcgtcacagagagaacggtcagggaagtaacaccgacaaacctgataaagcgatggaggcatga

SEQ ID NO: 234571 - DNA, 1080 bp, Klebsiella pneumoniae
atgaacgataacgtcacgctacgggtaaatggccgggagtggaatggctggacatcggtgcgcatcggtgccggtattgaacggctggcgcgggatttcagcgtggagatcacccgccagtggccgggagatgagggtatcaccacgcttcagccgcgcattaaaaatggttcaaaagtggaagtgctgattggtgatgagctggtgatcaccggctgggtggaggcgacccccgttcgttacgatgcccgttcggtcagcaccggtattgccggacgtagtctgacggctgacctgattgactgtgcagccgaaccgacacagtttaacggacgatcgctggtacagattgcgcaggcgcttgctgcgcctttcggcattgaggtggtgaacaacggtgcgccgtcgggtgttattcctgatgtccagcctgatcacggtgaaacggtgattgaggtaatcaacaaaatactcggtcagcagcaggcactggcttacgacgacccgcacggcaggctggtgattggcggtattggctcaacgcgggcacatactgcgctggtactcggggaaaacatcctttcctgcgatacggagaagagtatccgggagcggttttctgtttaccaggtggcggggcagcgtgccggaaacgacgatgatttcggtgaggccaccaccaccgcgctgcgggcccgcacagaggacgcatttattgcccgttaccgtccgatgtatatcaggcagacagggcaggctacgggggcaggctgtattgcccgtgcggactttgaagcccgacaacgggcggcgcggacggatgaaaccacctatgtggtgcagggctggcgacagggtaacggtacgctgtggcagcccaaccagcgggtgattgtctttgatccggtctgtggtttcgacaataccgaactgcttgtttcggaagtcacgtttactcaggaccagaacggcaccctgacggaaatccgtgtcggcccacctgatgcttatctgcctgaacccgaagcccccggcgcgcggaaaaagaaaaaagccagagtacaggaggacccgttctga

SEQ ID NO: 234572 - DNA, 1329 bp, Klebsiella pneumoniae
atgacgtggaaagacaggcttcaggacgcgtcatttcgcggtgtgccgtttaaggttgaagaagaaagtgcgggaacaggtcgccgtgtggaaacacacgaatatccgaaccgcgacaaaccctataccgaagatctgggaaaagtcactttccgcccgtccatcacggcttatgtggtgggcgatgactgctttgaccagcgcgatcgcctgattgacgcgctgaataaacccggtcccggcacgcttgtccacccgacttacggtgagctgaaagtctgtgttgacggagaggttcgggtcagcacatcgaaaagtgaagggcgtattgtccgctttgacctgaagtttgtcgaagcgggagaactctcttaccccacatcaggtgcggcgacggcgcagacgctgatgtcatcctgttctgcactggatgactgcatcagtgacagcttcagcggtttcagtatcgatggtgtggcggatttcgtgcagaacgacgttatcggtaatgccagcataatgctggggtatgtttctgatgcgatgaaagtggtggattctgccgtatcggatgccgccaggctgttgcagggggatatctcggtacttctgccgccgccatcgtcaggcaaaaatttcgttgagcaggtgcagaaaatgtggcgtaccgggaaacgcctttatggtaacgccagcgacctggtcaccatgatcaaaacgctttccggtgtcagcctcggcagcgatctgcaaccgcgcggcgtctggaaaacggacagtaaaaccaccgccacggcgacgcagcagcgtaacgtggttgccagcacccttcgtgcgaccgcaatcagcgaagcggcgtatgccgtcacccgattgcctgcgccaacaacttccgcggtgatgcagaatgccgcagtggggcagtcaacaacttccgcgcagagcaccggctggccttccgtcacgcatccggcactgaacaatgcaccggcggtgaaaaacacggttgacctgccaacgtgggaagaactgactgacattcgcgacacactgaatacggcaattgataaggagttgtcccgtacaaccagtgatgcgctgtttctggcgctgcgccgggtgaaagcagatctgaatgcggatatcaacacgcgccttgaacagtctgctcggatcattcagcgcacgccggatgaggtcttacccgcgctggtgctggcggcgacctggtttgataacgcggcgcgtgacgcggacattatccggcgtaatgccattacgcatcccggctttgtgccggtgatccctctgaaggtgccagtgcaatga

SEQ ID NO: 234573 - DNA, 378 bp, Klebsiella pneumoniae
atgggtctgttacatgccattataggtaatgccggtgaaattaatgcatcagatgcacaacaggaattaggggctgttttaggtgagggagaaaatgtcgaacttgcctataaactcattcgtgaccaaattattctgactaacagaaggttaatttttattgataagcagggtgtcacagggaaaaaagtagagtatcgttcgattccttataaatctgtgacaaacttttctattgaaaccgccgggcatcttgatcttgatgctgaaatgaagatatggatttctggtattgcagaaccgataaaaaaacagttcagtaaaggagcaaacatttataaattgcaggctcatctggctcaaaaaatagcagggtaa

SEQ ID NO: 234574 - DNA, 1956 bp, Klebsiella pneumoniae
atggctgaatttgagcttaaggcgttgatcaccggtgtcgacaggctttctcccgcgctgtcgaaaatgcaaaagaaaatccggggatttaaacgccaggcggaagaagcgtcacagggtgggctggcgcttggtggcggactggcagcgggtctgacgctttccctgaaatcttatgccgatcaggaaaacgccgccaccgggctgaaagtcgccatgatggatgcgaacggcgaggttggaaagagctttcaggacatcaataaactggctattggcctgggtaaccagctacccggtacaacggctgatttccagaacatgatgcagatgctggtgcgtcaggggatcccggcagaaaacattcttggtggtgtgggtaaagcgacagcttatcttgcggtacaactgaaaaaaacaccggaagcggctgctgagtttgctgcaaagatgcaggatgctaccggaacggcgtcagaagacatgatggggctgttcgacactatccagaaggcgttttatctgggcgttgacgataccaacatgttgtccttcttcactaaaaccagttctgttctgaagatggtgaacaaggacggtcttcaggctgcacagagccttgcccccatcagcgtcatgatggatcagatggggatgaacggggagtcggcaggtaatgccctgcgaaaagttatccagtccggattaagcgttaagaaaatcagggacgtcaataaagtcatggcccgccagagactcggggtacagctcgattttactgacggcaaaggaagttttggcggtcttgataacatgttcaggcaactggcaaagctgcgaaaactgaccgacgttaagcgaacaggtgtacttaaggcaatatttggtgatgatgccgaaacccttcaggtggtcaatgcactaatcgataaaggaaaggatggctacgatcagatccagcagaagatgaataaacaggccagcctgaataaacgtgttcaggcacagcttggtacgctgtccaacctgtgggaggcaatgacggggaccgcaactaacggccttgcggctattggcggcgcattttctggtgacgccaaaaatatcacgcaatggctgggggagttgggggaaaaattcacgaagtttgcggatgaaaatccccgggttattcgcggcgtcgtcgggcttgctgccggtcttgcgattctgaaactgggattgatgggcgtgggcagtgccatcagtatcgtcagcaggatcatgtcgatgacgccgattggcatgattgcgacggcgattgccctggctgcgggattaattatcactaactgggatgttgttggaccttatttcaagaagctctgggaaaccattggtccttattttgaggctggctgggaacttctgaagaaggtttttgcctggtcgccgctggggatggtaatcaataactggggaccggttgttaagtggtttcaggatatgtgggacaagctgaagccaattattgagtggtttaccgacagttccggtgacacggtcgatgccattaactcggcgcagtggggcgcgggtgcttatgatgcttatgggacgggaataccgccacggggatacactccttatccggcgcagtcaaacaacgcctccggtgacacggtcgatgccattaactctgcgcagtggggcgcgggtgcttatgatgcttatgggacgggaataccggcgcggggatacacaccttatccggcggtagatccggctcagtcaaacaacgcctccgatgctacaggcccgaatcccttcatgattaacaaagcttctgcgccaaaagttgacggtgagatcaaggtctcttttgtgaattcgcctccgggtatgcgggttatggaaacgcgatccagcggttttgatataaatcacgatgttggctatacgcatattggcagatga

SEQ ID NO: 234575 - DNA, 270 bp, Klebsiella pneumoniae
atgaaagagcttgagttaaagaaaccgattaccgctcatggcgagacactctccgtactggagtttgatgagcccaccgggaaagatgtccgcgagctgggatatccctaccagatgaatcaggatgagtccgtcagacttctggcgcatgtggtatcgaaatacatcgtgcggctggcgaaagtgccgcaaagctctgtcgaccagatgtctccggcagacctgaatgcagcggcgtggcttgtggccggttttttcctccaggcctga

SEQ ID NO: 234576 - DNA, 357 bp, Klebsiella pneumoniae
atggcccgtatcgggggaacctgttatttcaaaattgacggtcagcagctatcgctgaccggcggcattgaggtgcccatgaacaaaacggttaacgatgacatcatcggcctggacggttcagtggaccgcaaggaaactcaccgtgcaccttatgtcaaagggaccttcaaggtgccgaagaattttccggtgagcaaaatcacctcgtctgatgagatgaccatcactgccgagctggcgaacggtcaggtctatgtactgtcgtctgcctggctgcacggcgaagcgaaccataatgccgaagaaggcacggtcgatcttgagttccacggtgaagaaggggattaccagtaa

SEQ ID NO: 234577 - DNA, 1497 bp, Klebsiella pneumoniae
atgacgataagctttaacaccattccgtcgaatacgctggttccgctgttttatgcggaaatggataaccaggcggcgaatactgcacaggacagcggagcatcgctgctgattggtcatgccaataacggtgcagagattgttgccaacagtctggtgctgatgccgtcggcagactatgcacgccagatttgtggtgcgggaagtcagctggcgcgtatggtcgaggcttatcgccagaccgacccgtttggtgagctgtatgtgattgccgttcctgaatccacgggcgcggcggcaacggttacgctgacggtgaccggggcggcaaccgaaaccggcacggttaatgtttatgtgggacgtacccgcgtacaggcaccggtgaccaacggcgataacgttgcgacgattgccagcagtatcaaagatgccatcaatgccgttccggccctgccgtttacggcttcatcttcggcaggcgtggtcacactgaccgcgcgtcataaggggctttgcgggaatgaaattcctgtcagcctcaattactacgggtttggtgggggcgaagtgctgccagcgggcgtacagattgccgtggcgacgggtaccgccggaacgggcgctccggttctcaccggcgcggtggctgcaatggcggatgagccgtttgattatatcggcctgccgttcaacgacacggcctccgttaacacgctggtgaccgagatgaacgataccagcggtcgctggagctatgcgcgtcagctgtatggtcatgtgtatacggcaaagatcggcacgctgtcagaactggtgaccgcaggtgaccagtttaaccagcagcacattaccctggcgggatacgaaaaagacactcagacgccagccgacgagctggcggcaagccgtaccgcccgcgcagcggtgtttattcgcaacgatccggcacgtcccacgcagaccggtgagctggtgggtatgctgcctgcgccgaaggggaaacggttcacgatgaccgagcaacagaccctgctgtctcatggcgtggcaacggcgtatgtcgaaagtggggtactgcgcattcagcgtgatgtcaccacgtacaggaaaaacgcttacggggttgcggataacagctacctcgacagtgagacgctgcataccagcgcgtatgtactgcgcaaactgaaatccgtcattaccagtaagtacgggcgtcacaagcttgccagtgacggtacccgctttggtcccggtcaggcgattgtcaccccggcggtgatcaaaggggaactgctggcaacctaccgtcagctcgagcgtgcggggatcgtggaaaactacgaactgtttaagcagtacctggttgtggagcgtgatgccagcgatccgaaccgcctgaacacgctgttcccgcctgactatgttaaccagttgcgtgtctttgccgtggttaaccagttccgtcttcagtattcagaggagtctgcataa

SEQ ID NO: 234578 - DNA, 171 bp, Klebsiella pneumoniae
atgtttgtgaaacctgttaaagggcggtcagtgcctgaccctgcccgcggtgaccttttgcccaccgaagggcgaaatgttgatgagaacaactactggctgcgccgtgaagcagcgggtgatatccggcgcgtgaataaaaaggtgaacaccgatgacgataagctttaa

SEQ ID NO: 234579 - DNA, 561 bp, Klebsiella pneumoniae
atgaaactgacgcctgttattgctgcgctgcgtgcccgctgcccgtattttgaaaaccgggtggcaggcgcggcacagttcaaaaatctgccggaggtcggaaagctgagactcccggcggcgtatgtggtaccgggtgatgactctccgggagaaaacaaaagccagaccgactactggcaggagctgaaagagggcttctccgtggttgtcatactgagtaacgggcgtgatgagcgcggtcagtttgcttcgtatgatgtggtggacgatgtccggcagatgctctttaaggccctgctgggctggaacccggaagcgtgcggtaacccgattacctatgacggcggcacgctgctggatctgaatcgtcatgagctgatttatcagttcgatttttcggtcatcagcgagctgaccgaagacgatacccgccagcaggatgacctgaacagtctggatgaactgcgaacgctggcgattgatgttgattatctcgatcccggtaacgggcctgacggcgatatcgaacatcacaccgaaataacccttccttcctga

SEQ ID NO: 234580 - DNA, 507 bp, Klebsiella pneumoniae
atggcgactcccttttttcacgttgatgttcagcagcccgccgagatgcgctttaaccgcgcccgtgtccggcgggcgtttgtcacgattgggcagcgtcatatgcgtgatgcccgtcggctggtgatgcgccgtgcgcggtcggcaccgggtgaaaaccccggttatcagaccggacgcctggctcgttcgattggttatatggtgccgagagccagtaaaaagcgagccggttttatgacacgcattgcccctaaccagcgcaacgggaaggggaaccggatgatctctggtgacttctatccggcgtttctgttttttggtgtccggggaggagcaaaacgtcgtcgtagtcatcatcgtggtgcatccggtggcagcggctggcgactggctccacgtaataacttcatggtggaaactcttgaaaagaaccgcagctggacacgctattttctggcgcgggaattgcgtaaatcactgaagccggagcgacgacacagatga

SEQ ID NO: 234581 - DNA, 411 bp, Klebsiella pneumoniae
atgaaaattcgtcaggcgcagaccagcgcaacctacattctgccggaccccggtgaactgaataaacgcgtcctgatccgccagcgggtggatatgcccgcggataactttggcgtggagcctcaatacccggttacgttccggacatgggcgaaggttatccagaccagtgccaccacctggcaggaaaccgcgcagaccggggacgccatcacccattacatcaccattcgttaccgccgggggatcactgctgattatgaggtggtctgtgatgacagtgtgtaccgggtgaaacgtcagcgtgatctgaacggggcgcggcgctttctgctgctggagtgtacggagctgggcgaatgtaggcagagtcacggaggcagcaatggcgactcccttttttcacgttga

SEQ ID NO: 234582 - DNA, 324 bp, Klebsiella pneumoniae
atgcttctgacaatggaagagattaaagcccaactcaggctggatgaggatttcgatgctgatgaccgccatctgcaactgctggcctgtgcggcgcaaaagcggacggaaacgtatctgaaccggaagctctatgctccggatgaaaccattccggacagcgatccggacgggctgcacctgccggatgatattcgtctggggatgctgatgcttatcagccatttttacgaaaaccgctcgtcggttacggaagtggagaaactcgacatgccgcagagttttggctggcttgtcggcccgtacaggtactttccgcaatga

SEQ ID NO: 234583 - DNA, 1206 bp, Klebsiella pneumoniae
atggcggttgatattaaagatgtggaacaggtcgcgcaggagctgcagcagaagtttgacgacttcaaggcaaagaacgacaagcgcgtggatgcgattgagcaggaaaaaggcaaacttgccgggcaggtggaaaccctgaacgggaaactcagcgagctggaaaatctcaaaagcgatcttgaaaaagagctgcttgagctgaaacgtccggcaggtggtgtgcaaaataaactggccactgagcataaagaagcgtttgtgggctttctgcgtaaaggccgtgaagacggtctgcgcgatctggagcgcaaggcattacaggtgggcaccgatgaagacggtggctatgccgtgccggaagcactggatcgcaacattctcaccctgctgaaagatgaagtggtgatgcgccaggaagctacggtgatcactgttggcggttccgactacaaaaaactggtgaatctgggcggtacggcttccggatgggtgggggaaacggatacgcgatcccagactgccacctccagactggagctgattgaacctctcatgggggaaatttacggcaacccgcaggctacccagaaaatgctggacgatgccttcttcaacgtggaggcctggatcaacagcgagctggcaactgaatttgccgaacaggaagaaattgcctttacctcaggcgatggcaccaagaagccgaaagggttcctggcgtatgaatccactgatgaaaacgacaaggtccgggcgttcggcaaacttcagcatattgtatccggcgaagcgaccgcggtgaccgcagacgccattatcaaactgatttacacgctgcgtaaggcacaccgcactggcgcgaagttcatgatgaacaacaacagcctgtttgccatccgtctgctgaaagacaccgagggtaactatctgtggcgtccggggctggaactggggcagccgtcctctctggcgggttacggtatcgctgaaaacgaacagatgccggatatcgccgctgatgcgaaagccattgcatttggtaacttcaaacggggttacaccatcgttgaccgtatcggcacccgcattctgcgtgacccgtacaccaataaaccgtttgtcggtttttataccaccaagcgcaccggcgggatgctggtcgattcgcaggccatcaaactgctgaagattgcagcggcgtaa

SEQ ID NO: 234584 - DNA, 651 bp, Klebsiella pneumoniae
atgcagacgaaacaacgtcttgatgtaccgctgagtctgaaatctgtcagtgactccggtgagtttgaagggtatggctccgtctttggtgtaaaggacagccacgatgatgtggtgatgtccggggcatttgctgcttccctgcgggcgtggagtgacagaaaagcgttacctgcgctgctctggcagcaccgcatggatgagcccatcggagtttacaccgaaatgaaggaagacgatgtcgggctttacgtcagggggcggttgctcattgatgatgatcccctggcaaaacgcgcacatgcacacatgaaggccggttcgttaaccggcctttctattgggtacgtcctgaaagactgggaatacgaccggacgaaagaagcctttttgctgaaagaaatcgacctctgggaagtcagtctggtgacgtttccgtctaacgacgaggcgcggatcagcgacgtcaagaacgcgctggcccgcggggaaatccctgaacagaaaaaaatcgaaagagtcctgcgtgatgtcggactctcccgtacccaggccaaagcattcatggccgggggctatggcgcactgtccctgcgcgacgctgaggatgtgggctctgcactgaatgcactgaaaaatctgaacttctaa

SEQ ID NO: 234585 - DNA, 1242 bp, Klebsiella pneumoniae
gtgttcttttcgggattatttcaacgaaaaagtgacgcaccggtgaccacgccagcagagctggcggatgctatcggtttgtcctacgacacctataccggaaagcagatcagcagccagcgggccatgcgactgacggcggttttttcctgtgtcagggtgctggcggagtcggtcgggatgttgccctgcaacctgtatcacctgaacggcagcctgaagcagagagccactggcgaacgtctgcataagctgatctccacgcatcccaatggctatatgacgccgcaggagttctgggagctggtggtcacctgtctgtgcctgcggggaaacttttacgcctacaaagtgaaagcatttggcgaagtggctgaactgctgcccgtcgatcccggctgtgtggtaccgaagcttaacagtagctgggagccggtctatcaggtcacattcccggatggctccacggatgtactgagccaggaggatatctggcatgtgcgcacgctgacgctggacggactggtggggctgaatcccatcgcctatgcccgcgaggcaatatcgctggcggcagcgaccgaagagcacggggccagactgttcagcaatggcgcggtgacgtcgggtgtgttgcgtacagagcagacgctgtcagatcaggcttatgagcgcctgaagaaagattttgaggagcgtcacaccgggcttggcaatgctcaccgcccgatgatccttgagatggggctggactggaagtcgatggcgctgaacgccgaggacagccagttcctggaaacccgcaagtttcagcttgaagaaatctgtcgtctgttccgggtgccgttgcacatggtgcagaacaccgatcgcgccaccttcaacaatatcgaagagctggggctgggatttatcaactattcactggtgccgtatctgacccgcatcgaacagcggatcaacaccggactggtacgaaaaagtaagcagggcgtttattacgccaaatttaacgccggggcgttactgcgcggggatatgaagtcccgttttgaagcctacgccaccgggatcaactggggaatttactctcccaatgactgccgcgacctggaagatatgaatccgcgtcccggtggtgatgtctatctcacaccgatgaacatgaccacgaaaccctccgatggcagtaaagccggtaagcagaaggataacgccaatgcagacgaaacaacgtcttga

SEQ ID NO: 234586 - DNA, 183 bp, Klebsiella pneumoniae
atgatcatgctgattctcgcgcctctggtgggcgtgctgggtgcgcttttgctggcgtatggtgcctggctgatttatcccccggcggggtttgttgttgccggggcgttgtgcctgttctggtcgtggctggtggcgcgatatctcgaccgtacacagtcgtctgtcggcggaggtaaatag

SEQ ID NO: 234587 - DNA, 1734 bp, Klebsiella pneumoniae
atgagccggaaatcttaccccaacgtaaatgctgccaatcagtatgcccgtgatgttgtgcgcggaaagattgtggcctgccagtttgtgattcaggcctgccagcgccatcttgatgacctgatggcggaaaaaagtaagtcgtttcgttaccgcttcgacaaggacctggctgaacgggccgccaaatttattcagctgttgccgcacaccaagggtgagtgggcattcaagaggatgcccatcacgctggagccgtggcagctatttgtggtctgctgtgcgtttggctgggtcaataaagggtcccggctgcgccgcttccgggaggtgtataccgaaatcccccgtaagaacggcaaatcggcaatctctgccggtgttgccctgtattgttttgcctgtgataacgagtttggcgcggaagtgtattccggtgccacgacagagaaacaggcgtgggaagtctttcgcccggcgcgactgatgtgtaaacgcacacccatgctgacggaagcgttcgggattgaggttaacgcctcaaacatgaatcgtccggaggatggcgcgcggtttgaaccgctgatcggtaaccccggtgatggttcatcaccccactgtgcggtggtggatgaatatcacgagcacgccaccgatgcgctttacaccacgatgcttaccgggatgggggcgcgacgtcagccactgatgtgggccattactactgccgggtacaacattgaggggccgtgctacgacaagcgaagggaagttatcgagatgctcaacgggtcggtacccaacgatgaactgttcgggatcatctataccgttgacgaaggcgatgactggaccgacccgcaggtgctggaaaaagctaacccgaatattggcgtgtcggtttatcgcgaatttttgttaagtcagcagcagcgtgcgaaaaataacgcccgtctggcaaacgtctttaaaacaaaacacctcaatatctgggtgtcggcgcgttcggcgtatttcaacctggtgagctggcagagctgcgaggataaatcactgacccttgagcagttcgaggggcagccgtgcattctggcctttgacctggcgcgtaagctggatatgaacagcatggcgcgactttatacccgcgagattgacggtaaaacgcattactacagtgtggccccgcgtttctgggtaccgtatgacacggtgtacagcgtcgagaaaaatgaagatcgccggacagccgaacgctttcagaaatgggtggaaatgggcgtcctgaccgttaccgatggtgcagaggtggattatcgctacatcctcgaagaggccaaagcggcgaacaaaatcagcccggtcagcgagtcacccatcgaccccttcggggcgaccgggctgtcacatgaccttgctgatgaagacctgaatcccatcaccatcattcagaactacaccaacatgtccgacccgatgaaagagctggaagcggcaattgaatcggggcgctttcatcatgatggcaatcccatcatgacctggtgtatcggcaacgtgatcggcaaaaccattccgggtaacgatgatgtggtgaagcccgtcaaagagcaggcggaaaacaaaatcgatggtgcagttgcgctgattatggcggttggcagagccatgctgtatgagaaagaagacacgctgtccgaccacattgagtcctacgggatccgctcgctttaa

SEQ ID NO: 234588 - DNA, 495 bp, Klebsiella pneumoniae
atggctggaacggcggggcgttccgggcgtcgccccaagccaacggcgcgcaaggcgctggccggaaaccccggcaagcgagccctgaacaaagatgaacctgtttttacgcccatcaaaggtgttgagccaccagagtggttcgctgaagaagatctccctctcgccacgatcatgtggcaactgacaaccaaagaactctgcggtcagggcctgttgtgcgtgactgacctcgcggtgcttgagcggtggtgcgtggcctatgagttctggcgacgtgccgtgaaaaatattgccatacagggcaacaccatcaccggtgcaatgggcggcagggtcaaaaatccggagctgaccgccaaaaaagaacaggagtccgagatgagcagcacgggggcaatgctcggactcgaccccagcagccgccagcgtctgattggcctggcggggcagaagaaagccactaacccgtttctgaaaatcatcgagtcatga

SEQ ID NO: 234589 - DNA, 351 bp, Klebsiella pneumoniae
atgccccctcgaactccaaaagcctgccgcgttcgcggctgccgtaataccacgacagacccgtcaggctactgcgaaagccacaaaagcgaaggctggaagcaatacaagtcaggacaatcccgtcatcagcgcggttatggttctaagtgggatgttatccgtgtgcgtgtgctgcaacgtgacaaaggcctgtgtcagttatgtctgcgtgctggtgtggcgcgtgaagcgaaaaccgttgaccacatcatccctaaagcacatggcggcactgatgccgacagtaatctgcagagtctgtgctggccgtgtcataaggcgaagacggcccgtgaacggcttaagtga

SEQ ID NO: 234590 - DNA, 339 bp, Klebsiella pneumoniae
atgcaaaacagcagatcgcactggagtcacagagaacccaggaagatatcaaagtggctgttgcggatgatgattgtgcttcacgtcatgtgcctgctgccgctgctgaccggttgcggaagtacgcgaacagtttacgtaccgattccggcggtaccgttgccagcaagcctgactactgaaactccccagccagtcattcccgagccgctgacctatggggccagtctggatctgaatgtgagcctgctttcggcgttgggacaatgcaatattgacaaagcggggattcgaagtatcgagatgcgccgtaacgctttgctggcagcaggcaaatag

SEQ ID NO: 234591 - DNA, 477 bp, Klebsiella pneumoniae
atgcaggcactaaattcccagcgtaaagctttcctggatatggtggcatggtcagaaggaacggataacgggcgacaaccgacacgtaaccacggttatgatgttattgttggtggcgaactgttcactgattactccgatcaccctcgcaaacttgtcacgctaaaccccaaactcaaatcaacagctgccggacgttaccagcttctttcacgctggtgggatgcttaccgtaaacagcttggcctgaaagatttttctccagaaagccaggacgctgtagctctgcagcagattaaagagcgtggtgctttaccgatgattgaccgcggcagtattcgtcaggcaatcgaccgttgcagcaatatctgggcgtcgttacctggtgcaggttacggtcagtatgaacataaaatcggtgacctgattgcccgatttaaaaaagctggtggggtagtaaatgaagctgagatataa

SEQ ID NO: 234592 - DNA, 1053 bp, Klebsiella pneumoniae
atgaaaaatactgtaaaaataaacagtgttgatttaatcaacgctgattgcctgcattttattcagtccttgcctgatgattccattgatctgattgttaccgatccgccgtacttcaaagtgaagcccaacggctgggacaatcagtggaaaggggacgaagattacctgaagtggctggactactgtctggcccagttctggcgggtactgaaaccagccggaagcctttacctgttctgtggacatcgcctcgcatctgatatcgagatcatgatgcgtgaacgtttcaacgtgcttaaccatatcatctgggcgaagccgtccggacgatggaacgggtgtaataaagaaagcctgcgggcatatttccccgctacagagcgcgttctgtttgctgaacattaccaggggccatatcgcggcaaaagtgacggctatgcggcaaaagaaagggaactcaaacagcacataatggcaccgctgatatcgtatttcagggatgctcgtgccgaactgggtataacggcaaaacaaattgccgaagccacaggtaagaaaaatatggtttcccactggtttggtgccagtcagtggcagttgccgaatgaggctgactatcggaagttacaggcactgttttcccgtatagcggcagagaagtttcaggaacaacaactggaacaaccacaccaccagctggtggcatcttatgattcactgaatcgcaaatattctgaattgctggatgagtttaaatctctccggcgctatttctccgtatcagtctccgtgccttataccgatgtctggacgcataagcccgttcagttctacccgggtaaacatccgtgcgagaaaccggcggatatgctccggcaaataatcaatgccagtagtcgacctggtgatctggttgctgatttctttatgggatccggttccacaataaaagcagcaatggcgctggggcgtcgggcgttaggtgttgaacttgagtcagagcggtttaatcagacggtgaaagaggtaagtgaactggtggggaaataa

SEQ ID NO: 234593 - DNA, 204 bp, Klebsiella pneumoniae; identical to SEQ ID NO: 4411

SEQ ID NO: 234594 - DNA, 753 bp, Klebsiella pneumoniae
atgaaccttgaagccttaccaaaatattactccccaaaatctccaaaattgagcgatgacgcaccggcgacaggctcaggtggtttaacgattacggatgtgatggctgcgcaggggatggtgcagtcgaaagcaccgcttgggtttgccttattcctggcaaaagttggtgttcaggatcctcaatttgcgattgaaggtctgctcaattacgcgatggcactggataacccgacattgaacaaattgagtgaagaaacccggttacagatcatcccttaccttgtgaattttgcctttgctgattattccaggtctgcggcaagtaaggctcgctgtgagcattgtgctggtactggatttcataatgtattgcgcgaagtggtgaaacactccagaagcggggaatctgttatcaaggaagagtgggtgaaggaactatgtcagcattgtcatggtaagggagaagtcagcacagcgtgcagagggtgtaagggtaaaggtattgtcctggatgaaaaaaggacccggcttcatggcacgcctgtttataagatttgtgggcgttgcaatggaaaccggtttagccgtttaccaaccacactggcgcggcatcatgtccagaagctggtaccagacctgacggattatcagtggtacaaaggatatgcagatgtcattgataaactggttacaaagtgctggcaggaagaagcatatgcagagatacaattgagaaaggtgacaagataa

SEQ ID NO: 234595 - DNA, 918 bp, Klebsiella pneumoniae
atgcccctgtttatgcaggggcgtgtcctgctggagcctgagccggaacgttattcatctttcgccagtggtgccgttccggcggcatcacaaccgctggcggatgatcctgccgttagggccgtgttccgcaatgaggcagtgatccgtcgtgctggtggcgtggaatgtcttgaaagctggttacttcgtgaaaaaggctgccagtggcctcattccgactggcacagcgagaacatgaccacaatgcgacacgcgccgggcgcgatccgtctgtgctggcactgcgataaccagctgcgcgatcagttcacggaacggctggaatcaatggcaacggataactgtgcccgctgggtgttgtctgtagtccgtctggatctcggttttgatgataaccatgccgtgacaatgccggaactgtgctggtggctgattcgtaatgacctggcggatgccttaccggaaagtgcagcccgtaaggcactgagattaccgaagcctgttgtgccgtctgtcacccgggaaagtgaccttgtgccttcggttcctgccaccagcatcatccaggataaggcgaaaaaggtgctggcgctgaaagtggatccggagtcgccggagtcttttatgttacgcccaaaacgccgccgctgggttaatgaaaagtacacgcgctgggttaagacacagccgtgtgcatgttgtggaaagcctgctgatgatccccaccacctgataggccacggtcagggtggaatgggtacaaaagcgcatgacctctttgtgttgcctttgtgcagaaagcatcacgacgagctgcatgcggataccgtggcatttgaagagaagtatggctctcagctggagctgatatttcgttttatcgatcgtgcgctggcaattggcgtattggcgtaa

SEQ ID NO: 234596 - DNA, 810 bp, Klebsiella pneumoniae
atgaataatctgatggttattgatggtattgaagttcgtcgtgatgcttatgggcgttacagcctgaacgatctgcatcgcgcagcagtagcatctggtgcaaatgccagaaccaaggagccaggaaagtttctttccagccaacaaactgttgagcttgttcatgaattaaccaacacccagaatttgggtgttgacccggtgagtgtgattcatgggggaaatgaacggggaacgtatgtctgtaaggaactggtgtatgcctatgcaatgtggatcagcccgtcattccatctgaaggtgatccgtactttcgatatggtaaccagcgcaccggaaaaattatccggacaggctgctgacaagatgcaggctggcgtgattctgctggactttatgcgccgggagttaaatctgtctaactcatctgtgcttggggcctgtcagaaactccaggaggctgttggcttaccgaatctggcaccgcgctatgccattgatgcacctgctgacgcgcctgatggctcaagccgcccgacgctgtcgctgagtgcactgctgaagcagtatggtatccgcctgacggctaatcaggcatatcaccagatggtgaagctggggatcgtcgagcagcgcgaacgatacagccgtaccgggattaacaacatcaaaaaattctggtcgctgacggcgaaaggctgcatgttcggcaagaacatcaccagtcccgcaaatccgcgtgagacgcagccgcatttcttcgaatcccgattccctgagctgttaaagctgctcgataccgttcattga

SEQ ID NO: 234597 - DNA, 390 bp, Klebsiella pneumoniae
atgaagctaatactgccttttccgcccagcgtgaacacgtactggcgacaccccaacaaaggggcgcttgcaggtaagagcctgataagcgcggcggggcgaaaattccagagcgcagcgtgtgcagccatcattgagcagttacgtcgtctgccgaaaccaacgtcggcaccagcttcagtggagatcgtgttgtttcctccggataaccggcttcgcgatctggacaactataacaaggcgctgtttgacgccctgacccacgcgggtgtgtgggtggacgacagccaggtgaaaagaatgctggtggagtgggggccggttatcccggaagggaaggtcgaaatcactatcagtaagtacgagaaaacggcgggtgcagccgcctga

SEQ ID NO: 234598 - DNA, 327 bp, Klebsiella pneumoniae
atgacgacgttaactcaatgccagcagcaggtgctggatatgctgatttcttatcagaaagaacgtggcttcccgccaaccaatcaggaggtggcaaccatgctgggataccgttcagtgaatgcagcggtggagcatcttcgcgcactggagaaaaaaggcgtcatcacgataaagcgtggcgtggcccggggcatcacgcttcataccgcggtgaaggacgacgacagcgaggcggtcgggattatccgcgcactgcttgccggtgaggcaaacgccaggctgcgtgcagcccactggttacatgagaggggcctgaaagtatga

SEQ ID NO: 234599 - DNA, 654 bp, Klebsiella pneumoniae
atgagtaataaatattgccaggcgctggcggaactgcggaacaaaccagcccatgaactgaaggaagtgggcgatcagtggcgcacgccggacaacattttctggggaattaacaccctgtttggcccgtttgttctggatctgttcactgacggtgataacgccaaatgtgctgcgtattacacggcggaagacaacgcgctggcgcatgactggtcagaacgccttgcggagcttaaaggtgctgcctttggtaatcccccatacagccgcgccagtcagcatgaggggcaatacatcaccggcatgcgttacatcatgaagcatgccagtgccatgcgtgataaaggcgggcgctatgttttcctgatcaaagctgccaccagcgaagtgtggtggccggaagatgcagatcatattgcttttattcgcgggcgtattggttttgaactgcctgcctggtttatcccgaaggatgagaagcaggtgccgacaggcgctttcttcgctggtgctattgctgttttcgacaagacctggaagggaccggcaatcagctacatcgggcgcgatgaacttgaggcatgtggtgaggcctttctggcgcaggttcgccagcaggcagaaaaactggtcagggagatggcggcatga

SEQ ID NO: 234600 - DNA, 489 bp, Klebsiella pneumoniae
atgagtcttttgaatgacgttcagaaattcattgaagcccatccggggtgtacttccggagacattgcggatgcttttgcaggttactcacggcagcgcgttctgcagtctgcaagcaagttacgtcagagtgggcgtgtggctcaccgttgtgaaggagatacacgcagacattttccgcgcctgactgagagagcgcaggagccggaaccacaaccagttcgagaaaccagacctgtgcgcaatttctatgtcggcactaacgatccacgggtgattttgtgcctgacccgccaggctgaagaactggagtccaggggcttataccgtcgtgctgcaaccgtgtggatggcggcattccgtgaaagccactcccagccagaacgaaacaattttctggcgcgtcgtgaacggtgtttacggaaaagcagtaagcgggctgcatcaggtgaagagtggtatctctcagggaattacgtgggggcttaa

SEQ ID NO: 234601 - DNA, 993 bp, Klebsiella pneumoniae
atgagcctgttaatgacatcccagcccattgtgataaatcgtgatcttgcatgccgtattggtctgaatgaggcaattgtgttgcagcagcttcattactggctgaatgaaacgaattcaggcactgagcatggcggaattcgctgggtttataacacgacagaacagtggctggagcagtttccgttctggtcagagtccactctgaaacgcacatttgcaagcctgaaatcacttggggttttgcgtcgcgagcaactcaataaatcgaagcgtgacatgaccaacttctacacgatcaactatgaaagtgagcttttagaagaggtcaaagtgaacgaatccatcaggtcaaaatgcacttctccatcgggtcaaagtgacctgatggatgggcgcaaaatgacacgatccattggttcaaaacgacacgctgtcatcgggtcaaaatggcccaatgatcttacagagaatacaacagagattactacagagaataaaacctcttctcgtccggacgcttcgcaaccggacacgcaaacggctgaacaggagtttttaactcgccatcctgatgcggttgtattcagccctaaaaagcgccagtggggaacgcaggatgatttgacctgcgcacagtggctctggaaaaaaatcatcgccctgtacgagcaggctgccgaatgtgacggcgaggtggttcgtcccaaagaaccgaactggacagcctgggcaaacgaaattcgcctgatgtgtgtgcaggatggtcgtactcacaaacaaatctgcgagatgtacagccgcgtcagccgcgatccgttctggtgccgtaacgtgctcagcccgtcgaagttgcgggaaaaatgggatgagctttccctgcgcttatcgccgtccgtcagcacgtacaccgaaaaacgcgaagacccgtacttcaaatccagttacgacaacgtggactacagccagatcccggcaggattcagggggtga

SEQ ID NO: 234602 - DNA, 225 bp, Klebsiella pneumoniae
atgatccggaatattttcaaacgatttaccaatcagactttccgttgtcctcgccccggtcagtggtacaccacgcctgcagggcatgttctacgtgttagcctggttgaccgtgaatgtcagaaggtgatttgtgaaccgctgggccgtaattaccgcgtcagtatgccgcttatagcctttcgctccggaaaaaacatgaagcatctcggaggtgcggcatga

SEQ ID NO: 234603 - DNA, 1149 bp, Klebsiella pneumoniae
atgaacagtttaacggcaaataaccgttggtcgcaacagcaggtggtcagcgtggctgaacacctgttgttacggcatgaatgcagattatcaaatcacctggctgtaagtaaccacagagaactttacctgactgtggggggcgagttgtgcaggaacttaaccgctggtttcgtgacggaagaggactttatgttcatgttattcgttgggagccagaaacacagcgcgttatctatcttcgcaaagactacccgcatgagtgctttagtcctttgtggaaattcaggcgtgattttgttgagtgtgaaggaccaccagcacattgattctgccattccgggacgttacactgttcaggcaccttataaagcgggtgccgggattggcgtcctggaaatgttatcggcgatatatgacgcgccagcgtcttttttatcgtctgcgtctgtgcacacccaaattatggtgggctggacgggggcaccgaaaggtgcgccggtttccgataacgccggttacgccaaccccgttcagttcaccaccagcgaaattggcgtttccggtggtgaaggtaattcactgttatcggagactgccatcatggctacgatcccaaccctcactcaacctgaaattgccatcgttgatggtcaggctgttacttcatccctggctgttgccaacttcttctccaaacgtcatgacgatgtactgaaaaagatccgcacgcttgaatgttccgcatcattcactgcccgcaatttttcggtgagtgattacaccgattgcacaggccgcaaactaccttgctatcaaataacccgcgacggctttgcgtttcttgctatgggtttcacgggtaaacgtgctgcccagttcaaagaggcatacatcaatgcctttaaccagatggagaaacagctttcaaagcccgctgtaccgagcgacgttgcacataacgccagcgttctctattcctacatttcatcaattcatcaggtctggttgcagcagctttatcccatgctggaaaaagctgaatcacctctggctgtaagtctgtatgaccgaattaacgatgcggcatttcttgcccgtcttattcattcgtcgctgaactcttcagaggtaagggggcgcaaatga

SEQ ID NO: 234604 - DNA, 585 bp, Klebsiella pneumoniae
gtgggtaaagaacctgaatggaaagttgataaacaaccagcatggctggtggcagcaatacgaagaacgattgctgatttacctcatggctatgaggaagcagcagaaattcttggtttgtataaatctgatgatatcaccccagcaaaagatcaattgcataacagactgcgtagcggtggggatcaaatttttccacttgagtgggccatggttttacaggatgccagtggtaccaggcatgtaacagatgcaatagcccgtcgtagtaatggggtgtttgtgccgctggtggtcattgatgacattgacaatggtgacattaatcagcggctgatggagtcaatagaatggattggcaagcattcccagtacttacgcaaggcaactgctgatggagttattgaccaagctgagcgtgagcaaatcgaagagaacagctaccaagtaatggcgaagtggcaggagcatttaacactgttatttcgtgttttttgtgcgccggaaaagagtaacgcccgcgagtgtgcagctccgggcgtcgtggcgtcgattgcttctggttgtggagaaactaacgcatga

SEQ ID NO: 234605 - DNA, 198 bp, Klebsiella pneumoniae; identical to SEQ ID NO: 12733

SEQ ID NO: 234606 - DNA, 654 bp, Klebsiella pneumoniae; identical to SEQ ID NO: 12732

SEQ ID NO: 234607 - DNA, 123 bp, Klebsiella pneumoniae
atgcgcaggctgatgcgcgaaagacattgcagctattgcggaaaagagctgttcggcggggccattaaacgcccgtatctggaggttaaagaacaaaatgaaagtccagattttaaacaatag

SEQ ID NO: 234608 - DNA, 246 bp, Klebsiella pneumoniae
atgacttttgatgaaaaagaacttgataatgcaattaataaaatcatcgtaacgtcgctcttttcctgtctcagcgacactcagcagaaacagttctacgaatcggctttcaacatgatcgagcgttgttgtttctgcgatgccgacgagttacctgaaaaaatcaggaaacagttggctgatgctcttcgagtgcgactttctgaccaattttctgaaatgtgctctccgaatttggacaaatag

SEQ ID NO: 234609 - DNA, 363 bp, Klebsiella pneumoniae
atggctagcgaacgcagtactgatgtgcaggcatttatcggggagctggacggcggcgtatttgaaaccaaaatcggcgcagttctcagtgaagtcgcttccggtgtgatgaacacgaaaaccaaagggaaggtctcactcaacctggaaatcgaaccatttgatgagaaccgtgtgaaaatcaaacacaaactctcatatgttcgcccgactaaccgcgggaaaatttccgaagaagacaccaccgaaacgccgatgtatgtcaatcgcggtggtcgcctgactattctgcaggaagaccagggacaattactgactcttgccggtgaacctgacggaaaactccgcgcagcaggtcattaa

SEQ ID NO: 234610 - DNA, 825 bp, Klebsiella pneumoniae
atgtctcagaacttagactcaaccgcaattaatcaaatccatgcccttatttctgctcagggtgttaatgaaattatcagtaagattggtgccgatgctgtggcattgcctgagaatttccgcattcatgatctggaaaaatttaatttaaatcgcttccgtttccgtggcgcgctttccactgccagcatcgatgattttacccgttattctaaagatcttgcagatgaaggcacccgctgctttatcgatgctgataatatgcgtgccgttagtgtgcttaacctgggtactattgatgaaccaggtcacgcagataacaccgccactctcaaactgaaaaagacagcaccgttctctgctctgttgtctgttaacggcgagcgtaactcccagaagtcactggcagaatggattgaagactgggccgactaccttgtgggctttgatgcgaatggtgacgccattcaggcaacaaaagcggctgcggcagtccgtaaaatcacgattgaagcaaaccagaccgctgattttgaagataatgacttcagcggcaaacgctccctgatggagtctgtcgaagcgaagaccaaagacattatgccagtggcatttgaatttaaatgcgttccgtttgaaggccttaaagaacgtccgtttaaattacgcctcagcattatcactggcgatcgtcctgtactggttctgcgcattattcagctggaagcggtgcaggaagaaatggctaacgaatttcgtgatctgcttgttgagaaatttaaagacagcaaagtagaaacctttattggtactttcaccgcctga

SEQ ID NO: 234611 - DNA, 537 bp, Klebsiella pneumoniae
atgtcatttattaaaactttttccgggaagcatttttattatgacaggataaataaagacgacatcgttattaacgatgtcgcggtttccctttcaaatatctgtcgctttgcaggacatctttcacacttctacagcgtcgcccaacatgcggtgctttgcagccagctggtaccgcaggaatttgcttttgaagcgttaatgcatgatgcaacagaagcatattgccaggacatccccgcaccactgaaacgccttcttcctgactataaacggatggaagaaaaaatagacgccgtaatccgtgagaaatacgggttacctcctgttatgagcacgccagtgaaatatgccgatctcattatgctggcaaccgaacgccgcgatctcgggcttgatgatggctctttctggcctgtactggaaggtatcccggcgacagagatgttcaaagttattccactgtcaccaggccatgcctacgggatgtttatggaacgttttaacgagttatcggagttacgcaaatgcgcatga

SEQ ID NO: 234612 - DNA, 363 bp, Klebsiella pneumoniae
atgcgcatgaatgttttcgaaatggaagggtttcttcgcgggaaatgtgtaccgcgagatctgaaagtgaacgaaacaaatgctgagtacctggtacgtaaattcgatgcgcttgaagctaaatgtacggcactggaaaacaaaataataccagtgtcagctgaactgccaccagcaaatgaaagtgttctgttatttgatgctaacggagaaggctggctaattggctggcgttctctctggtacacctggggacaaaaagaaaccggagaatggcagtggacatttcaggtcggggaccttgaaaacgtcaatatcactcactgggcagtaatgccaaaagcaccggagaataagaaatga

SEQ ID NO: 234613 - DNA, 204 bp, Klebsiella pneumoniae
atgagcgtgataaaaactcatacaggaattgttatcacccgagacggtccgcaggtaaaaaaactgcaccagacaaagcggatgtgggtcgtcggaaaaaacgagttttaccacaaagaaaccggacgccgccactttgcagaaaatacgcgccgccgactgctgatcgacagcatcaagcctatcgaggtgaagcatgtttaa

SEQ ID NO: 234614 - DNA, 240 bp, Klebsiella pneumoniae
atgtttaaacagaacgaaaaatctatcgctcaaattgctgagtatatcccgcgtgcgtgccggggtatgcagttgcaggaagccaaagcgcgcctggagaaaaaaattgcgctctatatcgatgacggctgtgatgctgccgttcttaacgcagcgttcgcgccagctcttaacagtcatacgcgggagtcttttttttcgcgcatcgcagcgcagatccgtaaaggaggcaaccagtga

SEQ ID NO: 234615 - DNA, 312 bp, Klebsiella pneumoniae
gtgagcaattatctgtactggtctggcttagtggctaacattgcgctcatgttgttcgtggctctttgcatctgggtttggtttatctggccttttgtagaggccatgagcataactcggtgctttatttgcgcatcaaagacttctggatgcaaaccaactgtaagagcaattatcagaactttaaaatactggtatctggatttgcttttcggcaggggctggacgcgaattagtaaccgccagtttgaatgggaaggcgtcggtaactggcgaattcacagcagcaaagaaacgcaggaggtgaagtaa

SEQ ID NO: 234616 - DNA, 573 bp, Klebsiella pneumoniae
atgaacaacttaatgatcgaccttgagacgatggggaaaaataaggatgcaccaatcgtttccattggcgcggtgttcttcaccccagaaaccggagacatcggacaagaattctatacggttgtcagcctggaaagtgctatggagcaaggggccacacctgacggcgataccatcctgtggtggttgaaacagagccctgaagcacgagctgcaatctgtattgatgatactttgtcgatcagcgatgcactctctgaactgagccatttcattaatcagcatgcagacaatacaaaatatttaaaagtctggggtaacggggccaccttcgacaacgtaattttacgtggagcttatgagcgagcaggacaaatctgcccgtgggcatactggaatgaccacgatgtacgcacgatcgttacgcttgagcgttccatcggattcgcccccaaaatggacatgcctttcgatggcgaacggcacaacgccctggccgatgcccgtcatcaggcaaaatatgtttccgctatctggcagaaattaattcctgccaccagcacagaattatga

SEQ ID NO: 234617 - DNA, 147 bp, Klebsiella pneumoniae
atgttaggggtattgaattcagccatcagtaaaaacaaggtgttcataattttctccatcaaaaccggctgcacccgggaaaatcataattctgtgctggtggcaggaattaatttctgccagatagcggaaacatattttgcctga

SEQ ID NO: 234618 - DNA, 582 bp, Klebsiella pneumoniae; identical to SEQ ID NO: 35527

SEQ ID NO: 234619 - DNA, 1785 bp, Klebsiella pneumoniae
atgtctacgacgatgcatatggatcgtgccgataaaaataaagttggcaccgcggaaattgaggacctgcgggtaattccggttatttttctgccaggaataatgggaacgaatcttaaagaaaactctgaagagaagaatgcaaaagctgtatggcgatacgatagcgaaacctccttgttgggctggacacttccatcttcggggccaaaggagagaaaacggctacttcatcctgaacgggtgaaaatagacaaccggggaagaattctgctgtcgtctggaatacaggagcaggtctcagccattcatccctacccctcctccaattatgatgaggagggaaagaagcgttatgctgaagcgctgaataagataatggataataacgagccggaaaaagaactctttggctcgcggcatgatcgatgctggggagaggtagccgccccaagctacggcgcttttcttgatgcgctacagactgcactgtaccgggataagccaacgataaaagacaatacgctgagtgcgatttatcaaaaattagttgatgaaccactgggactggaatttggcgtggattccctggatgaaacataccttgaagtcatgaaactgtatcagtttccagtacatgtcgtgggctacaactggctaggctccaatgtactgtcggcaaaaagacttagcgaagaagttgataggattattgacaagtatcaaactcagggcatgaagtgcagcaaagtcattctggtgacccattctatgggaggactagtggcacgatattattccgaatgcctggagggcagagataagatttacggtattgttcacggtgtgatgccgtctgttggcgcggcagcgacctatacccgcatgaagcgcggtacagaaaatacagagtccggtttggctggcgctgtaggatatcttaccagccatatccttggccgcaacgcagcagagatggtggcgattggctctcagtcttccggcgcgctggagttactccctgccaacgattatggtgacgactggcttaaggtcgttgaccgtgacggtagtacattaacgctgcccgcagatcttccggtcggagaggacggtaagaaagaaaactgtctttatagtggcctttatctgaaccgagataaatggtggaagctaatggatgaaaatctgttgaatccgtttaataccacattgaataaaaggcagatcgacagtgactggttggaatatgaaaatctgattaaggataatgtaaaaccattccaggagcagttagctgacaaataccatccgtacacctactcattttatggaaaagcaaaagggggagaattatccgcagcgtatcggactcaggagacggcggtctggagcggggcgctggcaagcggccaaataggtgagacgccgccggcgccaaaaatgaatgacgaacgcctttatttaagtgaagtcagtgccgatcgaacggtgaaagatgaactttccccggaagagcaggcatgggcattcaagggcgataacaacgtagtatatggctgggtaggacaacgttttacactacgggatgcctgtgaaaatggcgacggtacggtgtctttgcgcgccgggcaaatcgttcatgagaatattcgggagcgtctggcagtacaggttctccatgaagccgcttaccggaatactctcagtcaagcttttgccttacgctctattataaaaattgcccagcaggtcaattacgatgaaaaaatggtttttgcttaa

SEQ ID NO: 234620 - DNA, 267 bp, Klebsiella pneumoniae
atgtctaaagaacgtcgtctctcaagaatattcgcaaaagacggtaaatccgtgaccttagcgctggatggctactatttttccacgaaaacaaatggtattgataatacgataaatcagctccctgctctggtggaacacggcctggattgcgcgctcgtcacgtacggcatgttgaagaattatcgggaagcattgaacagcgttcccgttgtgttacgcgtcgacagcacggtggctttgttgaataaatcgaacttttgctga

SEQ ID NO: 234621 - DNA, 960 bp, Klebsiella pneumoniae
atgctcagcaaacaggcgttattgcaggcttaccgcaagatgcgggagatcagaacatttgaagagcggttgcatcaggaaaataccagcggtgatattccgggcttcattcacctttacaccggtgaggaggccatcgcggtgggggtctgcgaaaatttaacgagcgcagattttattggttcaacacaccggggacatggccactgtattgctaaaggttgcgacattcacggcatgatggccgaaatattcggtaaggacagcgggttatgtcgcggtaagggcgggtcgatgcacattgccgatctgtcgaaaggaatgctgggggcgaacgctatcgttgggggagcccctcccctggccatcggcgccgcgctaacggcaaagacgctaaaaaccggcaacgtcggtgtctcttttacgggcgatggtggttctaatcagggcctggtctttgaagccatcaatatggccgtcgtgctccagcttccagccgtctttattttcgagaataacggttacggcgaagggaccggccatgactacgccgtgggtgggcgtgatatcgcccggcgcgccgctggcttcggcctgccggcagtgaccgtcgatggcaccgatttctttgccgtttatgaggcaacctcagaggcggtcaagcgtgcgcgagaaggcggtggcccaagcgtcattgaggccaaagccttccgctggcatggtcattttgagggcgatcccgcgctatatcgtgcggaaggtgaagtgcaacgcctgcgtgaacaacatgatccgctgaagatttttaccgctaaggtcaagcaacatatcaccaaggaagaactggcggcgattgacgaggaagtagaagccctggtcaacgatgccgtattgaaggcccgcgccgctgcctacccggctccggaagacctgctgacagacgtgtacgtctcatactga

SEQ ID NO: 234622 - DNA, 1365 bp, Klebsiella pneumoniae
atggatatcttagcgttaaaagaattacttcgccctgtggtgggaaacttgaaaaatcactgcactaacgaaaaaatccctgatctctgtcgtcacttgggtctacctgtgcccaaagaggaaggatccaagcgcgagcgcttgcatggagcctttgatttactcgatgacgcagatatgccggagtttgcaagaacgcttttggcgcagaaggttttcaatccaagcatacgcaacaatatccaagacctcctatgggcggacgagcccatcatcgatatacccaagcgtcatcgtcgtgaactggcagaagctctgcaaccatttgaattatttggccactgggaaaatttcaagcgtttattaaatgatctgtttgtttttccgttggatttaagtgaaatgttttcgattcatgagacagggattcttggcgaaattcaccgacattttgtacgaaatcctgaagacggtgacgtggcatggttatttgaaaaactacagatagtcgaactatcagctccacgtttccgtaggtggctcgaaggtttagtctctgcggacgtgcagatcagtatcgaaaggcagttagcaaaggttgaggccgttaataaagttttaagaacctgtggagctgagcttatccatagctctgatgctgaaggctatccggtttttagcctgatatcgttgcggacatttcgagggcgccctaagaacattatttttgcctctctcaccaaacccgatattcgcttgagtgactctcttaataacgaaattgaaattctttcaaactccaatgaggttttgatctatgatcgtccattaagttccgagggattgagttggcgagaactgcaggcatggtgggcagattttatttgtgaagagaatagcgaagaggcaaaaatttcgctttatcgacgattgcagcaaagtttgcctaattcgtctccgccccagaaaaagtttttcaaggaattctttcgacaatataggtcagcaatttatgacttacctgcattgctaccagaagtttggctgcactgggatcccaaaaccgtatctgagagaggcgctggtgcattactcaatcatcggatggattttcttttgctaatgcctgatggcggtagggttgtgatcgaaatcgatggcattcaacattactcagatgaaacaggtagggcgagtaggagtaagtatgcagatttggttgcagctgatcgtagcttaaaattggcaggttatgatatttatcgttttgcaggtgtcgaacttcatcacgacgatgcttcatacaaaataaagtgcttttttgatgctttatttaaatatcatggaataaaaataaaattttag

SEQ ID NO: 234623 - DNA, 840 bp, Klebsiella pneumoniae
atggttacaatgactgctggacaaccgtactcagcttggctcaaaaaagctgaacatagcataaccacttctgacggcaatgagatagaggtatacgagctcgaaatcgatcttgaagcagggcttgtactatccgcatgggccaaacatttccgtgagcattactgtcttgatagccaaattgatcgcctgcgcagagggactaacaaatcgcgagccgagtatttgagagacttggtgtttcctgatgagtctgaagattttggcccagcaacgcgctccggtgattttgctgaaatccttatcgcggatctacttgaaagccattttggtttttgggttccacgtacccgatatgacaacaaaatggttcgcaacgagtccccaaagggaacagatgtcttagcgtttaagtttgatggcataggcccatcacggccatctacaaaagatatcttgatttcttttgagtcgaaagcacaactcagtggtaagaaagcaaagcctagattgcaagacgccgttatcgactcgataaaggatgtgtatcgaatttcagaatcccttaatgcgatgaagcgccgtttaattgatcgtcaagatgaagaaggtgcagatcgggtagaacgctttcaagaagggttggatgtcccttatgtacgaatgacaggggcggcggctgttttttgttcaagtctttatgattctgttcacatatctgaaactacagactgcacttcgcatgaaaatattaaaaaccttatgttggttgtgatacatgctaaatcgcttatgaaatttgttcacgctctctattggagggcagaaaatgaagcctaa

SEQ ID NO: 234624 - DNA, 3186 bp, Klebsiella pneumoniae
atgaagcctaaaaaacgtgctcgatatgcggcggcagttacgctatcaaaaggaaaaatgtttgagtatggagttcctgaaggagaccatatagagcttcctgatgatctcgatttgcagatgcagtttccattagctgttggtactgtcggcgactttgcgtccgaagtggtggctaagaccatcggcaattcgattgaagcacaatcccaaaccccactggatgaggttattttttcagctcaagtccttcaagcttttgacgattccctgcttaacaaagaactctccttcaatcttcgcatacttgcagctgctggtttttatcttggcgatgtacccggaaatgcttcagtccaattatctaaactgagccaactagattttcctaagcacgatactttagctatagcagttaaaactgcgatggatcggccttgggagcataccaacgagacattagagtcttcacgtgcaaaagatattttggatgttttgtgccaacacttcaggaatggccggaatggccggcagaaagcctatgatgcaattaaatcattgcgcgaatgggcctatagccatgcgtctgcacatgacctacttatggccgatttgctcggagcgattagtgccactcgcatcgctaattctgcttggacattacttccacgctatagcaacctcccgcaagaaaagtgggagacatatttatcgcgttctatgtcaattaaggaaatgtggccatctcagcgcttgctaggagaggctggattgtatagagggatatcaggagtagttcagatgccgacgagcgccgggaaatctagagctaccgagcttattattaggtcggcatttctttctgctcgtacgaaattggccttagttatcgctcccttccgggcactatgccaggagatagcaaacgatcttgaaaaggcattcaaggatgatggctatgacgtcaatcaacccagtgacgcgttgcaaccagatgtcgagttcgatttttctaacttatcagattttctcgatttggaatctggaatatttgactcagaggtcgaatcgaagccacaggtcattattcttaccccggaaaagcttctttacatacttcgacaagagccagacattgttcagaaagctggactggtagtttatgacgaagggcatcagtttgacacaggcagccggggtgtaacttatgaactgctgttaacatccattaagcgaatgctacacgaaaatgcccagagcgtgttgatttcagcagtaattcagaatgctgcttctgttgctgcatggctattaaatgacggttcaaaggttgtctccagtagagccttacaggctagtagactcattgcctttgccagccttccgaaaggtaaagatggtcaacttcagttcaatgtggcctctgatagcgatcagaaattctttgtcccgcgagttattgtttcagaaaaaatgcctcgattacctaaggaaagaaaggatcgttttttccctactcaggagagtggctccatagcgttatatcttagtttacgcctgctgaaaaatggtggggttgctatttttacaggaagaaagtcttctgctgcaaaaattgttcgtgaggccgccgaagatatttttcgtcgtggaatttcacttgagccaccttctgcccatagtgaccctgatgagattcgtcgctttgtttatctcttcgaacgtaattttggtgctaatgcatatttgacacaagcagctgctttaggcatttttgctcatcacggcaacactccccaaggtgttcgtctggctattgagtatgctatgaggcaaagccttattcgattgatcatctgcacctcgacacttgcacagggtgttaaccttccgattcgatacctacttgtaacaagcgcaatgcaggggcgtgaatcgatcaaagtacgcgacttccataatctcatgggacgcgctggacgtgccggaatgtacggtgagggtactgttattttcactgacccccgtctctatgacgagcgtttcgcaaagacgtaccgttggcaagaaacgatcaatctaatcaatcctgatagtgctgagccaactggaagtacattgctttctcttttcgatcctctgcgaaatgacctcggaacagttactctaagctcttcaagctctgctgaagtagccacttacattgtcaatgactgggaaactcttttaaagtgggtagagagcgttcctatcaatattcctaaacagaacttttcggtcgcttcactaatcgaacaacttaaatccaagaaaaagataattgaagcaattgaaagcttcttaatgacatatcgtagtgatgttcagcccgaaacttttgtggacaactctcgagaattggttactgaaacacttgcctactcgcttgccactgaggagcaacaaatactcctgacagatatcttcgagtctgtggcgcgaaggatcgaactttttgttccagatacagcgatccagaagcgtttcgggcggactttgttaggtattgatcaagcattggcaatcgaatcatgggtcactacaaatgcaaacgcactcgagggagcaacctctgccgatcacctgtttgatgtgctatggccgcttttagtactcttatctaatgaaaaacggttgagtgacacagttcctaatggggcactaaagacattagcattggggtggctggctggagattcgtttgcagctctcgttcaacggcttgacaaattgggtgcatcctatccctatggtgcgaaccaaagaaaatttgatcttgatgtggttgtagacctgtgtgaacaaacatttggctttgagtttgcgctgttgctcgcagcggtaaaggaatcctttctcgcgttctcttcagaacaggcgggtgaggtttttagagaatatgttgatcttcttcagaagcgattgaaatatggacttccgaatcagagttgcattgccttttttgaagcgggatttgctgaacgcgtaattgcccagtgtcttgcagaaggaacgactcaaggtgctattcaagttagttttgacgcccgacacatgattcgacaaaacccagagagatttgaagtaatgctacaaggcttcccatcttatttttttgatgtatttaaaacaatcactgcaccttga

SEQ ID NO: 234625 - DNA, 1371 bp, Klebsiella pneumoniae
atgttgaaccttatcgtggtcggtaatcccgattattacagtttcttctctgacagtaagggtgaagagtcttttccagtttcccgactttttgaatccacccctgactcactcagaaagaaactgctccccctgaccagcaaaacctatcagtttcttcaggaactgccggtcatctttatgacagagccggagtttgaagttgatgaggaaggcaatacaggcggttattacagtcacatccgcattgggagaataagtaacatcagagcaaaaactataaaccgggaaaaagttctcgcttttaactatgacttaaccgatattatcggcaaaaaattcttaaccagtgaaaaagaatacgtgaagaagctggaactgggcagcttcggactgaacagaaatttctgggcagtcaaagatatagacgttaaagaatttttcgaaatattaggtatcagtgtaaaagcccctgaagcttccgctgcggttaaaaccgaagcacctgacaataatgaagaccttgaggtaatttcggatatcaatgaatatctggaaatcatactgaatcatcctcaggaaaataatgaagaggtgttttaccggggtcactccgacatcagctatcagttagaaccttcgctgttccgcaagaatacgcagggcaactatcgctaccgatatcacgagtcggatatgattaccgagctgctgacggttcaacctgccgagttcagagatgaccgctatatgctggataagcttgtacgcatgcaacattacggcttacccacccgcctgcttgacgtctcaactaacccgctcatcgcactctatttcgcgtgttccaaaatcaaacgagataaagatggaaatgaaattgatggcaacgtcattatattgacggcacccaaaagtgaaattaagtttttcgactccgatactgtaagttgcatagccaatctttcccggcttccatcacgtatcaaaagcaacctgaataccagcttggcgactcaggcatttaatgccaccgaagagtgcgggcagttgcttcatctgatccgtgatgagaagtcctatttcaaaaacattatcgatccggcacatctgagtaaaatcgttctagttaaagggcggttcagcaacgcccgcatttcgtctcaggctggagcgttcctcttatttggcgaaaacgtggacctgccagaaacggggctaagtacgctgaacgtcagaaaactggtgattagaaacaaggaacgcctgatgcagcagctcagccgcttcggcatcaacgaaagcacggtttatccgggtatagagaaagctgcaacggaaatcgccaaactctacgatggtcggagctga

SEQ ID NO: 234626 - DNA, 132 bp, Klebsiella pneumoniae
atgatgaggcgtaaactcttttttgtgatgtatatcacaaaaaaagagcgttataaactgcacctgcgtcaggaaatcatcatgaaactgttccataaaatcatcgctaaatttagcgtcctgagcttctaa

SEQ ID NO: 234627 - DNA, 789 bp, Klebsiella pneumoniae
atgcgtgtcgttgagccgcaccatgacaggacgccgcactggcatacgatgctgttttgcaagcgctggcagcgcaaagaaatcaccgaaattatgcgtcgttatgctctcaaagaggatggcgacgagcgcggtgctgctcgtaaccgatttcaggctaaacaactgaacaaaggcggtgcagctgggtacatcgcgatatacattgcaaaaaatatcgacggttatccgcttgatggtgagctcgataacgataccggcaagccgctcaaagataccgccgccgctgttactgcatgggtgtcaacgtggcgaatacctcagtttaagccgattggcctgccgacaatgggtgcttgccgtgagttgagtaagctgcctcgcggggtcagtattgctggcgagtttgatgagcgtgtcgaagctgcgagcgctgctgctgatggcggtgatttcgacctgtatatcaatgcacaaggtagcgcaaatgtcccgcgagacgggcagacggtcaggataacccgtagcgttagtgacgagattaacgactatgaggaagaaatcgagagagtggtcggtatttacgcacctcacctcggcgcgcgtcacgttcacattacccgttcgtcggaatgttgcattgttccaaatattttggccgttgagcctttgaccttaaaaagctgcatcgccgcgcctgggagtcctgtcaataactgtggaaagctcaccggcggtggcgatccagttatgaccaccacaccctctgagcaagccgcagcggtgtaa

SEQ ID NO: 234628 - DNA, 195 bp, Klebsiella pneumoniae; identical to SEQ ID NO: 135180

SEQ ID NO: 234629 - DNA, 711 bp, Klebsiella pneumoniae
atggaacctaaaaagaatctgacgacagaacagcttgcagatgcagcacgtcttaaagctctgtatgagtcaaagaagaaagcgctaggcgtcacccaatactcaatcgctgatgagctgggcattacgcaaggagctgtagggcactatctaaacgggagaaatgctcttaacctcaccgttgccgctgcatttgcaaagattctgcaagtatctattgctgacttcagcccttccattgatgaggaagcgcagaaaatattggcaaatgagacatccaatgtgaagctggtcggtccatataagcaaggaaaggagtatccattgatcagctgggtgcaagctggagcctgggcagaggcaattgaaccttactcagtcgatgagatcgatgaatggttcgagtccgatacaaaggtttttggtaaagccttttggttgcgtgtcgagggcgactcgatgacagcgcctactggccttagcattcctgaagggaccctagtcttaatagatacaggccgggaagctataaatggcagtctcgttatcgcaaaaatggtagatgcgaacgaagcaacattcaaaaagctcataatagatggcggccaaaagtaccttaaaggtctcaatccggcgtggccactgaaagaaatcaacggtaactgcaaaatcattggtgtggctgtgcaaaccatgatgcgcttggtttaa

SEQ ID NO: 234630 - DNA, 1086 bp, Klebsiella pneumoniae
atgcataaaactaacgttaccgttgctgaccagaacaccgttatcaactccaacgtggctctattcgattcccagtatctgaacgccatcagcaccttcgcgcagattatggcgcaaggcaccgcgaccgttccaaaacaccttcagggtaatcaggccgactgcatggctgtagcgatgcaagcggcacagtggcagatgaatccctttgctgtagcacagaagacgcacctgattaatggtgtgctcgggtatgaagcgcagttggttaatgccgtcatttcacgtagcggcgtgctggccagccgctttgattatgagtggtacggaccatgggaaaaggttgttggaaaattccacatccgtaaaggtgacaaaggcgagtatcgcgtcccgggctgggcactggctgacgaagcagggatcggcatcattatccgcgcaaccctgaaaggtgaagatcagccgagggaacttgatttactgcttgctcaggcccgtacccgaaactctaccctttgggctgacgaccctcgccagcaactggcgtacctggcagtcaaacgctgggcgagactgttctgcccggatgtgattctgggtgtatataccccggatgaactcgatgatcgccgtgaagaacgagaggtaaatccggcaccggcgcagcacgtaagccttgcagatatttcaggtgagaacgtcaccccgactcaaacggctcaggaatcagctcaaaacatcgatgcacttgctgatgatttccgcgaccgcatcgaggcggcccaggatgtggatagtgcaaaagctctacgcgcagatatcgaaaccgtcaaagcaacgctaggttccgccctgtttaccgagcttaagaacaaagcagtgaagcgctactacctggttgatgctcgcaataaggtggaagcggcgatcaactccctgccatctccggatgaacccgacgcggcagaacgctttggcgaagctgaacgcgtgctggcatcttcaaagcgtcacctgggcgatgaactgcatgagcagttcagaatcaccctggcggatatgaaaccggaatacgtgaactaa

SEQ ID NO: 234631 - DNA, 165 bp, Klebsiella pneumoniae
atgtgtaactcaacaaaatgcgggtactgcggcaagacggttaaaccggaggaagtagttaaaagtacccttctctatcgcaacggcgcacagctggcgcgcaaagaaaaagaatactgctctgaacgttgtgcttcgtacgaccagatggcccacgaggcataa

SEQ ID NO: 234632 - DNA, 489 bp, Klebsiella pneumoniae
atgaatgaattgttgaaatcgagtattgaagcgttatctataatgcatatcaatattcgagagtctgaagttaaattatctgacggctataatgcgttcaattttaattcagttactaaaaaaacacagtcattccgcaacattaagaaaattgaagctatagaacttgtcaacgaagaagatagtagtacaaatcaattatattattctttccattatagcttaggtctacgatttgtcacccctactcaagctgaagaaactgaaacagttctaacaatagaagccatttacgaagctatatataggtccaaaagagagttatcaaaagaagaattagaagaatttgccaaacaaaatgtcggcttcaatgtatggccattttggcgtgaatttgttcaaaacagtacgtctcgcatgggaataaattctgtcagtgtacctttttttaaatataaccgctctgacattcctaatttagagaaataa

SEQ ID NO: 234633 - DNA, 588 bp, Klebsiella pneumoniae
atgaaaatcaataacatatgtccggtatgtggtgtaggccatctttcagcacagattgattacgatgttgttgcttacaaagaccaaaccaaaagtctccctgcgagattttcggtatgtgatacatgtggttctgaaacagcaactcaagtagatctacgtgaaaacaaaagaatatttattgaatttaaaaaatgtgttgatggattattgacaggaagtgagattcgggcaattagaaccgaggtctggaagatcactcaacagcaagcatgcttgatatttggtgggggtccaaaagccttttcgaaatatgaatcggatgatgtaattcaatctgaagctatggataaactcattagattggcatctcttattcctgaggcatttataaaactcagagaactggctggtgaagttaaaattgagacctcagttgcagtctccaaaacactgccaatttggcattctgaaactgcctcccaatttaacagtgacgagttatgttttgataatgataatccctctaataacagccacatacggcgctctataaaaattagaactgtagcgaaaaaggtagcataa

SEQ ID NO: 234634 - DNA, 384 bp, Klebsiella pneumoniae
atgaaagaaaaaactcatcagacagaacaccctcaggtgcagcggctcaatgaaatacttgagttgaaaaaactaactaaagctgacattgctcgcatctgcggagtcagcgctcagtccgtcaataactggtttgttcgcggcacaatcgggaaaagctcagctatcaaactggcagacgcgctaggagtcagtctcgagtgggttcttggccaagaagtcgatgaaaaaggtggactcaagccagacgagctgcgacttctggagttgtaccgccaacttccggaagaagagcaaaaaaacatgcttcgagtcttttctattcgcttgaaagaactggatgagttgtacgataagtacattaaaggcaggatccgtacttag

SEQ ID NO: 234635 - DNA, 858 bp, Klebsiella pneumoniae
atggccgacctgtcgaacgggtacaccaaggtcgctaacgagatccaacagctcaagcctcgtctgagaatgtcaggccgggagtggcagtgttttgaggcggtgatctggcttacctacggctggaacaagaaacaggaccgcgttacgaacacggtgatcgctgagcttacagggctgagtgattcgcatgtttctgatgcgctcaaatcgctcgcagaacgcaaaattatcttcagtcaaaagcagggagtgatgaaaactgtcggtataaatactgaccttttcgcctgggttttagacaaaccgaaaacgggaaaagtcttcccgaaatcgggaaaagtgttaccgaaaacgggaaaaaccttcccggaaacggtagacacccaagactataacaaaaacaatattaaaatatcctcgtctcggaattctgacgaatcccgaaaccagaaaactcaaaagtttctctctcgtcatccagaagctgccgccgggatatacactccggcaggtaaatcatggggatccgctgacgacctcaaggccgctcgctggatttacgacaggcttctcaccgtcaatgcatcgctatccgaacccaactgggctgaatgggcaaataccatcaggctgatgcgtgtccaggacaatcgtactcactacgaaatctgtgacctgttccagtgggctaaccgggacgaattctggaaagacaacatcctgagcccttcgagtctgcgcaagcagtgggatcagctcaccaccaaacggctgcgtgctaccggagcggtaaaaccttcccggggcggcattgacctgcataacaccgactggattgacggggtgctggaatga

SEQ ID NO: 234636 - DNA, 687 bp, Klebsiella pneumoniae
atgaaaaatctagccgaaagcattcgcaattttgaccgggaacaggctcgtcgcgtggcgcacaacctgcctgagcagtacactgaacgcgaacaaacgcagcaggtggcgcagattatcaacgggctattcctacagctggcggccgcgtttccggcaagcctggttaatcgcagccaggaagacgtgaacgagatccgccggcagtgggtgctggccttcaaagaaaacgggatcatcaccatggaacaggttgaagcgggcatgcgcatggtacgccgacaggagcgcccatttctgccttcgccaggccagttcatcaagtggtgcagggaagggcgctgcgtgctggggatcaccactgctgacgtcatggctgaatactggaagtggcgtaagctggtattccggtacccgagcagtgagcagtatccgtggccaaagccgattttttaccatatctgcctcgagctacggcgccgcggaactgatggccaactgagccagaaagagcttgagcgtgaagccagcgacatcctagatatgtgggaaaagcgggtgctggctgggaagccgattccgcctgttcgacgggctctggcagcgccggtatcgccgaaggggccgacaccggcagagcttttgaaagctaaatatcagcggatgaaagctgatggcagggcatag

SEQ ID NO: 234637 - DNA, 567 bp, Klebsiella pneumoniae
atgaaaaagccacaacagatatacgacctgcaaattcctaatgacgactataaaatggcagcagtcatggaacgtgataagttgaactttgagtctcccaacaaatggttttacgtgggtgctgacagcagagacctcagctttgcgaaagtaggaattacgatgggcgatttaacatcccgctcatacggcaccaacaaccctaatttctacctgttctgcgcctttcagtgccagcaaagcacaacggaagctcagctcaaaagcattgaaaaaagcgctataagctatctagatggtgtgttctgcgccgaaaatggtcagacaaagcgggcgcgtcacatggagtcacaacgcctgtcagagtgttattacgatgtaaatttcgaggatttttttgtcgaggtgcatgactacctattggataatcacgtcagctatttccagacctgtggtttcgaaaatgaagcaggcagtgatggaggctatgcacttgcgtgggagttcagttctctccttaaacccgaagttaaaaggtatttcctgaacaggatcctccggtggtga

SEQ ID NO: 234638 - DNA, 414 bp, Klebsiella pneumoniae
atgagtattcagcgacgtgaggtgtatctggtcttgaaacaactatcagatggccggttgttttatgtggaaggcttgagaagcgcccgcaattatttttttgatggccatgttcgggtactcacttccccggctggttcagcgagctttattgagttcgaaccaggtgaacgccctatgcaacttttccatttgccagatgaagaaggtactcaatggcaagctgctttccatgatttcggctgctcgcctgaatttggagaacctaaactggaatacgtcatatttgttggcgcttattccgatgaccgcgagcgtaccattgagttgatgaatatgggcatgactcatgcgtgggaaattattgagggcaagtgcgaactgcgcgaaggcgagtttgaagtagaatggtaa

SEQ ID NO: 234639 - DNA, 1215 bp, Klebsiella pneumoniae
atgacatcgtttatagtggggcaaaaatttcactcggtagggaatggcacttttaaatcaggtgtagtaatgagcctggatacaagagaggctttccaatgggtttatgattgtggctccacaagcatgactacgctaaatcgagtattaggggcaataacccggcgcggatggccagaatccattgatatgttagtgctatcgcatttcgataatgatcacgttaacggcgttgaagagattctgaggcactgtcgcgttaaaactcttgtcctcccattttcagaatgggcgcaaaccgtgcgcgagatttcggttatgggcaaaaagggtacttcaccgtcaacagcgctcatgcagctcaatccagttaaatggctgacatcaagaaattttgatgctcatgtcgaagagattgtattggttcaggggggaaccgaaacttcacctgttccctatggtgacgatgcgcctgaaccggaaccgggagattttcagcgagatgatgatgtcagacgtttcagtcagaactacttttctttaggttcggctttgaccggtgcctcaagaattcgaattctccgccatgatcgatctattcaagccttaaacagggagtttgagttcgtcttttataatgcagaaaaagactttaacgccctagggttgatagaacagcgaagcggacaatggtatgcaaaacactcaggcaatctcttatctgatgtcaaaacagatatccaaaacactatcatgagtattaacctacaccagccgttatcgacaatgcctgcaggctggaggaaaactctgaagaattgctatgaaagccattttggtcatactggtaaggctaaaaataatatttcgctatgtatgtatgctgcacctatcagagcaacccccagtcaatttcatgtgagggattatcatcgcatcaccttgcacgcgaataatccgactgtccggctggccacactctgtactggcgatattcatcttacttcatcagtgatttcagatatccaaaaccatttgggaacgcaacgctgggacagaattggtttggtgcaggttcctcaccatggctctcaacattcgtgggaaccaggtaatgcgggcttactagcccctgcgcaatttgtacattgcgcatcgggcacaaagcaccacccacatccactcgtgcaggcagatctcggctttgttgaataa

SEQ ID NO: 234640 - DNA, 141 bp, Klebsiella pneumoniae; identical to SEQ ID NO: 36145

SEQ ID NO: 234641 - DNA, 255 bp, Klebsiella pneumoniae
atgcgcgccactcaggctaagtgggataagctgcagcgaggcgttgcggagttttcaattaggttagcgctcggtcgggctgatttattccctgagacaccggtgcgcgtgtcgggctataagcgtgccatagacgagcagtcatggctaatcagtaaattaactcacaatctaaataatagtggctacacgatgagcttagagcttgaggttaagctttctgatgtgcagtacagtgaggaaattgacgaataa

SEQ ID NO: 234642 - DNA, 249 bp, Klebsiella pneumoniae
atgaatagcaaaaatgttgagctgaatgctgccaaagaaaaactggctaaactgattgatcatttgtacgttttagagcgtgaatacgacaaagcgcttgaacatgctgcaagctatcttggatatgatgagaagatagaaaaggtcagagacgaaagggctagcggtctgtacgagaatatcaatgaagttaaaaatcagataatgaatcaaaccaaattaattgaagcgctggtagccgactattga

SEQ ID NO: 234643 - DNA, 531 bp, Klebsiella pneumoniae; identical to SEQ ID NO: 92400

SEQ ID NO: 234644 - DNA, 1233 bp, Klebsiella pneumoniae
atgggaattaacgaaatcatcatgtacatcatgatgttctttatgctgattgccgccgtggacaggatcctgtcgcagttcggcggctcggcgcgctttctcggcaaactggggaaaagcattgagggatccggcggtcagtttgaagaagggtttatggcgatgggcgcgctgggcctggcgatggtcgggatgaccgccctggcgccagtgctggctcatctgcttggtccggtgattattccgctgtatgagatgctcggcgccaacccgtcgatgttcgccggcacgctgctggcgtgcgacatgggcggtttcttcctcgctaaagaactcgcgggcggcgacgtggcagcctggatgtactcaggcctgatcctcggctctatgatgggtccgaccattgtgttctccattccggtggcgctcggcattatcgaaccaaccgatcgccgctggctggcgctcggcgtgctggcgggcattgtcaccattcccatcggctgtatcgccggcggtctggtggcgatgtattccggggtggagatcaacggccagccggtagcgtttaccttcgcgctgatcctgatgaatatgatcccggtgatcatcgtcgccgtgctggtggcgctggggctgaagtttattccggaaaaaatgatcaacggcttccagatcttcgccaaattcctcgtggcgctgatcaccatcggcctggcggcggcggtgatcaagttcctgctcggctgggagctgatcccggggctcgatccgatctttatggcgcctggcgaccagcccggcgaggtgatgcgcgccatcgaagtcattggctctatctcctgcgtgctgctcggcgcttacccgatggtgctcctgctgacccgctggtttgaaaaaccgctgatgcgcgttggtaatctgctaaaaatcaacaatatggctgccggcggcatggtcgctaccctggcgaacaatatcccgatgttcggcatgatgaagcagatggatacccgcgggaaagtgatcaactgcgccttctcggtgtcagcggcgttcgccctcggcgaccatctcggttttgcggcggccaatatgaacgccatgatctttccgatgattgtcggcaagctggtcggcggcgttaccgcgattggcgtggcgatgctgctggtgccaaaagatgaaaacgtaccggcgcctgccaacaacgaagcggaggcgcactcgtga

SEQ ID NO: 234645 - DNA, 996 bp, Klebsiella pneumoniae
atgtttccagtcggcattgacgtaagtaaaaacaccctggatctttgcatgctttatgacggtatcaaaggacgcataaaaacccgtaacatccagaataacagacattcagttgaaaatattcttcgctggctcaggcttcaacattgcagtccggaagatgttcatgtggtaatggaagctaccggtgtttatcacgaacggctggccactgaattacatgatgccggtttccgggtttctctggccaaccctcaccgtagtcgggagtttgcgcgtggcatgggaatcatgacaaaaacggataaggtggatgcgtatatgctggcctgttacgcattccttaagaagccacaccgctgggagccgccggcacccgaaatcagatatctcggtgcactcctgcgacggcgggatgttctgctgggtgatgccctgcgtgaggagaacaggctggaaaaatacctgtcgacagacacacctgcagatattatcagttcctgcaggcgtatggcgcagcttctgcgcgaggaggtaagtaatatcgagcggcagataaaagcacatatcaaagccagccctgcactgaggcgtgattatacactgctgacctcaattaaatcggttggtccccagctggggatgcatatgctggtcgtgcttcgcagccataactttgtatcggctgagcaggctgccgcctttctgggcgtggtgccgatcgagaaacgctcaggcacatcggtccggcgccggccgcggatgtcgaaaatcggcccccctcagttgagagcgaagctttacatgtccgccctgtgcggaaaaatctacaataagcgaatgcgtaatatttacgatgagatgtgcctgcggggtaaacctaaaatggtggccattggcgcgctgatgcggaaactggtgcactggtgttatggcgtcctgaagaccggaaccgtttttaatgacgaaagcctgaaacaagtaatgtcaacctga

SEQ ID NO: 234646 - DNA, 261 bp, Klebsiella pneumoniae
gtgagtgacgtaaaaagcaaaatcatgcaggtgttgatcgagggagcagaccagcagagacaatgggctcagggcgaatatccctttcgcatggccacctggaatatccgatgcgcgatggagcgcaaattccctgaggtggaatggaggagcgccgacctccgcaaagagcttattgaactggcgaaagaggggctggtatccaaatgtccccacgagagccgcattggccaggccgtctggcgcctggaggtgaagtga

SEQ ID NO: 234647 - DNA, 597 bp, Klebsiella pneumoniae; identical to SEQ ID NO: 228009

SEQ ID NO: 234648 - DNA, 1446 bp, Klebsiella pneumoniae
atgtcatttataacaaacctgaaccagcaacagagaaaacgacttcatcagatcaccttagtggccaccttcggcggcctgcttttcggttacgacaccggcgatatcaacggcgccttttcctcactgaagcagtacatggcgctaaccccaaccaccgaagggctggtaatgagcgttctgctggtcggcgccgcgctgggcagcgtgtttggcggcaaatttgccgattacttcggccggcgtaaatatttactctttctctcctttgtttttctcatcggcgcgttgctttccgccgcggcccccgatatcactaccctgctgattgcccgcgccctgctgggctatgccgtcggcggcgcttcggtcaccgcccccacttttatttcagaagtggcgcctaccgagatgcgcggcaagctgaccggcctgaatgaagtcgccatcgtcattggccagctggcggcgtttgccatcaacgcgatcattggcatcatctggggccatctgccggacgtctggcgctatatgctgctggtacaagcgattccggccatctgcctgttcgttggcatgtggcgcgcgccggaaagcccgcgctggctgatcagcaaaaatcgtcatgatgaagcgctgcatatcctcaaacaaatccgcccggcggaacgcgcgcagaaggagtacgatgacatctctaccctgatcaaaattgaagctggtaataagtacagcgcccagagcacctttgcgacgattgtcaaaacaccctggatcctcaaaattttgctggtcggtattacctgggccgcactgcagcaaaccaccggcgttaacgtcattatgtattacggtacggaaatcctgagtgccgccggtttctcagagcgtacttcgctgatctgcaacgtgctgaacggtgttttctccgtgggcggtatgctgatcggggtgctgttccttgtcgaccgcttcaaacgtaagacaatcatcatctacggtttcgccattatggcaaccctgcatctgattatcgccgctgtcgattacaccctggtgggtgacctgaaagctaccgccatctggctgctgggcgcgctgttcgtcggcgtgatgcagggctccatgggctttattacctgggtggtattagccgaactgttcccgctgaaattccgcggactgtcgatggggatctcggtatttttcatgtggatcatgaacgcggtggtcagctatctgttcccgctgctgcaggcaaaactgggccttgggccagtcttctttatcttcgccgccattaactatttagccattcttttcgtggtctttgccctgcccgagacctccaataaatcgcttgagcagttagaggcagagctgtcagcaaaccatgaagataaaaaatccactcgtctcaccagggaggttggttatgatcgataa

SEQ ID NO: 234649 - DNA, 213 bp, Klebsiella pneumoniae
atgatcgataacatcacgctggataatctgcatattggctgcaaagccagtaataaagcggaagtcatcgccatgatcggcgcggagtttaaagccaaaggctatgtcaatcaggaatgtgtccactttctgctggagcgtgaacatcaggtctcgacctttttagggaaggtgcgaataagcaggtcatttcttcccaagctgactcgctga

SEQ ID NO: 234650 - DNA, 465 bp, Klebsiella pneumoniae
atgagaggatgcatgatctggataggactggccaccctggtagtggtgtttgttgtgggatttcgggtgcttacctctgattcacgccgcgcgatccgccgcctgagcgaacgcttgggcattacgcccgtcccgctggaatcgatgatcgatcagctgggaaaagccgccggtaatgagtatttgcgttacctggagcggccgaatgaagcgcatctgcagaacgccgcccaggtgctgctcatctggcaggtcgcgattgtcgacgccagcgaaaaaaacctgcattactggtatcgcctgatgcaaaaagcgcgtttagcggcgccgattaccgaggcgcagatccgcctggcgcaagggtttctgcgcgagctggacccggatgtgagcgatttacataacctacagcagcgctacaacgacctgtttctcccggaagacggcgtgcactggctgcactga

SEQ ID NO: 234651 - DNA, 165 bp, Klebsiella pneumoniae; identical to SEQ ID NO: 189350

SEQ ID NO: 234652 - DNA, 528 bp, Klebsiella pneumoniae; identical to SEQ ID NO: 189351

SEQ ID NO: 234653 - DNA, 177 bp, Klebsiella pneumoniae; identical to SEQ ID NO: 230771

SEQ ID NO: 234654 - DNA, 918 bp, Klebsiella pneumoniae
atgagcttaacccttattgatttcgtcaaacaacaggagccgcttttcattaaagcggcaactgacgagaggatggtgtgggcaaaggaaagccagttcgccatccagctatttcagaacaacgactacctcgccaaagttgcattccagaaccagaccagcacgcagaacgcgatcatcaacgttgcggctatcggcatttcgcttaacccagcgcagaaattagcttatctggttccgcgtaaaggagctatttgcctcgacatcagttacatgggtctgatgcacattgcgcagcagtctggcgccattaaatggtgtcagtcggccatagttcgtcggaacgaccagttccgccgcgaagggctcgataagccgccgatccacatctacaacgactttgataccgaagagcagcgcggggacatcgtaggggcgtatgtaacggtaaaaactgacgatggagattacctcactcatacgatgcgcatcgatgccatctactcaatccgcgaccggtctgaggcgtggaagaaatacaaatctgacaacagcaagaagtgtccttgggttacagacgaagagcagatgatcctcaagacggttgttaaacaggctgctaaatattggccgcgccgtgagcgtctggatgccgctattgaccacgtcaacaccgagggagaagaaggtatcaactttgccgctcagcgccagcctgaacgcgatatcaccccggcagaaacatcaatcattaaagagattaacgatgttcttattgcgatgaataagacgtgggatgacgacctgctccctctgtgttcaaagatttttcgccgtgacattcgtgaatcatcagatatgacccaagaagaggccgttaaggcactcggatttctgaaaaataaggcagccgcatga

SEQ ID NO: 234655 - DNA, 579 bp, Klebsiella pneumoniae
atgaaaggcatcagccaggcgctaaagagcgcagatgaagttaaggcagtggcagcagagctacaacgcaacaccaccaccaacctgttttattgcctatgggtgtttatgtatgagagcgggttacgtatctctgacgtgctcaagctcaagtatgaggatgtagaggggcaatctcacctcaaggtaaagcaggagaaaaccggaaacgtggtgaggccaaaggtgacagccgcgatgctctctgtcgtggcacaacgcaaggcggagcaagccaatatgccagtgaagacggatttcatctttagcaagggcgatctacgtagcaaaggcaacgccgtcacccgtaacacggtattcactgagtttgggaagatgggacgtagagcaggattctctaacgtaggctgccatacgcctcgaaaaagccgtggtcgaattttattcgaaaatgcagtgccgcttgaaactatcgcccacttcctggggcagacagatccacgctcaaccatgtactacatcgggtttggtcaggacgtgcaggacgatttaacagaggagttttctttagaatggtga

SEQ ID NO: 234656 - DNA, 492 bp, Klebsiella pneumoniae
atgccggataaccagggactttcccctaccgaagttgaagcactatttaaagagacattccactccagcactaccccagcgcaagttaccattgaacagatgtttgatagtctcgtaccctatttcactgaagtaacacattcgcaaaagcgcagcaagcatcccagggtgctgaccattactaccgatcataagcgagtgtgggcgtatctcagagagtgtgaggacgatacagccggatgtgtgatgttcgatctgagttgtgcagcccgtaatctcgggatgacccagaaaaaagtgatgaccgtcattagcgatctggataatgctggctggatactctgccgagacattggctcgcccggtgctggaacctatcagataactattcaggacattgaaactatcatttcagtttgtagcaccataacctacgcagcaccccgtaccctgacgatggatgtgttaagaggctcacgctgggttcattaa

SEQ ID NO: 234657 - DNA, 162 bp, Klebsiella pneumoniae
atgaaaattaacatcgattctgaaacttttggcaaagtccttgctattgctaaaaaagaaaatacaaccgtaccgctgttagtaaaacagcttatcaatcagttcgtccttgccaatgaggaaaataatgaatcaaaaaagaccgatagtagcctacgttga

SEQ ID NO: 234658 - DNA, 1449 bp, Klebsiella pneumoniae
atgaatcaaaaaagaccgatagtagcctacgttgatgcaatttgcggatctggaaaatccacaacgttacagcaatacattaaatccagtttattaaccaactctgatgcaatcccccctcgttacctcctcgtgatgccaacacatgatttgtgcgaacaggtgaaatctgagctagagcacagggatgtacgaagctatcacgtagacattgaactgaacgcagtaaaaaatcttatcagtacgttggaaaatgactttcaacattctgttattatctgcacgcatgaatgtttcaaacattattgttatcgtgctgagtttgaaacggaacttcaaaaccttctcaaagatttcagtatttttgttgatgaaatcccggatgccatgttcggtgcatacatcaaggccacacacaccgaccgcacagaggaaaacttcccgtttattaaatggctggaagagagggacgggcttttattcttaaatgagagctatcgtgatgacctctataaatactggcacgagaaacaggctaacggtgaggaactaaaacgcctgctatgggctatcctacaaggcgctgggctgctttacgaagagaataaacacctgtttgccttcactgcatcgccgattatcaaatccgcacagtgggcggaaaatctcacagtgttaggtgcaggggcatctcgtagtctgttctgctgggctgctgagcatgtggcagggtatacggtagaagaggctaaaccgtctctacagccgcctgaggagcgcaggaagcataaacgaggtgctatcaccctgatggcagtttgtgagaacagatgcactctcacgagcctacagcatgtgtttaacgagcgtttgcaggaaatcatccgccgtgttcctggcgagttcatttttgccaccaacagagacaaatctatttgtgaattcacaacgataggggatgaaattctctccagtggttctcgtggtgagcgtgtttcaatggcctcctatggattaaaccactatcagcacatgcataatgctgtgtttctcggatgcagcaatctggacagagattttcagggtaaatggcggcagtatgctgatctaaatggatggaacgttgaggagttcgaacagaaacaacgtgcagcgatgaattacgaaaggtgctaccagtttattagtcgtacatctatccgtaatgctgacacaaatcaccctctgatgttcgtagtgccggatttagctactgctgagtacatcaaggaatactattttcccggtgcatctatcgaatgtttccactttgagaaacctagaaaaaaggttaaagggacagcaacacgcgagagagtgcaggaatgtaaagcacaggggatgacgcaaaaaagcgcagcggaactgttgcaggttaacataaaaacaatcaaacgtaattggaactaa

SEQ ID NO: 234659 - DNA, 408 bp, Klebsiella pneumoniae
atgagcagaaaagaacgaaatgtaatagcccgtattgaacgacaatccaatactctcccccccgcaaaatcactagccagccgtaaagagtttcgggagctatcccgcctctctatggaatggaatagtgttcccggagaatggaaaacagaaataatcgagcacgatagtcctccgttatcagaggaagagcaggaagcattaaatgacattctctcctcctgtgatggtgtatatttcaaacctcgtaaacgtaaacaatatattatggatagctctgatttgaggaaatatcaggtgatgggctttgaggattatgtttcatattgtggctatctcagcgttaacgggctaaacaacctggtaagagattttgacgcagtgtacggcgataaggagagcgagtaa

SEQ ID NO: 234660 - DNA, 774 bp, Klebsiella pneumoniae
atgtcgttagatatctccgttagcacaatccgcaacacggtcacatttgtggtggataaaaacagcatagctcaggcaaaaaaagctgctgatgatctacataaagcttttgaaaagctgcaagaccccaagattaatttcaaacgttttaatcaaaacctgaaacaggcacagaaaacggtagagaaggcctctaaagccgcctctaagccccgcgataatagccaacgtgaagcagaacgagcagcaaaagcgcaagcacgtgtagaggcacaggcagcgaaagaggccgcaagagcagcccagcgtagagaacgtgctgaattgaagctattggatacggccagcagctttaaatcaatgcaacacctcactaatgttgaactcacacaggctgcattacaggctagtaaaatcactaaggcgtatgctgacggaacaatcagcctacaacgccagaacagcgagattaagcgtttacagcagagttatcgcaggctcaatgctcaacgtaaacaatcggcttctcctaattacgctaaagtggctggcaatatgccgggcactgggattattacaggtagtattatggggcttggctctcgtgtattagctggcgctggcgtgggcgctgccgcttatggcgcatataattggggcaaaggggctatttcctctcaggaggaaagaagcgagattgtagctagagcacggttaggaaatgttgattacaacgtcttacaggctttgttgaataaatcgaacttttgctga

SEQ ID NO: 234661 - DNA, 462 bp, Klebsiella pneumoniae
atgaaagtcactgaacccagactgaatacgctgatcgataacctgaacaccctgatttgtgaggacagcctgctcacgcgcaaggagcgtgaaacgctggtactggccgtcgccgccatcggcgccatgaaagcgcgcgtcggcatgaaaaagcccgcgataccggcatcgtcgaaaccgaaggaagagaaacaggcacctgtacctgacccacgctttccgaatgcccgccaggcctgggtggctgaagaggaaactttattactggatgcgctcgatggcgtcccgaatgatgatattggtaagcatcttttctggctttccgagaaactggggagaacaccgttcagcgtcgcctgcaaaatcgcgtcacaaagacatttgacaaatggttggaaagagcagttcagggaagtttctgataaaattcgtttgtccggtctgagtatcagtgaatattag

SEQ ID NO: 234662 - DNA, 3135 bp, Klebsiella pneumoniae
atggcattgagcgatttattacaacaggcttgctttcagtgcaaaccattaaaaacgaccgcattgcctgctgattatcctgggtgggtcatcttttttagcgtcagtgacggtaagcagcgtgcgcatgtccatgtttcgacagcagccagctttgatcaagcctggctagccggggccagagcgctgcaggagtggcgtaaaaagcaagataatgaaacccaatggttacgaattgatattgtcgatagcgtagaacagctaacgtgggaaaatctattaaagaaactcaatatcaccaaacgcaattattttcgcttcggcatctcttttgatacacaatttacgcaagcgatccttgaacaggaaattgcggcgaatgctttactttatgatggggacaatggcgtagcggcgccaaatgacatcaatctggaaaattatggtcaacgccgatttaagcgcagtttgaactggccgagcgaacctcagcagatactatggcggtttaaaacgcgttcagtattctgcgatcgtaacggcgctaaactcatcgaacatactggccgcagttccggctaccgcgttatcggtgatgaatggcaaaaaaattatctgcccgaggttattaaaaaggggagcgattatctggctcgtcaggtcaaaaaagacggactctattattacggatggtttccctgctttgaccgtcctgtgcgatcctataatgctttacgccatgccagctcaacctattcgctgattgaggggtgggaggcgactaagcagccgcaccttcgtcaggcgatcgatcgggcgattgcttacctggtcaatgaccttatttctgttcgtacgcttgctgatggacgacaggctgcgtttctttgtgatgtcgaaaatgaaattaaacttggcggtaatgccgtcagtattctggcgctggtgaaatacaccgaaacgacgggcgatcgacaatatctggacttgttgtcgcaactggccactggaattgcatttatgcaggacgcgcaaagcggtgagtttgttcatgtccttaacagccacgatctctcattaaaagccaagcatcgcatcatctattacgacggtgaggcggcttttgccttaatgcgcttgtatagcttgacgttggcgccgcagtggctggttatggtggagaaagcatttgaatactttattcgacaaaaacactggcagcatcacgatcactggttgagctattgcgttaacgaattaacgcgttttcgcccggaggagcgttatttccgcttcgggctggacaacgtgcgcgatcatctggatttcgtgctgcaacgggtaacaacctatccaacgctactggagttaatgatggcggcggcggaaatgattgcgcgcctggaggcctctaccacacagcgccatttgctcgacgactttgataaagacaaattttaccaggccctggaggcgcgggcgcgttatttactggatggtttcttctggccagagctggcgatgttttttaaaaatcctgcgcgtatcgttaatagtttctttattcgacaccatagctatcgtgttcgaattgatgatgtagagcactatctgtcaggttatatcgcttatcagaagtattttcaggcagccagcaaacgtcagcaatcgccaatcgcggcgccgcccgcgcctcggggaacgaccctttttttgttagagaatctgcgcgacgtggggaatggtattgaggttgcggctacccggcgagcaaggctgtttgttgaacatttacacaccgtcccgtggcttatcaccgccgtctggaacccagaccttaacgatgcggtaaaagcgttgaaggcgcggggagcgttgccggaagcggtgccggtttataacctctacaatgcattagcgtcgtgcctgagtgcggggaagatcgtcccgcttcccgggctgaaaggggaggttgagcttcgtcagaccgttgtgccgaaagcagaggcgccaatcggtaaaaataattatcaattacgcccgcaggggcaattggtggaagattacgtcgatagcgcaggaaacgtgttgctgcgtaaatattttgatatcaagaaagcgaatctgcagattatccgcatggatgtcgctttgccgggcggggaggtcaaatcctttaaccaacaggaagcgtttttctcctggatgctggaaatgatgctgcccgcagcgggcaactggcattttatcgtcgataaaaacaaagcgtggaaagattttgtctgttcgcaaccggcacagcggatgaactgcacggttagcgcggtcatccactctcatcatcaattgctaaacggcgggataaaagcttcttaccgtcatttactggaacaaccgcaactggtggatcggttaatcgtactcaccgacgaacaatggcaagatttacagcaagaggggatccccggcgctcgccttgtggtcattcccaaccatatggatgacagcaaaattccggttaacccgcaaaaggagccctcagaaacggtcatttacctggcgcgttattcagaagaaaagcagcatctgacgctgttcaacgcattccgtaaagtgtccgcgcaacgtcccgatgcgcggctccatacttatggcgtcggcccgcttcgccgtaaacttagcgaccaggttaaggcgtggggattagaagacgtgataaaaatcaacggatttacctcggatattgctgccgttcatcgacacgcttgctgtacggtcctctgttcaaatcaggaggggcaatctctgtcggcggtcgaggccatggtctacggcacgccgttaattagttttgctattaaatatgggccgcgcgatattctgcaggaccgccaggccgggattctggtgccttacggcgacgaagaggcgttggccgcggccttagttcgggttatttccgataaggcgctacaaaaagagatgcaggccgccgctatccgcaatgcgcgccgttattacgctaccgcgatagccggacgctgggaaagctggttacagcacaatgagcagcgaatgaaggagcaggaggagaagccactcaatgtggcttcgctcaaacaacgtgtcgtgtaa

SEQ ID NO: 234663 - DNA, 1221 bp, Klebsiella pneumoniae
atgaataagcccactgctgcgattttcccgttggtaaaggaactcgatccggttgctgcgatggctgataacgagcgtgatgaggccgagctggttaaatcgcgccgcctaatcgctttactggcgctactgctggtggtcacaggcgtttgggcgtggtttgccacgcttgatgaagtatccaccgggaccggaaaagtgatccccagctcgcgcgaacaggtgttgcaaacgctcgatggcgggatcttaactgagctgaacgttcgcgaaggcagccgtgtcgccgcgggccaggtggtcgcacgattggatccgacccgcagtgaatccaatgttggcgaaagtcaggcaaaatatcgcgcgtcattagccgcaagcattcgcctgaccgccgaggtgaacaaccaaccgctgatttttccaccatcgctgaaggcctggccggggctactggcggaagaaactcgcctctatcacagtcgcagggagcagctaacgaagtctatgcggcaactggagcagtcgttatcgctggtcaaaagtgagctggcgataaatgaaaagctggctaagaccggtgcggccagtaatgttgaagtgcttcgtttacgccagcaggctgccgatattgagctaaagaaaattgacctcaacactcgctactatgttgatgcccgcgagcagttatcaaaagccaatgcggatgtcgccagccttgccgaagtgattaagggccgggcagattcagtggctcgattgaccgtgcgctcaccggtgcaggggatcgtcaaaaatatcaaagtgaataccatcggcggggttatcgcgcctaacggtgaactgatggatatcgtccccattgatggtcgattgttgatcgaagcgcggatttctccgcgcgatattgcatttattcatcccgatcagaaggcgctggtgaaaattaccgcctatgattatgccatctatggcgccctcaatggtgttgtcgaaacgatatctcccgacacgattcaggacgaggcaaaacctgatgtttactattatcgggtgtttatccgtaccgatcataactatctggaaaataaacgcggtaagcgttttttaataggtccagggatgatcgctacggttgatattaaaaccggagagaagacagttatggattatttggtgaaaccatttaatagggcaaaagaagcgctgagagaaaggtaa

SEQ ID NO: 234664 - DNA, 2148 bp, Klebsiella pneumoniae
atgagcgaacaaccccagcgcagcgatattccgcatttacaggattgggctaacgctatggcttttgtcgccagccattatcggcaaagttactcaccggggacgcttcatgccgcggcggagtgggcgacgcaaaaaacgctgcctgatgcgcttaaacatttatgccgtcatgccggtttgcattgccaatttcttaatggcaatgaccggaaaatgtcggcctggcggctgccgcttgtggtacagctcaaagatggccagattggcattattgaaagcttcgatctacataactcagtcgggatccgttttgtcaaagagattacattactaagccactgtccgcttgactccttgttagatgaaattgaattcactgtggcttttcgtccggcctcgccggagaaagatattagaactgaaagctacctcacacgcttccagccggactggttacgtaagatcgttttaaaagattggcgtccctatacacatgtcatgctggcgtcgctggcgatcaatattttggcattagccggtatcctgttttccatgcaggtatatgatcgggtaattccggcccaatcctatcccacgttatatgtcttgtttagcggcgtattaattgccgcagtgttcaatttcgttctgaaaattacccgcggtcacgtgaccgacctgctgggaaaacgtggggatattcgtatctccgatcgcgtatttggtcacgcattacggctgaaaaataccgctgtgccgcgctcgacgggcagctttatttcccagattcgcgagctagagcaggtacgggaaatgatgacctcgaccatgatgacggtcattgccgatttaccttttttcctgctttttcagcttgtgctatttatcgtctcgccatggctgagttggatcgcgcctgttgcgactatcctgatgctgttaccgggattgttactgcagaaaaaactggctgagctggcaaataaaaatcagcatgaaagcacgctacgcaacgccattttggtggaaagcattcagggcctgccggatataaaaatgatgcaggcagaaagtcgctttctgcaacaatggaacagctatgtggcgattactgcggaatcgggagttcaaacccgaaaagtcactcatgggctggtgagctggggcatgtcgatccagaacctgttgtatgccaccgtagtggccgttggggcgccgctggtgattaatggcgacatcacgaccggcgccatggtggcggcatcgatgctgtccagtcgaatggttgctccgatgacggcgctctgcggggtactggctcgctggcagcaggtgaaagtcgcgaaagcaagcctggataatttaatggcgctgccggtagaaggggggctggatgagccgcggatccatcgagcggttctgcacggtaattatgaatttcgcaatgccgagtttcgttacggcaaagacaatggccccgcaccgttgcgaattaaacagctttctatcaaagccggggaaaaaatagctgttctggggcgcattggcgccgggaaatcaacgcttttgcaggcaatgatgggtaatgttgagttgacgtcaggcgaactaaggcttgacgatctttcgctgccgcaaatcgatctggcggatattcgccgtaatgccacgctactgacgcaggaggctcggttatttcatgggacattaagggaaaatgttaccctgggacggcctatggcgagcgatgatgaactggtgaaagtgctggagctgtgcggtgcgctggagtttgtcaacaaactgcctatggggcttgaacatctggtgatggagggagggcttgggctttccggcgggcagcggcagtcactgctgctggctcgagcgctcatccgcgatcctaatattattctgctggatgaacccacctcattctttgatgaacgaacagaaaaagcgtttgtcgagcagctggcccgttgggcaggagaacgtacgttaatcatcgccactcacaaagcggcggtgctcaatatcgtcgatcgtatactggttattcaggacgggcagctggcgctggataagcctaaagcgacggtatttgagcaagaaaaagcgcgtgctcaggtggtgaacatatga

SEQ ID NO: 234665 - DNA, 1143 bp, Klebsiella pneumoniae
atgctgattttaattagtcatctgagtataccagaacatattattttaaatttatttaacgatacacctccttgcaacgctttattaaatcaatgtcgcacctgcattattaactattacatgcccgattttcttctaaatcatataacagatcgttttgggaaaaataatttagacatcagtaatatcattaactctgattctccagagcttattggtcgcaacttgtcaaattataatgattttttacctgacatcattccttataacgtgcaaatttcgttacacatattagcaagatataacatgcatttgttaaaagagtcgttatcgaattcaatcaataccttaaaaatatattccttagcatcttgtataaagattgaagatgcaataaaactcatagagtcatcatcctctaacaactacacttcaagaatattaattttttatctattcaataaaaaaaatcatcttgatgaaaacttttccagtgatgatgtcttttttactcgtttatttaaacacatttacaacactggtgagttccactattggatgaagtatataaatacatacccatgtcgatttccaaaaatacaagtttttttggggaaagcattagcaatgattgacaatcaagatgctgtggatcaatacctcaactcgataaaacttcattgtaatagcttagaccattcatatccaacatctagagaaccagtccgtgactgcctaaaaagttttgagcaaaattcaaatgccagccttcaattatattgttgggaaaaagcatttaagatatggagtaagtgggactttgatattttgaatgaaaggcatctattctctgtttcagcatcagaaatagattaccccgttgtacaatattttataaacaacatgaacgccatcgaaagacaaaacttcatagataacacaataaacaaaatatcattcatcgatagtacttggcactcttctaaatcagaccttataagttattattatagatttatatcctcactccaattaccttaccatgcaaatttagcaattaaaaaaccagatgagggaattaatctttcactacattttaaaattgaattctcaaaatattcaaaattattttttgaaatttaa

SEQ ID NO: 234666 - DNA, 1212 bp, Klebsiella pneumoniae
atgttattacccaataagcttcaaaataaaaaatataccttctactatgatgaatctaacaacgtaagaaaattggctttgtcagataagattgacggatacaatattgaacatgacgaagataagtattcaagtttaaactttgttttaggtggagtggcacatttaaatgactcatctacggctgatttcgatgcacttaaaaaatccattatgcttcaacctacagcgaaagaaatcaagagagatcatgtagccactggcgacttcatctttatgcttaactctcgaaaacttaaagggctgtttgaatggctgctacaaagcgatctctatgttcaatattttaatctcaacatggagtactgggcttaccttgatattattgaagactgtgttctattctgccttgaaaaaaaacttcttagttttaattctttagaacattgtcggcactaccaagatatccacaaagatgaattatataaagtagtctcttctaacagagaaaagttcataagattcctaaaatgctatgattacccatattttacagggaaagaaaaaaacttccttcaagagctacatgacatagttcttgaccactacaacaccattcgttataagcctcttgttacacaagatgaaaagctacacatggatagcctcagagagctacttgaaatgtgtattgaaaacgaaatggaggatttcactcttaccacagactttagatatgaagttgaagaagataaatctaaagccagtgaagatgaaggtcaggatgatagtagtgataactatttagtggatgcttttgcggtcttctatcgatatcgtggcatggattttcctaacagtaagcacatttttgatgttgaagaagttgtaaaagagagctttgaatcttcgctcccgcatgatgaagaattggtaaatcttgactatcagtttgatgtttcgcacgataatttatttattcaagtaagtgatgttgttgccggagttttccagaaatactttgcctatttgaatgccaatcgcatagaagacataaaaaatgttcgtgacaacctcaacccaatacaaaaagccaaccttgagctttttagaaaacttattaacaagtcagatagtgaaaataaaaagcttttgttttatgtaatgtctatgcttgagcatgaaaaacattatcaatttacatttgcttga

SEQ ID NO: 234667 - DNA, 1005 bp, Klebsiella pneumoniae
atgaagtttttggtcactggtgccgcaggttttatcggcttccatatcgcgcagcgcctgctgaatgaagggcatgatgttgtcggaatcgacaacatgaacgactattatgacgtcagcctgaagcaggcccgtctggatcgcctggcatctccggcattccatttccagcagctggatctggccgaccgtgaaggtatggcaaagctgttcgccacagagcaatttgaccgcgtgatccacctggccgcccaggccggcgtgcgctactcgctggaaaacccctatgcctacgcagacgctaacctgatggggtatctgaacattctggaaggctgccgtcataccaaggtgaaacacctggtgtacgcctcctccagctcggtttacggccttaaccgtaaaatgcctttctccaccgaagattccgtcgatcatccggtctccctgtatgccgccaccaagaaagctaatgagctgatggcgcacacctattcccatttgtacagcatcccgaccaccgggctgcgcttctttacggtttatggtccgtggggacgcccggatatggcgctgtttaagtttacgaaagcgatgctggaagggaaaagtatcgacgtttacaactatggcaagatgaagcgcgacttcacctatatcgacgatatcgtcgaggcggtgatgcgtgttcaggatgtgatcccgcaggccaatgccgactggacagttgagagcggttccccggccaccagctccgcgccgtatcgggtatataacatcggcaacagctcaccagtggaactgatggactacatcaccgctctggaagaggcgctggggatggaagcgaaaaagaatatgatgccgatccagccgggcgatgtcctcgataccagcgcagacacccaaccgctgtatgacctggtgggctttaaaccgcaaacgtcagtgaaggaaggcgtgaagaacttcgtggaatggtacaaggattactatcagatctaa

SEQ ID NO: 234668 - DNA, 657 bp, Klebsiella pneumoniae
atgctccctgcatggaatataataataatggcaacaataaacaatacatctaatacaaacactaccactacagataaaggccaaaatggtttttgtattctgtccagcttgtataatacagcttctgatagttacatacagaagtatcaggctctaacatttgatagcactccatctacaggaatacgcagacaagccgatgtgacaagctatcctgtagaaagtggagctaatgtatctgatcatgtgcaaatcagaaataacacatttaaactatcaggtatgatcacagaaacaccaatcagagctgttagagatttattatacagtgctggggtgaatggcactcgtattagtcaagctatcacctatttagatcaaatcttcgaagcaagacagcctattatcctaataacagagcataaagtgtatgagaatgttatccttacagggatttcttatgattataaatctgagcacgctatgcaatttgatctggagtttgaacaagtgcgcctggtgtcttatgcagaaactaatgttattgctacaaagacgcaaggaaataaaaacgtaggtggaacagttaaacaaaaagggccatcaagcaaggctaaagccagctctgacacggtgacaccatcgtttaataagtaa

SEQ ID NO: 234669 - DNA, 1119 bp, Klebsiella pneumoniae
gtgaagagcacaggcacacgcgatgtgcgcgaggcccggctctttcgtgatgcggtggcccttgagtggatcaagatacgcagccagctaaagccacagcgtgataaaggctcaaaggtggagcaaatcctcaatgagctacgccgggtcgggacgtatgcacatgaagcaccagaaccactaagggcccctgtaatgagttgcccttccctcttgaggatgcgggatcagtacattctgcaattcagcgagaagcgcaagctcaccacactatcgaagactaataaggccgtagaagttttcttagaacatctgaaaaaacgcgatgttcagcttcgtgacattaaccgaaccatagttactggctggttggataggctgaaaagcgagagagcgccccagacgattcaaaactatattagcgccttggctcaaatctgggatctggcccgtaaccgatatcacgacgcaccacaggataacccctggcgtggtcacggtttagaaagtaaaagtagcaaagtgagttacgaagtgtttgagccgggagaattggcgaaggtcttcgctgcgatggatggcgacgaagagatgcagaacgtaacgctgatcgggatgtacagcggcatgaggttaaatgagatttgctcactacgtgcagccaacatccgagagattgacggtgtgttatgtttcgaagtaactgagggaaagacccgttcagccgcccgtattattccggtgcatagcctgatcactccgttggtgttgtcgctgcgtgagaagccccataacggttttttattctaccgtgcgtcaatgattgaccgtgccgacggcaagcgctctacgtggcattcacagcgttttacaagggctaaacgtaaggcattaggcgaggaagggacggagcggaaggtttatcactcgctacgccatgaggtggcacagcaacttgaccggaaccaggttccagaggacagaatagcgctgctcctgggccatgagcgcggctctacggaaagtttcaaaacttatagcaaaaatgctgcttctcctgccgagctacggcaatacatcgagttgatacgctatccagaaatagaaaaaggggcataa

SEQ ID NO: 234670 - DNA, 900 bp, Klebsiella pneumoniae
gtgaaacacgactcggcgcacaccgaccatgtgaccatccagaactataagcgcaacgtgctgcgcaccccggcgaataacaaaatccggctggacgatgagcggggtaaggagcacatcaaggtcagcacagagtacggcggaaagagccagctgaacctgggacatctggtggatgctgggaagcagcagcgcggtgagggtttcgaactgcgcaccgatatgtggggtgcgataagagcgaaaaaaggtgtctttatcagcgccgatgcgcaggaaaaggcgcaggggcaggcgctgatgatggatgaagcgttaagccagctccaggaagcgctgtctttagtggaagcactacatagcgccgctgaagtggcaaaatcagagctggcggatttacagacacaaaaaacgctattgtcagaaacgctgaccgagctgaaaaaatcagcgctactgctttctgctcccgcggggattgcacaggttacgcccaaaagcctgcaattatcctcaggggaaaacctgattagcaccagtgggaaaaatacggatttcagcgtatttaaaaaattcactgtagctgcgggagaagcagtaagtctgtttgctcaaaagcttggtattaaaattttcgccagcaaaggcaaagtggagattcaggcacaaagcgatgaaatgctcctggatgcatgtaaagatctgcgcataagcagtagcgacggaaaaattcttattagcgcaaaaaaagaaatcatcctaaccagtggtggtggatatattcgaattggaggtggcacggtggaatgtgccgcaccagataaaattatagagcgtggagcggtttggcaaaaattcagtggtcagagggctttgttgaataaatcagatttcgggtaa

SEQ ID NO: 234671 - DNA, 654 bp, Klebsiella pneumoniae; identical to SEQ ID NO: 35574

SEQ ID NO: 234672 - DNA, 753 bp, Klebsiella pneumoniae; identical to SEQ ID NO: 35573

SEQ ID NO: 234673 - DNA, 957 bp, Klebsiella pneumoniae; identical to SEQ ID NO: 35572

SEQ ID NO: 234674 - DNA, 234 bp, Klebsiella pneumoniae
atgacggagctggaaagacatttgctgaacgcattagagcaactgcaacaggactatatgcagcggctgaacgaatgggagagcgccttcgtggaattgcagaaaatgttttcgcttacgcaacgggacaacgcgatgctgaacgggcgggtcatgcagttgagtcagcaggtgcagcacttgagcgagcggacagaacgcttgagccagttatacagcgagaacaggagataa

SEQ ID NO: 234675 - DNA, 531 bp, Klebsiella pneumoniae
atgagcaatcttttgcagacgggcgcggagttcgagaaaaagctgaaagagagagccgaatctacagagaaaatgctgaacgacgagttcaggaagctcgaagaatctgtaaacagggaactgacctcaaacgaatctttaatcaggaacgctatcaacgaccatacagcagccctgaaagaacttctggagaggtatcagaaaacgaccgtcagcacgatggacacacactggcaaaccgtgctgaaaatgagcgtgaaacgctggctgtggctgattatcgtctcagtactgatgtttgccacgaccgggagtctgctgtggtaccagggcatgaagataaacgcgaatatgaatattctccgcgagcagaaagagagtctggagaagctgaatgcgaagacatggggcgtgcgttatcacgaggacagcaacggacgttttctggtgttgccgaaggggatgaaagccgaaacgaactggacgaaggacaacggcaaactgaacgcagtgagactggtgcaggagtga

SEQ ID NO: 234676 - DNA, 357 bp, Klebsiella pneumoniae
atggggataatgataccgatgaaacgcgagaggatgctcacgatacgggttactgatgatgaacatgcccggttactggaacgctgtgagggtaaacaactggcggtatggatgcggcgggtctgcctggctgagccggttgcccgttccgggaagctgccgacactggcgccgccgttactgcgtcagctggctgccatcgggaataacctgaatcagacagcaaggaaggtgaacagcgggcagtggtcttccggtgaccgggttcaggtggtggccgcactgatggccatcgagagagagttgtgcagcttacggcaggtcgtcagggaacagggagcgcggaatgattgttaa

SEQ ID NO: 234677 - DNA, 936 bp, Klebsiella pneumoniae
gtgactaagccccccctcgatctttttaacgaccgtctcccaaacaaaccgtacttctcggacgatttgcacttcggcgtgcgcatcgccgggaaagagcgcgcgatcctggcgaaatacatccagttcaaccagccgcacgccatgttctggctgggattcgacgtcgatcgcaccggtgcggccatcgactggagcgaccggaacgcgcctgcgcccacgctgaccatcaccaacccggaaaacggacatgcgcacctgctgtacgcgctggaaaccccggtacgcaccgctcctgacggaaaaatgaagccgctgcgctacgccgccgccgtggagaacgcgctgcgtaaaaaattagaggctgacgaggggtattcgggactaatctgcaaaaatccgaaccacggccactggaaaatcgccgtgtggcagccggaactctacacgctggactggctggccgactcgctcgacctgagtgccgcgaacgacaaagaaatcgtcgccgactatggtttaggccgtaactgcactctgttcgataaaacccgcaagtgggcataccgggcgatccgccagggctggccggagtatgagcagtggctgcaagcctgctatgaacgtgccagtgcctacaatctgcaattttcgagccctcttgatgaaaatgaggtgaacggtattgcgaaaagtattgctaaatggactcatagtaattttgatgaagcttcatttaagaagtatgtggaagatacacacagtagttacattcaatcattaagaggaaaaaagagtcgtggaggggggcggaagaaaatgccagaagataagattcttgcaataaaagagatggtttctgaaggcatgtcttatagagagatctccaaattagaaaatgtatccatagggtttattagcaaacattgcaaatga

SEQ ID NO: 234678 - DNA, 651 bp, Klebsiella pneumoniae
atgcgttacgtaaagatttccctttcagtagctacttttttattgttttggtatgtctctagctttttcacagggtgttctgatggctggggttcttcatccatagggttgagaggagcgtgttcatatcatggcggcgttagtaagctacctataatcattatctttttgggcctcatcgctagtttttttgttttttttcttttccctgatagtgaaagtgctactagcaaaaaggatactttccctgttgtaaacaaggaaagtaatgagtctattccaaaaataaaaaccaatacgcataacgaaataaaagttaagcgcgaattgaaaatagaaatagagaatttaaacgataagaaattctctaaaatatttatttattctgatggtctttttattaaagagttcaatcctgaaaataaaatgagggtgagtaccaaaaggattaataaaaataaaatattaaaaataagtaatcttcttcgtgaagggaaggggggggctataaatcccattctcgatgtggaagcaaaagggtatcttgtgcgtttgttcgaaaatcatgcgcatgaaagtaaaacttattttattgatagatcggagaaacaagccttttcggacattaaagaactcatcaatagcgtctaa

SEQ ID NO: 234679 - DNA, 1614 bp, Klebsiella pneumoniae
atggccgcacccgctatctcgatccgtaacctcgatcaccttggtttggtcgccgcactctgccaggaactgggcattgcccgcatgatcgatgccttgctccccaaaaccccgcctttcaaggtctcacatggtgaagccttggtcgccatgatagtgaacggcctcggctttcacagcagcaccctgcacatgttcccgcaattcttcgctaacaagccggttgagcgcctgattggccccgggatctgtgctgatgacctcaatgatgatgtgctcggtcgctgtctcgatgccctctttgaggccgatgtcagcgccttgtatcaggtgatggcggcgcaagttgtcgagcggctggggctcaaaagcaccgcagtgcacctcgatattaccagcttccacgtcgatggcgcctatgactgtgccgatggggatctggtcggtaagctgcaactggtgcgtggttatagtcgtgatcaccggccagagctgaatcaagtgatccttgagctcatctgtgaaaatcaggctggcctacctgtctatatgcaggccctgagcggcaatagtaatgacaccaaagcctttgcccagaccgttcgtcgccatttgagcagtctcaaggccgcgcaggagtgccgttatctggtcggcgatgccgcactgtactgcgccgataccttgcaattactggcgcaacagcagcaactatttgtgacccgggtgcccgtcactctcaatgaggcaaagcaggccgtggcaaccataggtgcacaaccgctgaccgctctgggcaatggctatcatggccgttggcaacacgcgaattatgccggggtcgcgcaacgttggttgctggtgcgcagcgaacaagccagccaccgcgagcagcagacattggccaaaaacctgctcaaagacagtacccgcgagctcaaagccttcgccaaattgtgtgcccgacgctttgcttgtgaggcggatgcccaagctgagttgagctgttttaccgccagcttgatgctgctgcaactggatgccgaagtggtaggtgaacccgtttatacaggacgtggcagacccaagcgtggcgaagagccaattggccatcagtttcaaatcactgggttggcggcaactagcctggcttgcgttgaagaggcccgcaaccagaccggggtgttcatcctggcgaccaatgaccacagcgatacgctgaccatggccgaacttttggccacctataaagcgcagcagaatgtcgaacggggctttcgttttctcaagagcccggagtttttaacctcctcactgtacctgaaaaagccggagcggattgaagcgttgctcatggtgatgacctgtagcctgatgatttacgcagcgttggagcaccggatccggcagggattagtggagcagaatcgcagtgtggcggatatgaaaaagaaaccgacccagcagccgacggcccgttggatctttttgcgctttggtggcatccatgaatatcgactgggagaagctccgccacaagtaacggagctaacaggagaccagcagatcattttggaggtattgggtgagcgctatcggcaaatttattcctaa

SEQ ID NO: 234680 - DNA, 249 bp, Klebsiella pneumoniae; identical to SEQ ID NO: 17230

SEQ ID NO: 234681 - DNA, 3120 bp, Klebsiella pneumoniae
atgtttggaaaacttcttaaaagtgtctcatggcaggtgagagctgaactccgacggagcctgaagtcgaaccaggattacaaaaaacttcgctggaaccgggtggagagaatacttattgcctgcaccacccattacatccgggctatgctggtcctctggtccgcagccttcggggctgtttgcgtggtcgaatattttcgccctgtattacaacctttcgctctgcagcattttaagggcattaccacgctttcaggttggatgtctaatttactgggtagccagttgactattatcggtatcgtttttccacttgtcgtgggccttataagtgttctgtttcaaaaaaaatcagcaaggatgcatattcagtcagcatatcaacttcattccggatatttgtttgctggtctgagtggactgtcacttgccgcatttattgtggtgggcggtatgatgttatctgttggtgacagatatcttaatacagctttcgccgttactgcttttgtgtggatgcttttcaatattattctgtctatctggttcttcgtctccagtctgaatgtcctggatgagagcaagcgcgatcgactattgaataagttttttttgtctcagatagtggatgactacatacaaaaagcatatattctggcgtggctgcgctacccgggggctaacgtaggtgaaaattacctcggtaatattaaaatactgccttactcaatctctgagaaaaacgagatgcttcatgttaaatctaatgtcagtaaaggtgatgttgttacagacatttatataaggccatttttatttctgctgagaaggctagaggcggtagatgggcaggatgcggaaattatcattctgccctcctttggtgttcgttccggtgaactgactttaatgtcattgaaaaatatcaagcctgtttcaggattgtggcggtggttatttatccgttgtattgtaacaggacgccctgagaagaaaagggatctggatgatattacttttgatttctttggtgaggcttacgatgcacttaatgataaaaatattagcgtcttcagagcaggaattgaaagattaacagatacctatacctctatcaaaagaagttacaattacggggttgataaaaattatctggatgaagtaaaagaatcaggttttagccatactttcagtgattcattccattatgaattgagaaagttttttcgtgaatccgtaaaatcaacggaatattcaggcgaatatttccgtgaatcgatggccattccattgcatgtgtacagaaaaacacagagcacgtgttttaccgatttcagacagtttttactttcgcttttcagggtgtggcatgtgttaaacgactggaaagcgggactggggggccccctctcggccagccaggagctgactcaccaggcccttatccgcgagttcatcggactgtgggaaggctggagtatgaccacgatcactggcaaacccgggagtgaagattctactggccgcctgatgtatcatctgcataataccgtcaggcttcttattccgtcagtggttgccgataatgcctcttccgtgcgatatgctcacgacgttctctgcctctggtttaatcagaaccggtttacacggtactgggaggaagagtaccgctggcacagtttcttcctgactccggattatctgtccctgaaggagacagaaccgcagtgggatatgttactcaggggcagcatgtataaaaaagatgcggctttgtccattatgtttgcaaatgccttatctgatttgcggttgttaatggcagggtatcttattgctcattttgaaccgcaaaaaaatatagacttagccgatcttgtaaatcatctcattatgtctgaattatatgaagatagagatacacatgacacgctgacacctgcattcagatgttctgtcgatatcattgacatgatactgagaattgagcactgtaatctgcatacgaatacaagctggtacagcgggttatccgaaaccattgaggttatgaactcatataatgaaaggccttacattcccgggcgggtgtatacaggagtaaatgaggatattggcagcctctacggagcgttctccttactggccataaagctcgcgcgaccagctgaacaggttacgcagcgcgttaatgaagccctggcgggaaggttgttttcctatttcagtaaagacagaataatttctattcttgaacgactgaaacgagacccttcagttccttatgaaggttatattatttcagaagcggattatgcaacgaatgtggtgttctttaatgatgttctggataaatacatagatgtcttcaaccgtagtaaaacggcagatatcgttgctgctgaaatagaccaggagcgactcagaaatactgatactcgtcttacaaacgaacttcctggggcattgtctgaagatgttctgcttaaatacttcacgtttactcaaaattcagaatgtgatcgcaactggctggtgagatacattcctgttggtgtttccaaagattatgttgccagagatcttaatcagaatgtctacggagattttccttcggtatcagaagtgaagagaaatattctccacagactgcattatgaactgtggaaatcacaggctaaattaacaattgaggtcaataatctcgaaacgctcttaatggaagtcgcgcaacggtccgctgatcagaataactacattctgatgatctatggttcccgcttcagcgaagaactgagggagctggtctaccagccggcaaggcatgacgcgtttagcatacatgttgatgtatcggccagaggtagccgctctctgcccttcaggatcaataactgtcttatttaccttgtcctcaattccgaacagaaattttcacttatggtcagtgctgaatcctttggtgaactcaggttgttcaggtatccggatggaaccctttttaacactttctaccgcagcaacggtgatccacttgaaggtgtgatgaaaacgctctgggaaatggagatggaaattaccgatacaccagtggtgcggtttgaacatcgctga

SEQ ID NO: 234682 - DNA, 375 bp, Klebsiella pneumoniae
atgtcagatgtcatgacagattcagaacaagttaaagcagttgtgcaggggttttctgcatggatgccggtgatatcaaccctagccggtggtgtactggctggcggcgtggctttactggtgagcagggtgaatcaccgttacgcccgggaacgagaagcgactgcggcagcggagcgactgcgccatgagcagcaactgtctgaggataaacagcagaaagaacttctttacatcaccacggagctggtcttccaccttgaacgtttcgctgagcactgtgcaagagttgccacggatgccggttatgaagatcgtgacggtattaccgtaagcgtcaagccactgccgcctgttgcgattactaacgattga

SEQ ID NO: 234683 - DNA, 357 bp, Klebsiella pneumoniae; identical to SEQ ID NO: 129681

SEQ ID NO: 234684 - DNA, 243 bp, Klebsiella pneumoniae; identical to SEQ ID NO: 129683

SEQ ID NO: 234685 - DNA, 603 bp, Klebsiella pneumoniae; identical to SEQ ID NO: 168233

SEQ ID NO: 234686 - DNA, 537 bp, Klebsiella pneumoniae; identical to SEQ ID NO: 168232

SEQ ID NO: 234687 - DNA, 426 bp, Klebsiella pneumoniae; identical to SEQ ID NO: 168231

SEQ ID NO: 234688 - DNA, 2280 bp, Klebsiella pneumoniae
atgagtacaaaaaatataacgaggtatttaggaagtatattcttacttctttcactaacaacacaaaatgcttatgcagaaggttttgatctctttaaacccagcgatgataactggttaattaaacatatattccttcaattattctatcctgatgtatcgccacttggtcccatttcagaagttttccttgcaggtattcttgcttttgggggaatccttgcagggtataccatgcttgccggcacactacacacggcgaacgatggggagatgttaggtaagaaatggtcttctctctggatacctatcaggacaaccctgggtgtgtctatgattttacctatcaagggcgggttctgtgccattcagttagttctcatctggattgcagtgcagggtatagggcttgcagatcagacctggagtgcttttgcggaaaaccccttgaagggttcagtcgttccacaaccttacattgataaacaagtcaaagaactctataaagctggggttatgggttatgcctgtcttgcagcgatacaaaaagaccaggatgaaaatgaagctgatgcaaaatcagcaggaatcattgataaattattgaaaccttcaagagatgcctggaatccgggtatcactacaaccacttctaaaggagctaataatagtcaaagacttacgattgagttcggtaataaaaacaatgaagtatatagaaatgtttgtggttctatcacatatgatatgtctttatctgcaactcaatcagtatcatcggctccggcagcggcattagatttagttgatttagataagattcaacatgctcttgttcctgtgcatgtaacggcattgagtgcattactggcaagatcaagtcaaataggtaataagcttgttaattccgatgaaataacacctgaaagccttgcttccgatatgaatacagctactgatgcttataaggtcgctattgctcttgcagctaacacagcttaccaggatgcaatcagtaaagatgcggttgaagcaatgaaaaaagacgggtttgtttccgctggggcatggtttatcagaatagcttcggcacaagatgcagtaaatgctcttgcgaataatgttccaatgggtacgggtccgggaagctatttagaagagtcaactggttggtggttcgacacttctgggaaaacaaattacccatctgttgagaaagttatcaaaaaagcaaaagcatattttggtaaagcaaatatgattaataataacagtgccagtggtgcaggtgtaggtgctgatggtgaaattaatcttttagataaattactggcttatatttccccttctgaattaggtgcattgtttgattctcagtctatgacttctaaccctgttattgcaattgtcagtattggttctaaattaatcaactttgtaatagtaacagcctcagcaatagtagcgggtatagtggttgttggtactacttcattagtggcaagtggtggtgtaattgcaggggtaacttttgcaacacctttattggcaagtcttcttggaactcttttgtggaacggggttaaaatggcatatgtccttgtctggaagccattcataatatggtgtggagcggttattggttggttaattcttgtcgttgaatctctttttgctggtcctttatggatggttgctcaccttgcccctgatcaggatggtgttgtgggtaaaatggggcagggatatatgttagttctttcattgttccttcgtcccgtcctaatggttataggattcgttgcggcattatcacttatgacaccatgtcttatgttcataaatgcttttatcgcttttaacggtaatgcaattggtgtaggtgcagcggctttaatcggtaagattgtaatgataagcatctatcttaaagtagttgaagaagtaatgaacaagttattcggattaatacactctataccagatagtatcttacaatggatcggtggtggtttatctcgctctatgggtgattatgcaaacggcattgaagcaggttctacacaaaacactgaaagatttggtcaaggtatgagccaggttaatcaggcagtaaccaatgcgggaactgataaaataaaaagagtaggtgctgaaaggaaagaatcacttaaaggtaatatgactaatgccagtgcaggcgacgaaccgggaagtggtgcaggcaacaaaacaaaagcaagtgaatcaccaggcaacaagccaaaaacaaaaggttaa

SEQ ID NO: 234689 - DNA, 531 bp, Klebsiella pneumoniae; identical to SEQ ID NO: 158545

SEQ ID NO: 234690 - DNA, 936 bp, Klebsiella pneumoniae
atggcaacgtatcatctcagcgtgaaatttggcggcaagggtaaagcccttgctcatgccagttacattacgcgggaagataagttcagccagcgccaggatctcgagcacaccgaacacggcaatatgccggaatgggcgagagatgaacccgcccatttctggcaggctgcggatgcgttcgaacgtgccaacggttcaacgtacagggaaattgagatcgctctaccccgcgagctgaatgaagcgcagcggctggcgcttgtccgggattttgtgaagcaggaaacgggcgacaaacatgcatggacgtttgcgatccacaatccgaaagccagcattgacggcggcaaacagccgcacgcccatatcatgatgagccagcgcgtcaatgacggtattgagcgcagtcccgaacagtatttcaggcgctataacgccaaatttccggcgcgtggcggcgcgcgcaaggactcagggcataatttaacccctacagaacaaaaacaggcactgaaagccctgcgggagcgctgggagcgtacgcacaacgcgcatatgaaacgatatggctttgagcagggttttattgatagccggtcactgaaaacacagggtatcgaccggaaaccggaacagcatctcggttttgaagcagccggacgactggacgacagccagaggcaggatattaaagacagccggacgttttcagtcgtggatgtgcctgaacaggcgaaacatatcgaccacagcgaccgtagctggatgaatgccagcggtatcgaggtaaaccggaaggaactggtcagatctctgacgcatgatatctcgcagcagtacgggcgggagatggctgcacgggtcacaaaacagggaaatgttgaaatagagcgcgtgaaatccctgtcacgcggattttccataagcaggtaa

SEQ ID NO: 234691 - DNA, 387 bp, Klebsiella pneumoniae; identical to SEQ ID NO: 158544

SEQ ID NO: 234692 - DNA, 252 bp, Klebsiella pneumoniae
atgatgactacatatagcttaactgaaattttcatgcaatgggcagtatttgctctttgtgttgtaattgtaaaacaattcactcgctttgaagcatgtgaagctatcttttctgaacataaaacggttttacagggatttgctttccttgcatatcgtgtagttttatacactctcatgctcattagcttgattgcaatgatggttgctattggctactcactcggctatttaggtgtgtatcgtatgtaa

SEQ ID NO: 234693 - DNA, 192 bp, Klebsiella pneumoniae
atgataaatagtaaatataattgcaaagaaatatttgaagagttaaaaagtgatggtgttttggattcattcgtcgcatgggcatcaaacatatacccaaacatacatttaagtcagccatgtttcgaaagttgctatgaaatatataaattgaatgagaatttttttaaagaagaatggaataaaaaataa

SEQ ID NO: 234694 - DNA, 252 bp, Klebsiella pneumoniae
atgagggaacgctttgttgatcgactgattctccgggttaactttggcgtaaacgaggcgcgtactccagcgctggttatcttcggtaatgagctcaaccttaccggcaatgagttgaccatctccgcccatcgcatcgcccagtggatacccttgttggtaataaccatctttatagatgtggtgggtatagctgtaatggcactgttgcaaatagtcggtggtgataaacttatcatccccttttgctga

SEQ ID NO: 234695 - DNA, 1593 bp, Klebsiella pneumoniae
atgagtcaggactatctcgcccgtatcgctgcgctggaagacgcgcttcgccagaaagacagccagctcagtctcgttgctgagactgagtcgttcctgcgttcggcgctggcccgcgcagaagagaaaatagagaacgaagagcgtgaaatagaatatctgcgggctcagatagaaaaactgcgccgaatgctgttcggtacccgttcagaaaagctacgccggcaggtcgaagaagccgaagccctgctgaaacagcaggagcagcaaagcgatcgttacaacggccgggacaatgatcagcaggttccgcgtcagttgcgccagtcccgtcatcgtcgcccgttaccggaacatcttccccgcgaaataaacagactggagccagctgaaaccagctgtcctggttgcggtagtgatatggcctatctcagcgaagtcagcgcggagcaactggagctggtctccagcgccctgaaagtgatccgcacggtcagagtgaaaaaggcctgtacccgatgcgactgcgtcgttgaagcgccagcgccctcacgtcctatcgaccggggcatcgccgggccgggtctgctggcccgcgtgttaacggccaaatactgtgaacacctgccgctgtatcgccagtgcgaaatctttgcccgtcagggtgtggatctgagtcgtgcgctgctctccaactgggtggatgcgtgctgccggttaatggccccgctggatgaagccctctaccactacgtgatggactgccgcaaactgcatacggatgacactccggtgcccgtgctggcgccgggcagaaagaagacgaaaaccgggcgtatctggacatatgtccgtgataacagaagcgcgggttcatcagatccgccagcggcatggttcgccttctcaccggaccgacaggggaaacaccctcagcaacatcttcggcactatcatggcgtgctgcaggcagatgccttcgcagggtacgacaggttgttcagcgcagagcgtgaaggtggcccgttgacagaagcggcatgctgggctcatgcgcggcgcaaaatccatgacgtctatatcagcacccggacggccacagcagaggaggctctgaagcgcatcagtgagttatacgcgatagaagaggaaatacgcggccttccggcatctcagcggctggccgccagacggtcccgaagtaaaccgttgctgatatccctgcatgactggttggtggagaaaagagccactctgtcgaaaaaatcccggttaggcgaggcgttcgcttatgcactgaaccagtgggatgccctgtgttactactgcgatgatggtctggcagagccggataataacgctgctgagcgcgcgctacgagcggtctgtctgggcaagaaaaactacatcttcttcggcagtgatcatggtggtgaacgtggtgccctgctgtatggtctgatcggaacgtgcaggctgaacggtatcgatccagagggttaccttcgccatatcctgagcgtattgccggagtggcccatcaacaaagtggccgaactgctgccatggaacgtagatctcaccaataaatag

SEQ ID NO: 234696 - DNA, 351 bp, Klebsiella pneumoniae; identical to SEQ ID NO: 159238

SEQ ID NO: 234697 - DNA, 450 bp, Klebsiella pneumoniae
atgaaagatattgatgtaggttttacgcacgttgcgtttgttgttagaaatttggaaaaaagtattgatttctatagccgttatgctggcatggaagtcgtacacaggcgagagcctgatcttccggaggtacgtaaagtcgcgtggttaagtgaccgaactcgcccttttgcacttgtccttgtccaggttgatgctgtgactgacacccctctaggtaatttcggtcacttgggagtagcttgttcaagcattgaagaaatcgacaataaggtagcgatggccagaatggaaggcatcttgcgaaaagaaccggttcaggcaggcgaaccggtaggttattatgtcttcttcgctgatcctgatggtaacacacttgaactttcttatggtcagaaagtcgggatcgaggctttccgtcaggatgataaagtgcctgcatctcagtaa

SEQ ID NO: 234698 - DNA, 219 bp, Klebsiella pneumoniae
atgaaactacgcatcacaagagcaatcggcctcagcaagttctcgccacgttggattaaggttatctgtttacggttgactaaaaacgatattgagcgttccctcaacgctcttctggccacaatcgatgaatctgaacttacccctgagcaagtcaaagcattaagggaatgcattgacagaattaacatcgcaagggggaagggtatgcaggcgtga

SEQ ID NO: 234699 - DNA, 717 bp, Klebsiella pneumoniae
atggcaggattgggatttaatattgctggtgcagtctgggattcacgtaatgtgatcgggagtatttacccgctgccgtcaattgcaacaataactctgtacggttcaggtgggcctacaccggtacttggttccacgccgtccgtcattaatacaccgataattaatgctaattcgtttatcggtaattcaatggggggtgggtatgacactggcgtatctgatagcgtgacaaaaacgctgatgttgctatgtaagccatcaacagcggggacaggcaaatcgaaggggattgggacatacaccggctctgggtcgccaatcggggacacgttaatttttgattcaacaactaatcgcattagttcaattgccggagccagtagtggattcgttcaggatctcgtcaacgcagaaatttacgacggaaaattttatgtcgtatttgcggatttcgctctgtataaaacacaaatttttgcttgcaaggaaggtggtctcattgccgggcccggtgtaggtttaactactcgcgcagtcccagataaaaccatccgcattgccagaacgtacgaatctgcggacacgtcaggaaatgccgatattgaaattgccgcatcaggcatctggtctggagcgcttttaacgagtgagcagaaattacagatgcgtaacgcactggtcagtcgtcttggggggattatcgcaataggttaa

SEQ ID NO: 234700 - DNA, 141 bp, Klebsiella pneumoniae; identical to SEQ ID NO: 36145

SEQ ID NO: 234701 - DNA, 141 bp, Klebsiella pneumoniae; identical to SEQ ID NO: 102393

SEQ ID NO: 234702 - DNA, 1068 bp, Klebsiella pneumoniae
atggggctgcaaggtcagcggaagttgctcgacaacggaaaagacatcgccgaaaagctggcagacagctacaccaacagcacctttgataagaagtctggacaatggaaaggtgggaacgctgctgtagacacagccctgaacatgggattcacaaaagctgatttaaagaaatatcaatcaaatccgtttggctttgtctctgcttacaccaacaccatgcagggaaaaggctattcacaagagcaaatccttcataatctggaagacctagcagacgatttgggcttgtatcacaatgcatttagtaatggtggtaaggcactcactgatcaagttgatatattaaaacgtaacggtcaatggttagataaggaacaacaggatcagctcgttgcctatcgcaagtttaatcaggaaatgagtgtcctttccgatagccagaaattagccttctttgaaggattcatggaatctatagaccctgaaaccatgcgagagtttaaggaagctatgcaagatgctttgccattcttcaaaggattagggaaagccgctggcgatgttgttgagggattaatgaagttaaccaactggatcacaggaaagctgaaccttctgaacggtgataacaccactaaagaggcagtgagccagcactacggcactacaagcgcccctgtagctcctgggagcaatcctgtagcgaataattacggggcaactcagcccagagcagacggcacacacgagccaaatatcttcgacacaatgcgcgggtggtggtatggcacaagcgatgccagggatgttaccagctattcgtctaacaaggatggaagctattctcctgtctctatgctgaaacagagtgcaacaactaccgctacgcctacacaagcgcctgtagtggctcctgtggtgctacagaataacctaccggaggggatgattaccctcaacattgctcctgatccgtcattcggaaacatgctaaatgctactgtggatcagaagataacacaggccaatcagcgtcttgttttatctatagcgaggctttgttga

SEQ ID NO: 234703 - DNA, 303 bp, Klebsiella pneumoniae; identical to SEQ ID NO: 96991

SEQ ID NO: 234704 - DNA, 1461 bp, Klebsiella pneumoniae
gtgcagcagtacggcaatcttaatggtactgaaggcaatctctcgcaactggttggcgtctcgctgctgagcacgattaatgtgtcgctgttgtctggcagtagcttccgcttcaacgtggacaacaacacaacagaggatatgacggttgatgtcagcggcgtgtctctgctttcaacggctgggctgttaacgtcgatagtcaatctgctgggggctggaaatacgctgacagccgatctgtcggtgattgatatcgcgactggacgcgtagttgctatcgacgcgggaagcgtgagtattagcgcaacgttgcttggtgggttggtctatagcggaacagcttcctttgagaatctgcctgctggtagctatgcgctggcgatatcctcaccaaattccgatggagttctggtgagcctgatcaacacgctcgcaggtgcaggagtagccacctttgtagaagcaacggtaaccgattcgctcggttatagcggaagtaccgttacaggcaatgtgctggagggatcggataacggcgatatggccgatagcggtaccgaccttacggtaacgtcggtaacggccaccactgctgcaggtgagactttctcagtgaatggcggcaccatatcggtaacgggtgcttatggcgtactgactattaacgctgacggcagctatagctaccaggcatcaggtaaggccgggtcggcaggtaatgcggatgtatttacctacaccattacggatggtaatgggctgcaatcaaccaccaccctgactatcaatatcggtcaggaggtcgagaccgcccaggctaatccggatacgcaggcttattacgtcggcaacgtcgaagataatcttgatatccaggggggcaatgtcgttcaggtggcgggcctgtcgctactgaataccgtgaatgttgcgcttccgaccaatggctttaagtttgtcgtggctgaagggactgaacaggatgtgacgttaggcgtttcggggtccactgcccttagcatcgcgctaggcgccgttaccctggatctcattctgatcaataccgacactaaccagatagtcggcgttattaaggatggaattacagcaacgccgacaggtttccttggattaagccttgaatacgcgggaggaggggaatttgaaagaattggcgccggtaactatatggttgttatttcgtcgccgactactgaaggattgattggttcgatactgaatctgaatttgggcaccagcattagtatggaggtgacagattcgactaaatacgtgacggggaatgttctgcacaccgatagcgatggcgatgttggcgatacaggtaatgaaattaccgtaagcagcattcagtttggatcgcagatcgaaacagtcactgccggcggcgtcacgattaacggtacatacggtactctgataatcagtaagcgttaa

SEQ ID NO: 234705 - DNA, 267 bp, Klebsiella pneumoniae
atggcgacgctggggcgtcttatgagcctgctgtcaccctttgacgtggtgatatggatgacggatggctggccgctgtatgaatcccgcctgaagggaaaactgcacgtaatcagcaagcgatatacgcagcgaattgagcggcataacctgaatctgaggcagcacctggcacggctgggacggaagtcgctgtcgctctcaaaatcggtggatctgcatgacaaagtcatcgggcattatctgaacataaaacactatcaataa

SEQ ID NO: 234706 - DNA, 645 bp, Klebsiella pneumoniae; identical to SEQ ID NO: 168248

SEQ ID NO: 234707 - DNA, 141 bp, Klebsiella pneumoniae; identical to SEQ ID NO: 36145

SEQ ID NO: 234708 - DNA, 174 bp, Klebsiella pneumoniae
gtggaaagagatgaatatatttcaccgaaatgggattccggaggtaaggtacacaactggaaaagatatgctgaaccggaactgattgctatctgggacacattcagcgaagagcaacagaaggttatcgctctgactcttgaggaagtcgccaaccgggaagagtattattga

SEQ ID NO: 234709 - DNA, 177 bp, Klebsiella pneumoniae
atgaaaggggaaaataatacaatcccatttaacactggcgataaaccaaaacttcctaaaaccgataaggttaagttttatcatgaagacgagtatgcttttgctcatttcatgtatgacgatacagcagccgaacaagacaatgcagagactaaaagcgagaataacaacgactaa

SEQ ID NO: 234710 - DNA, 231 bp, Klebsiella pneumoniae
atgaaaatcgagttagccattgatcgcatgaagaaacttcctgatggagctatacctgcactagagtcagaactgctcaaaaggctcagcaagcagtttgataattgtcagctaacgatcaagcgtgccagcaatgatggtctgagtgttttcgggggcgacaagaaagaggttgagcaaatcgtgcaggagacctgggaaagcgccgacgagtggttttggctttgttga

SEQ ID NO: 234711 - DNA, 522 bp, Klebsiella pneumoniae
atgccggatggcggctacgccttatccggcctacagggtcctctcacaggctcaaacctcgcaggcccgcgcaagcgcagcgccgccgggcaagatatcagacacggtacctgtaatttcgccgggtggcggctgtcgcctggcccggcctacagggtcctctcacaggctcatacctcgcaggcccgcgcaagcgcagcgccgccgggcaagatatcaggcacggtacctgtaatttcgccgggtggcggctacgccttgcccggcctacaggggcctctcacaggctcataccccgtaggcccgcgcaagcgcagcgccgccgggcaagatatcaggcacggttcctgtaatttcgccgggtggcggctgtcgccttgcccggcctacaggggcctctcacaggctcatacctcgcaggcccgcgcaggcgcagcgccgccgggcatgaggagatttacttcccggcttccggatgggtatcgaacgccgccatcaccgccgccagcgccgcttcgctga

SEQ ID NO: 234712 - DNA, 261 bp, Klebsiella pneumoniae; identical to SEQ ID NO: 215051

SEQ ID NO: 234713 - DNA, 711 bp, Klebsiella pneumoniae
atgcgtccagcaggccgtagcgctaatcaggtgcgtcccgtcaccctgacccgtaattacacaaaacacgctgaaggctccgtgctggtcgaattcggtgataccaaagtgctgtgcactgcctctattgacgaaggcgttccgcgtttcctgaaaggccagggctggatcaccgctgaatacggcatgctgccgcgttctacgcacacgcgtaacgcgcgtgaagcggcaaaaggcaagcagggcggccggacgatggaaattcagcgcctgattgcccgcgcgctgcgcgcagcggttgacctgaaagcgctgggcgaattcacgattactctcgactgcgatgtactgcaggccgacggcggcacccgcaccgcctccattaccggtgcttgcgtggcgctggccgatgcgctgaataagctggtcgccgccggcaagctgaaaaccaatccgatgaaagggatggtggccgcggtctccgtcggtatcgtaaatggcgaagccatctgcgatctggagtacatcgaagactccgccgcggagaccgacatgaacgtggtgatgaccgaagatggccgtattattgaggtgcagggcactgcggaaggtgagccgtttacccatgaagaactcctcactctcctggcgttagcccgaggggggatcgagtccattatcacgacgcagaaggcggcgttagaaaattaa

SEQ ID NO: 234714 - DNA, 873 bp, Klebsiella pneumoniae
atggcacatggcaaattaattaatatctgggaaaaaaataccatccctccattaccgtggtgctcactaaacagagcagcaacactattgaagtgcgaattatcagacttctcagcatggatgaatcatctaaatcctatgattgaatttaaacaaagttcagtggaaggtactctgacggttacattgaataactatgataacccatatgagtatggggatatttcaaaagaatatattgaccttatacctgtggcatcacgaggcggattgactccaacttcgccaatgatagataccgcattcaccattggtaaaaataaaaaaacactggattttgtgggctactttgatggcatggcatccgttttggaagggatgtatttaattgaaaatgatgagctaatggtccttccgcaagatttgttctgcgagattcctattgcaaaactaggcgctccatatgttggtgaagactgcccggtactgtcagtagatgatattttaattagacctgtttatgcgtattgctacgatgctcagccaattgttttgagtatgaatgatgtttatctaagcagggaggatatagagctaatttacaattgcggagtccaaggtatagatttaccagaagatagattgaccgtgtctgaatcaattaaggctaagccaaaaattagggaaacggcaaagcaatctagatttattgcttatctaataaatgctctaggcgtgaagcaagacgaactaaaaacactttccatcaaaaatattatggatagattaagccatatggcaaatgagattaaatttcctgatgtaacggatgactctttacgggattggttggaaaaagccggttataggtaa

SEQ ID NO: 234715 - DNA, 132 bp, Klebsiella pneumoniae
atgccaaccattgatcgatgggttaaaaacggcacattgccacgcccggtgaaactcaccaataacgtgaccgcctttgatgcggtagagattaacaactggctggcagagcgtcggggaaaggcggcgtaa

SEQ ID NO: 234716 - DNA, 570 bp, Klebsiella pneumoniae
gtgagaaacagaacgcgcagctataccaccgacctgccccgcatagggttgccattccttgcgcacatgcgtagcaggctggcggacgccgaaccggggacgcagattcatacccagaccgaaagcggaaccctgcatatcttccgacaggcagacggctacgccatgacgatcaacggcgttacacggacaatcagaaccacgaccacacaggctggctacggagttcggcaatggtatgtttgccctcattgcacgaaacgggtagcaaagctgtatatcggcaggaaagatatcggatgccgggaatgctggaatctccactataaaagccagagtgccgacagactggacaggatgcgcatgaagatacgccagcagcgatacgcgatatggggcaacaatgaccttgccaataatctgtttaatgacattcgcatgttcccgaaaccaaaggggatgcgctgggctacgtttgataggaagcgggcagaattatcagttatggagatggcttactggcaggcattcagtccggtagtggacaagataaccgggcgtgtgcggtag

SEQ ID NO: 234717 - DNA, 1014 bp, Klebsiella pneumoniae; identical to SEQ ID NO: 193268

SEQ ID NO: 234718 - DNA, 462 bp, Klebsiella pneumoniae; identical to SEQ ID NO: 193269

SEQ ID NO: 234719 - DNA, 645 bp, Klebsiella pneumoniae; identical to SEQ ID NO: 92939

SEQ ID NO: 234720 - DNA, 657 bp, Klebsiella pneumoniae
atgaaacgctactcacttatctatgccgacccggcctggtcttacgggaacacgatcagcaacggtgcagccgtcgatcactaccccaccatgagcttgctcgatatgaagcggctcccagtatgggagcttgccgcggataacgccgtgctggcgatgtggtacaccggcacccacaaccaggaggcgatcgagctggccgaggcctggggatttacggtgcgcacgatgaagggcttcacctgggtgaagttcaatcagctggccgaactgcgcattaccaaggctctggcagagggcgatgtgaccgatttttacgacttcctcgccctgctgaatgccgagacgcgcatgaatggcggcaaccacacccgcgccaacacggaagacgtgctgatcgccacccgcggcgctgggctggaacgaaagcatgctggcattaagcaggtggtctacagcccgctcggcgcgcacagcgagaaaccgtgggaagttcggcaccgactggagctgctctacggcgacgtgccgcggattgagctgttcagccgcagcgcagcgccaggctggagccactggggcaaccagtgcgccaccgcttccgttgaactgatccccggctgcgccatcgacgttgtgaagacggaggcggcatga

SEQ ID NO: 234721 - DNA, 213 bp, Klebsiella pneumoniae
atgaccatcactgaagggttttgcactgacatgtattgcgactgtgatggttgtcagacaggggaaatctaccctctggctcggattgaactcaccggcaggaacatgactgatgtttctcagcaggcgcgcaaagctggctggcgcatcagcaaagaccgccagcgctgctatgcgccgggccacaaaatttcacggggagccaaccaatga

SEQ ID NO: 234722 - DNA, 132 bp, Klebsiella pneumoniae
atgaccaataaccacttttccagagaagaattgctcagcatcatcgagactgaccatctgcaatatggtgaggcttctatgttggcccgcattgcgctggccgccgctggcatcaaggtggaggatgagtga

SEQ ID NO: 234723 - DNA, 222 bp, Klebsiella pneumoniae
atgaccaaatatgaattactcgactcaaaaataatgagcaaaattgatgcgcaccctacgccattttccagtctgtacgtcagggatgtagcagaagaatgcgtccgtattgcaaaggatgagaataagccagagcctttccgcattctcgatcgccggcttcaggcgctacgtaaagcgggaaaaatccgcagtacatccaagggctgggtgagggcttaa

SEQ ID NO: 234724 - DNA, 684 bp, Klebsiella pneumoniae
atgaccagcaaattaaccagagagcagcttcacgaacgcgctcgtgaaaacgtcaaagcgctgaaaatggcatcacgacagacagcattcgaaagcgctcgcgaagaaatattggcagacctgcagctggctgaactggcgctggccgcaatggaaagcgagccggtggcgtggactgatgaagaagaactgcgcgatgtaaatgatgctggaatcggctatttgtttggcattgaccgagaagcgaataaatttgccgatccgcgtcgccagatcatgctctatcgccacgcgcagcagccggtagtgccggaggaagccacttcggacagtatcgagattcttgccagcgccaggcgtcgtgaccacgctgtattccagtgggatgaagaccaacgaaatgcggccgctgattcctggaatgcctgccgcgccgccattctcgcagccgccccgcagtcacccggcagtgaacccgctaccgtgccgggtaaatggattccggtaagcgagcggatgcctgaagaccgcatatcggtaatcctatgggatgctgaaattggagaagtaacaagcggtcactacagccataaaacacagactttttatcattgcggcgatgctatcgaaaacgagataacccactggatgccgcctccatgcgccccgcaggaggtgaagtga

SEQ ID NO: 234725 - DNA, 597 bp, Klebsiella pneumoniae
atggcgcaaacactgcaatttgagaagagttatcaaaacgtactgattcccgcagagccgggaaccagcgaatacctgcaacttatcccggtagggcaactgctttgcggtgagttccgcaagcccaggaattacgcattccacaagaagttcttcaagcttctgactctcgggtatcactactggacgccttccggtggcctcattgagcccgctgagcgcaccctcatatccgggtttatcgacttcctctcatccgacctcgatcagcgcgctgcactccagaacgccgcggagatgtatctctcctcggtcggcatctcccgttcccgcgatatggcgctgctgaaacacttcgaatccttccgcgagtgggcaaccattcaggctggcttttacgacgaataccagatgcctgacggtagccgtcgtcgtgtcgcaaagtcgatctccttcgccagcatggacgacagccagtttaacggcgtctacaaatcagtgctgaatgtgctctggaactacattctgcgtcgcaaattccactcgccggctgaggctgaaaatgccgccagtcagctgctgagctttgcggggtga

SEQ ID NO: 234726 - DNA, 351 bp, Klebsiella pneumoniae
gtgaagatgatcattttcgctttgctcgtgctgatggctgtgctcgttctgttacttctgcgcaaatatacccggctggagttcgtagggcatgccagcctgctgctgaaaacatggtctgtaaagctgggagctatcggcgcgctggttggtgtatgggcgcagtcgttcccggatgctgcactgcacgcctgggcgatgctgccgccggatatcaaaaccatcctgccgccaaacatcgttgcactgattagcccagcgctggtggtactggccgtgctatcgcaatacgtacgccagccagcattgaaagataaggccgacaaactgaaggagccgcagcagcaatga

SEQ ID NO: 234727 - DNA, 195 bp, Klebsiella pneumoniae
atgttaacagtaaaagtgatgtcaccagatggtggtgaagaaatccattgcggccggagcattggtttcaatcccaaccagcagagtatctcagtgtcgggaatggaccagaacgttttcctgaagcagggagaagtggcgtacgtgatgaacgcaaacggaaagaccatttcccgttacgagcacttgacctga

SEQ ID NO: 234728 - DNA, 921 bp, Klebsiella pneumoniae
gtgagttcaggcgcaaaacggatcacggcgtttatccgtgaaactacccccggtaccacgccagtggctggcgactgggatctgctaaaacgcgcatccttcggccttgggccgactcaaaacaccaacgacaacgacgaaatcggcggctcccgaatggcacagggcgtaagtcgaggcactgtcgatgttggcggggatgtggagacaaaatttcgctggggccagctcgatgattttctcgcgtcatgcttcggtgccgaatgggttgataacatcctggcgatgggtaacgaccggatctctttctccatcgcgtcatacgatgctgatgtgggtatcgcgtcaattgcccgcggctgtcaggtcggcaccctccagttagaaatccccaacgatggtgatattgccgccacactgacctttgccgggctggactgggcgacgaaggctgatgatacgagctatttcggaacgcctgtcgataactccggtgagcttcgttattcattcaaagaagtcaccaatatcaaactgaacggcgtagacggcggcacgggattctgtgtcgattcgttcaatatccagttcgacaataacctgcaaacgcagcgctgcatcggtactggatcggcgttcgccggggcgaatatcccgacgacctttaccccgtccggtagcgttaccttgtcctggtctaaagcggcgtgggatctgtatcagaagacgttcacaggtgagctgttcccgtttgagttcaccgtatcgaatgccgagggctcttaccgcttttacttgccgaaagtgcaggtagttgctgactggccagacggtggcaataccgacattatccaggttcaactggatattaccggcgctgacgaatcgccaaccgtgacgcgtactcctgccggcagttga

SEQ ID NO: 234729 - DNA, 432 bp, Klebsiella pneumoniae
atgctaattatttccccgcgaattgacctggacggcgaacgctggttctcaccaatggaaggtctgcgcctgctggtcgccagtagcgaaaacccgcaataccgttcccgcaatgcactggtgcgccgccacatcgacaagatggacgctggctataaggttggtaccactgaattcgaccttgccagcgtaggcgacattgattccgttgacgacctgctgattgataacgtggcccgttatctgctgaaaggctgggaaggggtaggcgaactggttgacggcaaagaggtcgctattgactacacgccggaacgcggcgcggccatgctgaagcagcaccctgagctgtactggcagatcatggctgaagccgcaagcattgctcagggtaaagagcagcagactcaggaaaccgtaaaaaagccatag

SEQ ID NO: 234730 - DNA, 225 bp, Klebsiella pneumoniae
atgattatatataccgatcaacgcacaaaccagtcgtcagccgtctcccaggcgtctttaagagtggtctcgacaaattctttggcgatttccttatcagtcgcccacgtgacgatcgggccgttattgctggcgcagctcccggctccggtggtggtggcgcgtatgacctcgggtttaccagcacggcttataccggcggcgatggcgcggatggcatcctga

SEQ ID NO: 234731 - DNA, 201 bp, Klebsiella pneumoniae
atgccgggcggcggcaacgccttgcccggcctacataacacaggcatcaatacactgtactatcaaacggttgcattgatatcccaggcccgtgcaagcgcagcgccgccgggcaagaacagcgggcgcggaaccgcttttatgccgggcggcggcgtcgccttgcccggcctacataacacaggcactaatctgatttaa

SEQ ID NO: 234732 - DNA, 1443 bp, Klebsiella pneumoniae
atgcgtccttttttacccatcaagagagtatttgacaatgaatttatttctttagtcacagaactaattttcctgataagaagttatggaattgataaagtcggtttttctaatataaaaaaagattataaattatttatttctgcagtacatgatggttggaaaaaagcacaaataaaaatctctcacaatgtcatcaataaactcagtgaaattgaaagtctggagataaagaaaaaagaatttcatcgacaaaaaaacaaagatgccaaacaagagtgcattaacaaaatcaacactttaaaatcagaaattttaattctaagacgttttattgactctatcgtttggactattctcgaagatgaacactcaacgattaggcgattacctttagatgataatcttgacaacctctcaatcaagaatttaaaagaagcaatacaaacacttgaggagattaattccaacccatttacaattggtatctcatctgatctaacgacattcatacacacaggagatttattagtaagaaactattttgatggcactctatctattgtcgagctgaaaacaggcaaaaaaaaccttgagttttgcgatgctgctaatttttctctacattcagattgtcctatttttgatgagcaatatacaaaagagttatcgcctgtcgatttaaaacactatcaaagaacgaaaaaacaactacaacatatgaaagatgtaacaaacacaataaatacaggagagggatatgatcactttcataaaaaaacagtaaaaatccaagataataattatatacctaattacttttcagaaaaaataatggattcttggcgacgcatatctcttggaaaactttgggatatacacgttatagacgaatgcttattcattggaacttacaaaaacgttgaaatggggtttgttgggttcaatagctggatgaaagtctcaaaattcaatggcactgtatttaacatcaacgatagctttaaattaaaattaaccaagccattgttaaacttgaaccttcccaatgagactatcaaagatattcttcttggtgaatttattgtcgttttatgcttagatactgaaaaattctataatgaagcaaataagatacatccggggattttgaagagaaaaagggtaactaacagtaaactaaacacaatggatttggttactgtcaatgaagaggccatttacagtgaaaataacggacaagagatttatttagggacaggttttctcagcagaattattttcgactttcaacggccaaaaaatatcataaattggatttataaagatagtgatgtaaaaagacgtgacaatagagaaaaaaacaagaaaaagaaaattactcaaaatgccaaaaaaagcaagtcaaagatagctaagcttagcaggagaaaacaaaattaa

SEQ ID NO: 234733 - DNA, 909 bp, Klebsiella pneumoniae
atggcttttgagcgccacattaaggatcaagcgcaggacaagccctggttaggagaaaaagcagataagcgtcgagttaccgacctcgtagatacttggttcaatgcacatggtgttacactctctgatggcctcaagcgtaagggcgcaatggaatttgcctgctttgctatgggaaatcctcttgcaacagaattcaatgccaagctttttgcaacctaccgcgagcaacgtttaagcgggaaaatcacacgttcggatcgtgtaaaaacggtggctccccgtactgttaatcttgagctggcgtatttccgtgctatgttcaacgaactaaaaaggctggatcactggagtttgccaaacccactcgaaaacgttagggaatttaaaattgatgaggctgaactgacatggcttacagttgaagaaattaagcaattgctagctgagtgtgagaaaagcaaagcgacagatttagtgactattgttaaaatctgccttgcaaccggcgcaaggtggggcgaagcggaatcactaacaggcaagcaaatcagccccggaaaaatcacttacatcaaaactaagggcaagaaaaaccgcgccgttccgatatctgatgaactttatgaagctctccccaaaatacggaattcaaaaccaatatttacgaggtgttattctgcgtttcgtggtgcaattaagcgagcaggaattgaattgcctgacgggcaattatcgcacgttctaaggcatacctttgcgagccactttatgatgcgcggaggtaatattctcgtactacaacgaatacttggacataccgatatcaaggtaacaatgcgatatgcccattttgctccagatcatttaactgaagcaatatctttgaaccccttaaatggtatataa

SEQ ID NO: 234734 - DNA, 615 bp, Klebsiella pneumoniae
atgtcaaacacaaaagaaacccctaaggcgatctcagattacaacttcacatcccaaagtggaggtaaagaggcaattactcgcatccttcaggcttatggattcagtaccagacaggctttgtgcgatcatctaggagtatctcaaagtacaatggcaaaccgttggatgcgcgatacttttccgcacgactggcttattgcatgtcaccttgatactggcgcatctatgctttggcttactacagggcaaggcagtcccaccacaaaaataatcaatgacagcggattgcttttgcaattaaaagaaatctcaaatgggatttactcatcatctgaacaggtccgttatgacgcctgccttatccccgcagatgcatcagctcctttcttggtgaagtttgaaaaggctttctatcttgtggatgagttcaagggagaaatcaatgatggaatctggctgattaaaatagatggttttctgagcatcaggcaagtttatcgccttccaggcgggcgcttacgtgtagagaatggcccagcatcctttgaatgcaccccatcggatattgaggttaacggtagggtgctcagcaaaacagcatttacagaatga

SEQ ID NO: 234735 - DNA, 510 bp, Klebsiella pneumoniae
atgtttgattatcgcgtttccaaacatcctcactttgatgaagcctgccgcgctttcgcacagcgtcacaatatggcgaagctggcagaccgcgcaggcatgaatgtccagacgctgcgcaacaaactgaacccggagcaaacgcatcaacttacggcgccggaaatttggatgcttaccgatattacagaggattcaacactcgttgacggtttcctggctcaaatccattgcctgccatgtgtgccgctgaacgaagtagccagcgagaaaatgtctcattacgttttgaatgctacagcagagatcggtcgcgttgcagcaagcgctgtttctggcgaacaccagacaacaacggaacgccgccaggttatcgaaagcatcaattctgttactcgtttgatggcactaacagctgtttccctgcacgcgcgcctacagtacaacccggcaatggcaagtgctgttgatactgtgacgggcctcagcgcttcgttcggcatcatctga

SEQ ID NO: 234736 - DNA, 201 bp, Klebsiella pneumoniae
atgctgactaaagaaccatcattcgcgtcacttctcctaaagcaaagcccggcaatgcactacggtcatggctggatcatggggaaggatggcaaacgctggcacccgtgccgctctcaggatgaactgctggctgacctgtccacaaccaaacaggggaaatcatggctattgaaggcgctacggcgacttttccattaa

SEQ ID NO: 234737 - DNA, 975 bp, Klebsiella pneumoniae
atggggttaggattaaaagacggtattttgcatacagcagcatttcataataaagacactaacgagttgcttttgcctaacaaccactgccatccaggatttataactgtattggcagcttatattaaccatcatcggattaccgaagaaaactgctctttacctggccgagactatatgagtgcaatcaatctgcacggtgctctttgggggacagaccggtatcagcaggaaagggtaaacgtaggtcggcattacagcttagttactgctcttactagtgttgatgcggtagatatcgctacaactagcatcaataattgcgttagacagttaacttttcctggccgagctccgggagactatccgaagggactaaccgacctgacgcatgttatcggagagttgcatgacaacgtttggtcgcatggaaaatcgtcaggtttctcatttgctcaacgatctgctgttccgtatacacaaagaagagagcattatctcgagttctccctggcggactgtgggttaggttttttgagagagttaaggcgggctgatattcctggtatagaatcacatcaggatgcaattgaatggtgcatacaagagggtaactcctcaaagcatgccgatctgcaggatgactgggctcagcaggtacctggtgactacatgggagggaacctgttcggtgcaggcgttaaagtaaaagaaaaagagaataatcatcaagggcttggcctccatcacttgatgaaattggttaaaacttacaacggagaattgcaactggctacaggaaatgtatgcttagaggcaagtggtgacgaagtaacctacactgagttgagaagtgcttggcctggagtggctatttcttgtcgttttaagattaatgaactggctgttgataaagataacgaagaaaatgatcctcagcttatggatatcatgcgggcgttaggaggggagtaa

SEQ ID NO: 234738 - DNA, 339 bp, Klebsiella pneumoniae
atgaacagaatcgcttacaagttgcccgagggtgacctggcttcgcgcaatcaggctatccctcaacggcacaaaattgaagtcctcatcaaaagtggcagctcagtggatctggatttgagcggcgtatgctcgatttctgaatcttactcagatgagattttcggggtgctggttgtgaaatttggtgttacgaaggtacttaaccaagttaaagtccgtaacgcttcaccttcaatcctgaagagtattgctaaagtaatccagcgccgcagtaacgaagttgcaacaaagaaggttcagtctgctggatttgacggtgtatgtgcagcttgctaa

SEQ ID NO: 234739 - DNA, 1065 bp, Klebsiella pneumoniae
atgaaaaagaaaacccgttttgcctttaacgcctacctgcagcagctggcacgcctgaacaacgtggaagtggaagaactttccagcaaattcaccgttgagccctcggtgcagcagacgctggaagaccagatccagcagtccgctgcctttctgacactgattaacatcaccccggtggatgagcagtcaggccagctgctgggtctgggtgtcggtagcacgattgccggtaccacggataccaccaccaaagagcgcgaaccaactgacccgacagtgatggcggacgtggaatacaaatgcgagcagaccaactttgatacggtgctgacctacgcaaagctggacctgtgggcaaagttccaggatttccaggtacgaatccgtaacgccatcgtgaagcgccaggctctggaccgcatcatgatcgggttcaacggcgtgaagcgtgccaaaacctctgaccgcgacgccaacccgatgctgcaggacgtaaataagggctggctgcaaaaaatccgcgaagatgcgccggatcatgtcatgggcagcgaaacaaaagacggcgtgaccaccaaaggcgccgtgaaggttggtaagggtggcgattatgccaacctggatgccgtggtgatggatgcggtcaacgagctgatcgacccggtgtatcaggatgatgatgatctggtggtggtctgtggccgtgagctgctgtctgacaagtatttcccgctggttaacaaagaccaggagaacacggagaagctggccgctgatctgatcatcagccagaaacgcatgggtggcctgcaggctgtacgcgcgccgtatttccctgcgaatgcactgctgatcacccgcctggataacctgtccatttactggcaggaagatacccgccgtcgttctgttatcgataacccgaaacgtgaccgggtcgagaatttcgagtccgtcaatgaagcgtatgtggttgaggattaccgctgcgcggcgctggtcgaaaacatccagatgggggatttcagcgcgccagctgtaccggaaggcgagggggcataa

SEQ ID NO: 234740 - DNA, 552 bp, Klebsiella pneumoniae
atgaatccactcgcccttacagcaataatcttagttcttgcaatatttatattccgaaaaagtcaattcataatagacatcaaaaatatttttaaatataaatctgacgatccaaccactaatacttctgatgagtctctaaacccagcagaaatatcagccaatagaatacagtttttttgtcagagattgatttttgcagccttgactatttttctacttgtaaaaggtggtgttgaaataatcgacaccttacaccctaattttttatcagatcataagtttttaacacatataaaagagataaagacacttagttatgtagcaaaagctttagctgtttcctgtggattccaacttgcttttatgttaataaccaaaggccccgatgaagcagtagaaccaataatgcttggcattgcctctgtcattttattaatgttatcagtaatagatccagaaaaatggagtgtgcacaattcaatatcagtcacactgttaataatttgtattgcaggtttattttatttatcaagaaaacttaaaaagtga

SEQ ID NO: 234741 - DNA, 606 bp, Klebsiella pneumoniae
atgactagcagcctgttaccgccgggttcgtctgcgctggagcgcaggctggcgcaagcctgttcaggtatcagtgatttaaacgtgccgctgcgtgacctgtggaacccgtggaaatgcccggcaaagtttctgccttatctggcctgggctttctccgttgaccgctgggaggaaacctggacagaaaccgctaagcggcaggcggtcagcgatgctttctggatccatcagcgcaaaggtacggtggcggcagttaagcgggtgatcgaggggctgggttactcaatgacccttgaggaatggtgggaggtggccgaccccgccgggacgtttcgtcttgagatcgatctgaatgaaatcggcatcacggagtcgatgatttacgagcttgagcggattattggcgatgcgaagccagtcagcaggcatatatcgcaacttactttatccacatcagtaagggggaccgcatgcaccggtttaacgctgtttgatggagaagaaattacggtttatccgccagactataaaccagatgacggcattttttataacggcatgacgcaatttagcggtaattattatttttcaggtgagcaataa

SEQ ID NO: 234742 - DNA, 2166 bp, Klebsiella pneumoniae
atgtctaacggcaacattatagtcagtaccctaacaaacagggtcgagtgggatgtagaccggacatcatatggtaaagcactcaaagctgtaaaatctctcaaagccgctcacgagaagcctgctaaagcgctggaggctgcacagaaacgcgcctcgcagagtgaaggcaaagcagcattagccgcagcgaaagcccagacagcgaagctacgccaggcaaaacagatcagcgccgaacagcagaaacaagcacaaattgcagccaaggctgcccaacaggagcagacccacgctaaaaaaatggctgctattaacgctcgtggggtagtccagcaaatcaatcaggccgatcaactggcgaaacagaatgagcgccttgcccgtattagcgcgaaggtcagagcggcggcacggtcaagatcgatgacctataaccccagcatgggtggcacagctcccgaaccaggattattagcagcgcaaacagcagcaatgaatcgcggccatgcttctatcaccaacgatattatccagacgaaaaaggcgatcgccctggaagagaagcgccagcgtgagaaagaggccagcctcaagcgccagagtactgcatacgataccctgcgccgcgccagcttgacaattagtcatattgagggggctagtctggctgacaaaatgaaagctgttcaagccattaaggaagcaacaaaaggctacgccgagcagcgttataccattgcagagatgagacacgagctagcgaaagcgactctggaaaccagacgccaggcacgattaaaccgccagattgttaaggataaagcgaaagctgagcgtgctggtcgcattaatgccgaacgtctgacccgtgaacgtagcgaacgtggttatggtggccttgctgccactggtgtaattgcaggtggttccctgattggctcaatgggtgttgctcgtgttggtcagacgctacaaggaagccttgagcgttcccgcgatgtgaaaaaactccagcagtatggaatctcacaattggagtttaccgcacttcaggatctggctatgagccgcgttggttactcactgagtgctgataaattaagcgatctaaataaagatacactcgaaaagtctggggaattgctgaataccggttcctttaaacgcaactctaaaacaggtgctgtaacgttctctgggggcggtgagtttgcggatatagtgaaccttacgttgcaatccaccaacggcaatcagaaggtagcccagaaagtgatcgatgaactccaaaagctggattttccgacctttatcacttacctgaaacagttgcagaaaactttcaaatggacggacaaccagacccggcacctggctgaggctgtgaatgatggttcggtcttcctcgaagtgttcaatgatgaggggcagggcttgataaatcgtatgcagaaactttctgctgaaggatggaccctatctgatgcacagcaggccaaccttgataagctagcggcattaggtgctgagtacaaccgagtgcaaaccagcctcgcagatcatttctctgcatcatttgtccaaggtcttggagaatacgcagctaatacggatacactccgccagtcaatgacaggacttatacctattgctgacaatcttgggcaatcgttgggcgaactcacaactaatgttatcgcgtgggcctcgcaaattggcggagaactccagaaaggcgaaactctgccgaccgctatctataacaccaccgttgatgagggcagcaacgccgcagcacagtggcttaaagagaaaactggattcgacccgcgtgtcatcggtcagacgcttaagcagatttacccgtggctggatagttctgcacagaacaacatcggcagtggacaggcctggacaaatccggggttaacccgtggggttgctggatttagccaaccacaactaacctttaccccacctgagccgttcggttctactggatggagaccagacagctccaggtttaatctgactggtgaggcgacggttaaagtcgaggttgagcagactttgaatgctggcgttttagatggtcttattgatacaaagatcaacgataacaacgtcagacagcagaatatgatactgggtatagcagattaa

SEQ ID NO: 234743 - DNA, 537 bp, Klebsiella pneumoniae
ttgtgtgagcaagcaactggcgatagccagactactaacagcctgaaggctgacccagaaaaactccccgacctaacccgcctgtttaaaaaccgcgcacgagatagcgacgtaatcaaaaaatgcaagcacatgctcattgcgggatattctccagcacgcgtggcattgctgctgaggctaccgctagaaaaagttcttgatttatataataattcgtacaatccccgctgccgtcgttttgccaaccgcaactcctaccaggattcaaaattagccttaacgatgttccaacagggcgagtccctagtggatatctgtgatgcgctgggaggactacatctgtacaccgtggtgttgtcgctccggcagaatggcgttgctgaatccgctattgagcagcggctaccccctgagggcgaccccttactaatcgaatatcaacgcgtctgcaaaagaaaggctggcagcaggtataaggcgatacaaatcaactccctccaacgagtcaacgtggcgcaggcaactacagcctga

SEQ ID NO: 234744 - DNA, 429 bp, Klebsiella pneumoniae
atggggaaacctgttctgttcgatttctcgaacgccactgcctcagagattgtcgctgcaatcgatgcaaaaattaccacagctcaaaatctgcacgccttccgcactcgtatgggtggtgccaagaaagccgataagctctatccagctactcgcgaagcactgaacatcattaaacgcctgcgtcagcaagcgaaagatgcaaaaatcatccgtgatattctgcaaccatactcagcagagttggcaaaaggccgtgatgttatggaaatcatcgaaccagtgctttctgcctggcgtgtctattacgcctctcatggtatcgggctcatgaatgagcagatcctcctgttgaaaatgattgaggcgggcggtgaactcgaaagcattaccggaaaagccattcccgaactgaccacaaccgaataa

SEQ ID NO: 234745 - DNA, 393 bp, Klebsiella pneumoniae
atggaattcgtccaaggcaaagacagctttaacgagatggcaaccggaatcctggtgaaactgtttgcggactatccggcttactcttctttcgaattttcggacttcggctggaagcccagaggagacagaactcagattgacctgctttgcaacacactccaggctctcagcgatatgggttacacggagataatctcttcaaccgacatggataccgccgccaagttaactccaatgggcttaaagttgcttcaacagcaagcaccaggcgcaggcgatactgtgatcaacattctgaaaggtggggctgaacaggctggaggcgcggtagctggctcaacgatgagcgctctgcttgactggatttttaaaggcaataaaagccgataa

SEQ ID NO: 234746 - DNA, 552 bp, Klebsiella pneumoniae
atggcgagaacgaacgcaccgacaccaaaagaggcacgagagattgaggcagtcctacgccgtcgcaacgaaacctttgctgacgcctgggcgcttaacctgaatctggcattgcgcatcagtgatttgctggcactgacatttgatgatgtcgccggaaacgtggttactatcaaggagaagaaaacgagcaagctgaaggtctttccgattaacaaccgggcacgggagattatcagccgtcgccgtgctgcatacccagaagataaattcctgttccagtccaaatctaaccgtgtgaagaatcagccacccagggccatcacgcgagaatcagccagccgtgcattcagtgaagcgggggaaatggtcacagagaagaacatcagcagtcacagcgcccgtaagtgtcggggccgtgcattgtgggaggcaggcacaccaatcgagacgatcagtaagatgctgaaccacagcagcccagcagtcactatgacgtatcttgatattacccaggacgaagtgaaccagacctatcagatggtgatctag

SEQ ID NO: 234747 - DNA, 195 bp, Klebsiella pneumoniae
atgcgtaatcgtcccttttataagatgtacaacttcgtttttttcttcaatattgccaaaattctctttctagttcatgccgccttggatgctgagtcccttcttttcgctattgcagcgactacccaagcgttcgcagtttttacaacaatggtgaatgagtattacaacgagcgactagacaaacttctttag

SEQ ID NO: 234748 - DNA, 501 bp, Klebsiella pneumoniae
atgttcacaaaaaacttccagcaactcgcagaacttgatatttccaagaatgagttgaaggttatcgcaaggattttaaacatcatggaatttggaaactgctttcatatatcgcaagcaaagctatgccgcgacttagatattaaaaaatcaaatatgtctcttgtctttaaaaagctcaaaaagaaagggatcattatagataaagatggagatctctttatgaactccaacatatttcttaagggacaagcgcattctatcaatgccaaacaacgccctaatgttaaaaaggcacagggatttaacgctaatactgaaccagtatttgataatgtttatatatttaatcaaacaaatgattctgacaatcaacctacagagggaacgactatatctgagccaccaaaaacatctgatagctgttctaacaaagaaacagatccagcactgacgctgcagtatcctaaaacagcagagccagcttatgatgatgtttaa

SEQ ID NO: 234749 - DNA, 240 bp, Klebsiella pneumoniae
atgattgatgaattccacgttatgtatatgtatagaaaaatccaagctgaagcggctaccactgatataaagacattgaaccaactcttgaagaagttccgcaagctagtagcggaacggcaggaagaatactatctggagattggtgagaaaaaggcacgtaagttaaaaatgacaaagatcctcaaattgatggagaaggataggatatcaccagaggatctcattgattggcagtag

SEQ ID NO: 234750 - DNA, 441 bp, Klebsiella pneumoniae; identical to SEQ ID NO: 22297

SEQ ID NO: 234751 - DNA, 504 bp, Klebsiella pneumoniae
atgtcacatattgatactgtatcaaaaattcttagaatgggttttcttttaatatgtaaatttttccttttctcaaaagaagaaatcacaatattagtaacaacttacccatttaaaaaaggaatgatattaagaaaaacaaccaccataatatccattttatttattgcgtatttattaggtggtcttgtacgttcttatagtatacaaataattttcatattaccgttagctttaggatttacattaaccatatatacatacaaaaagcataaggaacgattaaaatatacttctgattgtgttctgtatggcttagcgacaataacatcagcttatcttgttacaaatacaacaagtatagatctccatttttttgaacagcaaatgaagggtatatctgggtttctcgttactaatttttttgctgttgccgcatcaattcgtttttgtattagtgttgtagaatgtttagaaatatgtggactcaaaagtaaaaaatga

SEQ ID NO: 234752 - DNA, 486 bp, Klebsiella pneumoniae
atgttatggtttgaattgatcaaacaatggcgagattcaggacggggaagttatgggataacgtttccttttttaattggttctcttagcttcataaataaagaaaacgttacaaaaaactatatcaaaaaaatatttaatgaaataataaacaaccctgttaaaggatattattctgaggtcagatggtgtggaaatatcgatgagccagtaatatcaataagtaaaattgaaaatatctctaacatagcagtcaaagattatttcacaagcaataattgttattccttagtttttactgctgatttgatgaatatgtttcatttggatagtgataatgctcaagattgtcttgaaaaactaattttacggacatgggatacagtatccaaaaaatgttactcgaaaaatcaaggtcaattcactccgttcaccgatgatgacattgtttttatcaatgaagtaaaaaaagtaaaaattagttaa

SEQ ID NO: 234753 - DNA, 543 bp, Klebsiella pneumoniae
  misc_feature (518)..(527): n is a, c, g, or t
atgcgtaaatttttactcgtagcaggtcttgctgctcttttatcgggatgcggtgaaaaaggggattttgagaaagcgatcaacgcgaaaatatcgcaatcaaagctgtgctactcactgcaggacaatgacattgtgttcaataaaggtttccccatccgggttaatcacggctatcgttctactggatacagtgccagtgaagaaatcttaaaaggtctggctaatcagggactgcttgatgtttctcaacaagctaatggtttcagtagtgtcgatgttctggaagtaacagacaaaggccaagaggttgagttttgggaccgtgagaaaggtgcctgtgttggtcatcgggctgttgctgagataaaggaatggactgaaccgggaaacggtaatcagaaagttgttcgcgtgtcttatacatggaagttggtagatgttccttcgtggctggacaaaagcgcgttcgctggtgtgaaagggataaacgaacctgttgaaagtgtcatagctcnnnnnnnnnntcatagctcttgttaa

SEQ ID NO: 234754 - DNA, 555 bp, Klebsiella pneumoniae
atgaagagaatcttacttgtggcaggaatggcactgacaggatgccagcagctcaacgatggcgtgaatacagttaatggagcaatcagttcttcgctgtcttcagtaggcaaagcgctggggggaaccgccaccactcaaatccttggcccggtatcgtctgtatctggccttggtgctgtctgcaaagactatgaagaaaatgcgatggcagcagaaaagaaatggactggcaaaaggatctctatcatcaatgcgactgttcttgaagttacgaagggcagaagtgccagcgatatgatgacgggaatgcccaaatctaaccctaactattatctgctctttaaaacagctgatacaagctactgcggcggcatggtatggatcgattactactccggccttgatgatgccgttctcacttataagaagggccagaaagtcagcataaccggaacagtaaacaatttcgaagttcgcggtttcgccacagtaaacaatgcagatatgccggttcgtcttgttgtactgcgcaacggcacgatcaatcattaa

SEQ ID NO: 234755 - DNA, 192 bp, Klebsiella pneumoniae
atgacgaaacaacagaaaacagcgctgaacatggctaaattcatccagaatcagtctctgctcctgctggagaagcttaacgagcttgatctcgatgctgaggccgacctttgtgagaaactccacgatgatgcggagcatcttttccgtacactgtcctcgagactggatgaattacaggatggcaattga

SEQ ID NO: 234756 - DNA, 1032 bp, Klebsiella pneumoniae; identical to SEQ ID NO: 189859

SEQ ID NO: 234757 - DNA, 483 bp, Klebsiella pneumoniae
atgaccttttcggcttgttatgaaaaagcgtatgcgtttgatcaaaaaacaaatgcaagtcgtggagaatgtgtaacagcgaatttaattatacataagagtttcattgatagggttggttattttgatagtaatcttttctctggaggtgatatagagtggaatctgcgtgcaaccaaagagaatattggcatagtttatgcggatgacgttattgttatgcaccctattagggcgtctttaaaagagattgtctccaaaagggttagggttattggtggacagtataaaaaattatccataatcggtactttaaaatttcttcttccccccataaaagatgttgcgtatttatcttcgagagcagaattaacaagatttgaaaaaatcagtgcctttcttataagatattatttgaaaatcatttcatttattatggttatattgcttaagctaaatattcagaaacccaagcgagcctag

SEQ ID NO: 234758 - DNA, 168 bp, Klebsiella pneumoniae
atgccactcattttcatactgaaaacctccaacgcctttcataaaacagcaggtgccattcaacaggcacacattcccttttactatattaaacttattactatattacagccattatttcttatacaaaacaatagattactgaggaagggttatagattactataa

SEQ ID NO: 234759 - DNA, 231 bp, Klebsiella pneumoniae
ttgaagcagcatccgcgcaagaacaaaacggccatcaacatcgaatacatgaaagccagcatccgtgccaaggtggagcacccgtttcgcatcatcaagcggcagttcggcttcgtgaaagccagatacagggggctgctgaaaaacgataaccaactggcgatgttattcaccctggccaacctgtttcgggtggaccaaatgatacgtcagtgggagagatctcagtaa

SEQ ID NO: 234760 - DNA, 372 bp, Klebsiella pneumoniae; identical to SEQ ID NO: 212322

SEQ ID NO: 234761 - DNA, 1158 bp, Klebsiella pneumoniae
gtggtcagacaggcgttcagcgatgcctataactacatgaaaaacggcaccctgctgcgtcaggtgatcaacaagctcaacgaaatcgacttcaccagcgccagcgagcgccacctgttcggcgacatttacgaacagatcctcaaagatctgcaatcggcgggcaatgccggtgagttttataccccgcgcgccgtcacccgctttatggtcgatcgcgtcgatccgaagctcggcgagtcgattatggacccggcctgcggcaccggcggcttcctcgcctgcgcgttcgatcacgtaaaaaacaactacgtgaagagcgtggccgatcaccagacgctgcaacagcagatccacggcgtggagaaaaaacagctcccgcacctgctggcgaccaccaacatgctgctgcacggcatcgaagtgccggtgcaaatccgtcacgacaacaccctcaacaagccgctgtcgtcgtgggatgaacagctgaatgtgatcgtcaccaacccgccgttcggcggcaccgaagaagacggcatcgagaagaacttcccggcagagatgcagactcgcgaaacggcggatctgttcctgcaactgatcgttgaagtgctggctaaaaacggccgcgcagcggtggtgctgccggacggcacgctgtttggcgaaggcgtgaaaaccaaaatcaaaaagctgctcaccgaggagtgcaacctgcacaccattgtgcgcctgccgaacggcgtgtttaacccgtacaccgggatcaaaaccaacctgctgttctttaccaaaggccagccgaccaaagagatctggttctacgagcacccgtacccggcgggcgtgaagaactacagcaaaaccaagccgatgaagtttgacgaattccaggccgagatcgactggtggggcgacgaggccgacggcttcgccagccgcgtcgagaacgaacaggcgtggaaggtcagcatcgacgaggtgattgcccgcaactttaacctcgatatcaaaaacccgcaccaggcggaaaccgtcagccacgatccggacgaactgctggcacagtacgcgaagcagcaggaagcaatccagaccctgcgccaccagttgcgcgatatcctcggcgcggcgctctccggtaaggaggccaactga

SEQ ID NO: 234762 - DNA, 276 bp, Klebsiella pneumoniae
atgagcttcgaaattatcgcggggctggtggttgtcatcctgagtgctatcgctggtgcgttcggcatcggccatgttcgcgggactagaaaggcagaagccaaagccgatctgcagcgtaccgaagagaccgccaccgctagcgtcgctgcagcagaacgtaaggcggaagttacgaaaggggcaagcgatgtacagcagacggttagccatatgcctgatgacgatgttgatcgggagctgcgtgagcacttcacccgccccggtagtcgttga

SEQ ID NO: 234763 - DNA, 3069 bp, Klebsiella pneumoniae
atgaccattcgtttttacccgtcccggcttcccggtgaaccactcgaaacgcatgagcatggtgtaaccagtattcgcagctggctggtggcaaatgttgaaggctacgaggatcgggatgtcccaccgctgaccgttgaggttgaggggctgttaattccgcctggcgagtgggctaagtgtgtgattcgccctgatagtgatgtcaggctttatccggttcccttcgggctggaggccgccacaatcgcgtggatcggcgtcggtatctccgttgccgctgcagcctattcgcttgttttgatgagcaacatcgatacgggcggctatacctcatccacagggcggagtctcgacctgaacccggcgcgggccaacaccgcaaaactcggtgatgccattcgtgaggtgtttggccgggtgcgtatctacccggattatgtggtccagcccgttacccggttcgatgccgccgatcctacgaaaatgcgcgtccagatgctgctgtgtctcggtgtcggtgaactgatttataccactggcgatatcagggtaggcagtacgccagcttcaacgctgccgggtttcaaaatcacctattttccaccaggcgcggacgtttccggcgatgagcgcagtgaaaactgggtcaacagtacggaggtcggagggacatcatccggcaccgggctggacatggcccagacgtcgccggatgccgacgatattatcgcagacagcatgaccgtctccggatcaagcgtgacgtttaccgggctggatacggatgatggtgacgataatgacgagaacgaaaacgcgctaccgcccagctgggtcactggcgccgtggtcgaactgaaagccccggcgaactaccagatcactacggcggctggatacagcgttatcgcaagcccgctgctgacggagatcgcgccggtagtaggtatgccggtaacgctggggtttaactcagtcgattacgatctgtttatcgcgtcatatacccccggtcaggctgcagtgcccggcaccggggggagtgcggcaaaagtccaggccagtgcggccccgaccacctacgatttttcgaccagctccagcacgttcacgatcacctggcagggggttacctacccggtgtcgctggtggctaactatgtctcgatgtcgggactgctggcggccatcaccgagggactcactggctccggcctggttgcacaggacaacggcggcaccgtactgataaccgagtcggccagtccgttcgcgggtggggcgatcacgtcctcttcgctgcctgcagctgttttcggtgatgctccggtttacacctccggcacggcatcaaccggcggcagcccggcggtaacggcgaatgtgacgcttgcctataacagcgccacgggaacagccttttccggcatgccggagggggtgcaacggctttcacttgctcaccgcgggaatgagtaccgcattgtctcgaccgacggcacaacggcgacggtggcgcgcctggttaatggtgccgttgatgagtcatggccgggattcaccgcccggacgatgatcgactatgaggccactggtcttaacgacacgctgagctggctggggccgttcctggtttgccctgaaaatgagaccgtcgatatgttcgaggtgaatttctccttcccgaacggcatctgtggctttgacagcaaggggaaaaagcggcttcggcatgttgagtgggagattcagtatcgcgtctacggttccggatcggggtgggtgagtcaccagggagagtatgcgcttaaaaacgtcaacgggctgggattcactgagcggatcaccctcagctcaccagggctggtagaggttcgctgtcgccggcgcaatgagcagggctcaaacaacgccagggattcgatgtactggcaggcactgcgcgggcgactactgacgcgcccttcatcctatcccggcgtgtcgctgatggcggtgaccgtcgagacgggcgggaagctggcggctcagtctgaccggcgcgtaaacgttgtggccacgcgggcctacgactcaggaacggccagaaccatttcgggggcgctgctgcatgtcgggaactcgctggggctggagatggacgtcgacaccatcaacgcgctggaatccgcgtactggacgccacggggcgaaaatttcgatttcgccacgggcgacagtatctcagcgctggaaatgctgcagaagatagccaatgccgggaagtcacgttttctgctgagtgatggcctggcgacggtcaaccgtgaggggattaagccctggactggcgtgatcactccgcatgagatggtggaggagctgcagagcggatttaccgtgccgtccgacgatgattttgatggcgtcgacgtgacatacatcaacggaactacctgggcggaggagaccgttaaatgccggacgccggacaatcccacgccggtgaaaatcgagaattacaaactcgatggggtactgaatcaggatcacgcctaccagatcggcatgcgtcgcctgatgaaatacctgcagcagcgggtgacgttccagaccactaccgagctggacgcgctgtgctacaacacgggagatcgcattgtgctcacggatgatattccgggtaacaacacgatttcctgtctggtggaggcgatgacaaaggctggtggcgtgacaacgttcaccgttacggagccgctggactggtctttcgaaaacccccgagcgctgatccgctatcaggatggctctgcatccgggctgatggtggcgagcagggtgggcgattttcagctgtcagtcccgcacctgagcgagtttgatgacccgatgaaggttgacctgtcgtcggcaaccatcgagccgatccgcctggtgttctgcggctcaacgcgccacgtctacgacgccattgtagaggagatcgctccgcagtcagacggaacctgtcaggtcaccgctaaagaatacctcgaatcgttctaccagtacgacgacgccacataccccggcgacgctgcttaa

SEQ ID NO: 234764 - DNA, 1299 bp, Klebsiella pneumoniae
atggctgatttgtcgatttcggttatttcagaccaggcatctgagagcaatcaggcggggtggtggcacccccttgacagctttcagggagtggaatgttacgggctgtgtaaagagtacggtaccgccggttatcatcaggtcgaaatcgttcgccgtgatgccgatggtactctcacgcggggaatgtgtaagaacgtcgacgggacggtcgcggaatttaacaatgacgtgggccataatcagccatctgtggttgtggacggtgcgggatatatccacgtgtttacgtcgatgcacgttaacctgctgcggtactttcgcagcgtgcgccctggcgacgtgtcgcaaatggtggatgcgaccctggactttccggatgtggactgggtctggacgtacccgatcaccggcagaggtcccaatggtgatgtgtattgcctgatgcgggtcgccagccggagcaccaccggggaaaataaacgcgggggtatcctttatcgctttgacgtcggcacgctgcgatggacccgttatgcgcatgtggctgaaacagccaaccgcgctatttacccggatgatatagccattaacgaggatggcgtccatcttctgtttcagtggtcggcctacccgtcgtctgccgtccgccatgtcggggaatatggcgtcattggtaccgatggactgatgagaacgataaataacacgcccctgccaatgccggtaacgcagggacagctggcgtataagccattgcagccgggtgaaaacccggcgataagtgacgggctgaaaatggggattcagtctgcgaaatttgcgtttgatggcgaggggttgtcgcatatcacttaccgtttcagaaccgtggatgatccttccgggacctggttcagtaagttcggggtctacgttgcgacatgggcggggtctgcatggagcgagcagcagatcgcatatgtcccgccggagagggggaacacttctgcagcactggcggcaaccgttcaggggggcaaacggagggtgtatttttcggtggaatacacgtcttccgggaatactgtcgctgtcattgtcctggcggaaaatgcaggttctggatgggtctactcggtactcggcaacagcgcccccacacttctgcgcctgggatctgcaccaggaaacggcggtgatgtgctttacgtctcagcaccatttgaggccaaggtgtatcgctattttgtgccggaagattattccccggctcagcaatttacgagttttgatgtgctgctgtcgactctggtgtaa

SEQ ID NO: 234765 - DNA, 918 bp, Klebsiella pneumoniae
atgctacacctgacaccgctgaaatcattgctgctggccagcgcgctggctctgctggccgcgacgccggcctcggcgcaggagaaattcagggttatcaccaccttcacggttatcgccgatatggcgcagaacgtggccggcgacgccgccgacgtgagctccattactaaaccgggcgcggagatccatgattaccagcccacgcccggcgatatcaaacgcgcgcagggggcgcagctgatcctcagcaatgggcttaatctcgaacggtggtttgcccgtttttatcagcacttacagggcgttccggaggtggtggtcagcgaggggatccagccgatgggcatcagcgcgggtccctatagcgggaagcccaatccccatgcctggatgtcggcagataacgccctgatctatgtcgataacattcgcgatgcgctggtgaagtacgatccgcctcacgccgacacctatcgccgtaacgccgaggcctacaaagagaagatccgtcagacgatggcgccgctgcaggccagactggcgcagctgccggcggataagcgctggctggtcaccagcgagggagccttctcctatctggcccgcgactatggcctgcgcgaactgtatctgtggccgatcaatgccgaccagcagggcaccccgcaacaggtgcgcaaggttatcgacaccatgaagaaagaacgcatcccgaccatcttcagcgaaagcaccatctccgataaaccggcgcgtcaggtggcgcgggaagccggggcccactacggcggcgtgctgtatgtcgattcgctgagcgccgccgacggcccggtgccgacctggctcgacctgctgcgcgtcaccaccgaaaccatcgtcaacggtatccaggacgggatgaggaagcagccatga

SEQ ID NO: 234766 - DNA, 2073 bp, Klebsiella pneumoniae
atgtcgtatacaccgatgagcgatctcggccagcaggggctgttcgatatcacccggcttttattacagcagcccgatctggccgcgctaagcgaaaccctgacccgtctggtgcaacagtccgcgctggccgatgaggcggccatcatcctgtggaacgcgggtaatcaccgcgcggccaggtacgcctgcgatgaggccggccatccggtaagctacgaggatgaaaccgtcctggcccacggtccggtgcgtcgcttactctcccggccggatgccctgcattgcgatcatgaaacctttgccgacacctggccgcagcttatccgcagcggactgtatcgtccgttcggttactactcgctgctgccgctggcggcggacgggcggatcttcggcggttgcgaattcctccgccgtgacaaccggccgtggagcgagaaagagttccagcggctgcataccttcgcgcagatcgtcgccgtcgtcaccgaacagattcagaaccgggtcagcaataacgtcgattacgatctgctgtgccacgagcgcgacaactttcgcatcctggtggcgatcaccaacgcggtgctctcgcgactggatatcgacgagctggtcagcgaggtggcgaaagagatccatcgctacttccggatcgacgccatcagcgtggtgctgcgcagcgaccgcaaggggaagctcaacatctattccacgcattatcttgacgccagccacccggttcacgaccagagcgaggtggatgaagccggcaccctcaccgagcgcgtgttcaaaagcaaagagatgctgctgcttaatctgcacgaacatgacaccctcgcgccgtatgagaaaatgctcttcgagatgtggggcaataagatccagaccctgtgcctgctgccgctgatgtccggcaataccctgctcggggtgcttaagctggcgcagtgcgacgaacaggttttcaccaccaccaatctcaagctgctgcggcagatcgccgagcgggtgtcgatcgctatcgataacgccctcgcctaccgcgaaattcagcgcctgaaagagcggctggtggatgagaacctcgccctcaccgagcagcttaataatgtcgagagcgaattcggcgagattatcggccgcagcgaggcgatgaacaatgtgctcaagcaggtagagatggtggcgcacagcgacagcaccgtgctgatccttggcgaaaccggcaccggcaaagagcttatcgcccgcgctatccacaacctcagcggacgcaacggtcggcggatggtgaagatgaactgcgcggcgatgcccgccgggctgctggagagcgatctgttcggccacgaacgcggcgcgttcaccggggccagcgcccagcgtatcggccgcttcgaactggcggacaaaagctccctgttcctcgatgaagtgggcgatatgccgctggaactgcagcccaaactgctgcgcgtcctccaggagcaggagttcgaacgtctggggagcaacaagctgattcagaccgacgttcgattgatcgccgccaccaatcgcgatctcaagcagatggttatcgacagggaattccgcagcgatctctactaccggctcaacgtgttcccgatccatctgccgccgctgcgtgaacgtcccgacgatatcccgctgctggtgaaggcgtttacctttaaaatcgcccgccgcatggggcgcaatatcgacagcattccggcggaaaccctgcgcactctgacgcgtatggagtggccgggcaacgtgcgcgagctggaaaacgttatcgaacgggcggtattgctcacccgcggcaacgtactgcagctctccctgccggagcgggatatcgtggaagccccgcggacgccggcggtcctgcctgaggaaggtgaggatgaatatcagctgatcgtccgggtgctgaaggagagcaacggcgtggtggccgggccgaaaggcgccgcccagcggctggggctcaagcgcaccacgctcctgtcacgcatgaagcggctgggtattaataaagacgaactggtataa

SEQ ID NO: 234767 - DNA, 3852 bp, Klebsiella pneumoniae
atgaaacaatttccaaaggaaaatgcaagccaggaaattggtcgacttgctgctcgcgctattgcatgcaagatgccagtttcatggattgaaaaatcccaatcaggtgatagtgattttggcattgattatctaatgcaattaaaagatcctgaagataatgttcgttattccttttatctacaattaaaaggtacgacagtaccaaattatatagaaaatggtaactttataagttacagcttcaaaaccagcacgttgtcatattattattctcaagaacctttagttatggttgccgttgtcgatttaagcaagcattctgacgagatttataaatgtccgatatattatttgtggttagatgaagaatggtttgattcgaacaaagagaaaattgcctcgcaggaaaatctgactttaaacataccaacaaatcaacaaattaataataaattggatgtttttgctttttatgaaaaaagattcatggagagactggcagtccaaagcttaagaaaagcgataaagacgcattctgaagacctaagtggaagcataacaaagttttctgaatacatagaagaaaaaccagtgcttataaaagttgtagaagaaagtggtgatgagccttggatttcaaatccaagcgggcaggcagtaactttgttaaaagaatgttctgatgccttggccgaaaatctaataaaaaaagcacagggtataatattgcagcttgatgagtggcctcatcaactaagtgatcatgaaaatgctgagttattattgcaaaaatcagcgctttgtgaactattgggtgagggggctgagtcattagaaattataagaaatgcaagagaatatagccttaaacctagatataggttggctttttttgatgcaaaactaaaaaatggtcagatgctaaatcaagaggagctagatgatgttgaaaaggaggtcttgaagggggattttagggctgtatttataaaagcaaaatgtatggcgatatctggttatttgaaagaagctattacacttatcgatgaaagttataatgataaaatcacagctaaattattgttgctaacgctatctgataataatctagagttagatgttgcaataaaaaaagttaatcctgaaatgcttatctctgatagggaaaggtttgttttttatgctatcgccgcaagaagaaattacttgaaggcccatggtgaagtttttgattatgatcaggttcaaccattttctggaaaatcaaatcttaattttaaatatatgaaagattcatatgagtattgtgataaagcatgggtatacgcaaaaaaattaggttatccatcagactttatgatacttactgacatatccccaattttgtatttttacttcaataatatagagtctttatttgggtactatgatgaaattattagagaaaggcccagacatagagaactaattgtatcttattcgcgtgttttatataactgcaatgaatataaaaaagtggtttcgttacttacacaattgaaatctaatttaggtttagaagataagtccattttgttggcatctaattattatcttcatgagtatgatactgcacttgatctttttttgagtattgaagaagaattgcttgagagaagtcctgaaaatactccttttttaatttgtttggctatcgatattgctatcgctaaatttgaagattctttagctgaaagacttagagccattcttcttgattatgaaaatggagaagcatttttggcagttaatacatgcgtaaggaaaataaaggaagaacctagcaccaaaattgactgtattgaaagcctttatgaaacatatctttctctaaataagcctttagtaatagctgagcatttattgaggttttttgatcttcacaacgaaaatacagaatataaaataattgatgtcgctgaaaaaatactaataagcaaagagttggatgaagcttgttcactaaaacttgctgaggcatatctaaaagccggagaaacggataaagtttttttaattgtagataaaaatctagggaagttaaatattgatcctcattggcatgtcataaaaacttatgcgttggaactatcaggcagagttggagaagctgtagatgaaatagaaaaggtattgaaaggccctaactattcaaccgaacatatgaaaatatatgttaacaagtgtttgaattttggaatgtttcgaaaggttgaaggtgtattacaaaggattttatcaagtgaaagtattcgtgaaaataaactaacttatttatataaattaataattgtatattcctctaacttggaatataaagataagttaatgagttgcataaaaagattcggcgaattagttaacagagaggactgtaatgaggaaggcaaatatttatctatgcttttatcaatacagcctaatatgactgatgagatgagagaggaatttagtttcaggatttcagagtatttcaagaaattccctgaatctaacatgctaagaatggcaaatgttgatattaataatggtcccgaggctttattaaattctcttcgagaacttactggtgtaacggatgagcagatagcacagtgggaaaaaaacaaaaactctatcaggagggggacattaccaattccattttctatgcttggtctgttcttgagcaatgctggagatgtttacacaagttggactatcgcaaaaaatacaccagaagagtcgttagagtttaaaataaatcaagcatcgcaaacatcacaggaactatttgacggttattttaggcaggaaacaaatttccttgttgaagaaacatctttaatcttgatgcaagagcttggtattttagatgatttttttggggtggttgagaaattcactattctcgagtcatgcttcgaaagaatgaaggtttcaggggtgtttaatttattttctgggagaaatccattacctcaaagcatcttaaatacaattaataaacatagatccaaactaagggttgaaaaggattgtaaagacaatcttcttgaatcatatcgtaatttattatccaaggatggagaaggttatgtattgttaaccgatgatgctaatatgctaatgctatgtggcagtaataatcagcctatatcgcacggaaacatatataatatcttgttagctttgaattaccaaggcgtcatggggaataataaattatatgaattaatcgcgagagtgtcaacttatggctataaatccattaatatggaaatagatttaatggctcaagtgttttgctattttgtgaatgaagatgaggattacacaaaaacaccatttaagaatctttttgacaaggttttcaatacacgacgtaaacctgatgaagtgattgtgatattatatagaattttgagctatgctattgatgaagcgaaaataaaaatcagtagtgctataatattgagtctattcactaattttttattgagatatccgtatgataataagtttaactttattgtaagttggtttctataccaatgtttaaatggaaaggaatcgtatatttcggatttattgcccgtgagtgtgactcatgctaatttatggtgtgttttttatgagatgtgttgtatttcaatggggcgagaagttgagcatagtgaactgtttagtaaaataattagcactatcgtccaacagaatccttcttctcgtgaaaaattatataatagtgttgttaagtgttttattcccgggacagaagattataatttatttacacatacttacaaatatttgtcattaattagttaa

SEQ ID NO: 234768 - DNA, 171 bp, Klebsiella pneumoniae
atgagtacctattacaggataaataactgctttttccgccgtatccaaatcagcaatttctttaccatcaatataaattcgagtcatacaagcacttcccataaagcccgaatctctttttatgatgacttcgcccgtaccttcttttttagtgaaaagcgatggatttaa

SEQ ID NO: 234769 - DNA, 576 bp, Klebsiella pneumoniae
atgaaagtggaaaatctacctcctgattactttttgaatgctgacgataaactcgtggactttcttgagaagcagggagaggaagtagttcgtgagattcaagcgtccaataaaataaacgtcgaaaatggttacaaacttctgagtattcagattgtcggaattggttcttcttttctactccttacacaacaaacgagctttgatttcctcgcagctggtatagcaacttttacggttctatggacatggtgcgctatttacttagttcactcagggttgtcagtaaaaatgagaggcctgatatatgcaccaccgcaatgtctttatactcagagcttcaaagatattgaggaagctagttatcagatattctttgatgctgggtacatgggggaagcaacccccttacctctgattaggcgataccggcttgctaatcttaacgatacagccaatgagttacttttacagaatgaaaaaatccgcaattgtttagataaggcgaggatgtttactatcctcgccccagtggtggcaatgcttatttctgctgtttttttaagtattctttaa

SEQ ID NO: 234770 - DNA, 129 bp, Klebsiella pneumoniae
gtggggaaacagctggtggcgaaggtagtggaaaaaatgcgccaggagcagcggaagattatccctctctgcccgtttgccaaacatgaattcgataacacccgcgaatacgacgatattcgcgcatga

SEQ ID NO: 234771 - DNA, 453 bp, Klebsiella pneumoniae
atgaacttgaaagaagtcgtgaaaggtatgtgcaaatcatatccgggtggccgcgaagcaatggctggcgccttgggtatgaccgtgacgcagttcaacaacaacctctacgagaaaaacggctgtcgattttttgaagtatcggagctggaagcgatggaagacatttccaacacgtcgctgctggcagactacttcgcccgccgtcgtggcgccctgctggtggatgtgccgcacctggaagaactcgatcgcgtggacctgtttagtcgtgcaatgcgtacctctgctgccaggggacaggttgatcagattatcgaacaggcgcttgaagatggcgttattgaaaggcatgaggccgaagaaatcatggtgcatcaccgccgccatctggcagctcgggaagaagagattgccgcaattatcacgttattttcacgcaaaaagaagtga

SEQ ID NO: 234772 - DNA, 219 bp, Klebsiella pneumoniae
atgactatcggccttgatggcattaacaggctcataagacccctctatttccctgaattttcgtttgaactgttcaagtgggctgaaacactcatgctgatacccttcgcgcaggtatataacgcgctgtgtttggggctcccagcgtatgaccctgaccgggacgccgtagtgatctctgaaccatcggttaagttctcgcatacgctttccgcctga

SEQ ID NO: 234773 - DNA, 498 bp, Klebsiella pneumoniae; identical to SEQ ID NO: 16552

SEQ ID NO: 234774 - DNA, 2655 bp, Klebsiella pneumoniae; identical to SEQ ID NO: 231076

SEQ ID NO: 234775 - DNA, 1155 bp, Klebsiella pneumoniae
atggaaaacttcaaagtacgtcttaaaaatcacattgaacatgttaaaaatgttagagaacactgcacaacggaagagacaaccaagcaggctttgatacttccttttttggacatcctaggctttaacgcatatgatccgcaaaaagtcaaagctgaatatggtgcggacttccctggtgtgaaagtgggtgagcgtgtagattatgctctattctgccaaggtgttcccgttatgtttattgaggccaaaggttgtaaagaaaaaatggacaaccattgccctcaattatctaggtattttaattctactcctgaggtgacaatatcagcaattactaatggaattgaatggcgtttttttacggatctcaatgaaaaaaatataatggattcaacgccatttttacgaatcatgatggatgacattaaagattctgatgctgagcaattatttagattccgccatgacaaattcaaaccagaggccctaagaacacttgcagaagagagtgtatatatttctgcatttgttaaagttgtgagtacaagccttcgggaagtagatcatgaatttgttagatatgttgcaggacgagcaaatattggtcgtcaattaaatcaaagatttatagaaacaataactccattggtgaggcaggccgtagagaggtcagtaagtgaaatggttgtttctggtctttcatcaagaacatctattcctgaattagaatcccctgctgatgtaaatgaaaataatgtaattgatgagcgcgcagatattgtcgatgcagagaaccccaacatagtaacaacctataatgaaagaattttatttgaaaaaatctgttctattataggccctgcatacgaacttcaagccaaagatacagagtcctattactctattcttttccaaggaaaaacaaaccgctggctggttcgctattatgacaagaagaatcgctcaaacatacagttaccaattgatatcaatgaaataacaggtaatgaaattaaaagagccggtcttgaacatgataacaatcgtattttcattgaacatcctgaggatgtattaaggatttcaggtttaatccttgattctttacaatatgtacagaatgatgagaatttcagaaagcgtcgtccataa

SEQ ID NO: 234776 - DNA, 486 bp, Klebsiella pneumoniae
atgactgatatcaccgaactgacagcggtaacacttgaagaaatccgccagcgttaccgcccgaccttagcccctaagtgccacatttgcggtgttgaaatgacaattcagcgcatgtcggcaagccgcattacttatgactgtagtggcgctacctatgatgaaacaggttgccattacgcaccgggtcgcagcattgccgatgaccattacgcagagtcgccgataacggttattgataccagtgaccctgacgtattgaccctcgtagaggagctggagaaggctcagcagcgcaacgcagaacttgaagcgcaaaacgaatatatccgtaagcgttatcagcaactggatctgctgatcgggaaaatatcctggttatgcaggctgcaatcatcgaatggcaggccactggcgatgctaaaaacgggctggccgatgccagacaccaggctaaatacatttccgttatctggcagcgattaa

SEQ ID NO: 234777 - DNA, 807 bp, Klebsiella pneumoniae
atgaacgaaagatttttcttatacttagatatcctgggctttaccgatttagtgaggcagggtagtaataaaattgatgatctttatgaagtcatagccagcttgaatgctcacagtcatgatgcatttaaagtaattgtcttttcagatacggtggttgtctataatgttgatggcgggcatactccggccgactctcaatatcttgtcatgtttctttgtgagtttgtaaaagacttgatgcatcgtttaacggggaggaatgtttattttcgatctgttataacacatggtgattttacacattacgaaattaatggagtaccttgtttttatggtaacgctttaatcgatgcttataactctgagaaggagttaaaagctattggattgtttattgataaaaaaatagccaagtactgtaatgtattcaaatttgaagagtataatgataattacaattttgtttatgttactcaatctctaagtgatctggaatcatgtcggctgcctattaaagctgatttcatagagatgactgattcaaaatggtttatttatccagagttaatgcatgttaataacatgtaccttggttctgtgaataatggctatccagaatcagtaaggataaaatatgcagcgtcatgggatatgtatcgaaaacattatccgaaactaacagcctatttattactatcaggtaatgatgtgactgctatatcacctgacgttgagtggggtgaggttgtagatagacacccagagagttgtaaatatgcaattaaaaaaatagtaaaatactag

SEQ ID NO: 234778 - DNA, 348 bp, Klebsiella pneumoniae; identical to SEQ ID NO: 6026

SEQ ID NO: 234779 - DNA, 351 bp, Klebsiella pneumoniae; identical to SEQ ID NO: 28365

SEQ ID NO: 234780 - DNA, 390 bp, Klebsiella pneumoniae; identical to SEQ ID NO: 28364

SEQ ID NO: 234781 - DNA, 552 bp, Klebsiella pneumoniae; identical to SEQ ID NO: 28363

SEQ ID NO: 234782 - DNA, 186 bp, Klebsiella pneumoniae; identical to SEQ ID NO: 28362

SEQ ID NO: 234783 - DNA, 192 bp, Klebsiella pneumoniae; identical to SEQ ID NO: 99236

SEQ ID NO: 234784 - DNA, 810 bp, Klebsiella pneumoniae
atgagcaagccatttctgaaatgggctggtggaaagtatacccagctggctgacctgttcgtgcatatcccggcagggaaacgcctgatagagccattcgttggtggtggggcggtattcctgaacagcgataagcacgcagattacctgctggcggacgttaacccggacctgattaatctgtatcagatgttagcggtggtgccggatgaagtggaattaaaggcccgctggatgtttgagcacatgcggtcatcagatggctatgagctgatccgttcagagttcaacgctcagacgctggatgctactgaacgcgcagctgcattcctgtatctcaaccggcattgcttcaatggcctgatgcgctacaaccaggcgaacaagttcaatgtgggctggggaggctacaaggctccgtattatccgatggatgagatgaaagccttcgcggctatggcgcataactgcgtcttcatgactgctgactatcgccgaactatcagcctggccgggaaaggggatgtggtttactgcgatccgccttacgaaccgatgccgggaacaaccggattcaccgcctacgccgctggtggttttagctgggataaccaggtggacctggcgaagcaatgcgtatctgcctttcaccgtggggctcgggtagtaatttcaaattcatctgcaccgaaggttctcgacctgtaccgggagcatggtttttacctggaattcatcaaagcgcgccgttcgatctcctgcaaaagcagtacgcgggaagtcgcaaaagatgtcgtggctatcctgtga

SEQ ID NO: 234785 - DNA, 900 bp, Klebsiella pneumoniae; identical to SEQ ID NO: 234670

SEQ ID NO: 234786 - DNA, 1020 bp, Klebsiella pneumoniae
atgaatattaatatacttgaaaaaatgaataaggtgcccggtgggttaattattattccactgctggtggctatattaattaatactttcgcgccccaggtgctcagcattggcggcccgaccaccgccttatttaaagtcggttccagcgccatgatgggcatatttttgctcatttgcggaacctcgatcaatatccgtcaggccgggttgccgctctataaaggcgccgtgctgctgtttctcaaatgtctggccggggcactggcggtgtgggttgcgggaacgttgtttggcccgagcggttttctcggaatatcgaccctggcgctgattgcctgcctgaccagctcgaacagctccctctatatcgcattgtgcagcaactatggcgatgccagtgatgccggggcgatctccgtattctgcatcaaggatggtccgtttgttaccatgatggtgctgggcgtcagcggcctggccaatattcccttcgccgcgctgctgtcgatgctgatcccactgctgattggcatgctgtggggcaatctggacgaacgctttaaacagttatgcgctgcggcgcagccgctggtgatcattattatgtcgttcgccatcggcgccaactccagtatcaatacggtgttcaccgccgggctgtccgggatcctgttggggattatctccgcgctaaccgggattgtgttctactttatctacaacctgtttttgaagaagaaaagcgcgctgggcgccgcgctgggaaccaccgccgccagctcggcgctgacgccggcgatggttgcccaggcggatccttcgctggcgatgtacgtggatgccgctaccgcgcagctggcgacggcgagcattatcaccatgatcaccgcgccgatactggtcgcctggtttgataaacggctgaaaaagcgtgcgccagccgctgaaccgctgaaagaggtgaaaagtgaagagagcgtgacattatcttcccctgccgccaaaggacacaaatag

SEQ ID NO: 234787 - DNA, 1635 bp, Klebsiella pneumoniae
atgcaaactaaaatcagtgaaatcaagttagcattacaagacggtgttctcggcttctacaatagaattgaagttacggagatcttttcattaagccctaacaaaactccgtgcaatattttaacactgatggttgcagaaagcctgaacgaaccaatcgacacaaaagaaatctatttaacaaaagagcttatttcaatacacaaccttaagaattggcgttttggaattaaaaagtatcaccttagcattgacgatcttattctaagattagatgcgttaaaccaaaatagaaagtggaatgattatcaaacggaaattacacatctaaagaaaattgataaatactttatttcggctgattcatatgaattagttccaattaataatatattaaaaaataactttaataatggctcctatatttttgaatggtttgactttagtaaagaaaaccataaagagctattgtcatcaccacaagccctacaagcactatcagatatagtaaataaaatcataccaatatctattgcaagtgtatcagatagagtaggtaactttttattgcaaattccaattagagttataatggcaaagtttggattagaagaacaaaaccaaacttatacgttaaaatgtgatcttgactggcatgaggatgctcaaaaaagggatttaataataaattgtcatttaagtgaaaatgataggatttgcgagggctactatactactatattaaaaagtggtgatttaactatttcattaccaataccaaacaaacgctctcacattggtactatttgggatcctgagtataactttattctatccagaactagaccgtctgcttttatatcacccacggcaagaattacaacttcagtttcaacataccaagaaagaatattgacaaatgggatagtatcaaaaaaaataagcatactaaagccggacaataataagaacaaacttaacagttcaaattccgtcgttaactgggttgataaaagaatttatgacagtagcagcattcagttgagagaaagtcgtaatttcgtccaatataattcaaaaggaaataacaaattacagtctaaatataaagctcttgatgatttaattcacttgataaatacatatggccaagatgctgtatggttatgggatccttatttgagttttcaagacctgtttgatacgttattactgaacagacattctggttcatccatgagagcaattagctcattggaattaccaccagacttgaataaagaagtcccattacaaaataattatgaatcaaaagctattcaaaccataaataaatacaaagagagctttaatgctttaccctcagagacaatcaagaacataaatttagaatttagatgtagaataggtaataatggatgggattttcatgacagatttattatttttcctgcaactaattatcattcgagtacaactgcatggtccttaggcacatcagttaattcgttcggtacaagtcaccatatactacaaaaggtacatgatgcacagctcatcgcgaatgccttttcagaattatgggattctttagaaagtactgattgcttagtatggagaaacattaatgattaa

SEQ ID NO: 234788 - DNA, 513 bp, Klebsiella pneumoniae
atgataaataaaataaaatcagtagaattaattgaggagaatatgttgcagcaaataagcaaagacatatttttagtaaatgcaataccacctaatacatttgcaaatgggaaaggtattttaatatcaaatcctcaatggcttacagaaaaactactatctgtatcagcgggagttagtaagggaaaatatacaatgctgtatgtggctttacttgttgaaatggtggaaaaaatcaaatctatgagctccgatgagaaagatagaacttttaaaattttaaagcaaaaagaaaacgatcttaaattttcggttacatgcggaatggaaaaaaagaaaatacaattattagttcctgaaaaaacacttgatgatattaatgggttaatgcctgatagctttaagtattatatgattccagcattaattgaccatgctattaatttaaaagaacaaagcggaaatgtgtttttgtttgaaagcaaccatgaaggagagcattatgaaaactaa

SEQ ID NO: 234789 - DNA, 909 bp, Klebsiella pneumoniae
atgattataactataaatgatagtgaatataacaagctatatgaggctggaaatttagatagagaagccattatagatacaatcgttaaggcagggggtaccgaaaaagttaaaattaaagttgattatcgtcaaaacaacccttgtgatataaccataaataatgaagatatagagacattaaacacattaacatttttaaaagaaatttatcaagatataaacaatgtgattattggacatacaccgaacgacacaatctgtatagctcttataaaatggggctatgatatgacacaggttgatgattttggcataccccatattgctaacttcggtaaggaagcactatcagaagtgataaagaacgggttagatatgagtcaatttacacaaggtgatcattttgattttaatcataatcatagatactctcgttttattaatacaaatgaaaagcttgaagtatttcttcaagctggattgctaaccgctgatactattaaagactatgaatgttttgaacatcacaaactttataacaaacctgatttaaatctaactgataagggattcgaactgctttttaaatgctatgactccatatcattaaacaccggaatgatgagttcatatagtatacattcaggtgaaaccacaactaacccagcagtgtttgagttaattggcaatgaaagacatttagatcatttgttcaaacgatacatagaagtgagttcagataaagttgaagctattaacttcataaaagatctgttccagaaatcagaatctcacagtttgaacagtgggaactaccctaatacagtgacgacaattgaagacattgaaatacagaatatattcaagcaatcacaaccaaaaaccattaccagaagaagaatgtag

SEQ ID NO: 234790 - DNA, 693 bp, Klebsiella pneumoniae
atgaatttaaggaaaataatagcatacataataatggcagtttttattgttttagtgtttatgccaataaatatagaaaatacagaaatcgctgctcatattggaattataaagatcactttaataggcggtgtgttggttgagttgttctttgtagggattatagcgggtaaaaaggaaagtattattgcagcaataatgtttgtgattttatctttgccatttggtcatgtattaagtaatgactcttcgatagagaaactaactatttcaatgtgcgaaaacgaaaaacaagcaggaattgaaaaaaaaccatatgagtgcgaggaaatagccaaaccatcatccagctttgaaagctttttctttactttcggtttaattgtaatgagtttattattaataaatcaatatattttatcaacacgaaaagtaaatatattattgagattttttgatgaagaagaacattcaacaaccgaagaagagcaaataaagacaaaaagaagagttgccagcttagtagaaaaagcaaatacattatgtgaaagtcctgctgtaagggtaacagtttttattgtcggttcaatcttagttttattaatagcatttatgcttatataccatgcatctgttaaagaaggtgataatttaaacataaagacaaaagaaataataacgacaaaaatctaa

SEQ ID NO: 234791 - DNA, 1854 bp, Klebsiella pneumoniae
atgtcgttagatatctccgttagcacaatccgcaacacggtcacatttgtggtggataaaaacagcatagctcaggcaaaaaaagctgctgatgatctacataaagcttttgaaaagctgcaagaccccaagattaatttcaaacgttttaatcaaaacctgaaacaggcacagaaaacggtagagaaggcctctaaagccgcctctaagccccgcgataatagccaacgtgaagcagaacgagcagcaaaagcgcaagcacgtgtagaggcacaggcagcgaaagaggccgcaagagcagcccagcgtagagaacgtgctgaattgaagctattggatacggccagcagctttaaatcaatgcaacacctcactaatgttgaactcacacaggctgcattacaggctagtaaaatcactaaggcgtatgctgacggaacaatcagcctacaacgccagaacagcgagattaagcgtttacagcagagttatcgcaggctcaatgctcaacgtaaacaatcggcttctcctaattacgctaaagtggctggcaatatgccgggcactgggattattacaggtagtattatggggcttggctctcgtgtattagctggcgctggcgtgggcgctgccgcttatggcgcatataattggggcaaaggggctatttcctctcaggaggaaagaagcgagattgtagctagagcacggttaggaaatgttgattacaacgtcttacaggcactttcacagtatgccacggctaacgggatcgatagtgggatggggctgcaaggtcagcggaagttgctcgacaacggaaaagacatcgccgaaaagctggcagacagctacaccaacagcacctttgataagaagtctggacaatggaaaggtgggaacgctgctgtagacacagccctgaacatgggattcacaaaagctgatttaaagaaatatcaatcaaatccgtttggctttgtctctgcttacaccaacaccatgcagggaaaaggctattcacaagagcaaatccttcataatctggaagacctagcagacgatttgggcttgtatcacaatgcatttagtaatggtggtaaggcactcactgatcaagttgatatattaaaacgtaacggtcaatggttagataaggaacaacaggatcagctcgttgcctatcgcaagtttaatcaggaaatgagtgtcctttccgatagccagaaattagccttctttgaaggattcatggaatctatagaccctgaaaccatgcgagagtttaaggaagctatgcaagatgctttgccattcttcaaaggattagggaaagccgctggcgatgttgttgagggattaatgaagttaaccaactggatcacaggaaagctgaaccttctgaacggtgataacaccactaaagaggcagtgagccagcactacggcactacaagcgcccctgtagctcctgggagcaatcctgtagcgaataattacggggcaactcagcccagagcagacggcacacacgagccaaatatcttcgacacaatgcgcgggtggtggtatggcacaagcgatgccagggatgttaccagctattcgtctaacaaggatggaagctattctcctgtctctatgctgaaacagagtgcaacaactaccgctacgcctacacaagcgcctgtagtggctcctgtggtgctacagaataacctaccggaggggatgattaccctcaacattgctcctgatccgtcattcggaaacatgctaaatgctactgtggatcagaagataacacaggccaatcagcgtcttgttttatctatagcgaggctttgttga

SEQ ID NO: 234792 - DNA, 543 bp, Klebsiella pneumoniae
atgtcggttggtggtgtagtctccccggggggatggcgtggcccaaggcggggtcggcgtcatcgggtcttggtcgtcaccggagtggatatcgtgaagaagagtgcattcatcgtcatcagcctgctcgccctgacgggttcgcccgttgtcgcgggcaccagcgcccaggtggaatacggcacggtacaggagagccgcctcctcacccaggaggcgccccggcagggaactacccggccccttcgcaccataggggcggccgcgctgggagccgccgtcggcagccaatttggcggtggctccggccagaccgtcgccaccacagtgggggccgtcgcgggggccgaagtctcccgccgccgccagggtaaccagcagagcgagcagggccggcagacggtcgagctgctgatcaagacggaggcgggcaaactgctcaacgtcgtgcaggagcaggatcccgcactcaccttcgccaagggggacagggtgcgcatcctgaccacgggagcggacacccgggtcgacaagtctgtatag

SEQ ID NO: 234793 - DNA, 1614 bp, Klebsiella pneumoniae; identical to SEQ ID NO: 234679

SEQ ID NO: 234794 - DNA, 450 bp, Klebsiella pneumoniae
atggctttagtatcaataagcgaagcagccagactaactggaaaaagccgcacaacagtacagtcatacattaagcagggaaaactgaccaagtgcacagatagcggtggtgcttcaaaactagacacatcagagcttctacgtgttttcggatcatttactggtcagcaggttggcagtgaacaatcaggcagtactgtgcagcatttggcaggcgattttgtgcagttacctgaccagaatttgctacatgaaaactatgccttaaaagctgaaatagaactcgtaaaggcattgctgcgtgagaaagagctactactcgatgaaaaagacaaacgcaatgaggatctcaaacatgctttgctgctaatcgagtctaaactgccgaatacatcggaaccagtgacacctcatgtggtgaaaaaatcatggcaattctggaagaaatag

SEQ ID NO: 234795 - DNA, 957 bp, Klebsiella pneumoniae
atggctgaattggtagtattcaaagcaaacgagcttgcggttagtcgttatgacctaacagagcacgaaacgaaactaatcctgttttgtgttgcaaagctaaaccctacattagaaacaccagatgaaactgaacgaacggttaaattttcatgctccgaatattcttcatttatggggataagttatgagaatgcgtgggggcgattaaatacatcaacacgagagttatttaagcggtctattgaattaatatatccaacaggtgctgtatctatgcgtgtttttaattgggctgaatatgcagagttcaatagggaaacacaagaggtaactttagtttttagtaaatatataatcccattattatttcacctaaagagattcattaaatacaacctcgagcatgttaagtcctttgaaaataaatactcaatgcgcatttatgaatggctgctaaaagaactaacgcaaagaaaaacacataaagccaatatttcaataagcattgatgagtttaaattcatgctaatgttagaaaaaagctacccagaatataaattactaaatcattgggttttaaaaccaatttcaaaagatttaaatacctatagcaatataaaactatctattgataagcgcggtcgtcctgctgatacgctgatcttccaagttgaactggataaacaaattgaccttgtgactgagctagcaaaagaaccaatatcaaaaaaagaagataactcaatccgtttaacgcctgaaaatcgtctgcatgaggggctaaaaacaacattacatgatgctttaactgcgaaaatacaacttactggatttgaagctaaattcctgagtgacatgcagagtaagtatgatctcaacggctcatttacatggctgactcaaaaacaacgagccacgctagagaaaattttagctaagtacggacggaactga

SEQ ID NO: 234796 - DNA, 468 bp, Klebsiella pneumoniae
atgaataaaagcgaaaaacaggaaaaatgggcagcagacagagtgcagtacattcgcggcttaaagtcgccgaatgaacagcagaaactcatgctgatactgacggataaagcggataaaacagcgcaggatatcaaaacgctgtccctgctgatgaaggctgaacaggcagcagaaaaagcgcaggaagccagagcaaaagtcatgaatctgatacaggccgaaaaacgggcagaagccagagccgcccgtaaagcccgtgaccatgcgctgtaccagtcagccggactgcttatcctggcgggtctggttgacagccagacggggaagcctgttgatgataccgctgccttgctgggtgcattagccagtctgaatgacctgtcgagggataatccgaagtggtcagactggaaaatcagaggtcaggaactgctgaacagcaagaagtctgacagctctgcatag

SEQ ID NO: 234797 - DNA, 1116 bp, Klebsiella pneumoniae
atggcatcctatcaccttagcgtaaaaaccggcgggaaaggcaatgccaatccccatgccgattatattgcgcgtgagggaaaatatgcccgtgaaaaagactccgaccttgagcataaggagtccggaaatatgcccgcatgggcagcgcataaaccgtccgagttctggaaagctgctgacacgtctgaacgtgctaacggctgcacctaccgcgaaatcgagattgccctgccgcgtgagctaaaacccgaacaacgccttgagcttgtccgcgattttgtccggcaggaaatcggcgaccgccatgcttatcagtttgccattcataacccgaaagcggcgatagccggcggcgagcagccgcacgcgcatatcatgttctctgaacgcctcaatgacggcattccccgtgacccgcagcagtatttcaaacgggctaataccaaagagccggagcgcggtggcgcgaaaaaggcacgtttcggggaaacacctaccgaacgtaaagagcaccttgttgcccagcgggaacgctgggctgacctccagaataagtacctggaacggtatcagcacgctgaccgtgttgatgcccgttcactcaaagtgcagggcattgatcgtgagccggagcggcatcttggcgcggggaaggttcagcgattcgattcggcgcagttacaggccattcttgagcgcagggaggctgaaaggcaggtgcagcagtcccgtgatgaacgtgatagcgtaattgacgtgaccacctcgctgcgcgaggcactggcggagcgggatagtctgacgccaaaacaggaacagaagtcagagcctgagcaggaagcccattccggcagaacgtttgattttgaaaaagagcctgacaagctgaacacactggtcagtgatgccatgaaggacatacaggaagaaatcgatcttcagtcccttgttaacgatgccatggcggagtttcaggggatacatcaggaaatggaacggcagagagagcgtgagcgcctggtggaaacacagcgtcaacaggagaaagagcggcagcgactcgccgaacaaaaacgacagaagccggataaaggctggtcattttcacgatag

SEQ ID NO: 234798 - DNA, 585 bp, Klebsiella pneumoniae
atgagcgacgacattaaacaaatcgctgccctcatcgggcatcatcaggcgctggaaaagcgtgttacctctctgactgagcagtttcaggacgcctcagcacaattacagcagcagagtgacacgctgagcaggctcattcgtgagctggacagcgcgtccggtaatatgactgaaaccgtcaggcaatctgttcatgccgcgctcattcaggttgagaaagagctgaaacaagccggattagcacagcagaaaccggcgacagaagcgcttaatcaggctaccgatacggcgaaggcgatgatccatgaaatgcgacgcgagatgtcgcgctatacgtggaaatctgcgatttatcttgttctgacactgttcttcgtcttggcgtcctgcgtggctgcgctgacgtggtttatgaatgatgggtacggacagatagctcaaatggaggcaaaaaaagctgagtgggaaaggaaagctccgctagctaacatcagcacatgtgatggtaaggtatgcgtacaggttacaggttctgagtatacaaacaaacaaggtgataggttttacataatcaggcaatga

SEQ ID NO: 234799 - DNA, 849 bp, Klebsiella pneumoniae
ttgaagtatatcatatatgcagatgaggcatggactcattcccagccactttatagataccatcgtttttttggtggtatcttatcatcagaaaatagttttgatgatcttgaatgcgaagtaaagaaactaaaaaaacaacataactataagaaagaaataaagtggtctaacctctcggcgagagatatttctttttacactgaattgctcgagttagttgggacgtttctttgcaaagaagatcataccaagtacaggcaaatgtttatggatagatcatatcaatatactggcgtcaatgctcctgatcttgattcgcaatttaaaatatactatcagtttttaaaacatatttttggtctcgagttttcagatgctaactctgagttcctatttaaactagataatcactctagttatttgcataaagagagactaagagaattcatatcctctattagtaacgatagagttaagataagcatagagtttatagaaagtaagacatcaatccctttgcaaatttgtgatttgttgatgggggctgcaggttattacggaaataaagtcgactgggacctattgcctggaaaaaagaggcgctctaaaaatcaaataatgaaatcagaatttgggaagggggtatataatttacttagaaatattgatgcaaggttcagaggtagaaaggcttttaactggtttgaaactacgggtgtagacggctgtataagtaatagatatcatcataaaatgaggatatggaagtttattccaaatggccatgaaaaagacgtttcgtgggaggatgatgctttcggaaaaaatacagtcaggaaaaagtaa

SEQ ID NO: 234800 - DNA, 192 bp, Klebsiella pneumoniae
gtgactaaacaggaaaaaaccgcccttaacatggcccgctttatcagaagccagacattaacgctgctggagaagctcaacgaactggacgcggatgaacaggctgatatctgtgaatcgcttcacgaccacgccgatgagctttaccgcagctgcctcgcacgtttcggggatgacggtgaaaacctctga

SEQ ID NO: 234801 - DNA, 1125 bp, Klebsiella pneumoniae
atggctttcacaacatggtcattctctagattcttgtggattttgacttgggtttttgtattgctgctggtgcctgtttttcgcatgacggccaagcgtattctagattcattaggcctgtggcggcgcgaaacttggatcataggtaatggtccaaatgcgcaggaggcttttaaagcaataagtagcgagagaaatctggggcttgaaatagtcggctttattgcgagcgatgatcatgaaacaaacaaatcgattattaacaatataccagtcttaccaaatgatatagaatggctaaaaaataaaaataaaaatacccaatttatcgttgctgttgaatcttcacaaagtgaaataagaaatacatggctacggaattttatgattaaaggctatcgctacgtatcagtcataccaacactgcgtggtatgcctttggatagcacagatatgtcgtttatttttagccacgaagttatgattttcagagttcagcaaaatttggcaaaattgtcatcaagacttataaaaagaatatttgatattataggctcaatttcaataataattttgctttcgccaatattaatctatatcagtcgcaaagttaaagaagatggtgggccagctatttatggccatgagcgaatcgggaaaggcgggaaaccttttaaatgtttaaaatttagatcgatggttattaactcaaaggaagttttagaagaacttcttttgaaggatataaatgcaagaaaagaatgggaagaaacttttaaattaaagaatgaccctagagttactaaaattggggctttcttgaggcgtactagcttagatgaattgccccagctatttaatgtactgaaaggggaaatgagtttagtagggccaagacctatcattactgcagaattagagcgctataatgaagaggttgattattatcttcttagtaaaccagggatgacgggactatggcaggtaagtgggcgaagtgatgttgattatgaaacccgtgtctatttagatgcatggtatgttaaaaactggtcgatgtggaatgatattgcaattttatttaagactattggtgttgttttaaagaaagatggtgcttactaa

SEQ ID NO: 234802 - DNA, 789 bp, Klebsiella pneumoniae
atgaaaaaacaattttataaagcaatggaaaatattttaacacgatctaatcgctcacattctgatacagtcagagagttctttaattgtgtgtcttacaccatgataatgaatagtctttatcagttagaaaaaagagaacagttttactcaggtgaaacaacatatcggttttcaactattctcaatgaattgcatgtagcagagagaaatataatcataacaaatagacataaattcaaagttgatagtgtgttttataaaagattcgcaaatgaaataacatatatttcaggagtattatctaatgaaattgggaaaaacccactaactgatatattcaatgagttgtttgaagatttatttttaacaggtaaaaaaggtgacagctttggtcaatttcttacacctactgatatatctgaacttttgacagatatagtttatactaccagtaaagataaatataaaatcgctgatagctgtgctggtactggttctttaatattcccattaattaaaaggatattttttaaagaagggtttgaaggtattcaaaaagtagagttgttttataatgacaaagattcatttgtatctcagttgttcatagctcaaatattgactaatatgatttatcataatttagattttaaagatcttcgtatttatattggtgatgctataactgaatacgacactataaacactttatttttaagatttaagcaaaataaattagtagctcaacgggtattagaaattgataaagaaaagaaagcggcatga

SEQ ID NO: 234803 - DNA, 510 bp, Klebsiella pneumoniae
atgaaaaaacaaaaagctcaatactctacattcacttcatatctttctaaaaccaataaaaatgtagatatgtatagaatttataatccattaaatgaaaatctaaatattttcggttttggatatgatatatatttctatgattcatattttaaaaggcatttggttacaagaagaaattttctaactgtttattctattctttgcttcaaactaagtaatgaaagatttttaggtaaaaaagaaatatacatgcaagacaaaaaatattttgttgaagcttcaattgaattatttaaatttaaaataaaccatttcttcagtaatattgatggcttaaatatttcattaagaggtagaaatgcaatttccatatccaaatttgggaaaaaagaagaagtctcatatttcacattatcacaaattgcaggtgatatttttgatattaatgattattcaattaataatgaaagtattaaagaaagaattgctgcattaaatgctgcataa

SEQ ID NO: 234804 - DNA, 789 bp, Klebsiella pneumoniae
atggaaaaacaattcaaaaagacactggcaagcattcaaacacgatctaatcgctcacattctgatacagtcagagagttctttaattgtgtgtcttacaccatgatcatgaacagccttttccagttagaacgaagagagctattttattcaggaagtaatatatacggtttcaatcagcttgctatacagtctggttttattgagaaatcaataatgttaaccgatagacataaattttgtatcgaagaaaaattttataatcagtttgataatgaaattatagatacagctaacttaatctcacttgaaatacaaaaacaacctttaacagatgttttcaataacatatttcaagagttatatttaacaggtaaaaaaggtgagaatttggggcagttcttaacacctaacagactttcagaagcaatatgtagatttgtaggctgggaaaaaaatattaaatataatattggtgatatttgtgctggcacaggctctttactatttccgttgcttagagaaatttacagtaaagaagggttcgaaggtgtccagaaaataaagcttatctataatgatattgattcgctcatggctcaattatttatgtctcaaattcttactaatatggcatatcataatttagattttaaatctctccatgtgtacataggtaatgcaattactgaatatgatactgtaagcactctttttttgagatttaagcaaaataaattaatagctcaacgggtattagaaattgataaagaaaagaaagcagcataa

SEQ ID NO: 234805 - DNA, 741 bp, Klebsiella pneumoniae
atgaaaaaatacgaaacaatgcaggatatatattttaaatacaataagccattaggtttaatccgtgggattaaaaaagaggtttcgaatgcagaatataaggaagttaaagaattttacagcgatattaaaaacattaagaatgaaaccgaattagaaatagaaaataataaaattgaaaaaattagagttgttgaaacagaagaaaagaaaaaattatttagagatccggaggtagtgcctaagcactacacaggagctgaggttaatcgttacatacgaaaggctctaaaaccttacaagaacgaacgaaagccccttatagctcgtctaaacgggtttaagagccgtttagagcattcagaggctgagttgtctgatctccgtcagaacttcaacagaagagtccaggaacgggtacaacaggagcaaaagttagcagtggccagagccacggctgagcaagaacaaatcattcaaaataaaaacagaaaaataaaagatatggagttggaaataatagaatacaaaaggcagttaaaggaaaatgcttcaatttctcagagatatgaaaaatataaaattaacagtgatgttttagatctaatacaagagcataaaccggcagaatttaaacaactcttcaatgctgctattgcagcagcagatgccgaatattcacagaaacagcaaaataataactacacaccccagaataagccaaaggctttaaaattataa

SEQ ID NO: 234806 - DNA, 606 bp, Klebsiella pneumoniae
atgaaaaaaaataaattagtaaataaagaaaattactcaatattagagactttgccggaagatccattatttgaaaataaatcgactttagaaattgatttaaatcaattcgatttatttaatagaattgcaaacgaaactgtagaagaacttataataaaagaagttaacgatcctaatgaccgaagcgataaaagcaatggtgttaatttaaatgcaaaagtttatgtagaaaaagaaaaaaagacttcattaaaaaaagattttgttattacatttgtagataatcttgaggctttagcaaaattaaatttaaaacctaatgagtttagaattatcgtcgagattgtaaaggttatggaatacggaaatctaattaacctttcacaatctacaattgcgaaaaatttaaatcttgcaaaatcaaatgtaagttattattttaaaaaccttaaaaagaaaaatatattagtagaaaaagacggacacgtctttatgaatagtaatattttttctaaaggattagcccatcgtttggacgaagaaaaaagaaaaaatttgaaatccgcacaagtcgaagacgataattttaaaaactcattttaa

SEQ ID NO: 234807 - DNA, 408 bp, Klebsiella pneumoniae; identical to SEQ ID NO: 15278

SEQ ID NO: 234808 - DNA, 609 bp, Klebsiella pneumoniae
atgaaaaaggttcttctttctgcagcaatggcaaccgcgttttttggcatgactgctgcccatgcagctgataccaatgttggcggcggccaggttaatttcttcggtaaagttaccgatgtatcctgtactgtttccgttaacggccagggcagcgatgcgaacgtttacctgtctccggtaaccctgactgaagttaaagcggcagcagcggatacttacctgaaaccgaaatctttcaccattgacgtctctaactgccaggctgctgatggcactaaacaggatgacgtaagcaaactgggcgtgaactggaccggcggtaacctgctggctggcgcaaccagcaaacaacagggctacctggcgaacaccgaagcttccggtgctcagaacatccagctggtgctgtctactgacaacgctaccgcgctgaccaacaaaatcatcccgggtgacagcactcagccgaaagcgaaaggcgacgcttccgctgtagccgatggcgcgcgtttcacctactacgtaggctacgccaccagcgcgccgaccacggtaaccaccggtgtggttaacagctacgcgacttacgaaattacttaccagtaa

SEQ ID NO: 234809 - DNA, 258 bp, Klebsiella pneumoniae
atggaacatggtgccagacaaaataccacccgcgttatcgctgtgggatttatcagtctggggacactcctgaccctcagtcttgcgaccaatattatccagggcataaataattaccgtcttcagacggaacagaaagtggcggtgacaccgatgttattccgtgcaccctttgcggtgtctcagaaccaggctgacgcctcttatattgagcagctgggcctgtcctttgttgccctgcgtggctttgttgaataa

SEQ ID NO: 234810 - DNA, 129 bp, Klebsiella pneumoniae
atgatgggtagcaggagaaagtgcgtgctcatcttccaggcttctcaggcggataacagtcaacgctttcgcgaggttaaaaagggcgacatttcaatgttgtgtaccaaaatgcgcccttcattctga

SEQ ID NO: 234811 - DNA, 2958 bp, Klebsiella pneumoniae
atggaagttccaaatttcaaaaaaagccgtctctcgcaattagtcgcgcacggcctgattatctcaggacgcggcggcagtaagggtggcggtagctcaaggacgccagtggaggctaatgacacggtaaacagccgcgctatggcttctgtattggatttgctgggtgagggtgttatcggtggtctgattgatggggcaaaatccatcttcctgaacgacacgccgctccagaatagcgacaattcctacaacttcagcggtgtaacctggtggttccgcgacggttctcaggatcaaagtgtcatcgatggttttgacttcattgaaacgccgaaatcagtagggcgtcaattgaagcaaacgagccaggttaacgtgtctctggattctgcggacagcgatcgcgttcgtgtagtgatgaagtttccttcacttcgcagcatcgataaaaagagcggcgatactaacggtacgacagtccagtttaaattccagatcgacgcaggtaatggcggcggctttgttgacgttgttgcagagggagagtccaacgcaaccatttctctgaccgcgaagaagacaggtgtttattaccgtagttatgttctggacttaccgaagccggcaaaggcatatactctgcgtgccattcgtctgactgaagatcataccgataacagctatctctacgatgacacctacatcgattcgatcggtgagattgtcaataccagcctgaactatccgaactctgcgctcgttggcctgaaaatcaactcagagcagttcggttcttcaatgccgactcgttcatacctgattaaaggtttgaaaattcgtgtcccgtcaaactataacgctgacacgaactcctacgacggcaattgggacggtacatttaagctggcatcatcctccaacccggcgtggattctcttcgacttgctgacgaacactcgttacggtctgggtcagtttgttcaggagtcgatgattaacatcggcgagctgtatcagattggtcgctactgtgatgcatacgtcgacgatggcttcggtggcaaagagaaacgtttcgctatcaatacccagataaccagtcgccaagatgcatatcgcgtcgtgcaggacattgcaggggcattccgtggcatggtttattgggctggtggcatggttcacatcacgcaggattctccagcagaccctgtgatgctgttctccaacagcaacgtggtgaatggatcatttgcctacaaaggttcggcgcgtaaagatcgctattccgttgctcttatcacctacaacaacaaagaggacggttacaagcagagcgtcgagtatgtagaagatcaggaagcgattaaacgctatggcatccgcaaaactgagtcagtcgcattcggctgtacttcacgcggccaggcgcatcgtgttggtctctggacgctctacacctctcgcatggaatctgacgtcatcacctttgcagtaggtatggactctgtattcctgatgcctggcgacatcgtgctgatcgcagataaattccgcgctggccgtcgcaacagtggtcgtattatcggctacacctccaatagcatcaagctggacgctccggttgatctgacttcagttggaaaccatatcaccttcctcagcgcagaagggaagatggttgggcgtgatattttggagaatgggaagaacatcaccaccgtcacgtttaaaaccgctctcagctccaatgagacgccggtaagcgatgcagtgtgggtcattgctcaaccagacttaactccgctacaagcacgcgttgtgagcgttgctgagggtgacgatggtacgtcgttcaatatcacggctattcagaacaacccgaccaaatacgaagctattgatagcggcgcacagctgatcccgcaaaataccactgttcttgacccaacgttctcaaagccgtcaggtctggcgattaccgaaggcacttatctgtcctctccgggtaacttgtccgtttctctgaccgctacatggcagggcaagtcggctcagtattacatcagctggcgccgctccgatgccgggaatgtttcaaactggaaatctgagcgcgtaactgaagaacagttcgaacttcgtggagtagcggagaacggccagtacgacttccaggtgtacgctgtttctgttggtggtcgcaaaactgatcctatcagcatcacctacaaagttctgggaaccatgacggcgcctgatgccccgaccggtctaactgcggtaggcgattatcgttcaattgttctgaattgggtaaacccggcttccgttgacttggatcacatcgaggttctggcatccaagaccaacgataagtctaaagcgcagctgattgccaaggtatctggcacaaccttcagtcacaacggtcttgaagactctgtcacctggtattattgggtacgtgcagccaacaaacgtggaatgctcagtgcgctgaactctccactagcgacggtcgcaacgacgcgcgacgttctttcgttcctgcaaaataaaatcaccgagtccgagctgggtcaggatctgattgccgacatcgacagtaaggccgtggccacagaagttgatgccgccatcgaagaagcgaagagccaggcgacatctcagattgatgatgctcgcgccgagtccgcgaatgccgtcaacgaagcgaaaaaagccctgaactctgcaattagtaaagagactaccgaccgcacaagcgctattgctggtgaggcaaccgctcgtgcaaaagctattgctgatgaagtggacgcccgtaacaaggcaatttccgatgaggcgtctactcgcgcttctgcgatctctgactccattgccgtggaagccagcaatcgtgcaaaagccattagtgactcagccttgtatcttaaagatcggttaaaatag

SEQ ID NO: 234812 - DNA, 156 bp, Klebsiella pneumoniae
atgtgtccatctttcgcgcccagttcgcaaatgatgtcggctccgatttggtcactcaaagatattgctgatagttttgtcgccgtcgacatccagttcaaaattgcattcatgttaataccattaaatagtttattgcttattagtatgtcttaa

SEQ ID NO: 234813 - DNA, 1293 bp, Klebsiella pneumoniae
atgagcgagctgagttatctggagaaactgctggatggggctgaggttgagtggttacctttaggtgatatttctgaaatttatggcggtcttacgggtaaaacgaaatctgattttgatggtgggaatgccaaatatatttcatataaaaacatatttagttgtattgatattaatcaaataccagaagataccgttaaggttggtgaaggtgagcgtcagcaccgggtgaggtatggtgatgttttatttactggctcatctgaaattgcagaggaggcaggcatgtcatcagctatcacgatagaatttgacgaacctgtttatttaaatagcttctccttcggagttagattcaatgaaggtataaacataatccctgaattttctaaatatctatttagaacgaatttcatgcgtgctgaaatatcgaaaaccgcaagtggcgtaactcggtttaatatttccaaggctcgtttcaggaagcttttgatacctataattagtcccagcaaccctgaaaagtccctcgccatccagtctgaaatcgtcaggattctggataagtttaccgagcttaccgctgagcttaccgctgagcttaccgctgagcttaccgctcgcaaaaaacagtacaactactatcgtgaccagttgctgagttttgatgagggtgaggttgagcatcttccaatggggcaaaaagatataggtgaatttattcgaggaggaagtttacagaagaaagatttcactgaatccggcgtcggttgcatacactatgggcagatttttacgcactatggaacatatacagacaaaacaaaaacatttgtatctgagtcactagccaagaggtgtcgtaaggctcagtcgggtaatttagttatcgcaaccaccagtgaaaatgatgatgatgtgtgtaaagcggtagcatggatgggagatgacgatatcgcggtgagtagtgatgcttgtatttataagcacaaactcaaccctaagtacgtttcttatttttttcaaacagaacattttcaaaaccaaaaaagacagtacatcactggaaccaaagtgagacgtgttaatgctgataatttggcgaaaatactaatacccgtgccatcacgggaagagcaaaatcgtatcgtcaccatcctggataatttcgatactctgaccagctctatcactgaaggcttaccgcgtgaaatcgagcttcgccagcaacagtacgaatactaccgtgacttgctgttcagctttccaaagcctgaagccgtaacagactga

SEQ ID NO: 234814 - DNA, 141 bp, Klebsiella pneumoniae
atgacgagattcaacggtctcaacaaagtgctgacgtttataaaaaacatgcacctcatcaataaccatatcaagtcattgacttactttaacagcacccagcttggtcagtttatctttaccgaagtgaagagactctga

SEQ ID NO: 234815 - DNA, 1188 bp, Klebsiella pneumoniae
atgctaatccagaaagcgtataaatacagactcaacccgacagatgcacaggcgcaacgactgcgtcagatgtgcggctgcgcccgttttgtctggaattacgccctggcagagacgcagcgtattcttgaggccggacaaaaactcccttccgcctttgagctgaataagatgctgacaggatggaagaaactccctgagctggcgtttttatcagatgcctacaccgacaaccttcagcagaaactgaaagacctgcacggggcatgggaacggtgctttgataaaaagctggcagcgaaagcgcccgtgttcaaacataaaagccacggcaatgactctgttcgtttcgtcaattttgacaaatactgccagcttcagcacagacgcgttaagttaccctcggggctgggctgggtgacattccggcagtcccgcgccgttgtgggtaaaatcaaaaacgcaacggtcagccagcacgctggcggctggtatatctcatttcaggtagaaatggtggtcgaacagcccacgcacccgtcaacgtctgctgtcggcctggatgccggtatctgcaagctggtaacgctgtcagacggcacggtgtttgaacctgtcaacagttttaaacagaaccaaagcagactggcaaggttacagcgccagcttgcccgtaaagtgaaattcagcgcaaactggaagaagcagaaagcaaaaatttcccgcttacacgcgcatatcaccaatatccgccgcgattaccttcataaagtcacgacaacaatcagcaaaaaccacgcgatgatcgttattgaagatttgaaggtttccaacatggcgaaatcggcagcgggtacggcagacgagccggggcgcaacgttacggcaaaatcaggtcttaaccgggcgatactggatcagggctggtacgaaatgcgccgccagctcgaatataagcagcgatggcgcggcggtgaggtgctggcagtaaatccggcctacaccagccagaaatgcgcctgctgtggtcatacctcgaaggaaaaccgtcaatcgcaggcagtatttgtctgcgtggcgtgtggatacgaagcgaacgccgacataaacggcgctcaaaatattctcgcggcaggacatgccgtgttgtccgggattaaccccggacgcgcccgtaaggcggcgtaa

SEQ ID NO: 234816 - DNA, 372 bp, Klebsiella pneumoniae
atgaaacgtatagggcagatgaatcagtttgttgaatcggctaaagaagagtcaggacaaaaaagtgactttctgcaaggtgtggcgtcttcgctttttggaagcgctggtcaggctcacgatatcaccacaggggcttttgtcctcaaccaaatagataaaggtgtgctgcagtatcgcaagtcgttgggtatcgccgcagattaccaactcttcgaagcgagcatgaaacgaaccaacgccatggtcagtcaagggcaactctggctgaacatctcaggcgctgcaatatcgttcctggaaatgttcagctacttgacatcctcccccaccttctcactacgtgaatcaggaaggggattccctttgtag

SEQ ID NO: 234817 - DNA, 849 bp, Klebsiella pneumoniae
atgaaaaaaacattattagctatcctcacatgcactcttctggccggatgcgccactcaaccacagagcccagataaccgtatgttcacaaaagaacacggtgtttactggcatgcagatcctcaaaaatcggtggcaacgaacgcatacgcacttgcaggtgtaccagtaaatgtagatgaagcagagaatgcaggagggggagttgatgaaggtcttgcttcaaaaatgcttctgaacactgctaccggtgtaataacaggcgggcttaaagctggaattgggatgtttacggcatcactctacagcgaggctgatgctgaatttctcatggttccacagagtgtggttttcgtttcaaatcctcgcaatcttccttatgacgacccatcacttataaaagaaggggccagaattgttatcgagtcaataaaggaacaacctaaaattttaggtgcaacttatgagggtcaaataaacgccttgaacgcatgcacaatctcaaaatcttcaatgggaccttgggatagttgcgaacttaaatcaaaggtagaaaactcaggggatgtaggaagtgagttcttcaaataccaggttatccggccagcaactggtgatgaattagctcagctttcgttgccaaaaggtaattactcgataattcgatatactaatatttttagtaagaatgctacatttatgactaataactttccaggttttattctacagcctcaatcaaagaaaacagcacctggatttcctagtgtgacaattaataatcttgaatattattttattaaaggtgatcttggaaagaaaggatttcctcataagaaagaaatataa

SEQ ID NO: 234818 - DNA, 267 bp, Klebsiella pneumoniae
atgtgtagccagttaaaccccttgttcgcagacgcatacttgaagccacagcagactcattatgtgcagctggtgaatacaaccccgttgttcgcagtcggataccagaagccactgcagactcatgatgtacagcaggtgataacaattccctgttcgcagtcagatacctccatcctcatcagacccttgatgcgcagcaagttaaaccccctcagcttgtcctcatttggttacctgaagtctcttcaggctaccgatgtgtag

SEQ ID NO: 234819 - DNA, 141 bp, Klebsiella pneumoniae; identical to SEQ ID NO: 185283

SEQ ID NO: 234820 - DNA, 231 bp, Klebsiella pneumoniae; identical to SEQ ID NO: 136885

SEQ ID NO: 234821 - DNA, 483 bp, Klebsiella pneumoniae
atgcgccaggccgtctgccagtatgccgagcgcgcggcggaaaagttgcgcggtgagcgacagtactgccggcatatcagtaccttcatcaagacatccccttttgcggttaatgagccgtattacggtaacgtggccacggaaaaactgaacacccctacccgtgacacccgggacattatcgcggcagcggtcaggtctctggacaggatctggctcgatggccaccgctacgcaaaagcggggataatgctcaatgatttcagtccgaacggcgtcgcgcagctgaatctgttcgatgacgtgcagccacggccgcacagcgatgcgctgatgaaggtactcgacggcattaatcattccggactcgggaaagtctggtttgccggcagaggtattgctcctgagtggcagatgaagcgggagatgctgtcgccagcatatacaacccgctggaaagagttaccggttgccaggttttaa

SEQ ID NO: 234822 - DNA, 279 bp, Klebsiella pneumoniae; identical to SEQ ID NO: 190922

SEQ ID NO: 234823 - DNA, 837 bp, Klebsiella pneumoniae
atgttcacttctactccgtcagacgagtcaacccaaggcgacagcttcatgtcagaacctgatgttcttaaaaccatactgggggataaagtgaagattgaactcgatacactttcaaactatctcatagcaacccttgaaaatcatgttagtcattcaaaaaaagaacccgacttgatgtggatgatccatgagatggacagttttttccatcaagaggttttcgaccacgaatatgacgctaacgcagcaactatgctactggcgacgaactcatacatgatgctttcaaatgcagttcttcaggcactatcaggtcatcgggtcgcagtgctcccagttgcccgaattgctctagaatcagcctgttatgcctatctcacatcatccagtgagaagatgagtgaactctggtttaatagagataaatctaaaactgcaaaggataactgtcgtaaggcgtttactattggagcgacggtagccaaactaaagcgcatctcactggatatgtctgactacctgaaaaaactctacgaattgtctattgaatatggcgcacatccaaacatcaaagccatatctcaccatctgcgtgatggcggtttggtggatgataagtgtcgcgtcttttcgcacacaggtgtttatggggaaaacagtaatcaggtaaatggcgccttattattctgtgttgatgttggacaagccattgcatttctgctttgtgcatcatctaaagaacatcctattattaatgagcgcattcattattttcagaactggatggatgagaaaaataatcttatagataaaatttcagcagagttttattaa

SEQ ID NO: 234824 - DNA, 1125 bp, Klebsiella pneumoniae
atgatggatgatgagcaatcacaaacattaaatatgcttgatgtaatgcagcgtgactcatatgttgaaacaatatcaaatatattagatatatctcagggtaacgaagtattaaaggatttacttcttcgcggattttaccagaaccctaatcgagtagttcaccatgaaaataactcacttcttaatagatttattgctgcaggtaaaaaatctgaatggctatgtgagcatgatggatgtactaatcctagtatttattctcatgaattatctgaaagggctgtattaagctatttagcggatgataaccataaagcatttatcctgcaacgcaacctgaagaataattcatttgaattttcatttgaggataaacacatacgtaacatttcaaattttgccggttactgcagtatacatgatgaaggtttatttaagttgatagatgatccaggtagagaggtcgatttagaatatgtaaatttacaagctttaaaaatgatgaaacgccatatgctcgatcatgaaatcaccttaaaagttgctaagaatattgctactgaaattaataaaaaaattgatgaaattaaaggggctgaacaaattattacgggccttcaagaaagttttgatattttccagcaagcaattaaagatatggaaagttcatcagaggcgttacgcgtattttataacaacttatgggttggtattcagttaagagaatatatcattgattacagaaaaatcccatgcaataagactgggtgggttttctctcattcgtttgaggtaatagaagaagaaagtcacgaacgtatcttatcattcatatttaaggtggatgttaatcagcagcctgtgttgattcatgcctgggacaatactacgttagccagtaaacatgaggatttttatatctcttctgaaaaagtaattgagtgtatgttgctaaataaagaaaagcttgtattttcattgggctttttaaaaaccatggagataacgcatcttgagcgtttacttgacgatgagagcatatataataatgtgaaaaaccctgttttcatttttctttttaaaaaaatatttctcgatgagttagagggtgatttaggttaa

SEQ ID NO: 234825 - DNA, 783 bp, Klebsiella pneumoniae; identical to SEQ ID NO: 190909

SEQ ID NO: 234826 - DNA, 654 bp, Klebsiella pneumoniae
atggctgactggtttattgcaactgaaggcgtgaaggtggtcaaggacagtgccagtctgtggccgcagatcatcacgggggttttgtccgccggtgctgcattcggtggtgtgtggtacgggcagtggcggataacacagcgagagaaggaagcagcagctgcgaagcttgccagcgaacgtctctttatcgctacggagctggtctttattcttgagcggtttgcacagcgctgcgttggctccgcccaggagtcagatggcccagaaaagtatgatcaatatggttatgtcaggattgaacaccctataccagaaattgattacacatctgttaccggggactggcgggctcttccttcggacctgatgtaccggctcagcgagttaccggttctaagacaggaagcggccagctccattgatgccaccttctatgaaaatacgccttttgatggtactgccgggatttctgagctcaaccagcaggcctcccgcctggggctgaaggccattcgcttgtcccgttgtctgcgacatctctgtgaaatgccagaagatcgactctcggagcagccgtggtcagcgtggcgcgttctctggcgtgtacgggggcgttgtattcagaaactgactgcagcgagagataactga

SEQ ID NO: 234827 - DNA, 309 bp, Klebsiella pneumoniae
atggatacagacaggattcagttcaagatcgaaacactgatacccgttctcaaatctttagggcatagcaggctttggtaccgagcgatcagctacggttccagatatgaagaactggagtttatcgtcaaccaggaaaatgaacgtcttgctcaatggagccctaagcgtcaagggtggattgtgaccgacaagattctttgcattcccttaaacggaagtctgacgcatcctccgggtgtgccagtcgatgatgaatgggtgtatttcagaatgcacaatgaaccttttagcagaaagtcgctatga

SEQ ID NO: 234828 - DNA, 1578 bp, Klebsiella pneumoniae; identical to SEQ ID NO: 233997

SEQ ID NO: 234829 - DNA, 240 bp, Klebsiella pneumoniae
atgcgttacacagtaatactgagtgatgactttggatatgctgattatcatgttttagctgaagacaaaaaagttgctgtcagcaaagcgatatcagaacactgcaaggacgattcagaagagagacaaggaggaacggtgctcagatcgctgactgcaaccacaagcaattttcgtttatcacagttggtgcaagtatgcaaaaagataaaacaggcagtatcgaatcaacaaccttga

SEQ ID NO: 234830 - DNA, 765 bp, Klebsiella pneumoniae
atgaatattcgacaaaggcgtgtgctgcctaaagctaatgcttccttgatttcaatttttcaaagattctccgatatcacaatcatattcttttcattattcttaacttgctattttaatgatattgaattcaatcatagccatgttttaaattttttggtaatgttagtaattttccaaatgattggtgggattaccgacttttatcgctcatggcgaggaattaaattaacttcagaattaactttaatcataaagaattggtcattgagtgttatatttggtatagcgctaatggcatattctactaatatgaagatgtcatttcctattctttttgaatggtatatacttgtatgtattggtgtgcttatttgcagatctttgattagatatagcgcgcagtttgtaagaactattggatacaatacacgtaatgtagcaattgctggttctttacctgtcgggcaaatgcttgcacaaagtttcattgatgaaccatggctagggtttaatgtatatggtatttatgatgataactacacaatggataaaaataataagtatgttggggatttgcagtgtttaattcgggatgcaaaagatggtaaattagatcgtatatatattgctatgagtatggatgaaaatgacaaaattaagaatttagttaagtcattaacaaatacgacatgttctgtaatgctgatacctgacacattaacacttaatatggctttgttgaataaatcagatttcgggtaa

SEQ ID NO: 234831 - DNA, 918 bp, Klebsiella pneumoniae
gtgaaagcttgcttgattattccaacatataatggtggtgaagtgtggaaaaaatctgccaacaacattgcattatattcaaaaatacaaccccatgatgtttatgtaattgattcagagagcaaagatgatacagtacaagtagcaaaggctcatggttttaatgttaaaataattgaaggagcttcatttaaccatggaggtacaagaaatcaagccattactgataatggtgtagtatatgatgttgcaatcttgattactcaagatgcaatccctcttgatggttttgtaaacaaaattttgtctgcatttgaagatccattagtagcttgcgcctatggtcgtcagttacctcacgaaaatgccaattccatcgctcaacacgctaggttttttaactatccagctaagagtgttgttaacacaaaagaaaatattcctgagtatgggataaagacagcgttcacttccaattccttctgtgcttatagggtttctatatttaatctattaggccgatttccagacaatacaattcttagcgaggatatgtattatgcagcgaaagccataaacgcaggatataaagttgcttatgtttccgaggcgcaggttatgcattcgcataattactctccgatagaggagtttaagagatactttgatattggagtatttcatgcaactgaaaattggattaaaaaggattttggcggcgctggaggggagggtaagaaatttataatttcagaaataaaatatttattacaaaaaaatttaactcttatccctaaagcttgcgtaaataatttcatgaaaatattagggtataagctaggtcagaattataaacttttacctaaaaatgcagttaaaaaattcagtatgcataaaaaattctggaataaatactga

SEQ ID NO: 234832 - DNA, 2166 bp, Klebsiella pneumoniae
atgactatagatacaacaaacaaaaaaaatgtttcagagtcagatgagattgagctcggtcgtctcattggcgagttggttgaccatcgaaaattgataatcgcggtaacatctgtatttacacttatagcattactgtatgctatttttgcaaccccaatatatcaagcaaatgtactgatacaagtggagcagaagcaaggaaatgctatacttagtagcttaagtcagatgttacctgatagccaaccgcaatctgctcccgaaatcgcattattgcagtcaagaatgatacttggcaaaacagtagatgatcttaatcttcaaattgaggttaggccaaacgactttccgttaataggaagtgggttagctagaattttccagaagtcaccaggtacgctcacagttaaaaaattagattttcttaattttaaaggaagtgattatcctgacttagttattactgtaattgataataataattataaagttgaaggtgatggcataatagcagaaggtaaaattggtgaggaggcccatacaaatggacttaatattcttgttgattcgattgattcaaaaccaggtcaacaattcaaaataaagtattattcaaaattggaggccatcaatcgcttacaaaattcattgaaggttacggatcagggtaaagatacaggcatgttaagcctgatattaactggggataatcctgatcttatttccaaaatacttgataatattagtgataattacctaacgcaaaatgttgcacgtcaagctgcccaagatgaaaaaagtctgcagtttttaagccaacaattgcctaaagtcagaagtgatttagatgcagcagaagataaattgaatgaatataggaagcaaaaagactccgttgatttaacaatggaagcaaaatcagtactagaccaaattgttaatgttgataaccaattgaatacattaacatttagagaagctgaaatatcccagttatatacaaaagaacatcctacttataaagccttaatggagaaaaagcaaacacttcaagatgagagaattaggctcaataagaaagtgaactccatgccatcgactcagcaagaagtattacggcttagtagggatgttgagtctggtagggctgtatatctacaattattgaatcgacagcaagaattgaatattgcaaaatccagcgctattggcaatgtaagaattattgataatgctgtggttgaacctcaaccggttaaacctaaaaaattcctaatcatagttgttggattcttgctaggtgtatttatctctgtcttacttgttttattaagggtgtatttgcgacgtggcattgagtcacctgaacaactcgaagaatacggaattaacgtctacgcaagtatacctgtttcagattggctttctaaacaattaagccgtaagggaaaatttaaacaaaatgagtctgatacaattttaagtatagaaaatccaaccgatttggctgtagaagcaattcgcggattacgtactagtctccattttgcaatgatggaggctaaaaataatattctaatgataacaggtgcaagtcctaacgcaggcaaaacttttgttagtactaacctagctgtaacaattgctcagacagggaaaaaagtactatttattgatgccgatttacgtcggggttatgttcacaaaatgttcggtagtgaaatcaagtctggggtatcggatattttgagtggcaaagagtcaattattaatgccattcaaaaagtcaagaacgcagattttgattatgtttcgcgcggacaagttcctcctaaccccacagaattactaatgcatccgcgttttaatgaactgcttgcatgggcttcaaataattacgatctagtaatagtagatactccccctatattagcagttacagatgctgcaataattggtagatatgttggaacaacattgcttgtagcaagattcgaagtaaatactccaaaagaaattgatatcagtattaaacgttttgaacaaagtggcgttccaatcaaaggttgtatactgaatggtattgtgaaaaaagcaagtagctattatagctatggctaccatcagtatggatactcctatacagacaataaaaaagattga

SEQ ID NO: 234833 - DNA, 771 bp, Klebsiella pneumoniae
atgaacagtattggtcaacgtgaacgcatgacacaaaaacgtgttatccagttattcaccgatcatctcggttatcactatcttggtaactggcataaacgagaagacaatcgtaacattgaacccggtttagtctctgcctggttaacaaaacgcggcgtttcagaagtcctaatcgcccgagcattacggcagctggatcgagccgcaagcctcggtgaaggtcgtatcctctatgatgcaaacaaagaggtgtatcgccttctgcgctacggcgtaaaggataaaaaaggtgctggtgagcagaatcaaaccgtgtggttggtggactggaaaaatccagaagccaatgattttgctatagctgaagaagtgaccttcaacggtgaaaataaaaagcgcccggatttggtgctgtatgttaacggtattgcgcttggtgtcattgagctaaaacgatctacagtgtcagtttcagagggtatccgccaaaacctcgataatcagcaaaaagcattcatccgcaacttcttcactaccatccaactggtgatggccggtaatgatttagaagggcttcgctatggcgtaatcgaaacgccggagaaatattaccttcaatggaaagaagccactgaatcacctcacaccaacatgcttgatcgtcacttggctcagatatgcaataaacagcgcctgctggaattgatccacgattttatcgttttcgatgctggagtggctttgttgaataaatcgaacttttgctga

SEQ ID NO: 234834 - DNA, 1362 bp, Klebsiella pneumoniae
atgatggataatgtattaaagatgcaaattgataaagcggttccagctggttataagctcactgaaatgggcgtaatcccggaagattgggatgtgtacacattcaacgatctcattgaatcctgctccagcggagccactccctaccgtggtaataaaagtttttatacaggcagtaataaatggattaccagtggtgaattaaactattgtgttatcaatgatacattagaaaaaataagtgatgaagcagttaaacgctcaaatctaaaaatacatccagcaggtaccttcttaatggccattactggtatggaggctgcgggtacgagaggagcgtgtgggattgttgggcaatcagcagcgacaaaccaatcttgcatggctatttatccaaatcataaattatcatctctgtatctctaccattggtacgtctacaatggtgagtcattagcatttaaatattgtcaaggaacgaagcaacttagttatactgctggactgctaagaacaattccaatatacattccgagaacaataaaagaacaaactcgaattgcgaatgttctctccgataccgatgcgctgattaccaagcttgagcagttgatagctaaaaaacagactatcaaaagcgccaccatgcagcaactgctgactggccgcactcgcttacctcaattttctaaacatcctgatggtactagcaaaagctataaagccagcgaacttgggtcgattccggaagattggaaagttttgagtgttggtcaggtatgcgatttactaacaggattccctttctccagcaataaatattctgactctggcattaggttacttcgcggctcaaatgttaagcgtggtatcactgattggagtgatggtattacccagtattggccagagatcagtgccgacattaagcaatatgaactttatgctggagatatagttatttccatggatggttccttagtcggcagaagctttgctcaattatccgatagtgatttacctgcagtattattacagcgagtagctagggttagaactagtttcgttgatcaaggctttttaaaagaatggatttgcagtcaatttttcactgaacattgtgacgctgtaaaaacagtcacagcaattcctcatataagccctcaggatattagaagctttaaattcttgatgccacctacaaatgaagaacaaacagccatcgccaacattctctcagatatggatgctgaactcacagcgctagagcaaaaactagccaaggtccgcgatataaaacaaggaatgatgcaacaactcctgaccgggcgtatccgtttaccattggatcagcagccatga

SEQ ID NO: 234835 - DNA, 891 bp, Klebsiella pneumoniae
atgaagatattactgattggcaagaatggtcaggtgggctgggagctgcagcgctccctgtccacgctcggtgatgtggtcgcggtggattactttgataaagagctgtgtggcgatctgactaatctggacggtatcgcgcagaccgtgcgtaccgtccgcccggacgtggtggtgaatgccgccgcgcacacggcagttgacaaggccgaaagcgagcgggagctttccgatctgctgaacgacaaaggggtagcggtgctggcggcggagtcggcgaagctgggtgccctgatggtgcactattccacggactatgtgttcgacggcgccggtagccattatcgccgggaagatgaggcaaccggcccgctgaacgtctacggcgaaaccaagcgcgcaggtgaactggcgctggagcagggcaacccgcgtcacctgattttccgtaccagctgggtgtatgccacccgcggtgccaactttgccaaaaccatgctccgcctggcgggtgagaaagagacgctctccatcattgacgaccagcacggggcgcccaccggcgcagagctgctggcagactgcacggcgacggcaattcgtgaaacgctgcgtgatccggcgctggccggtacctatcatctggtggccagcggcgagaccagctggtgcgactatgcccgctatgtgtttgaggtggccagagcgcacggtgtagagctggcggttcaggaagtgaagggcatcccgacgacggcctatccgacgccggcgaagcgtccgctcaactctcgcctgtcgaatgaaaaatttcagcaggcattcggggtgactctcccggactggcgtcagggtgtggctcgcgtggtaacagaagtcctgggtaaataa

SEQ ID NO: 234836 - DNA, 360 bp, Klebsiella pneumoniae
atggtggactgcgccaaccgtctggcggggaccctctcctacggacagcagcggcggctggagatcgcccgcgccatgtgcacccgtccggagatgctctgtctggacgagccggccgccggcctcaacccggtggaaacccaggcgctgagccggattattcgctttctgcgccagcagcacggcatcacggtgctactgatcgagcatgatatggggatggtgatggagatttcggatcatatcatcgtcctcgatcacggggacgtcatcgcccgcggcgcgccgcaggcgatacaggccaacgccagcgtgattgccgcctatctaggcgctgaggaagaggagacgcgccgatga

SEQ ID NO: 234837 - DNA, 474 bp, Klebsiella pneumoniae; identical to SEQ ID NO: 99300

SEQ ID NO: 234838 - DNA, 474 bp, Klebsiella pneumoniae
gtgatactggcaatcaggtacgtttttgcttcatgtccacttcgtattatcgcactcattagcgttgtcctgctgcagggtctgataccggctctaaatgtctttatgaccggccatataatcaataaattgcatgcactacaggcctctgataatgaacttatactgagcattgcactatggtgtgtttctcttctgggcattcagcttatgcagcccctggttaatcttattcagggagatgtcacggaaatttcaacaaatcatttcagtgctaaaattatggaacgaatgaacgacttatattccctgagcctgtttgataacgaagagcgttatgagcaactggaatatttgaaaaaagaagcagcctatcgtccactaaatttcatcatctgtataatttacgctattcgggcaactgtcatggcaggcaggcaggcaggcaggcaggcagtctgttgttggttctga

SEQ ID NO: 234839 - DNA, 564 bp, Klebsiella pneumoniae
atgatagagaagatcagggaggaagacccaggcaaattcgcctctctcgcctggtcccgcaatccggccacccaggcgcagattaatgaagagtttatccgccggcagaaagaatatgaagcacagctaaaacaagcagaagagttaaaagatagcgatattccaatggtaccaatacccggcctgaaaatacatatctgctcactggtggctcaggactctcccgtggataactgggtgccagtttatatccactccaagctgatgatcgttaatgacgttttcacaacacatggttcggcgaatattaatacccgcagtatgcaggtggacagtgaaatgaatattgcacatgagtggggcagtgtgacccgggatttaagacgacggctgtgggggttgcataccagtgggaaaggcgtgcaggacaatgcttctgatgcatttgatgcatgggaatatattattagtaaaaataaagaacgccagcaaaaccatcagaagcctattgccccgctgattgctttttattatgccaacaacgaactcaaggatctggattga

SEQ ID NO: 234840 - DNA, 216 bp, Klebsiella pneumoniae
atgatttttatcgcgcgttttatggatagttttctgcatcaggcgtcgttcgccacggggtattggtgctatgatcggcatcgctcagtccggttggtgattttggttggtttggcgattgatcagatcgcacaatccgggctgagttccatcaaagtgatctactatttggcgcagctatttagattatccgtggcgattcaaaccgaaagctga

SEQ ID NO: 234841 - DNA, 690 bp, Klebsiella pneumoniae; identical to SEQ ID NO: 226836

SEQ ID NO: 234842 - DNA, 1278 bp, Klebsiella pneumoniae
atgaacagacgtgaattctcttttctccttgttagtatggggctttcatatccttggctaaagtcatcttattcattcgcacagcaagttaataatactgatgttataaatattatagattttggatgtaaagcttataactcaagtgatactgctttgcatgacaatcgagttgctctacaaaaaatattagattattgttttgcaatgagttcttcaactaagaagtcttattccatttatattccgaaaggcatattttatttatcttcaacctcgctagattcttcgcatggagttcctggatctttttgtttacagatctatagcaatataaaaatttatggcgaagggactttaaaacttttacctaagcaatatggattgggcgcttttttccgtattttagctagtgaccaaaataataagataagcaatgtcatgatatctgacattactctcgatggtaatagcgctaatcaagttgatggtgtacaggctagtaatatactccttgagtgtgctaataatattcagattaaaaatgtcaccagtaagaattgcaatggaaatggcattcttattcgaggatcaaaacaaatagataaacctgttgaacaagtttctatcataggttgcattgtttcaaattgcaaaaaaataggaattcaagtcagtcagtttaataaattaacaatatgtaataataaagtttccaattgttctgataacggcattgatatatatggggatattgggcgcaatccacgaggattaacaaatggaaataactttgaaatatatttaaataatgtttcggattgtttgaatggtattttcccagaaacggtttctaatggcaagattttcaagaatacaattaaaaatattaggcgctcctcagttcatgttaatagaattcacgggctgccatcaagtatttatataactgaaaatatcgttcaaaatgcaccggtcgcatttaccattacaggggatatggctaatatcataatcaataaaaatcatgtaaaaaatgtcaaggattattttttctcttttggtagtggtaaaggaaatgtctcaggagttatcgctagtgataatatccttgaggtcggcccaaatctgaaagcagtcgttaagttttcagggatgagagtgaataacatacagatcaatgcgaatcgacttatttcagaaaataatattaatcaggtgcctatgcaggtaaataatgcattatcttttaacaaaaactctgtaagcttaaagtga

SEQ ID NO: 234843 - DNA, 393 bp, Klebsiella pneumoniae
atgatgctgtttcttcgaaagtatggatttttgtttatccctccagtctactggctcatctatctgggagccagactgacttacaatggactggcaggagagttttctgctgatttctttcagggtattcgacatgaaggcgtctatattatctgtagtttgtgtgtattttattttttctgcttagaggtggaagttggtgatggggagttctcagcgaacattctgttcctgattgttttctttcatgtggttttattatttatcactctgcttatttgtttgtggcaaggggaggtgttgttggattcgatctttatgggtcagattattgcctccatgtgtttattgttttttattccagtgctttccattataagaaggagtttctag

SEQ ID NO: 234844 - DNA, 645 bp, Klebsiella pneumoniae
atgattaaaacggtcgcactggtactgatggtgactgaccacaccggcttactgctggccggaaacaatgaagtgatgcgcctgctgggacgtggttgttttccgctgttcggtctggcatggggaatgaatctggcacggcacgcggaaatacgccagtctcaactgaacagcctgtggggctgggcgctggtcgcccaggtgtcgtttatgctcatcgggtacccgtggtataccgggaatattctgtttgcctttgccgttacgggccaggtcctgcggtgggtcagccagccgtcctggtattacaccctcccggcggctggactgctggtcacctggatacccctgtcaaccggcagctacggcatggccggagtgggcatgctcaccgccagctggctgctttgtcgcgcacagcatgcaccggaacggctgggatacggggtgttgtgggccctcatggtgttgctgatgaatatgcatgacgtgagtgaatcagtggccgggctggcgattgcgctgctgacgctgatggtgtgctcatctgccggagagcgtgtgaaacgcttctggccgcggcagttcttcgtgatgttctatgccgtgcacctggcggtactcggtattgtcgtctcgatgtaa

SEQ ID NO: 234845 - DNA, 531 bp, Klebsiella pneumoniae
atgatgattacgaacaaactacttattgaggaagtggaggagctgaaaaatctactttcacaagggaaggctgaaattccatctttttgggagtgcctttggcctggcgtagtgttagttgcatggaatatgctttgcgctgtaattagtgtggatgctgtttatttgaccggaaagtatatatttcatgttttggtttttcctgtcggggtcagtatcattatgctcctaggtattgccagttcacgctctctctttttgtcagttcctaaaaactttagagaaaaatcgaatatatatcgctttttttctaagaaggttttgatttatgctgttgtgtacatggcagtgattatgttattagctatttgtaatagagtggtttatgacacgccattttcttttgcatttatggttattttaacgtctgttttttttggttttgtcatgaatctggattttggacgctatcagctatcattgctcacctctgcaataaactctttccgagcggaaaagttgggagggtaa

SEQ ID NO: 234846 - DNA, 1224 bp, Klebsiella pneumoniae
  misc_feature (674)..(683): n is a, c, g, or t
atgattgatgaaagaaaaatcgctatttataatttaaatacatatccagaaatgtcaggcggatgtgaaagatcatgtttagagttggcaaaggaattaattagattgggagaagatgtacgtgttatttctttgaatccattcttgagtggggtgaattttttacagtatgagggagtcaggatcgaaaaattacctttattgaatatttattggccaacatcaaaaaagaagaaaagttttttaagaaaggctatatggaatttgatggatatcgttaatctcccaatgagcgtttatttagcaatgtatcttaaaaaaaatggaataaatattcttcatacaaataatattaaaggtgtatcacctgctatttttccaattatgcgattatttggaattaagacagtgcacacaacaagagattattatcttctagataatggtgcctggtatagagatatccaaagtcaacataatacaatcatattaagagccaagcgaacgctaaaaaaattattatcgagttcagcggattttatcgtatacaatagtaaatacatgaaggagtaccatgagtcctgccttttttttaagaataaaaaaaatcaggttatttataatggattcgatccttcagtatacaaatctaatacagaagacaagctgtctcnnnnnnnnnncgacaaggataatgtaaaatatacttttggttttataggaagacttattgaagaaaaaggtttagatctgttggtaaatggttttttagagttcgataaagatgaattcaaccttattattgctggctcaactttagaagaatacttattactatacccagaaaaagaaaaagaaattagaagtagaactgacattatctttttaggcatagttgataataagcttttttatcataaagttgactgtgttgttgtcccttcacgctataatgaacctttcggccgggtagctatggaagctatatttatggggaaaagtgtcatagtatccgaccgtggtgggttacctgaacaaataataaatggtgttcatggcgtagtttgtaaagatgataattataatacagcaatgcaaaaaatctatcttacacgcaatgataaatcttataatttaaatttggacttaaatgaatttacaattaattactgcgcgcaagcttatcttgatgtttataaggaggtttcgaatggccaaaagtaa

SEQ ID NO: 234847 - DNA, 255 bp, Klebsiella pneumoniae
atgtcgcagtggaatattgcctctttttcaaaggaggagcaggacaaagttgccgtcgataaggtggctgctgctgttgcctggcaggagcgcatgaacaagcccgtcatgccggaacttgttgaacgggaacagcctgaacacctgcgcgaatatttccgtgaacggctccacgtacatcgactgaacagtcagcagctgccgcgcgcaaatgcacccgaatataataaaccgggcgatgatcagcagaattga

SEQ ID NO: 234848 - DNA, 318 bp, Klebsiella pneumoniae
gtgcgtatgtctctgatgtttgctgccgtgacgcttttaaccggtattaacctgttttttattccgtttcagcctgttccggccctgtggggggctatcctggccgttgcttttgttctgattaatgtcgtggcggataagctgcgcctctggagtggtattgcgtggattatcgttgccggcatcatcataacgctgatgctgaaggggaaagagccgggtgacgaatttcgtgtcctgatcaccgttttcgctttcctggcttcaatctggtatagcgttgcgcagttcaggaaggaaaataagctccgttcctga

SEQ ID NO: 234849 - DNA, 219 bp, Klebsiella pneumoniae
atgcatgcctttatttttctggtgctgatgacgccgagtagtggtggtggaatttggggtattactcccatgcctaatacagatgtctgcataaaaatgctacgggtactcgaagcacgtggaggcagaggttacggaagtaatacaggagagtgcattgaaattaaaacccgcgagcctttgagcagcgtgatagaaacattgagtgagggtgggtaa

SEQ ID NO: 234850 - DNA, 861 bp, Klebsiella pneumoniae
atggctacgcttaaattgtatcacaacggtcttacggctgggattccccccatgagaaacaatcatgtccgggcaaagagaggcgaggtcaacggctggtctccttccgcctcccgaaacaacaccaaattcctccgctctgttcatgtacccggtcttacaggtgccgcggtggcattcacgctaacggttcgtgattgccctccaacgtctaatcattggaaaatccttcgtgagactttcatcaagcgtcttcgccgtgctggtatgattcggcttcactggcttacagagtggcaacgcaggggtgtgccccatctccatggaatagcctatttccctgacgcctatgagacatgtaccgttatcggtgcttggcttgcggtggctgagaagtatggctgttcgtggaagtctcagcactgcgtgccaatcactgatatgcagggttggtttctctacctcgctaaacatgctggccgttcagagactcactatcagcgtagttctgacctaatccctcctgggtggactaaaacgggtcgtgtgtggggttactgcggtgactggcccactgataagccttatgagcttgaaacgtcccacagcgctttctgtgcctttagacgcatctgccggggatggcgtcgatctgatgcccggacgtctaatgttgggtctcgtgggcaccgtatttcctctgctcgtaggatgcttaagtgcaacgatcacagaaagtctcaggtccgtggtgtgtctgaatggatccctttggatctttccctgaccgctgcttactggtgcatgtctcagtacccgatgccggaggtagacgattcacgctatcagattgaaatctga

SEQ ID NO: 234851 - DNA, 1098 bp, Klebsiella pneumoniae
atggctcatgaaaaaagtgatataattgtttcggtcgttattcctgtttacaacgccgaagagtatattgcagatactctaaaaaacattttttcacagtcattgtatgaaattgaaattataataatcaatgatcattcgagtgataatacattagatatccttaaggagattgcatccggcgatgaaagaatacgaattattgataacgctgtaaatattggcgctggcatatcacgtaatataggtctttcagaagcaaagggagaatatataatatttcttgatgatgatgattatgtcgatacgaacatgttgaagcacatgtctgattgtgcggagctatcaggggcagatatcgttgtatgccgaagccgctcatttaatctacaatctctccagtatgctccaatgccagattcaattcgaaaagatttattacctgaaaaagcagttttctcgcctggagatattgagcgagactttttcagggcatttatatggtggccatgggacaaattattccgacgtgaatttattattcagcactcgttgagctaccaagatttaagaacatcaaatgatctgttttttgtgtgtgcatctatgcttagtgccgaaaaggtaactattcttgatgaaatattgattgctcatacgattaatcgaaaaacatcattgtcttcaactcgctccgtttcctatcattgcgcacttgatgctcttgttgctctaagggattttctttttaaaaatggcatgatgcaaaagcgacaaagggatttttataattacattgtcgtattccttgagtggcacttaaatacgctatcgggtgaagcctttaataaactgtttcaagatgtcaaattattcatcagcagttttgatatcaataatgaagacttttatgatgagtttattctttctgcttatcgacgaatcgctgatatgtctgctgaagagatcagaattatgaaaggatttaatttcaaactatctaacaacgttataatttctgagaccaatcgatgtattgatgattgtatggttatcaaaacgtcagatgcaatgcgaaggtcaacgataaattattag

SEQ ID NO: 234852 - DNA, 753 bp, Klebsiella pneumoniae
atgcgaacaatacatgccgccatgctggcggggtgcctttgctgcaccctgatgccggctttcgccaaagacgcgggctggcagtggtacaacgagaaactgaagccccgtgatgaggaaaagccagccgcaccagcggcaccaccgccgcaaatggatattctggagaaactcgccacactccaggcggccaccaaacggtcgctgtacgaggccattctgtatccatcgtctgaaaacttcgtgaagtatttccggctgcagaactactggacgcagcaggcaggtttgttctcgatgagtgcgaagaaagcgatgctggaaaaccccgaactcgattacaacctgcagcacagctactacaacggcacggtaaaaaaccagctcgctgccgactatgccgaacagcgacaggctatctccaccctcgcacagcactacggcgtgatgttcttctaccggggccgggaagcgatcgatggccagctggtccaggtgattaaaaattttcgcgaaacctatggcctgagcgtgataccggtgtcggttgacggagtgattaaccccatgctgcccgacagccggacggaccagggccaggcagagcagcttggcgtgaagttcttccccgcgatgatgctggttaacccgaaaagtggccaggttaagcctctcagttacggctttatcagtcaggacgacctggcgaaacagttcctctatgtctccagcgactttaaaccgaatttctaa

SEQ ID NO: 234853 - DNA, 777 bp, Klebsiella pneumoniae
atggacagcgtccaggataaggccagcgataaagacaaagaacgtgtgatgaaaaacatcaacatcatgtggaatgccttatcgaagaaccggctcttcgacggcaataaggagctgaaggaattcatcatgacgctcaccggtacgctgattttcggggagaacagtgaaatcacgccgctgccggcacgcaccactgaccaggatctgattagagccatgatggagggcggcacggctaaaatctaccactgcaatgattcggataagtgtcttaaggtcgttgctgatgcgaccgtgaccatcacttccagtaaagcgctaaaaagccagatttccgctttgttaagcagtatccagaataaagcagtggctgatgaaaaactgacggatcaggagaaagggtttatctccagcaccaccattccggtattcaaatacctggtcgatccgcagatgctcggggtgtctaactcacttatttaccagctgacggactatatcggctacgacatcctgctgcagtacattcaggaacttatccagcaggcccgggcgatgatttcaaccggtaattatccccagtcgacaatggatatgatcatggaaaacctcaatcaggcgagtgtccagattgccgcttttcagtcccgtgttcaggttcagcaggacgccttgcttgtggttgacaggcaaatgagttacatgcgccagcaggtctctgcccgcatgatgacccgctaccagaataactatcattttggggggaatctgtaa

SEQ ID NO: 234854 - DNA, 729 bp, Klebsiella pneumoniae
atggttccatttatcatcaggctttatttcacacctaaaatccgcaatataaagctcaagtataagaggcgatataatagttatttatttgcgacaggtattccacttgtcatttcaactatttcaatgactatttattctagggttaatcagttttccctttcctatttttcaggcagctatgaattaggcatttattctgttgcgcttacccttggtactgcgtggatctttatagggaatgcattttccatttcttttctgtcaaaaatatattcagaaaaagatgagttcctcgcaaaggataaaacttcaggattgatagcttcagtgtttaccgttttacttgtttttccagttttttttgtattgtttggaaagcgcattatatttattttatacgggaatgattatttggctgcttacaaaatacttgttattttatgcctgtcaacaatagttacttcattaggttttatttctaatagatatatagttaagttgtctggctataattatctctcgaaaaaaaccattctaatccttttattcagcattcctatttctattgcaatggtatatcaatggggactatatggtgcagcctatagtgttttgataatagaattactatcattaaccattatgaattatttctttagggaaggtgtggttttaaaaatgcacttaggggcttttaatttacgaaacataaaaaaattaaagtga

SEQ ID NO: 234855 - DNA, 171 bp, Klebsiella pneumoniae; identical to SEQ ID NO: 226817

SEQ ID NO: 234856 - DNA, 327 bp, Klebsiella pneumoniae
atgctgcacgaaacccggcagtacggcattccggcgacactgcgtgggctcatcaataacgacatgaggaccaccactgacgcggtgctgcagctggtgaaggatggcgtgaccgacggggtgcagatcgacccgacactgtacacgcagtacggcatccggagtgtgccgtctctggtggtacggtgtcaggccgggtatgacgtggtacgcggtaacattcacgtcaaacaggcgctggagaaagtcgcacaaaccggtgactgcgcacaggtggcccggcagatgcttgatgcgccctcaaatgccgccgggagccagccatga

SEQ ID NO: 234857 - DNA, 633 bp, Klebsiella pneumoniae
atgatctgcggcggtgatgtcttctgccttgatggtgaatgtgataaagccacgtccgggaagagcaacgactttgggcaggcggtgtctgagctggcggcactggctgctgcggggaaggacgtcgcggcactgaacggggtggatgtccgggccttcaccggaaaagcgaagttctgtaagaaatttgctgcaggcttcagtaactgctgcaaagacagcggctggggccaggatgtggggctggcacgctgcagcagtgaggaaaaggcgctggccaaagcgaaaaaagacaagctgacggtcagtatcggggaattctgctctaaaaaggttctgggtatttgcctggagaaaaaaaggagctattgccagttcgactcaaaactggcgcagatcgttcagcagcagggaagaaacggtcagctgcatatcggttttggcggcgccagcagtcctgactgtcgggggattacggttgaagagctccagaggatcgactttaacatgcttgatttcaccaactttatggacgacctgatgaaaaatcaaaaaataccggaaaacgatgtgctcaccaataaaaccagagaacgaattaaggaaatcatgagtcagcaatccgcgcaataa

SEQ ID NO: 234858 - DNA, 150 bp, Klebsiella pneumoniae
atgggtcccctggtcatcttcaatcgccacattctgatactgcgcggcgacaatctgagcctgctcgcgggtaaacgtgccatccggcatggattcaagcggggacaaaacgttatggtccatatgtttctccttctctgccccgcctga

SEQ ID NO: 234859 - DNA, 3741 bp, Klebsiella pneumoniae
atgagtaaacttctggatcgctttcgctactttaagcagaagggcgagacctttgccaacggccacggccaggtctataacaacaaccgtgactgggaagatagctaccgtcaacgctggcagttcgacaaaattgtccgctccacgcacggtgtgaactgcaccggctcctgcagctggaaaatttacgtcaaaaacggcctcgttacctgggaaacccagcagaccgattatccgcgcacccggccggatctgccaaatcacgaaccgcgcggctgcccgcgcggcgccagctactcctggtatctctacagcgccaaccgcctgaagtacccgctggcgcgtaaacgactgattgagctgtggcgcgaagccctggcgaagcatcccgacccggtgctggcatgggatagcatcatgcaggatccgtcaaaaacccgcagctataaagcggcgcgcggcaaaggcggttttgtccgctccagctggaaagagctgaaccagctcatcgccgccgccaacgtctggaccatcaaacactatggcccggaccgcgtcgccggcttctcgccgatcccggcgatgtcgatggtctcctacgccgcgggcactcgctatttatcgttgattggcggcacctgcctgagcttttatgactggtactgcgatctgccccccgcctcgccgatgacctggggcgaacagaccgacgtgccggaatccgccgactggtacaactccagctacattattgcctggggctccaacgtgccgcagacccgaaccccggacgcccacttctttaccgaagtgcgctacaagggcaccaaaactatcgccatcacgccggactattcggaagtcgctaagctctgcgaccagtggctggcgccgaagcaaggcaccgacagcgcgctggcgatggccatgggccatgtgatcctcaaagccttccacctcgataacccgagcgattactttctcaactactgccggacctacaccgacatgccgatgctggtgatactcgagccgcgcgacgacggcagctatacgccgggccgtatgctgcgtgcttccgacctgcttgacggtctcggggaaagtaataacccggaatggaaaaccgtggcctataacagcgacggcgaactggtggcgccgaacggctccatcggctttcgctggggcgaaaaaggcaaatggaatctcgaacaacgggcagacggcaaagatgtcgagcttaagctgtcgctgctggatattcgcgacagcgtggtgtcggtgggcttcccctactttggcggcaacgaaaacccgcattttcgcagcgtatcgcagtcaccggtgacccttcacccgctaccggctaaacagctgacgctggccagtggcgaaagcggcctggtggtcagcgtctatgacctgattctggccaactacggtctggatcgcgggcttgacgatgtcaatgcggcgaaggatttcgccgaggtcaaagcctataccccggcatgggcggagcagatcaccggcgtaccgcgtcaacatatcgaacaaatcgcccgcgagtttgccgatacggcgcataagacccacggccgctcaatgattatcctcggcgccggggtgaaccactggtaccacatggatatgaactaccgcgggatgattaatctgctggtattctgcggctgcgtcggccagagcggcggcggctggtcgcactatgtcggtcaggagaaactgcgcccgcagaccggctggctgccgctggcgttcgccctggactggagtcgtccgccgcggcagatgaacagtacctcttatttctacaaccacgccagccagtggcgctacgaaaaactgaccgcgcaggagctgctgtcgccgctggccgacgccagcaaatttagcggcagccttatcgacttcaacgtccgtgcggaacggatgggctggttaccttctgcgccccagctcaacgtcaacccgctgaccattaagcagcaggccgaggccgccgggctctcccccgcggagttcaccgtccagtcgttaaaatcaggcgatattcgctttgccgccgagcagccggatagcggcaaaaaccatccgcgcaacctgtttatctggcgctcaaacctgctgggatcgtccggtaaggggcatgagtacatgttgaaatacctgctcgggaccgacagtggtattcagggtgatgaactgggcgccagcgatgaggtaaaacctgaggaagtcgagtggcagaccgcggcgattgagggcaaactcgacctgctggtgaccctcgatttccgcatgtccagtacctgtctcttctccgatattgtcctgccgaccgccacctggtatgaaaaagacgatatgaacacctcggacatgcacccgtttatccacccgctctccgccgccgtcgacccggcctgggaggcgaaaagcgactgggagatctacaaggatatcgctaaatccttctcgcaggtctgcgtcggccatcttggcaaagagaccgatgtggtgctggtcccactgcagcatgattcccccggcgaactgtcgcagccgttcgaggtgcttgactggcgcaaaggcgaatgcgatctcattccaggcaaaaccgcaccgtcgattgccctggtggaacgcgactacccggccacctgggaccgcttcacctctctcggcccgctgctcgataagctcggcaacggcgggaaaggcattgcgtggaatacgcaaagcgaagtcgatttcctcggcaagcttaactacgtcaagcccgacggtccggccaaaggccggccgcggatcgacagcgccattgacgcctccgaagttattctcagcctcgcgccggaaaccaacggccaggtggcggtgaaagcctggcaggcgctgggagagtttaccggccgcgatcatacccatctggcgctcaataaagaggatgagaagatccgctttcgcgatattcaggcgcagccgcgcaaaattatctccagcccgacgtggtccggactggaaagcgagcacgtctcctacaatgccggttataccaacgtgcatgagctgatcccatggcgcaccctctccggccgccagcagttgtatcaggaccatccgtggatgcgcgccttcggcgaaagcctggtagcctatcgcccgcccattgatacccgcagcgtcagccagatgaaggccgtgccgccaaacggctttccggaaaaagcgctgaatttcctgacgccgcaccagaagtgggggatccactccacctatagcgaaaacctgctgatgctgacgctgtcgcgcggcgggccgatcgtctggcttagcgaaaccgacgcgaaagagctgggcattgaagataacgactggattgaagcgttcaacgccaacggggctctcaccgcgcgggcggtggtgagccagcgggtgccgccggggatgaccatgatgtaccacgctcaggaacggattatgaatatcccgggttcggaagtgaccggtcgtcgcggcggcattcataactcggtaacccgcgtctgtccgaagccaacgcacatgattggcggctacgcccagctggcctatggctttaactattacggcaccgtcggatcgaaccgcgacgagttcatcatgatccgcaaaatgaagaatattgcctggctggatgacgaaggtcgcgatcaggtacaggaggctaaaaaatga

SEQ ID NO: 234860 - DNA, 768 bp, Klebsiella pneumoniae
ttgagtaaagaaatcgttgtttatacagcaattactggttcatatgatagtttgagttcggtgaaggaagaggaaggtattgattatatagttttcactgatcaagatttttctggagttatacccaagccatggaagcatattcgcttacctgcttcgaggttaaataataaggaccttgcaagattttgtaagctaaatcctcatagattattacctacttataataaaagtttatggcttgatggaaatatagtaattaaaagtgaaattaaaaaattgattttagatacattaaaaaatgattatatagcttcatatgatcattggtggcgagataaaacagagcaagagtttttagagtgtgcattgcttgggcatgattttattttgaatcttaggaatcagtatagtaggtataaaaaggacggctattcttcatataatttttttgaaaataacgttatttttcgccaacatatgaatgaaaatgttgtaaaaatgcatgacttatggtggggcgaatatctgcatggaggaaagagagatcaatattcatttacatatgcatcttataaagtagggatagtaattaaatcaatgggcttacatgatcctaggattgtaaaaaagtattttgattacaaaaaacacagtaaaaataaaccattaaaagaaaagatacttatgagagttaatcgagccattcaatttgtctatccttggaatgtgagtgaacctcaaagggaaaacagtcttttaaaataa

SEQ ID NO: 234861 - DNA, 204 bp, Klebsiella pneumoniae
atgtcgaatgaggatgagtttttcgcagagatgcacccgcagatagcgcagattatcgggatagcggttatgcagctgctggttgagaagcgcgagccatcaagagaggcgctgatagagatgattcaggtgctgtggctgggggaccagccagatctggctgtggagctggcactggatgtgctgatgttgagggaagagtag

SEQ ID NO: 234862 - DNA, 891 bp, Klebsiella pneumoniae
atgaacaccgcagaaatactcaacttccccatggccgatatggggatacaggagcaacgtgtggccgacacagacgatggttacacccgtctggcgaacgagctttatgaagagcttatcggtgcgaacctgaccaaaaatcaggccaaggtagctcatgcatactgccggaaaacctacgggttcaataaaaaaatggaccgtatcgctgacactcagatcgcgaagatgaccaggctgccacgtcagaaggtcaacgttgccaaaaaagagcttctctcaatgcatgttctggttgaagagggtgatctcattggccctaacaaaaacctccatgagtgggctttacctgaaaccaagaagggacctcagtgtaactacggtggtgacacagactgtcaccacgatagtgacagtcaccacggtggtgacagtgtccctatggcggtgacaaaaagtgtcaccaaaacggttacagcgctgtcaccagaacagggacacacaaaagacactattacaaaagacaataaagacaatattaataacccccctaaatccccccgggcggtttcgttcgatgcgtcagctgttcagttgcctgactggctttctgcagaaatttggtcgtcatgggtggcataccgtcgcgacctgaaaaagccgatcaagtctcagcagacggtcacccaggcgatcaacctgctggaccgctgccggctgaacggttactcccctgaagaaattattaaccagagcatcgcgaatggctggcagggcctgtttgagccaaagggcgccaagcctcaaccacgtcaacaggtgcgagttaccgaaaatttcgcagggaaggactacgggcagactgaaatcccatcatgggcgagggactga

SEQ ID NO: 234863 - DNA, 786 bp, Klebsiella pneumoniae
atggcaaatactaatgaacatgggttgcccagaacgattcctgaaggagtcaaaagagagatcaggcagagatgtggtttcggttgcgtaatttgtggtttaggcttctatgattatgagcattttgctcctgattttgtcgatgctacagatcataaccctgctggtatgactttattgtgccctaggtgcaatcaaaatcgcgcacgagggcgattgtctcgagagactgtagccgaagctaaccaaaatccagtttgtattcggaatgggcacgctaatgaaatgtttgactttcatagcgatccgattgcagtcgtatttgcgggggtcactttctatgattgtgctcatttgatcatggttaatggtcgctctttgctatctgttcgcccacctcaggaagttagttcaccaatgctgctttcgggggtgttttgtgactccgttggaagagatgcccttgttatcaaagataatgaatggtctgtcagtaccggaaattgggatgttgagtgtgtaggccctagaataacaatacgtagtgggcctggtgacatagtccttgttttaaagttaaatcctccgcatggtattattgtggagcgcattaacatgttgtttgagggggttagattcagagggaatgatcaaactcttgaaatatgcatggatggaattcattggcagagatggttcggttgtagtatgagccattgtcatgtaggcatcaatatagaaaatggacctcgagcagcaaatgatccttgttggaatattgcatga

SEQ ID NO: 234864 - DNA, 270 bp, Klebsiella pneumoniae
atgtctgaactcgaagagcgcattgctgatcttgaaggaatcgttagcgacctgcaacttagcgaacatgcatcaagaatcgctatcaccattcttagttcagttgtgaatagcatgtcccagacccctggattgttagctcaaagctatgctgatgcagccgccaaagccggcccgatagagtttgactttcctacgccagaaggttacgaagagcttcttcaccagcgtgttctttcacttctctcaaagagtgaagaaaccaattaa

SEQ ID NO: 234865 - DNA, 639 bp, Klebsiella pneumoniae
atgtcaacgcttaaggatttatcccggcagctaaagcagctgcagaagcaaatccctttcgccacggcgcaagccatgacatcggtagtaagggatatcgccgcagcgcaaaaagtggcgctgggacgaaaactggaatcgccgacgccgttcaccgtcaactcagtgggctctgctggtgccagaaagaacaacctccgcgcaaaagtctttgtgcgtgatgttgccgcagaatatctcgaaccgtttgagttcggcggtgaacataagctaaatagccaggcgctgctcaatccaaaaaacatcaaactgaacaagtacggcaacatgccgcgaaacaagctgtcacagttgaaagcgaagccgaatgtattcgtaggtgaggtcactggtgttgatgctgtctggcaacggcgtaaaccgaagaaggcgaaaaagaaacgagcccggcgctctgcgaacggtacgcgccgaccaaagcggaaacagcgcgctcctaagctgctggtgaggtttggtgatgctctacctgttacgcctacgcttgactacatgaaccgctcacggtcaatggcagccggcttgatgccaggcgcgctgagcagggcgattgaggaagcgattcgaacggcaaaatga

SEQ ID NO: 234866 - DNA, 564 bp, Klebsiella pneumoniae
atgaccacgatgaaccagagtcagtacgcgcaacattcaggcgtcgatcgcaagactattggccgatggatcaaggctggtcggtttatcgtcatggatggcgacctgattgatgttgaggcgagcgatgccgcgctgaagaaaaaccgtgatggaaaagatccgcgggcatcaaacgcgaagaagaaaaaagccccagcaccccggaatgatggcgacgatgaaattgatgaaaccgttcgccagataatgcttacagaaggtgcagtcctttccagggaagaggccgcgcggatccgtgaaaattacatggccctgcaggcaaagctccagtatgaaaaagacagcggccagacaattgaattggccatcgccgaggaggttctgtttaacgcctttcgccagcagcgtgatgcctggctgaactggccttcacgcgtggcaccgctgatagccgccgatctgaatgtgccggcggacaggatgacagaggtgctgattgaacatgtccacaaacatatctcagtcctcggagaaccagagtttaacccagcggaagattga

SEQ ID NO: 234867 - DNA, 591 bp, Klebsiella pneumoniae
atggcgaagaaaaagacttttagttttgctcatcttattggccgtggcgcgactgcttccgaagaggaagaggacaaaaaggccaaaaaagcgaaaggccgtcgcgcggaagaggatgagcgcgaagatgatgccggggacgatgaacgcgaagatgacgcggaaaacgacgatcgtgatgatgacgctgaagatgacggtgacgacccggatgcggctgaagacgatgacgattccgaagatgacggcgacgatgaccgcaaagaaagcaaagcggtgaaaaatgcccgcgccgccgagcgtaaacgttgcgcccgtatcttcggcagtaagcacgctgcggcgaatccgtcactggccgcttcactcgcattcaataccgggatgagctctgccgccgctatcgatgttctggcatccacggcgccagccttgcaaccaaaggcaacgcgcgggcgctctctcgatcagcgcatgcaggaaagccatgatgtccgtctgaatccggatggcggcaagaaagagaacggtaaatcggcactggtaaaccagatgaccggcctctacaactccattaaaggagagaaataa

SEQ ID NO: 234868 - DNA, 408 bp, Klebsiella pneumoniae
atggatcaatttggtcagaatgcctttgcacctggcatgaagagttcagtgtttgtgccggatcagttaattgccggtacgctgcaactggtcactgacaccggcacgatcaccggcggtgtgtataagcgtggcactgtgcttggcatgatcaccgccagtggcaaatatacagccagtgtgaaaaccgcaacggatggtagcgagacgccagcggccattctggttgatgatgttgacgcttccacccatggcgatcagtccggcggcctgtacctgatgggcgagttcaaccagaatcatattatttttgacgattcctggactgcgccggaactgaaaacagcactacgtccgctggccatcttcctgaaagacagcgcccaggcacctttaaccacctcctga

SEQ ID NO: 234869 - DNA, 1050 bp, Klebsiella pneumoniae
atggaaaatatttatgataccagtgtgctggtgcaggtcgttcctaacctgaaaaccagtcagaactggctgcttgatcgcttcttcccgaacgtcgtgacttatgagaccgaagaagtagcgattgacgtggatgtcggcctgcgtcgtatggcgccattcgtctccccgctggtggaaggtaagctggtcgagtcccgtaaataccagaccaatacgttcaaaccggcgtacatcaaagacaagcgggcgccggacctgcgtaaacctatccgccgccagattggtgagcgtattggcggtgaatataccgccgcagaacgcgaaatgttgaacctgcagtttgagatgactgatcagattgacatgatcaaccgtcggctggaatggatggcggccagcgcgctggtgtccggtaccgtcacggttgccggggaaggctatgaaaccaaagtggtggatttcgggcgctctccggatttgactatcactctgagtggttcagataagtggccgttgacggttgccgcgggtgccactaatacccagccctctgatgatattgaaatctggcagacgcttttcctgaaagaatccggttccgtcgcgacagatctggtgttcacaagcaagtcatggcgtgctttccgactggacaccaccatcaaagataacgccatcacgttcccggcgctgagcccgtttggtaaccagattaatgctggtccacaggcgatgaagggcgctatttataaaggtcgctggggtaactttgacctctggttatataacgactggtttattgacccacttgataatgtcgagaagccgatgatccccgacggcgccgttattatgtctggcgctgatctgatgggtacccgcgcttttggcgttatcctggacccggcatttaactacggtcccctggcctatgcgccaaaatcctgggtgaaagaagatccggcccagcgtcttatcctgatgcaatcctccccgctggttattccgagccgggtaaacgcatccctctgcgcgacggtggtctga

SEQ ID NO: 234870 - DNA, 378 bp, Klebsiella pneumoniae
atggcaaaaatctctaaaaccgagcaggtcgatgatctgaatgctgaaggcgccaccgaagacgccctgaatatcgacgacctgaatgccggcggcagcgttcagatgacgcatcagtatgacgaaaaagacggcgattcatctgatgatcaggatgacgatgaagaagattttcaggaagtagcggaacctgagtttgtggtcctgaaagggaactgcattcgccatgacggtgaggtttaccgggaaaactccctaattccggtctccggtaaggatgccgagcgtctgctggccgcaggtgtaattgccgatgtccatgctctgcgacagcgcgcgttatctgctgcgcgtggtgtgaaaataacaacggagtga

SEQ ID NO: 234871 - DNA, 360 bp, Klebsiella pneumoniae
atgggcgtggactgggatttacatcttctgagtccgctccatggcgtgtttggcgatgagcatgagtaccgtccccgcaacggtactccttttacgattaacggtatttttgaccgtggctatgcgcaggttgcagaaaatcttgatggtgattcagaaattaacacctccagcccaatgcttggggtgcgcgatgctgaatttcgtcagttgggtaaaccgcaacctgccgtatctgaccgtgtgtttatcaaaacggtcggaggtcagatcatcaatcagttatttgttgtgtccaacgtcgaaccggacagccatggcggctcacgtcttgttctcaatgtggcgaaaacccgatga

SEQ ID NO: 234872 - DNA, 546 bp, Klebsiella pneumoniae
atgaatgcttccgcaatacgacacatggtcgtggccgcgctgaaagataaaacggctgccgccgatcgtgtgtattccccgcgtgactgggcaacttcgccggacctgtacccagcgttgcttgttcagacgccatttgatcacaaaaaggcgcaggggagaaatgtcccggcctttacctctttgaccaccgttcgcattactggccgggttcaggagtacgacagtgaaaccactgatgatggcgccatgcgcgcggaggttgcgctggaagagctccgggaacaggtagaaagggcggtgattaacagctacgagttaacccggaacatccagaaatatgcggaggtccgctcgacgattgatgttgattcggatggtgaagcgcatatgggccagttgcttatcgaaattgatattgagcactatcagggaccggaagacttttatccggtcgatacggtgccgctggcggggatcgacatcaccatcgacatgccggacggtacgccgcagccgggcgtaaaaatagaccttcaggagtaa

SEQ ID NO: 234873 - DNA, 186 bp, Klebsiella pneumoniae
atgtttgtaaaaccgaaggacgggctcagcgttcgctgccctgtcaggggggagcctttgcccaaagatggcgcggaggtacctgataatacgttctggcgtcgccgcctgaaggatggcgacgtcagtctggtaccggaaaagggcgttaaaaacgccgtaaaaaaagagggcgtaattaaatga

SEQ ID NO: 234874 - DNA, 1512 bp, Klebsiella pneumoniae
atgaccgttccattttcgcgagttcccggcaatttacgtgtgccgcttttttatgtggagtttgataactccatggccaacacggcgacggctacacaacgaacgctgttgattggtcagatgctggcatcaggctctgcacaggaaaaaatcccggtaaaagcctcctctcccaatgcggtgggtgagctcaccggaaaaggatcaatgctgcatggcatgatgacggcgtatcaaaaaaacgatactgctgcggaggtctggatccttccgctggctgatgatgcggattcgatggcagtggcaactggcagtatcaaggttgccacacaggcggcagaaaccggcgttatctctctttatattgctggcgttcgcgtacaactgaccgtactggcgactgacactccggctcagattgccactgcgctggtcgcggcgattacccgcaaaacggaactgccggtgacagctgctgtaaaagccgatgcaacggataccgtgacactgacggccaaaaatgccgggttgctgggcaatggtattgatatcaggctgaattatctcggtgttcagggtggtgaggtgacgcccgcgggcctgacactcaccatcacgggcatgaccggcggcgccggcgcgccggattttgttgatgcccttggcaacctgcaggataagacctttgattttgtcatcaacccttatgatgacaccgcatcactggatgccatcagagaatttctgaacgatgcaaccggccgctgggcatgggataaacagctttatggccacgcattcaccactaccaacggcacttacgccgagcttggcaccaaaggggaaacccgtaataaccagcatgagtcactgcttggtgtgtatcgctcaccgtcaccgcgttatatctgggcggcggcactgacaggggccgccgcacccagcctgcgtaatgaccccgcacgtccgctacaaagtctgcctgtttatggcgtgctggcaccggacctggcggatcgctttgagctgacagagcgcaacaacctgctgtacagcggcatctccacttacaccgtgggtgatgacgggacggtgatgattgaaaacctgattaccacctaccagaaaaacagctatggcgacgaagacgacagttaccttcaggtggaaacgctcttcagcctgatgtttgtcacgcgatatctccgcactgcagtgaccagtaaatttggtcgcatgaagctggccgcggatggcacgcgttttgcgccgggggcggcgatagtgacgccaaacatcatcagagccgatcagatcgcggaataccagacgctggtctttaacggctacgcgcaggacgctgaggccttcgccagaaacattatcgtggagcagaacaaaacaaatccgaaccgcgtcgatgtgttgtggccgggaacgcttatgaaccagttgcgcatcttcgcgctgcttaaccagttccgcctgcaggctgaatcaacaggagcataa

SEQ ID NO: 234875 - DNA, 279 bp, Klebsiella pneumoniae
atggcagaacttgaacgcaccaaagtcattcccctcatcaagcctctggtcgatgaggcgcaaaaaacacgctatgagcaactggagctgaaggcgccgacgctcagccaggcagagcagttctacgaaaagcaggcatcgtccacttcactggcggcgatgcgcctgctgatctcgctggtcacggatacgcgggaaagtgtgcttcagccgatggattttatcgacttccgaaaatgcgaggagtttttgctcggttttttgacctggaagccctga

SEQ ID NO: 234876 - DNA, 1854 bp, Klebsiella pneumoniae
atgagtaattctttcgactttgagctggtggccagcgaccaggcgacggaagccattgagcgtatcaatgaggctatccgtgatctggaaccaaagctggataaaaccaaagagggactccagttaggagggcaggagaccctcgatggactgaacggctttatttcccgcttcgaaaatctgtccaaaaatgcccgtgataatgttcagtacatcggggacatggtaccaccgctgaagatggtcggtgagctctccggtaagctggcatcactgggggttgttggagcggcgggatatgggctaaaacagattgcctacggtttccatgaggcctcaagggaagcctataacctcgatgtcgccgcgaaaaatgcgggtatgcgagtggacgatttttcccgcctgtccggtgccatgcggatactgggtgctgatggcgacagtgcaaattcctccatcgaggggatggctaaaagcctgaaggaggccgccagtggtgccaacagccaggtgctcggcgcattgtcacagattggcgttcagatccagaaaaacaacgatggatccgttgatacgctgagaacgctggagtcgatagcacgcgttttcccgagtctgcgaccggaccagcagaaatcagtttccgatgccctcgggttgacgccggaaatgctggcgctgatgcgtgaaggcgtacggatgaaagcattgctggctaaatctgatgaacttggcctgacggttgatccggaacttaaccggcaattgtccgaggttaacggctccatgaatgagctgggcgctgcatgggatgggctgaaaaaccgttcgaaaaactctctgtttaagggattgctttccgatggttcggtgaaagacggccttgaaggagtgaccgacttgttcacgaatggcgatttcaccgggctgtcgcatgcgctggggtttatcagtagcaaggatgccgggaagctacgccgcattcagggtgataaggcgctgtataacaccctttcccggcgcgagcgcggagcggtggatgccggctttatgactgatgccgtccgtaaacgctacgacgcgcaatatggcgccggggacagagctgaacaactccgaaatgatttgtctgtcatcctgccagcaggtgcagcagctccacgcagagaagtgaattacagccagccatctaaccaggcactgggcctgagaaataataaccccggcaatctccggatagcgcctaatgcgaccggggtgaatcgtggtttcgtcacttatgacaacagcagcgacgggctggcggcaatggcccggcaactgatgttatatggcgatcgtgggaataacacgctgaacagcatgatccacacttatgcgccacgctcggaaaatgatacgcagtcctatatcaattcagtatcggccgcgacaggtattcaaccccagcagcgggtggatctgcataacccggaggtgctgaagtcagtcatggcggccatgattcagcatgagaatggggcgcagccatattctgaagatgagatacgggcggcaattcagacggctatcagtgatccgcgctggtctggtcttcgtgacagccgagtgctcagccagcagagagagaacatcctcgtaccgcaaccggacaagtttgacagttcctcaatcctgacagcttccggtaatgggagagacactgtcagtgaaaacctgacccgatccctcaaagaggcgatggccgatcagaaaatgaagctggaaatcaccctggtcaatgataagggggagaagaaaacctataacgtcgaggataacggcagaataacaaccgccatgaattactaa

SEQ ID NO: 234877 - DNA, 1401 bp, Klebsiella pneumoniae
atggcaattatccaggatgcaataacttctctgatggggggcggtggtagtgaggactggttgagccagctacgtcccggctcgttccggggcgtgccttttgctgtggtgaatgaggaaggcagtcatggccggcggcaggcggttcatgaatatccataccgtgataccgcctggattgaggatatggggcgcgggacacggcgatttattatccgtggctttatcgtccagaacagtctggtatacggcggtggcgacgttatttctcagcgccagtcattgatcaatgcgtgtgaagctaaggggagtggtacgctcattcaccccacgctgggggagatgaccgtttccatacctgagaatggtttaaggctttccggttccgccgacaacggccgttcgtttgaatttaccctgatggtcattgagtcggggttaaaggtctttgccgttaccgacagtgccgccgcgggggataccgttggcaccaactatctgaagctggttagtacgacggttgccagtaccctcgcgagaattaaaagcgagatccgcggtgtgtcgcaggggattcagaccatcaggggaaccgtgacgttctggaccaatatggtggataacaccatcagtgaggtaacaaacgtcagtaacgtgctggattctactttcgggaataatcgttacgggcggtacagcaaggggaccgtaggcgggagctcttcgggtattaacggcaatcgtgatgccgatgactcagaagaccatcaggcattgtctgaacaggttaccgcccgggcggtgatggatcgccaggctgtgctcgatacaacggctgcactgaatgaatctgtatcggtcgaggaatttgttcagggcgttgccgatgtgattaatcgcattctgtccagcgccggtagcgtgagtgacaaaattgctgcatttgaaaaactggcggcttcaaccagtaccggataccagcgttccgaaagcagccagcaactggctggcaccatgaacacgctgatcgtagtgctatgtaccggagccatgacggatgctgctgcagattacaacccaaccagtcgtaatgaggccgaagaaatcactcaacgcgtggccgggcaactggataccgcgttactactggcgggcgaccgtggcgatgatgatctttatacggcattgatggacgtgagaaccgcttttctgaataccatggctcagacttcatccggactgagtgagttgatgcaaatcaatactgcggtgccggttcctgccctggtactggccaaccgcctgtatcaggatgcctcgcgggcaaatgaactgatacaggaggccagcgtaccgcatccggcatttatgccgacgacgatgaaggtgttgagacaatga

SEQ ID NO: 234878 - DNA, 1086 bp, Klebsiella pneumoniae
atgagtacggataatgatcaggatattgtctccctgacagtgggcggaaaaatcattgaaggatgggactctgtgcgggtgacccgtggcattgagcgttttccctccgattttgacctgggactgatggattattttccgggaagtgaccagaagcagcaggtaaaggaagggatgccttgtcaggtaaagcttggtaacgacctggtcgtgacggggtatgttgatgactggtcgcctgctatttcccgttcgcgccatgaagtcagagcctcaggccgcagtaagtgcgcagatctcgttgattgctctgctgaatggccaaataacgtcatcaataacagtaatgcgcttgatatagcctcccgtctcgcatcccattacaacattggcgtaagtacagacgttgatgatctggtgaaagttccgcaattttccctgaactggggggaatcgccacaggaaatacttgatcgtgtctcccgctggtcggcactgctttattacgatcagcctgacggtaacttatttctgacccgggtggggacaaagcgcgcggccagcggtatcgcagaaggggtaaatatcgaacaggcttattaccgccgttcgatggctgaccgcttttctgattacgtcggcgtatcgatgagcatttcgccgattgcaggattctcgccagatacggcttatgattcggtgacgctggcgacggcccgcgatcctgaggcggccagtatgcgttaccgaaaacggatcattattgttgaaagtacactgatggcttcacaacaggctcagcgagcgattgactgggagatgaaccgccgatacggccgttcccgtcagttaacggtgacgattgattcctggcgcgataaatccgggaaattatgggagccgaatacgcttatcccggtcaacatcccgagtctgcaactgcctgacaccgaattgcttatcgcagaggtgacttatatcagagacagtgacggcacccatgcgcgcctttatctgatgcccccggcggctttcgctgtccagccttatgctttctaccagcaaatacccggactaaaccaatga

SEQ ID NO: 234879 - DNA, 582 bp, Klebsiella pneumoniae
atgaatcaaaatttaaagaaatcggccacgcgcatcgccggcatgctgggcattggccgtattaccacgcagaaagatagcggggttgtgcaggaaatccagtaccagactccgcttgaagtggccagcgccccacggctctctgattttggtttttcatcggggttaccggcgggatcggatgtgcttattgcctttctcggcggggaccgctccagtcctgtcgtcattgcctctaaccatcaaagcttccggtataccgggcttaagccaggcgaaaccgtggtctataaccagcaggggatgaatattcatctgaccgaggagggaattttcattgatgcgaaaggcaaagatgtagagatcaataatgccagaaacatcaccgcgacggcaacggaacaggtaaagctggttacccccaaactcctggtgacgggtgacatcatcgataactgcgagacgaacaattcaacgctcaaagcgctgcgggatgctcacaacgatcatgaccatgacgttaaaaaagttcagtccggcgatagcacgatcataagcgaaaaaacagagagtcaggtatga

SEQ ID NO: 234880 - DNA, 450 bp, Klebsiella pneumoniae
atgagtgatatttcctcattctgggatgtggatgccattcatgctgactggcaaaccggtaacggcgtactgacatctgagaatgatatgcacacggccataattatcagtttgtttactgacggactggcgcgcgctgatgatgattatgaaggaactgaccgccgcggctggtggggggatctggacaacgaccggaatattggctcaaggctgtggctactgcggcgtgaaaaactgacgcgcgaagtggcgatgagagctgaagattatgccgaagaggctctggcctggatgaagtcggatggtattgcagcagcgatagaggctcagtcagagattgttttcccgaataggctgaacctcatcatccggtatttgccaccggcgggggactggcaggagttcaaattcttctggctatgggagcaactgaataatgccatttaa

SEQ ID NO: 234881 - DNA, 1149 bp, Klebsiella pneumoniae
atgccatttaagcggaaaacactgagcgagctccggcaggagaatcgccagtttatgcaggcagagcttgaaagtgttggcgcgctgttacggtttggcaaccttaaggtgctcgctgatatggatgcgggcatggcccatctgcactacgcctacctggattatattgcccgtcagagcacgcctttcacctctaccgatgagtggcttgccggatggatggcgctaaagcagatttaccgaaaagccgcaacggcagcacgctctccggcggcgaccgttaccggaacgccggggaaaacactgtcaaaaggggccgtgttaaaccgtgatgatggttaccagtacacaaccgatgatgccataacgataaacactgctggcagtgcgtcggttgctgtaacagcggttttgccggatatcacagacgatgtgacaggaggaggcgcttccggaaatgccgatgctggcaccattcttacactggatgctaatgcccccggcatagacagctcggttacgctgattgagcccgccaccggcggcgccaacattgaaagtgaagaggatttccgattacgtggtctgctggcgtatcagaatcctccgcagggcgggagtgacactgattataaaagctgggctttatccgtatcggggatcaccagggcatggatacggcgccgggggatggggccgggtaccgtggtgatttacatcatgtgcgacggcgatgataaaaccaatcatggattccctgtaggaactgacggtgtctctcaactggaagagtggggggctgtaaaagccaccggggatcaggggagagttgccgattatatgtatccgcttgcgccggttacctcccttaactatgtctgctctcccatcgaacgcgttatcgattttgaaataagcgggatatctgatgccgacagcgcaacgactgcggccattgctgatgcgattgacggggtgttgtttgaatccgctaacccgctcggcacagggaaaatttacctttcagatctcaaccgtgcgataggggatgttgccggtacttcaggttatatccttgtgtcgccttctgcgaatattgagccgggagttggggagctggctgttcgtggtgaggtgaactacacatga

SEQ ID NO: 234882 - DNA, 786 bp, Klebsiella pneumoniae
atgagaaaagttggcagtacaactgacaccgctgatgctaatggtgaatacactaatggtaatgtcgctaatggtatttcaccgacaataattaatgctgagatgatgaatacctttcagcgtgagctggtaaacgttgttgagggcgcggggcttgagcttgatcctgatgatgattcacaggttcataaagcgattggtggcggtcgcctgcttaatattgtcacctttactaagtcagggacttacactccaactaaagggacgaaaagagtgcgggtgaaagtttggggagcggggggaggtggccagaatgctccagttagtgtgggcgcatctggaggttgtgctggtggatattcggaagggttatttaatatttctgataacgaaactatatctgtgacgataggtactggtggcagtgctgttgctgctggtgtctcgtctaaaggcgggaatggtggtgatacaaggttcgggagtttaatctcagctactggagggagtggtggcggggctacagttcctgctggaggtatcggaagtggcgggaacattttaaatattactggcggaatatctcaaggtggtctgtattatggttctggtgcttttattggcggggctggaggatctgcattttcatcaacgggtggcaatggccacttcggtagttctggcgatgatggcggtttccccggctcaggtggtgccggggggaatggtaactattcatcaggaaaaggagcgaatggtttagtttaccttgaagagttttcctga

SEQ ID NO: 234883 - DNA, 1092 bp, Klebsiella pneumoniae
atgcttggcctaataaggttttttttggcatcgtgcgtcattgcttttcacttaacggctcgcatacctgcacttggcaactttgcagtgaattgcttctatgttattagtggttttttaataacatacattttgcatgaaacatacaagttcaacttctctatgttttggaaaaatagaatactgaggttattcccggcatatatattttttctcgtcatggggtttcttattataaaattaattccatccgcaaaggaattccactcaaactggacaggcaatttcttacctggagatttattaggaaacctcttaatcttcccctgggctttcctttctgataatgctgtagcaaatccattcggtgccttttcatccatttatcactttgctattgatggtaatagattcagaatagtcacatcatcatggtcagtgggtgttgagataacatgttattttttattgtggcttttcatagcccgaaataaacttacagccattacgtcgattctgctttcactgctttatcatgcttacgtatatgtagtacaccattcttttgatatggcgtatttcccattccttgctgcaacacttccttttagcatgggttctctgggttattttgcccatagaaagttcaaagctatgtatctttctccacacaaagcttttttaataacatttatttgcatcgggatttttattaccaattggcatttatatacaattaatgcattaggtcagtacaacataatactttactacaccaataatgtaatagcattgtttacaaccctggtattattaaaaataaagacaaacatacattttgagaaaatactcaagtggtttggtgacctggcctatccaatttttctttgtcaatattttggcggatttctagcatggcttgctattggtggtgaaaatcgtggcttatccatctttttattaggctacccaatatcaattgcacttgggatcgtttgtgtaatattaatagacaagccactaattaaaattagagcaaaaataagggcggacgctcaaagcaaaaataatcaggaaaactcttcaaggtaa

SEQ ID NO: 234884 - DNA, 1731 bp, Klebsiella pneumoniae
atggacaaaagatataataccggcaatccaagaccttcaaatagcatgaaggatctgaatgataacgccctggcgtacgatgatttcctgaacagcgaaagcgatacttttatagatcgttttggtaacgccaaggatacgatgattggggctactaaaaaaatggcagctgctaccgacgctgttattgatgaagcccgccaaaacctgatccctctcagtcggcagtatatgaccctggaggcagctcaggcggatattgctaatatcccagaaggtagcgccacctattaccgcagcccggatgatagtgcgctggctatcgaagtcatcaacagcgccggtacgcttgagcccaccggtagacggatgccttctgagaaacatattacggatgggctggggacattagatgcaaagaaactagacaaatacggtacatcccacgacagcgaaaaccttatcctgataactgattcagcgggcaacaagacgtggctacaggccagtctggaggacggcatgccgacgagtcagaccgaggagatcattaaagagactgtcgggcgattggaccatgaccgtattgacagcggtggggaggaattacttcttacaatattggatggtgaggacaatccgacagctctttcagtgcgtaaatcggacggcatgttcacaaaccctgtcattgaaaatattaaagggcgtattgggcggtcggaccccggccatatcgatagtggtggggaagaattgctttttgcgttatcagacggcgatggcaatccgaccgcgctctcggttcgtaagtcggatggtatgttcacgaatgctgttatcaaagacattaaagagcgtcttgacctgccgtcaaatgatgaagaggttagtccggactttaaaacatacgaccgcgcgcctgatttccagcttatctcttcggtggcacgtggcttgtcgagacatgttgccggtacggcactgccggcgaagtcctacacattcgtcaactcgtatggtcaggggaatatcatcaagctgcccaccgggtatagcgatgctacgccaatccccctcgtactgatcctcgacggcgtggctggcgacagcaccggttcggcaacaccgccaagtatccgtgctgcatatgacgtgctgctgagtaacggcattgcgatggcgaaaagccggtatcacggcgacagctacggcagtcccaaatgtatggcagacctgctggagctttatcagaaggcatgtgaaatcgcgccaattggggctgttatcctatacgggaactcaatgggcggaatcgcagcgcagaactgcctgctgacaaacacgatacccagcgtagcggggctgtatctcgttgaccctacttatgacctatatcagcgatacacaaacggccgggcgtctgaaataaatgcagcatacgaatgcacatcagcaacgtatgcggaaaaaacggcaggttatgaccctgcgctgcgccactggtctgagtatcgcggactcccgatacatatccgcgcctccagcttggatacgagtgtgcggcttagtcttcacgggcagaaactgaaaacctatctaggcgaacataatgatgtgacgttatttgatacacaaacggcgggacacaatatcgctgatcgtttcgacggtgaagatttaatgtccttcattcacgctaaatgtattagcgggcaagtcatcctttaa

SEQ ID NO: 234885 - DNA, 639 bp, Klebsiella pneumoniae
atggcaactgtcatcaaagcggatggcatcatcagcaatccgaaacttggaaagattatcacactgcaacttttaacatcggaatcctgcatacgcagtaccgatactgaactcacgggtgcgacaaccgacctctatgctggtgggtctgcttactcgtgggacggtacaaatgggttatttgtactatcaaaacttggtctgacgaataccttgactacggcttccgggaccacgtatctcggtatgccatcgacgaaagatatggccttgtccttcgaggccgggacgcagggctcggagataattatcgacgttcggcgtatccgcacaggtgataactactgctaccgccttagtatgaattcaagcaattttgctatccagagacgagtgtcaggctctactggcagtggatcgttcaagaacttacctgctctggtcgcgggggataaagtatatatcaccttcaaagggggcattatcacagtttacattaatggggttgaagtatacaccattgacgactccgcctacaccgatgtgcagcgtgctggcgttatcgccatgtcgaggggctcggctggtggtggtgcgcacacctacattaagaaccttcaggtcttttccctttcctga

SEQ ID NO: 234886 - DNA, 345 bp, Klebsiella pneumoniae
ttgaccccaacgcccatgctgccaacgtttgcagccccgactgatacggaacgcgcgaccctctccgcgatcctgaatgacaccggcctccgtgccacagtcccccggattaacgtcctccattacctgaacacaaccgacactcccgtaaccgctgagatgaccagccgctgcgttgacgtgccactatcgactgcgtacagaacgctcacggcgcttgagattaaccatctggcaggcgtgactttcgggcgcggagacgtgactcgctggttccggtttacaccggacagaccgcaatattgcccggcgtgcgggcagagcttttatggcgaatattcctga

SEQ ID NO: 234887 - DNA, 759 bp, Klebsiella pneumoniae
atgagcacttttcattacgcggaaaaaacggaaaacttcatcagtgcactaacttttatgccgatatatccagaccatgcccccttttatgttgctgatagcggcatgtacggcatcaggtggacccttaactacgaaatcatgttttatctgtttattgcagccacaatcctttttgcaaaacgatgggtctgggctggcgttttctttgcgaccacgcttgtcatactcccgttgaccttatggcatcagttcagtatggacccgtccgggtatgcagtgagtacagcgctgctcggactggttaccaacccgataatctggctgttcctgttggggatggctatcgggctggtgtttccttacctgaggtggttaccaaccagagggatggccgtcgctgcgttgttcagcttgattattgcggtttactttttcagccaagacatgttcattaatcatgggttactcagttctggctggatctacgggatgattcttttcacttttgtccttgcggaagaggttatcggaaaatacattccggactttctgatgcgcttaggtgacatctctttctctctttacttgatccatacattaatgaacaacggaatagggaagcgctttgccagccttggcattgaggatggatatgtcagattttttatttccattgctgcatcaggtttgctggcttgtctatcatggcggtttatcgagcgtccattcatgcagaatcataagaaaaaaaattaa

SEQ ID NO: 234888 - DNA, 1041 bp, Klebsiella pneumoniae
gtgaccgacgcccgcccgggcgtcggcttcctggaaaacagacggcgcgaaacgacgatgagcgataaaaaatggattaaggccgaggacgtggccagactggccggggtctcgcgctcggcggtctcccgcaccttcacccccggcgcctcggtgtcggagaagacccggcagaaggtgctgagcgccgcggaagccctgggctatcaggtgaatatcatcgcccggacgatgatcaccggcagcagtaattttatcggcatcgtcaccgccggtttcgacaacccgtttcgcagcaaactgctggcgccgctggtccatcagctggcgctcaatggctttatgccgctgctgatgaacgctgacgatccgcagcagctcgccccctcgcttaaacaactgctgagctatcacgtcgccggggtgatcatcacctccggcgcgccgccgctgtcgctggcggaggagtatctggcgcgcaagatccccgtcaccctgatcaaccgccatgcggacctcgccggctgcgaccgggtgtgcagcgataacgcccagggggcgaagctggtggcggatctgttcagtcgtcgaggctggcggcaggttggctttattggcgaaaatcgcgagaacttcagcacccgccagcgctatgaggcttttatcgcccggacgtcggatatggcggtgagcagccgcttctgcgacggcggcggctatcaggctggctaccaggctgccagagaattggttgctgaaaaccccgggatgcaggcgctgttttgcgccaccgatatgctggcgctgggcgcccaggacggcctgcgggacgccgccgccccgctgccggccatcgtcggctttgacgatatcccgcaggcggactggcagccctatcagctcaccaccgttcagcagaataccgccctgctggcccaccacgcggtggatttgttaatgacgcggatcgcccgcttcagcctgccctcgcgccatcgcgaagtgccggtgaaactaattattcgtcatagtgcgaaatga

SEQ ID NO: 234889 - DNA, 588 bp, Klebsiella pneumoniae
atgtcaaacagcaatgattttcccctcgtcgaagcgcccgccgccggacgcaaaggcgtattttccatcgccatggtgttgttcagctttacctttttcaccggcacgatgttcgccggcggtaaactcggcgtctccttttccatcgtcaatctgctgtggatagccgtcatcggcaacgccttgctggccctctatgccgcgtcgctgggctggatcgccgcgcgcagcggcctgaatacggtgctgatgggccgcttctgcttcggggagattggcagcaagctggccgattttattcttggttttgccgagctgggctggtacgcctggggcaccgccacggtcgctatctcgctggtgaagatcctcgccctgcccgaggcgctgacccagccgttgatggtgctgtttggcattttgttctgcctcaccgcgctggtgggctacaagggactggacgcgctgtcgcgcctgtcggtgccattgatgtttgtgctgctgatggtctccatgtatctggcgctgcaccacgccggcggctggcaggcgatgacccgtattgcgccgagcgacaccatgacctag

SEQ ID NO: 234890 - DNA, 696 bp, Klebsiella pneumoniae
atgattttcaacggggagatggtacgcgccatcctcgacggtcggaagacgcagacccggcggattatgaaacctcaaccaggaccatgcccccgtggtggacattggtggccaagcaacgtgtttaaaacgatgcttcatgtcgaagaaaaaatgcagaacagcaaaggcggctggggcgggcttgttggagatgcttgcccgttcggggacgtcggcgaccgcatctgggtgcgtgaaacatgggcaaccctgggcaacgaagacggctgctgtgtcgactgggaaggcaacctttgcaaaggggatgagcgctcagctgcgaggatttaccgcgctagctgcgagcagagaccaggtgattacggcctgtggtctattcccgatgacgcctactggaaaccatataccaaagagcacaagttcgaaggagcatggcgcccgtcaatccacatgccgcgctgggccagccgcattctgctggaaatcacaaacgttcgggttgagcggctgaagagtatcagtgacggcgatgctgtacgcgaagggtgcagtaccgccgacatgaagagtggcgactgtgtagctgatgtgttcgcgcgcctgtgggcatcaatctacggctcagatagttggaaaaccaacccttgggtttgggttatcgaattcaagcgcgttgaaggcggtgcagcatga

SEQ ID NO: 234891 - DNA, 174 bp, Klebsiella pneumoniae
atgactcgtgttcaggcgaaaccaatgcatgagaaagttgcggaattgaagcaggtttctgttagccgcaaccagaaacaaatgattgaaaatcttaaagatttaggattattaaatgcacccaaatttactttagcgtatggaccaacagcacaagtttaccaaccacgctaa

SEQ ID NO: 234892 - DNA, 885 bp, Klebsiella pneumoniae
atggataacttagagactacacttgaagggtacataaaatacaagctcagcgaattcagggaacaatttttccaagaatgtgacatcatcacatactatggcgggattactgactgggcaaagcttatatatcaaccagttatagaagatatcggcacttcagcattacagcgcgaacaccgctttttagttattcttttgcagaccaatggaggaagcgttgagtctgtagaaaaaatggtcgaaattactagacatttttaccatgaggtttattttatcgtacccgatagcgctatgtcggctggaacgatttggtgcatgtctggtgataaaatttacatggactatgcttcttcactaggcccaatagatccacaggttcaatcatcagatggtaaatgggtgcctgctttaggctatcttgacaaagttgaagaaataatcgagaagtcagcctcaggctccataactcaggccgaattaatgatggtcaataatttggatttggctgagctaagacgctacgaagaagcccgagaactgtctaaagatctgctaaaaaaatggcttgttgaatataaatttcgtgactggcaggttcatgaaactagtgtttcaaaactgggtcagcctgtaacacaagatgaaaagatagaacgagcccgggagattgctactgtactttcagacaataaaaaatggcactctcacagcagaacaatcggaatcaatactatagtttatgatctaaggctaaagatagaagattacaccgaacagcatgatatgcgtttagcaataaacgagttgcataagctgttgaatgaattcaggtataagacaaatagagaaatcgtagctataagttctgtacctttttaa

SEQ ID NO: 234893 - DNA, 468 bp, Klebsiella pneumoniae
atgcgcaaagtaaagcatcaatttaccaaccagtcaacagatgcatgcctatctaggagtaaagcaattatttacaatgaagccatgagcgaaaaaaatccgacagaaggcctgatagccaggctgacagcgttaaatgctaaaggaatctccaaaacagagatgtcccgaattgctggtgtcagtaagcaggcagtctcaggctggttcaaaacaggccgtatcagcaaagagtctgcactagcaattgccgatgcagtcggcgtttctgtgccttggttattgggtgaagatgttggtgagaaagacggtcttaaacctgacgaacagcgcctgcttgagctttatcgtcagttgccggaagaagagcagcagaacatgttgcggatcgtatctctgcgactgaaggagctcgacgaactgtacgcgaagtacatggggcggcggattaagggcgatagcgactaa

SEQ ID NO: 234894 - DNA, 219 bp, Klebsiella pneumoniae
atgactggtattgaaaacgctattcaacaatctggttctgcaagtgcgctaggtttggctatcggagtaaccaaaatggctgtgtctttgtggcgaaagaacggcgtaccgtcctctcgtgttattcaaatttacaaagcaaccggcgtcacgccgcacgaactgcgcccagacctctacccaaacccgaccgacggtctgccaaaacaggaaggctaa

SEQ ID NO: 234895 - DNA, 339 bp, Klebsiella pneumoniae
atgggcaaaccactaaacaaacgcgaacgcgagtttttaaagccagcaattgtccaaggctgggaaatcgaaattagcccattacgtaaaacggctttatgggatggcgactctctccttccagttagagtcggcaccatggctgaaagcctgataaagcgcggctatcttgagcgaatttctatgggattcggcagggacattatccgagcgacggaaaaggctaaaaatttacgttgttaccgttgctcgtatggcaggactatcaaatacggtcagcaagcgggcccatgcccgcattgtgacggcggaatcaagccagaaggagccaaccaatga

SEQ ID NO: 234896 - DNA, 393 bp, Klebsiella pneumoniae; identical to SEQ ID NO: 99437

SEQ ID NO: 234897 - DNA, 900 bp, Klebsiella pneumoniae
atgagcttaaggtcagagcgcacaaaatgggttatgtttctgccatgttcgaattcatccgctgagccccggcacgtccttgacctggtttttggtgttttatgtctggaacgtgcaggaattcagccgcaagatattttcatctacattgacagtcccactcagtgcatggatagtttttttaatcttggatcaacgcatcaatacatatcacggccaactacggattttttcagtgatctgcttgataactcatataataatttggtgatgtttattagtggccatggaagtccatttggtttagatgcaccaaaaccaataacaccaaatcaattgattacatctctaaagtcaacgcctgttctaaaaaatgcagtcatctatctaggccaatgttatgctggaacctttaattttgttaatgcagggaaggctaagggtgagattcttgatattatcttggtaggagccaccaaccttcatcagagtttaagtactggtacatctgaacagttttccgctcctggaattaaacttccctggatggcaaatgtctttctcctgcatgtttttaaatggatgtcttcacctcaggacattgatggtgatggaatttatacgattatggactcatataaatatgcgggcgtgtatactaatgatgcaaataaacaagtcaaaacaaatggcttcatcagtataattgatatgcttaatgattttattggcgctagagagttagcaaaagttgagtatgaagatgagcaggtcaatatcgataacaaagtggattgccaggcaaaatatgaaatgtatattaaccggctagcacttcatcatgtgcatcaggaatgttggatattaaactccaggcctgcgcagttgattgagttctga

SEQ ID NO: 234898 - DNA, 639 bp, Klebsiella pneumoniae; identical to SEQ ID NO: 99435

SEQ ID NO: 234899 - DNA, 297 bp, Klebsiella pneumoniae
atggcgaaccttcgcaaagcggcccgaggccgcgaatgcacagtgcggatccctggttactgcaacggcaacccggaaaccagcgtactggctcattaccgcctggcgggtacctgcggaactggatgcaagccggacgatacacagggcgctatatcctgcagtgcttgccacgatctcatcgacggcagaaagaaaaccaccgacttcacccatgaggaattgcgcctgatgcatgcagaaggcgtgtttcggacactcgaaatctggcggagagagggactcattaaatcatga

SEQ ID NO: 234900 - DNA, 345 bp, Klebsiella pneumoniae
atgacgactgaaaccgaatgcgaactgagcaatattgtcgtgtttcccacaaaagaggatgagccgcgtgatatgaccaactttctgtatgagcaatccgagcggcctttttgccgtcatcctgccgtcagcgtcaacgagaaagaacggcaggttcgttgccgcacatgtggtgccgcagtggatcctttcgactggatgctgtcacttgccaaaaaggagacgcaacttgcagacaacgtgaaagccttgcgcaaagaggaaaaagagcgccgtaagaacatcgagaaacttatccagatcgagcgtaacgccaaagccagaatccggagggcgaaaaagtga

SEQ ID NO: 234901 - DNA, 798 bp, Klebsiella pneumoniae
gtgaaacttgaagcgttaccaaaatttttctcaccaaaatcgatgatgcctggtgctgtaccatgtgggatcaccgctgacacactcacgattactgatgtcatggccgcgctggggctcgcagcatcaaaatcggcaataggtattgaactctacctggcgaaatccggcgttctgtcgcctgataatatcatcgccttcatcatcgaactggccacgaagcgggccagccgaaataggcctcttctggctatggaagaaaagcaacggcgagcgtttttgcgtgttctggctgaatacgttttccgtgattactcgctgagcgcggccagcaaggtgacatgcagtagttgcggcggatccgggttcattgacgctgaggtattcaccaacaaggtgacctatccggagggaaagcccccgaagtgggtcaaggtcacaaaggggatatcgccatcggactgggaagaggtgaaagttgttcgtgagcaggtaagggtaatctgcaaagcgtgcaacgggaagggtagcacaaagaacgaatgccgctgccgtggccgtggcgaggttcttgataagaaaaaatctgagctgcaggggcttcctgtttttaagcaatgtcctcgttgcagtggacgtggttacccgagattaaaagatacggaggtattcaaggcgctgggagttacagaaaccacctggcgcagaaacttcaaattattcttcgataggctggtggagttctgccatgttgaagaatccttcgcagaaaagatgctcgaaagagttacgagatga

SEQ ID NO: 234902 - DNA, 387 bp, Klebsiella pneumoniae
atgaaaagaaacttacagtacgagtttcaccattttggcattccattacaggatggaagatgcgaaggaacgttcagtgagaaggctggaatgttcacttccgacaatcccgggaaatttaaagtccagtggcatcgctttactgacgactcaccacttcatcctttactgaaaacggtacctcatgttgcgtttaaagttgataacttatcagcagccatcagagatgaagatataatcctcggcccctatgagcccatagatgattacttcgtagcagttatcaatgacgcaggtgttccaatcgaactgattcaaacaaccctgacggatgaggaactttgggagagagcaaggactggtaaaggaagtctctatcgtaaataa

SEQ ID NO: 234903 - DNA, 1800 bp, Klebsiella pneumoniae
atgacgacacaggccccaccttccaacttgctgccgctcaacccggagcaactggcgcgccttcaggcggccaccactgacttcacgcccactcagctcgcctgggtatctggctatttctggggcgtgctgaatcagcagtccggcacggcggtagccgcccccgccccggccgccgaggtaccgacgatcacgctgatttccgcctcgcaaaccggcaacgcccgccgcgtcgccgaagcgctgcgtgacgatctgctggcggcgaagctgaacgtgaagctggtgaatgcaggcgattataaattcaaacaaattgctgcggaaaaactgctggtggttgtaacgtccacccagggggaaggagagccgccggaagaagcggtcgcattgcataagttcctgttctctaagaaagcgccgaagctggacgggaccgcgttcgccgtctttggtctcggcgatacctcttatgaatttttctgccagtccggcaaagatttcgacaacaagctggccgagctcggcgcggaacgtctgctcgatcgcgtcgacgccgacgttgaatatcaggccgcggccgctgaatggcgcgcgcgcgtggttgaggcgctgaaggcccgtgcgccggtcgctgcgcccgctcagctggccaccagcggcgcggtgaacgatattcacaccagcccatataccaaagaagcgcccctgacggcgaccctgtcggtcaatcagaaaatcaccggccgcaattcagaaaaagatgtgcgccatatcgaaatagacctcggtgattccggtctgcgctatcagccgggcgacgccctgggcgtctggtaccagaacgatcctcagctggtgaaagagctggtggagctgctgtggctgaaaggcgacgagccggtgaccgttgagggtaaaactctgccgctgtcggaagccctgcagtggcattttgagctgacggttaacaccgcgactatcgttgaaaactacgccaccctgacgcgcagcgaatcgctgctgccgctggtgggcgacaaagctcagttgcagcagtatgccgccgcgacgccgatcgtcgatatggtccgtttctctccagcgcagctggacgctgaggcgttaatcggtctgctgcgtccgctgacgccgcgcctgtattctattgcttcctcacaggcggaagtggagagcgaggtgcatgtcaccgtgggcgtggtgcgctatgaaattgaaggccgcgcccgggctggcggcgcctccagcttcctcgccgaccgcgtggaagaggatggcgaagtccgtgtctttatcgaacacaacgacaacttccgtctgccagccaacccggagaccccggtgatcatgattggcccgggcaccggtattgcgccgttccgcgcctttatgcagcagcgcgctgcggacggagcgcaaggcaagaactggttgttcttcggcaacccgcacttcaccgaagatttcctctatcaggtggagtggcagagctatgtgaaggaaggtctgctgacccgtatcgatctggcctggtcccgcgatcaacaacaaaaaatctatgtgcaggacaaactgcgcgagcagggggccgagctgtggcgctggatcaatgacggcgcccacatttatgtctgcggcgacgccaatcgtatggcgaaggacgtggaaaacaccttactggaagtgattgccgaatacggcgcgatggacgccgaagcggcggacgaatttttaagtgagctgcgcgttgagcgccgttatcagcgagatgtctactaa

SEQ ID NO: 234904 - DNA, 1110 bp, Klebsiella pneumoniae
atgaccacattattaattaccggcgttacggggtttctgggcggtgccgcgttagagaaaatactccatcaggaaacccggttagatctgctgctgctggtacgtgctgatagccccgaggctggcctcgaacgggttaaagagaacatgcgtaagttcaacatcgccgaggagaagctggcgatgttgcgccagcagcatatcctgctgggcgatctcgcctctccggagcattttcttaacgatccgcgccttgagcaggtcacccatgtcctcaactgcgccgctgtcgcctcatttggcagcaacccgcttatctggaaggttaacgttgagggcacgctgcgcctggcgcaacgtatggcgcaggtgacgggtctgcagcgctttctgcacgtcggtacggcgatgtcatgttcgcctgaaccggattcactggtcgccgaaagcgcggagtttcgggaacgcgctgagcacctggtggaatatacccactcgaagtcgaccatcgagcagctgatgcagcagcagtgccctacgctaccgctggtaattgcccgcccctctatcgtggtgggtcatacccatcacggctgccggccttccagcagtattttctgggtgttcagcatggggctgatgctgcagaaattcatgtgctccatggaggaccgaattgacgttatcccggtggactactgcgccgacgccctgctaatgctgcttaaccagcctctggctcacggcgaggtggtgcatatctctgctggcgaagagaacagcgtgaagtttgccgaaatcgaccgggcgatggctcaggccctggagcaggcgccggtgggggataagtacgcccaggtgagctatgaaacgctggtcaaaatgagacgcgaactgaaagggatatttgggccatgcaatgagcggctgatgctgaaagccatgcgcttatacggcgcattcgccacactgaacgtgcgctttagtaacgacaagctgctgagcatggggatgccaaaaccgccgcgctttaccgattacatcgaccgctgcgtggaaaccacccgcgggttgtcgatccctcagcaaatggccgtcgactttaaataa

SEQ ID NO: 234905 - DNA, 867 bp, Klebsiella pneumoniae
atgggcgatcagatcgaaattattacccagaagcagccgaacccgagccgtgactggctgaaccctaacctcggctatgtgaccaccagccgcggacgttcgaagatccacgcctggttccgtaagcaggatcgcgacaagaacattctcgccggtcggcagatcctcgacgacgagctggagcatttgggcatcagcctgaaggatgcggaaaagcacctgctgccgcgctataacttcaacgagctcgatgaactgctggccgccatcggcggtggcgatatccgtctcaaccagatggtcaacttcctgcaggcgcagttcaataaacctagcgccgccgagcaggatgcggccgcgctgaagcaactgcagcagaaaacctacacgccgcaaaatcgcaccaaggacaatggccgggtagtggtggaaggggtaggcaacctgatgcaccatattgcccgctgctgccagccaatcccgggcgacgagatcgtcggctttatcacccaggggcgcgggatctccgtgcatcgcgcggactgcgatcagctggcagaactgcagtcgcatgccccggagcgcatcgtcgatgcggtatggggcgaaagctactcggcgggctactcgctggtggtcagggtggaggcgaacgatcgcagcggtttactgcgcgatatcactaccatcctcgccaatgagaaggtgaacgtgctgggcgtcgccagccgcagcgatacccgtcagcagctggcaaccatcgatatgaccatcgagatttacaacctgcaggtgctgggccgggtgctcggtaagctcaaccaggtgccggatgtgatcgacgcgcgccgtctgcacggcggttaa

SEQ ID NO: 234906 - DNA, 762 bp, Klebsiella pneumoniae
ttgaacactcgcaaaatcataataatttccgtaacaattttaatcgctgctctttttctaccggtgattatcttctcttgggtattcagcgaattgcctgtatcacatcaggttcaagactggtcaaatttcggctcttatattggtggggtatacagtgcattatttggcttttttagtactgcaattgtatgcttaactcttttatttacgatcaaatacaataaagaacaaatagagcaaataaagaaacagcatttttcaagccttataaacatttacgcagagaatttaaacagtaagcttgataaaaaaacatacagctatttccacccagagtccggatgtcatgttaataataatgaatcaacatttctagtatatattttaaaaaagtataacaacaactatgacattgaaatattgaatcataaaagtaataacccagaagataaaagacaatatcatcctaatgttttaaggataggtataaataccatttcagaacttgaaataaaatatagcagcgaaatagggaatttaatacaaatacttaatttaatagactcaagcgaaaacctatcaacgcgaaaagaattactaagccaatttcaagctgtaactcacagagatcgcatgttttggatgatgttatacgcatacgctaacataccttcagcacgagaaagtattgcatttaacgaaggcttactcattgcagcggagggagtcaaaagatccaccgggtgtataaatgactaa

SEQ ID NO: 234907 - DNA, 906 bp, Klebsiella pneumoniae
atgacagccgaaaaaaaatcacaacccgatgctagccctaaaaaagaggtaaaactcaagacttgctttattattatgcccattgctgaccaccccgattatgaaccaggtcatttcaaaagagtgtatgaatatttaatcaaaccggcctgcattgcagcaggctacgaaccgtatcgtgcagacgatagtaaagcctcacacatgatcatgtttgacattctgaagaagataatggattgtgatatggccatatgtgatttaagctcaaaaaatgccaatgtattttatgaattaggtctcaggcaagcattcaacaagaaaacgatactgataaccgatggtcgcgaaaaaccgcctttcgacatcgcgggttttcgttatgttcaatatacttctacactgagagttgatagtgtaaatagtgaaataatttcaatttccaaaatgcttcatgaaacagaaaatgcacctgaggatgatgtaaactctattgttaaacttctacaaatccaacctgcaaaagtagatagcatcgatcttaacaaagaagaaagtttgatatatggcatgctacttaacttacaaaaggagatatcaggcttaaaatccgataaccatagagataaatcttattggtctaatttacttttctcgcctccaggaaaggataatacacgttcatcactgtataaactttcaaagaaagagttttctggtttatcttttagtcaaattcaaaagatcttccccaatttacttcatgatctagatttcatttataatgatgaggatataggaaaattaacaagaattaatgacaatggagcgttttttaattttaatggtgactcaatccaatttcctatagatgaggaaatacttgataatataattgtaaaataa

SEQ ID NO: 234908 - DNA, 816 bp, Klebsiella pneumoniae
atgttttttatttccggaatgtttgtggatgcaggattaaaaaaaggaatttcaatttatgtaaaaaacaaaacaaaaagcatattatatccatttgttgtatgggcaataatatacgcctctttgaagatattttttatggcaaaaagcaatcatcagcaaagtgtatggaatgttattcttatgcatgttactggtggcggtgatatcacctggtttttacattctttatttattttttttataattataatatatgcaaggaaaattccgatcataccagtactattaacatgtactgttttaagttgccttattccagtcattcatagcgacagcgttttttccagctttgataatggccattttaataagtcaatttatttattcatgtttttctacattggtgattacgttataaggaaaaatattaggcttgataatcttgaagtaggaagtgtttttatagtgtcaattatttcattcctactaatcacattaattaattttaactttaatgtaaaatatcaatacctatcgcctttagcgttagcatcaatcccaatatttgtttttatttcacaaaaaataaattttaaatttattgcattcattggtgcaaactctatagttttctacctcactcactacttggtaattcagattgctgcaaagcttatcaagataaataacacatcaccattgattcaagacgtgaagttttttgttgtattaattatggcagtagcgattccttactttatctgcaaactaagaactgtaggtttttttaattacttattctctgcaaagtaa

SEQ ID NO: 234909 - DNA, 1743 bp, Klebsiella pneumoniae
atggaacactctaatagcaatcttattgtaaaaacaatccatcttctttcaaataaaagagatggcttaattttgcttgatggaaattggggcacaggcaagacttacttcattaaaaatagatttcctaattactaccatacaaatgtcttctattacatttccttattaggcataaaatccttatcagacttcaaagctaaaatcattgattgttactacctccaagatatacaaacacttaaatctggcctcgaaagtctcgcaggaattggtagtattagcagtggctcacctgcaagcgctaatgttattaacaacatgtttaattcgattggtgcaagtgtaagggagaatatcctctctaagcttgaaggtattttcatactagatgacattgagcgaattaccgtggcatcattagcaaatgaaatcttaacgtattgccatactctttatacaacaactactaattcaaatttagattttattatcgttgcgaattcatcatctgagtctgggttaaaaatagatcatagagaaaaattaatctcagatactcttcattataatccaaccccccaagaaattttggaaatggatataatgaaagaaaagctttttccttttcctcagaaagataaaaagctattcgaggatatagtgctaaacaatgagatagttaatattcgaattttgatacgtatgctaaatactatcacaccaatatatgaatatatagaatcacaccctcatctgtcttggagcataccgtctacaacagtattaaattcaatgtgttcatttttcatgcttttatttttacataattgctccattgaagaacttctaaccgacaataattcattcttttcatttaacactgatgaatacagcgattcagagagaatactatggtcatcgttgcataattacaaaataacccttgaacttaaaaaatattttagtggccatttatcgttacaagatgttctaagcattctatttcatgaagaaaaaccactagctttgagagatattgcaacatcaccacgccctgaattatatgaagtaaatgaaacagaattttccaaaatcatcatctctttaatttgtcgcgatcttgattgtgacttttataattggtttagggctgttcaaaattacgaatacttaaccagatgtaaatatttaagcaaatccccaattataacattaaagtttatcacttcagttttgaataattttactaatgacgagattgttgaatcttttcaaacacacgacctcggcgacagaagtgttttaaatagtgggtttgaagatagtaaattgctattctcgatatcgcttattcgctatcaaaaaacaatcaatatgagtaagctcctcaaaattaaaaaagaaatagaagttaatggttgggcctcgttcgatgttgatacattaacaaccctagatccattcggaaattacaaaccacttggcgtacttggtgccccatttataacaagatgtattttgaatcattggaaagttaatgacatagaacacttccgctctttcttaagaagcaattatcaaatcagcaatataaaacaatttgctcataatgaaaaaggcaaacttatttatctggacaatatgcttgaaatattttgctgcacacataaagagggatttaagtacggggctgtttatgatcttaaaaaagtggttaaaaatgctattaccatgttatga

SEQ ID NO: 234910 - DNA, 624 bp, Klebsiella pneumoniae
atgccacgatgcatctggcgcagcaggtgtttgacgacatcgacgccgcgcagggttgagtcgtcgtccgggtcggattgcccggcagtcgttgtaggccgggtaaggcgcagccgccacccggcgaaatggcgggtacgcgccgatagattgcccggcggcgcagcgcttgccgggcctgggaagcgaagatcgcctgtagaccccgtaggccgggtaaggcgtagccgccacccggcgaaatggcggcacaaccggaaatgtccctgttcgcactatgtttggcagggccacaacgtttggcagggctacaacttctatgttaattccgggcagattgcgctcccggttgatcttctgcgttatgtctcgtatggcgcagggagcgcacaggggcggccagtcgccgccgccccctgtacccccgggctccggccagcaaaatcgccactgcgtggtaccttcgacttatccctgcaggctgcgggtcgggccgaggcagcgtccctgcaaaacacggccctcagcccgcatccatgcgggctgccccggccttccgggaacgtctcagcgattttgagaccgccagcaccggcagtttcagtcgcgcaagtgggtaaatga

SEQ ID NO: 234911 - DNA, 324 bp, Klebsiella pneumoniae
gtggagaccctctccggcggcaaccagcagaaagtggtgattggcaaatggctggcgacccagcccgaggtgatcattctcgatgagccgaccaaaggcatcgatatcggctcaaaggccgccgtgcatcagtttatgtccgagctggtcagccaggggctggcggtgattatggtgtcgtcagagctgccggaagtgatgggcatggccgaccggattatcgtaatgcacgaagggctgatggtcgccgaataccaggccggggaagcgacagcggaaaccatcgttagcgccgccagcggcatcggccaggaggcggcatga

SEQ ID NO: 234912 - DNA, 243 bp, Klebsiella pneumoniae
gtggtgaacgatggcgataatatcctccgcgcgggtgacgcaaggcacaaaaaaaccgcatgcgccgtgtttggcgtagagttgaccgcggtagagcgtctgaaccagcgcatcttgtacgttgagaagaaaggtatcggtgcggacattaacaaacagaccgggacaggcgcgggttatttcctgcagtttgacggcaaagcgctccgcatcgtcggtgatgctaccaacttgctgatttag

SEQ ID NO: 234913 - DNA, 2664 bp, Klebsiella pneumoniae
atgagcaactcattacctgacacagcctcccctctcctgcccgtcccgccggaacacccggtgagttggccgcagggcgatctgaactgtgccgcaatcaaggcgcacatcgataccttccagcactggctgggcgaggcgtttgactccggcatcgtcgcggagcagctcatcgcggcgcgcaccgaatttatcgaccagttgctgcagcgattatggatcgcctgcggttttgaatccgtcagcgacctggcgctggtcgccgtcggcggctatggccgtggcgaactgcacccgctctcagacgtcgatctgctgatcctcagtcgtaaaaaactgccggacgaccaggcgcaaaaagtcggcgaactgctcaccctgctgtgggacgtcaagctggaggtgggccacagcgtacgcaccctcgaagagtgcctgctggaaggtctctcggatctgaccgttgccaccaacttaatcgaatcgcgcctgctgatcggcgacgtcgcgctgttccttgaactgcaaaaacatatttttagcgacggcttctggccatcggaaaagttcttcgccgccaaggtcgaagagcagaacgtccgtcatcagcgctatcatggcaccagctataacctcgagccggacgtgaaaagcagccccggcggcttgcgcgatatccatacgctacagtgggtggctcgccgccatttcggcgccacctcaatggatgagatggtcggcttcggctttctgaccgaagccgagcgcaatgaactcaatgagtgtctgcatcagctgtggcgcatccgtttcgcgctgcatctcgaactcacgcgctatgacaaccgtctgcttttcgaccgccagctcagcgtggcccgccggctaggctatgaaggcgacggcaaccagccgattgagcatatgatgaaggacttcttccgcgttacccgccgggtgagcgagctgaatcagatgctgcttcagctgtttgaggaggctatcctcgccctgaccgaggatgaaaaaccacgcccgatcgatgatgatttccagctgcgcggcacccttatcgatctgcgtgacgacacgctgtttattcgcgaaccgcaggccattctgcgcatgttttatatcatggtgcgcaatagcaccatcaccggcatctactcaacgacgttgcgccatctgcgccacgcccgccgtcatctcacccagccgctgtgctatatcccggaggcgcgcacgctctttcttagtatgctgcgccatcagggggcggtaagtcgcgggctgctgccgatgcatcgccacagcgtactgtgggcctatatgccgcagtggtcgcatatcgtcggccagatgcagttcgacctgtttcacgcctacaccgtcgatgaacacaccgtccgggtgatgctcaagctggaaagctttgccaaagaagaaacccgcagccgccacccgctgtgcgtggagctgtggccgcgcttaacgcacccggagctgatcttaattgccgccctgttccacgacatcgccaaagggcgcggcggcgaccactcgatcctcggcgcgcaggatgtgctgaagtttgccgagctgcacgggctgaactcgcgcgaaacgcagctggtcgcctggctggtgcgtcaccacctgctgatgtcggtcaccgcccagcggcgcgatattcaggatccggaggtgattaagcagttcgccgaggaggtgcaaacggaaaatcgtctgcgctatctggtgtgtctgaccgtcgccgatatctgcgccaccaacgaaaccttgtggaacagctggaagcagagcctgctgcgtgaactctatttcgccaccgagaagcagctgcgtcgcggcatgcaaagcaccccggatatgcgcgaacgagtgcgtcaccatcagctgcaggcgctggccctgctgcggatggacaatattaatgaagaggcgctgcatcagatctggaaccgctgccgcgccaactatttcgtgcgacatacgccgacgcagctcgcctggcacgcccgcaacctgctgagccacgatctgaataaaccgatgatcctgctgagctcgcaggctacccgcggtggtacggagatttttatctggagcccggatcgcccttacctgttcgccgcggtgtgtggcgaacttgaccgtcgcaacctcagcgtccacgacgcgcagatcttcaccacccgcgacggtatggcgatggatacctttatcgtccttgagcccgacggcagccccctttccgccgaccgccacgaggcgatccgccaggggctggagcagaccatcactcagcgcagctggcagcctccggccccgcgtcgtcaggcggcaaagctacgccatttttccgtggacaccgaggtgaatttcctgccgacccataccgaccgaaaatcgtttctggagctgatagcgctcgaccagcccgggctgctcgcccgcgtcgggcaggtgttcgccgacctcgggatatcgcttcacggggcgcgaattacgacaattggtgagcgagtagaagatttatttataatcgccaccgccgaccggcgtgcccttaataatgagctgcaacaagaagtgcaacaacggttgacagcggccctcaatccaaacgataaagggtga

SEQ ID NO: 234914 - DNA, 780 bp, Klebsiella pneumoniae
ttgcgtaaagaactggatctcgcgccttacaatcggtttccattaacctggattatggaggctgcggatgacatctcatattgcgtcgcggatctcgaggacgcggtggaaaaacgtatttttagcgcagaacagctctatcagcatctttacgacgcctggggcagtcatgaaaaaggctcgttattttcgcaggtagtagaaaatgcctgggagaaatcgcgagccaattatctgaagcagagcgcggaagatcagttttttatgtatttgcgggtgaatacgctgaataagctggtgccctacgcggcgcgccgatttattgacaacctgccggcaatcttcacaggggactttaatcatgcgttgctggaggacgacagcgattgcagtcagctactggagctctataaaaatgtggcgatgaaacaggtctttagccatccggatgttgagcagctggaattgcagggctaccgggtgatcagcggcctgttggatatctatcagccgctgctgaaattatcgctggaggatttcagcgaattagtagcgcaggagcgggtacgacgtttacccattgcctcccggctgtatcagaaactttcgacccgtcaccggctggcctatgttgaagcggtaaataaactggcgcgtacggcgcccgaatttgcgctgatggaatactattatcgctgccgtctgattcaggactatatcagcgggatgacggatttgtatgcgtgggatgaatatcggcgactaatggcggtggaatag

SEQ ID NO: 234915 - DNA, 1386 bp, Klebsiella pneumoniae
atgactgagaaaaaagcggagcttcagcgtggactggaggcccggcatattgaactgatcgcccttggcgggacgattggcgtggggttgtttatgggggcggccagtaccttgaaatgggctgggccttccgtgctgctggcgtacattatcgctggcctgttcgtctttttcattatgcgctcaatgggcgaaatgctgttccttgagcctgtcactggctccttcgcggtgtatgcgcatcgctatatgagccccttcttcggctatctgaccgcgtggtcctactggtttatgtggatggcggtggggatctcggagattaccgccatcggggtctatgtgcagttctggttcccggagatggcgcagtggatcccggcgttgattgccgtggggctggtggcgctggcgaacctcgcggcggtccggctgtacggtgaaatcgagttctggttcgccatgataaaagtgaccaccattatcgtgatgatcgtcgtgggtctgggcgtcattttcttcggctttggcaacggcggccactccatcggttttggtaatctcaccgaacatggtggtttctttgccggcggctggaagggcttcctgacggcgctgtgtatcgtggtcgcgtcctatcagggggtggagctcatcggcattaccgcaggtgaagcgaaaaacccgcaggtgacgctgcgcagcgcggtgggcaaagtgctgtggcggatcctgattttctacgtcggcgcgatttttgttatcgtcactatcttcccgtgggatcaaatcggctccaacggcagcccgttcgtactgacgtttgccaaaatcggtattaccgcggcggcgggaattatcaacttcgtggtgctgacggcagcgctttccggctgcaacagcggaatgtacagctgcggacgtatgctgtacgccctggcgaagaaccgtcagctgccggcggcgatcggtaaggtatcgcgcaacggcgttccgtccgtcggtgtggcgctgtcgattctgatcctgctggtgggctcctgcctgaattacattattcctaatccgcagcgggtgttcgtctatgtctatagcgccagcgtcctgccggggatggtgccctggtttgtgatcctgattagtcagctgcgtttccgtcgcgtgcatcaggcggcgattgccagccatccgttccgttcgctgctgtttccgtgggccaactatttcacgatggccttcctgatctgcgtgctggtcgggatgggactgaatgatgaaacccgcatgtcgctcttcgtcggcattatttttctggccgccgtcaccctgatttataaggtgtttggcctcggaagacaggggcaagtcaataatacggctgaataa

SEQ ID NO: 234916 - DNA, 690 bp, Klebsiella pneumoniae
atggctcccgggatcgttcagatattacctttattatttctgcttacccaacttgattttagtgaggggacaagtgattgggttgaaatactaatgctccttgccttaacagtggctattgttactattggcattttgcctggtgccatacatcttaatgagcgaagaaatgccaataaaatcaatagcttcatagttgttttaatatgcataccagttgtaattactttattcagtgtgtggtgtcgccccatcccaaatatgatcattaatatggcaatgagtctctcgggtattagcgattggagaacgcatcagtattatgttgaaagcaaaactctttctcatagtatgtttaatggattaatctggaatactcgatactataaagaaattcccgggaggtttttcatcaccggagtcagtacatttaccttaggggatataaagttgatatgcccaactgaaataactgaaacaaggaaagagagtttgaagtttaccgttaatgatatcaatgagtatgagcaaaaagggaaacagttaaaggcagtagccatgcaatgcatcccttttaataagaacgatattcatgcctgggattcgccattatctgaaccgatctattacgagaaagttaaacagaccatagataactctatgctaaaaattcttcataccctgaaatga

SEQ ID NO: 234917 - DNA, 870 bp, Klebsiella pneumoniae
atgccctccagcacgaccctgcaacacgcgatcgagaacatcactatctggcgcaaaggcgaacagcgtgcgccgcataagccactgttgctgctgtacgtcctctcacagtaccagcgcggccatgcgcggatgttcgactacgcctcggagatacgcgatgagctgcatagcctgctggaacgctttggcccgcagcgccgccagtaccggccggatatgcccttctggcgcctgaaaggcgacggcttctgggagctgcacaacagcgaccagtgttcaacccagggcagccgacagccgcccggcaaagagctggagctctgtcacgtcgccggcggcttcgatgagccgcattttgcgttactcaacaaaaataagaggctgatcaataccctcgcccatcagatcctcgaggcgcatttcccggagagtattcaggaagaactggctgaagagatgggatttgatctgcagcagatccgtaaagagcgcgacccgcattttcgccagcaggtgctgcgcgcctataactatgagtgcgcgatctgcggcttcaatatgcgccatgataatacctccgtcgccctggaagcggcccatatcaaatggaagcagcacggcggcccatgtgaaatccctaacggcctggcgctctgcgcgattcaccataaggcctttgataaaggatccattggtctggatgaggatatgcgcatccaggtttcgccggcggtgaacggcgggggcatcgttggcaggctattctgggattttgatggtaagccgattaccttaccgcagggaaaagaacgctatccgcaggaagggtttgtggcatggcaccggagggaggtgttcagggggtaa

SEQ ID NO: 234918 - DNA, 417 bp, Klebsiella pneumoniae
atgaatccttcgttaaccgattcccgccgtcaggcgctgcgttcagcttcccactggtatgccgtgctaagcggcgagcgcgtcagcccacaacaggaagcgcgctggcaacagtggtatgaacaggatcaggataaccagtgggcctggcagcaggttgaaaacctgcgcaaccagcttggcggtgtgcctggcgacgttgccagccgggcgctgcacgatacccgcctcacccgccgtcacgtgatgaaaggattactgctgttgctcggcgctggcggaggctggcaactctggcagtcggaaaccggcgaaggtctgcgggcagattaccgcaccgccaaaggcgcagtcagccgtcagcaactggaagatggctccctgctcacgctgaaggtaatgactccaatttactga

SEQ ID NO: 234919 - DNA, 465 bp, Klebsiella pneumoniae
atgaaccgactaatcgcagttatcagcgtcgtactgatcttcctgatagtcagcctcggctggctggccagtcactaccacgacagcgcgaccgagttcaaaaggcagcgcgataaagtgatcgggcaactcagcctggcgaaagacactatcgctgacatgcaggtaaggcagcgcgacgtcgcagcgctcgatgccaaatacacgaaggaattagccgatgcgaaatctcagcttgataatctgcagcgttgcgttagctctggcaagtgcgggttgcgcatcaacgcaaaatgtcccgcgaacggagcgaccagcgccggcggcatgggcgatgcttccggcccccgacttactgactccgctgaacgggattatttcaccctcagagagcgaatcttcacagtgacgaaacaggttggctatctgcaggattacatccgcacgcagtgtttgtctaattga

SEQ ID NO: 234920 - DNA, 273 bp, Klebsiella pneumoniae
atggcgcaatgtgactactcagatatcgctttccagataagtacaattcatggttttaaaaaactatttattgccagcggggctggagtggacattccgatcgatcatggaagataccttgtagctgtgaatgaacgtggagacagactggcagataaatcaccaaatggaacatggattattgaaggtaaattttatgctggctttgatccaaacatcccaaaatatcaacatgcgatagaggttgtccacccgccgcttgaaaataagtaa

SEQ ID NO: 234921 - DNA, 273 bp, Klebsiella pneumoniae
atgacgagcaataaagaacaaaccgtccattggatgcttgaacatctcaaaagagacggatgtttatatcaagatgatgtcgtagatcacttagttaaaactaaaaatgaagaccttttggttgaaaatgccgacggtaatttatccttaagtcgtcagattcttgccttgtttaagaaacatacagcagacgatgttgtttgggttaatcctcagcgttattggcgttatcgtgtcgatgaggacgaacctggtcgtgaggctcgtggttaa

SEQ ID NO: 234922 - DNA, 195 bp, Klebsiella pneumoniae
atgagtaaatataaggttggcgataaagttaagcttagatctggtggtccagtcatgaccgttcaacaaattagtgttccccaaccaactatgtatcggggcactaatcgatgccagtggtttgcagggaagaaacttgaagaaggttatttcccggacgactcactggaggaagttggggatgacgagcaataa

SEQ ID NO: 234923 - DNA, 678 bp, Klebsiella pneumoniae
atgccattttttgctgattttatggacagtcctgaaaaattgtactcttttatcggagcagctgcagctgtgtcgattcctttagttgtgaatacctgcaaagatttttattttgactttcaaaaaagaaaaacagagaaaaattatatagttatacagcttttgtttttgcttgatgattttgtttcccgatgtggggaagttgcctgggatcaaggttatgacccaaactatcccgagccaaacgagcatgagtatgaagcccaaacacaggagccggtgtttgatatgtcgtctgtaaagggagatcacaagtatctcgatcccattatgctttatgagctacacagtattaatgttgaaattgtaaaagccaaagaaaggctgagagaaataactaactcaccaggattcgattacggtgaaatcagctcatattttacccataggcgcagagagtttgcggagatcggtttaaaagtttccaaaattgcggatgcgctaagaacaagtttcaaagtacccggtcatgatgactggaaccctagagatacgattattagaagcattaatataatgaatcgcaaacgggctatcttacaaatcactcgaatggaacgaaaatcgaaaagagttatgtcagaacaccgacgtcaattagaagctaaagacatgtag

SEQ ID NO: 234924 - DNA, 174 bp, Klebsiella pneumoniae
atgaatgaagtaaaaaaaatccaaacaagcaatatttacaaaacaacgttttacaatgcattgtgtggggtcatagggaacgtcatgtatgatattggtaaagagatgccttcattaaataacccgccattcggcgggtttttgttttctggaccaagcttattttccaagtag

SEQ ID NO: 234925 - DNA, 462 bp, Klebsiella pneumoniae
atggataagtttgaccgagaacttcagaagcacatactatcttgttgtattgatgcatacccagctcacaccacatggaatagctttgacccagaaataatacagattgacgatgtcaaactctctgcaaacatcatttatctggctgaacatggcttgctcacaatcagagaacagagaagtgacgacccgtactcttttcttgatcatatgcgcgcgacctgcaaaggcgttgattttatgcaaaacgatggtggcctctctgcaatcctcagcgttcagaccatcaagtttcatcgtgaagcagtagtcgtcctcgaagacctgatcgcgatttcgaacatggacgttgagcagaaggaaaaagccaagtcgactctcggcgaactatcgacggaagcacttaaaactgtggtgcaagctgcgacgactgcaggattatctgcactacttggaaaataa

SEQ ID NO: 234926 - DNA, 468 bp, Klebsiella pneumoniae
gtgaaaagggctttggtggtcgggcttggtttaatggcattgttgggctgtgatgacaagtttcaaatatcaaaactactcccccctaaagacccaccttcaattgctgagatgatagctacggggaaagaggaaataacgtcggaatgtaaaaaaggcgatgtttcttttaactgtgaattcctcactggcgatttaaccgggacgggaaagtggcatcataccaagctgtacctgcataacaacgggatggtagatatgattattgacggcaaggcttactatcaaagcgatatcagcagtaacacctttgcgggtcaggagacaactaccttcacaatgaaaggcgttggtggcgacaatggtgaagtaaatatcgttagatccaatgaagggaaatccttaaattttgaagcctataacaaagatgacaaacggtttgttatgggaggcgttaaattgcagtaa

SEQ ID NO: 234927 - DNA, 291 bp, Klebsiella pneumoniae
atgtcttttgtaataaataaaacgctggaggccagcgttattgcagacagtggcacggcgattggctcggttcaggtcactgtggatgtgacctatacaatcacgttgattcaggtaattgacgacagcacagcctacgcctcggtatcggcatcagtgagcggacaaccgccaaaacaggttgatcagtttgagtttaactacacactggaaggcgggaagagcttgtttgagcaggctgaaagtaacctgctcaatagcgaaaaatatgctggcggcatagttatctga

SEQ ID NO: 234928 - DNA, 678 bp, Klebsiella pneumoniae
atgcgatatgaattttctggcctgcaagccgctaccttaaaaatcctgctggccgatatgggctttgaatatcaacgccactggtttatttcacaaaaacgggtacgccacattaccaaaacccggcagtgtggagctgactggtatttctcactggaagcactgattgacgccatcgagaccgggcgcagtcagtattttattgccccaggtgaaggtaactcactgtcaaataaccgccgatggatggttcaattttcccgactggctggcgtcgatatcgcccctgatgactcagccatccggctgacaaacggtgctgaaatacagtttattggcgaacaacacacccttgccgcgtgtaacggtaacgcttacgtcagtgaatacgcctgggctgataaaccggccaatatgttcaaagtggcgaagggtatttcagcccataaaaactgccgatttacggcttatacctcaccctcgccaagtgatgaggcttacgcgctttggtcttctgaaaaaccagataaccagcagcgactgtctgcatattcagcgcttcaacaaggcagcactattttgaatctgccagacattgaggccgaattttcaaaagaggattttaacatgcttttttcggctatctggccgcaggaaaatagcgaggtagctaagtga

SEQ ID NO: 234929 - DNA, 246 bp, Klebsiella pneumoniae; identical to SEQ ID NO: 109914

SEQ ID NO: 234930 - DNA, 795 bp, Klebsiella pneumoniae
atgaaggtttttacaggtagtaaatatggcttcgataatttcttgttatttgttgcatttttaactttgttttttaagatgacgtctgtttttaggcgtgtagaaaatatatatttatttgttttcttgtattcatcatattacttatgtgttcatgactatattcaggtcagggtatcacttgcattagctttggtatgcattgggatgtattggattccaaacaaaaaaatgtcattattttttataataacaggttgtttggtgcatttatcaacaattataccagtgttcgtatattatgtcgttggtagaagcgacaataatcttagatacaaaagattttattatatggtacctttggtactattaattcctcttgcgtttagcatgggatttttatcatattatcggattgacagatacttagattactataaccaagccagtgacaagaaaggtggtttattgcggaacatgcctttattagttccagccttacaagtaatagggcttatatatatatatgcacgtaagaagttgagacagaatatatttacatttgaatatgctatatcgtatataggaatattgattttttactcatgcatatcaatgcctgttatagcaataagaatatttgacataagcacatttttcttcattgtcctgatttcaagaatgaaatgcaatatgtatgtaatatttttttcgttggcatttgccctgataaatataaggaacactttaatcctattaggctataatatccctttcttccattttggttcttaa

SEQ ID NO: 234931 - DNA, 777 bp, Klebsiella pneumoniae
atgcaattcgttaccaccccgacgacagaaaccccgtttttgtatgaccaggggagatggcccaaatacagtaagtgcgagtttaccatcgggggcctcaccgggttttatcccggcgttcgctggatttaccgtgaacccacaaaatcatcgaatgcaatatttaaagccattacgataaccgggccaatggcagctgacgggggtgatccgaagaaatatccgatgtatctggcgagctatgatgcgtttgacggctcagtaatctgccaggatacgtactacattcccgacagcgaagggaagtatcaggaatttcatccgacaaaccagggattgtttgcccttggttatcagacaaaattcgggatactgcatctcaataccaatgatatctctaaagtggccggtgcgatcttctatgcccgtgaaggtgagtataacctgggcgaactgtcgatatccggggcgccctataagctccttcagggcgtctcgctggggaatatcatttctcttggtgcactcgcgaagacggcaacgaccggggacgtcgtgatatacggcaaagaaaccatcatgatgacggctgcaaccacactgactgcattaaccggatttaccggccagaccgtccgggtggtgagttttgtcgacgggagcgttattcagaacaacgcgcggataagcacaggcaccggcgcggacgtaccaatggttaaaaataaggtttatacactcacgatgttgtcgaataccacagccacgaaagactaa

SEQ ID NO: 234932 - DNA, 363 bp, Klebsiella pneumoniae
atgaataaagttaaggctatcgttttcggcgctatgatgtccgctgctataactgctaatgctgcaaacgaaactaccactgtaacaggtgaagtcggtaaagatgtcaaactatcccttgagtccaatccgactacgggttacggctggatgattaaagaccttcctgatggattgattttcgtttctggaggatatgagcagtcaaaagactgtccgaaaggtgctgtagggtgcggtggtgaagaagtgcttcacttcattggtgaaaagaaaggggaaagcacactaaaactcatttacggtcagtcatttaacaaatcaagctggcaggaaaaagaagttaaagttgtgattaagtaa

SEQ ID NO: 234933 - DNA, 624 bp, Klebsiella pneumoniae
atgactacacgtgtttatgcttacctcagagcttcgacgaaagagcaagacgcctcacgagctaaacagcagcttgatgaattcgctcaatccaacggtatgacaattgccacgtacttcaccgagaatgaatcaggtgcatctcttcaacgtcctgaactgttcagactgcttgagattgcacagaaaggcgatgtgatgcttgtggaacaagtagaccgtctgtctcgccttagtggtgaagattggaacaagttgcgttcactcatcaacgagaaaggtgtgaaggttgtagcgctggacttgcccaccagccaccagttgattcaatcgggtgatgagttcactaaccgtatgctggaggctttgaatggtatgatgcttgacatgctggcagctattgcacgtaaggattacacagaccgtaagagaagacaggctcaggggattgttaaagccaaagctgtaggcaagttcaaggggcgtccagaagacactcagcggaatgagaagatagccaagctgttgcaggctggtatgtcgtacagtgacatcatggacacggtgaactgttcacgtgcgactgttgcaaaggtgagtaagagtctcaaagaattagcttaa

SEQ ID NO: 234934 - DNA, 735 bp, Klebsiella pneumoniae
atggttgatggcatcacagagaaacaaaaagaggtggttgattatatcctgctcaaaattaaagaggatgatctgttacccggcgataaactggatacagagatcgccatagctaagaatctcggtataacccgagctactgttagggaagcgacacgtcttttaattgagcaacagcgtatttaccgggtcaaaggctctgggctgtttgtgggttcaattggaaaaagcaaccattccggaaagtttcatgcactttcaccttttgattttcaggctcagaaaagtggacacaaaggaataagaaaaattataaagtttggaataataaaagtgcctacaccggaaatggcgcaggcactgcgcatcaaaaatagcgatcaagtctataaaatcttgcgtctgatgtgttttgatgatattccagtagccctagagcatgtacatcttccagttaatatgtttgaaaacatggaggtcagtgagcttgaattttcaaagtattcttacatcgaaaatatcactgggaaaaaagtacaacgtcgtgagcagaacttaacggcaatcaatatcactgacgattttgtgattaactgcctgaaattggaaaaaaataatgctgttatggagatttacgaaactgtctatcttgatgatggcaccccatgtgaggtcaatatcgccattattaacaccaactactttccgctgaaacaaaattcttctagaccttaa

SEQ ID NO: 234935 - DNA, 1908 bp, Klebsiella pneumoniae
atgggtatggccgatattgctgaagttatttggcgtcaccatttgcgccataacccaaaagacccgcagtggttcaaccgtgatcgctatgtccagtcgaacgggcatggatccatgctgatttattcgctgttacatctcacaggttacgatctctctcttgatgatattcgcaatttccgtcagcttcattcccgtacaccgggtcatccagaatacggctacacgccaggtgttgaaactactacgggcccactgggtcagggtgtagccaatgcagtaggcatggctattgcggaaaaagcactggcagctgaatttaataaacctggctacgatattgtcgaccaccatacatggttgttcatgggcgacggatgcctgatggaaggcatttcacacgaagcgtgcggcctcgccgggactctcaaactggggaaccttattgccgtttgggatgacaatggcatctccatcgacggtcacgttgaaggctggttcgcagaagacaccgcggcccgcttccgcgcctatggttggcacgtcattgaagggattgatggtcacgatcctgatgcagtagatgccgccgtgcgcgaagcgaaggctgtcaccgataaacccagtcttctgtgttgcaaaacggttatcggctttggttcaccaaataaagccaacagccatgactgccatggttctgctctgggcgctgctgaagttgcccttgtccgggaacagcttgcctggccatatgcgcccttcgagatcccggaagaaatttatgctgcatgggacgcgaccgaaaaaggttcggaacttcagggtgaatggaatgacctgtttattgcttatgaaaagcaatggccagaattggctgcagaattcacgcgccgtatgaaaggggagctacctgtagactggaaggacagtatgcggaaatatgtccgtgagcttcaggctcatccggccgctctcgccacccgtcaggtcagccagaactgcctgaattttctgggagacaaactgcctgaactgatggggggatcggctgatctctccccgtccaacctgacgcgacatcagcactctgtcgatttcacagcgctgaatgcggcaggcaactacatttcttatggtgtacgtgaatttggaatgtccgccatcatgaatggactggccctgcacggaggattcattccgtatggcggtactttcctgatgtttatggaatacgcgagaaatgctctgcgcatggctgcgctgatgaaaattcgctcagtcttcgtatacacgcacgataccatcgggcttggtgaggatggtccgacacatcagcctgttgaacagttagcgtctctgcgcctgacgcccaatatggaaacatggcgcggttgcgatcaggtggaggtcgccgtcgcctggcagcaggctattgaacggcagaatggtccttccgcccttatcctgacccgccagccactgcaacagcaggaaagaaacgaggaacagttacataatgtcgcccgtggcggttacgtcctgattgactgcgagggcatcccggacctgatcctgatctctgctggttcggaaatagaactggctgtcgctgccgcccgcactctaatgcaggaaggttatcagatccgcgtggtgtccatgccctgtaccgaacgctttgatgcgcaggacgaaagttataaggcttcagttctgccacctcaggtacgtaaacgccttgcagttgaagccagcattgcaggattctgggaacgctacgttgggttagacgggaaagtcatcggtatgacgactttcggtgaatccgcaccagctggtgtcctgtttaagtattttggttttaccgccgaaaatgtgacagatactgccagaaacatgctgaagtaa

SEQ ID NO: 234936 - DNA, 453 bp, Klebsiella pneumoniae
atgtcagcgatatctagctggttaaatgaaagtaaagtgcagtttgtttcatcggtatctgactggaaaagcgctatcgagcttgccggtcgccctttactgaacgagggcgcaatttcacaatcttacatcgacgcaattattcaacaaaaagaagcaacaggcccgtattttgtcattgcgcccggtattgccatgccgcatgcccgcccagagcagggtgcagtatctctggggctatcagttctgaaaatcggcgagcccgtcaactttgattctgaagaaaatggtccagtggttgctgtattcatgttttcagcccctgacagcaacagtcatattgagatgatttctcaacttgcagaagtcctgtccgatgatgacatgatggaaaaagtgttcgccgtgcaaagtactgacgaactgcaggcgcttttactaagcaaaaaataa

SEQ ID NO: 234937 - DNA, 273 bp, Klebsiella pneumoniae
atgaaaattatggcggtatgtggtgcaggtctggggagcagcttcatgatggaaatgaacatcaaaaaagtgctcaaaaaaatcaacatcactgcagaggtcgatcattctgacctgggttcagttactcctgatctggctgacgtttttgtgatgggcaaagacattgcattcagcgcaaatcttccggaaagcaaggtcattgtcatcaataacatcattgatctgaatgaagttgaacaaaaaataaaagactactttgaacagcaatag

SEQ ID NO: 234938 - DNA, 1362 bp, Klebsiella pneumoniae
atgttttttcaaagctttttgcagtttcttgtcgatgtgctgaaagttccatcgatccttgtcggactggttgcgctgtttggcctggtcgctcagaaaaaatctttacctgacgttattaaaggtacgattaaaactattctgggcttccttgttctttctggcggggcggcggttcttgttgggtctctgtctcccttgggagatatattcaaacaggcatttcatgtacaggggatcatacctaacaacgaggccatggtgtcaatcgcattggaaaaatatggtgcgcctacgacactgattatggctttcggtatggttgccaatatagtcgttgccagatttacccgattgaaatatatatacttatccgggcatgtaactttctatttagcgtgcatggtagcaattattctctctgttgcaggctttgagggtgtgcagttgatttacactggctcgctgtccctcgggatgatgatggcgatctttcctgccattgctcaaccatatatgcgtaagattgtgggcaatgaccaggttgcacttgctcatacaggtacggtgggttacgtcctgtccggctggatcggctctctcgtcggcaaaggctccaagtctaccgaagaaatgaacatgccgcagaatctgagctttctgcgcgacagtaccatatctatatcactgaccatgatggtgatttacctggttctgtctgtgtcagccggtaaagaatttgtcgaaagtcatttcagccacggccagaactatcttgtttactcgttcattcaggccatcacatttgctgcaggtgtctacattattctgcagggagttcgtttaattcttgctgaaattgtgccggcatttaccggcttttcagaaaaacttgtgccgaatgcccggcccgcactcgattgccctattgttttcccatatgcacctaatgctgttctggttggttttatctccagctttgttggtgggctggttggcttgtttattcttgggcaactgaactgggttttgattttgccgggtgttgtgccgcactttttctgtggggcgacagctggcgtcttcggcaatgctactggcgggaaacgtggggcaatgataggtgcctttgctcatggcatactgattaccttccttcctgttgcactgttacctgttttgggtgccatcggcctgacgaatacaaccttctcagatactgatttcggtgtcgcaggaattgtgctgggtaacatggccagatttatgaatcctggaatgatcaccgccacagttactggtgtatttgcaatcctggttatttataacttccttggtaaaaagaaagttgtcacagaataa

SEQ ID NO: 234939 - DNA, 522 bp, Klebsiella pneumoniae
gtgaagaaattattagggattgcggtactgtgcgttgttttactcgggtgtggtgaagataaaccctcagataaggtgatgaaatttatcgcgactcaggatactgggatgctttctaaatcaaagacatctatgtgtactgatactgggttgaagaaaatacactttattgatgagaacgttttaccgactactaatgaatactatcaggtgagtaagtatttatatagcaagtcaaagtacagtgttgtatctgaaagaaaagagggtgatgtttatattgttgctgtcaaatggacatatcccaaagcaatacgtgaagcgaaatcatttatgtgggctgaaattccaagcatagacgatagagaaaagaataacttagataatctcaagtcgttatatgaaagcggaggtttgaaagatttggaatatgaagaagaagtcgcagattggacagtcctcaatgatggaattgaccctaagctatcagagcctgctattaaagtgtgttccgaatcataa

SEQ ID NO: 234940 - DNA, 411 bp, Klebsiella pneumoniae
atgtcagctcataatgataaattcccatggctaagttactatggaaactacaatttctttgaacagagaatgcatgaacatagtaaagttacatcttgtcatgagataaaaaaagggctttacaacatccaattaactaatggtaagatgttaaaagtttttatctgcgagtgttattcatttagcactgcagagtacgtagagtcttgtcagaattatggggagttagatgcagttataataagttctaactggtgcggatatagtcttgatttaaaatatgagtgcatgaagaaaaatgtgggaatttttgacattagaggatttatggctgcgatcaataaaatgcagttctgggaatatatgactgattatgaaaaagagaaattcaaagaatatggttggttgtaa

SEQ ID NO: 234941 - DNA, 699 bp, Klebsiella pneumoniae
atggcaatttcagaaaaagcgataaagattttatggtctaatgctgctggtatatgttcttttagcggttgcaatgtaaaactttcagtagcggaggctgctgaagatgccccatatactattggggagatggcacatataaaagggaatagaccaggttccaatcgctatgacattgaacagcctgcttctgaacgagatagttacgagaatcttattttactctgtccaacccatcatacattaattgataaagttgaaaacgttgatagatttagcgttgaaattctccatgaaatgaaaagagaacatgaggtgtcgatttctaaccgattagctattattaaatttgagtctgttgataaactgaaagaccaaatttctacatacttagctgaaaatcatcaaagttgggaacaatatgggcctttatcggataatgctaaaaagaatcctaacagtgagcaaatttatgccgtatggacatctgaacgcctctcaataatcgttcctaataatagagaaattgttaaaattctccaggggaatagagagttgttttctcggaacgagcaaagattagtaagtaaatttattcaacatgctgaaagctatgaaagatgggttaatgatgaaataccttataacgccatacaaagatttccattagactttgaaaccttaattttaggagagtaa

SEQ ID NO: 234942 - DNA, 522 bp, Klebsiella pneumoniae
atgccgcagcataactatccaaatggtaagccatggtctgattccgacatcgcttttctccggagaatggctggtgaaatgacgctgcgtgatattgcgtcagaacttaaccgcactcacgcggcagtacgaactatgagtacgagactgtcactcaatcttagagaaagttacaccaggtggacctctgtagagcttcagatattgaaatcatgtgcgggctccatgagtgccactcaaattgctggaaagcttggacgcactctcgattctgttaaggggaaagccagcctgttgggcttaagcctgctctgcattggcgaacgacatcatcatgcagtttacagtgatcatgatgtatctctgtgtattgcgcttcacgaagaaggcctgtcacaagcagtcatcgctgaaaaaatggagatacctgtccatagcgttaatgcgtttatccatggcaggaggctcacccatgaggatgtttcatggcgaaacctatcacgaaaggatatcgcatcatga

SEQ ID NO: 234943 - DNA, 294 bp, Klebsiella pneumoniae
atgtggagaggaaccgatcgcaccagaagccagatgatactgaccgagtatctctatgaccctaaagccaaagactccaaatccgtttacctggtgcggcataacagccgcattcatcagactgttctggagcagcatttgacgatagagcgcgatagtttcggtcgtttcatgccgactatcgaactgaaagactttccggaaggacttagcgaccgcgagtcgatgctgaaacttgccgactggctgcaccgtttaggtgtggcgatcgaggataactggagtcaaccatga

SEQ ID NO: 234944 - DNA, 189 bp, Klebsiella pneumoniae; identical to SEQ ID NO: 206036

SEQ ID NO: 234945 - DNA, 222 bp, Klebsiella pneumoniae
atgtatctcgctgatactgtgtatttttcacacacagcaagagaggtcatatgtcttacattcacagcagagaacatgctgatcatggcgatgtcatcagcgttcattgctctcatcaaattaacgtactggttctggatgataccaattactctaagtatcgttcggggcggcaatgcacatattacggagggttttacactagatttcccgctaatatag

SEQ ID NO: 234946 - DNA, 540 bp, Klebsiella pneumoniae
atggcgttgaaggaacggagtggaggttctgaccataggccggtagtttcagccagcatggtgaataaattaaaagcaggccgtacggaccttggttactgttctcggtttgcaacggttttggtccgggaaaacagttcttttttattatttcagagcagattgcgctcccgatgtttcttctgcgttatgtctctcatggcgcagggagcgcacagggggcggccagtcgccgccgccccctgtacccccgggctctggccgccaaaatcgccacttcgtgataccttcgacttatccctgcaggcttcgggtcgggccgaggcagcgtccgtgcaaaacacggccctcagcccgcatccatgcgggctgccccggccttcctggaacgtctcagcgattttgaggccaccaacaccggcagtttcagccagcgcggtgaagacattaaaggcaggtcgcaagaaccgtaggtcgggtaaggcgttagccgccacccgacaaaaaaacggcaccgcgtgtcgcccgggtaaggcgtag

SEQ ID NO: 234947 - DNA, 141 bp, Klebsiella pneumoniae
atggccaaaaccattctgctggtggaagatgacgaggatatagccacgctgctgcggctcaatcttcaggatgagggctatcagatcgtccatgaagccgacggcggccaggccctcgcccggctggagacgcaggtctag

SEQ ID NO: 234948 - DNA, 273 bp, Klebsiella pneumoniae
atgaagagtaagctgatgcaagaaggtaaaggattaaccgttgtgcggtttatgcgcgcatcagccataaccagcgggcaggcgcgcgcgcagaaatcattcatgaaaacaattattgccgccgcccggcggcagaatcaggtgtcgtctggcgcccaagcgagctccgggatcggaaagcggcccaccgtcatagagaaagggaagcaactcagcggatccgcgactgttcatcgtcgcgtaacgtcagcacctcaaaaccgttggcggtga

SEQ ID NO: 234949 - DNA, 1176 bp, Klebsiella pneumoniae
atggaaacgtcactggctgaggatgtaaagaaaccgacccggaccctgtcgccggacagcttcttctttatgtcgccgtaccgcagttttaccacttcaggctgcttccgtcgcttctcacagcccgccgttggcggcgatgcgctgaacggcgagttccagcagcagatggcggccgcctttgccgaggcccgggcggcggggatccgcaagccggtgatggtcggggctatcccgttcgacacctgtcagccttccgagctctatatccccgagcgctgggaagcgttctctcgcccggaaaagcagcgttccgcccgctatgccgcgccgctggaggcgatggaggtggtggagcgtcgggagatcccggagcaggacgcgtttttagccatggtggaacgcgccgccgcgctgaccgccaccccggaagtcgacaaagtggtgctatcaaggcttatcgatattaccacccgcgaccgcgtcgacagcggcgcgctgatggagcgactgatcgcccagaaccccgccagctttaacttccacgtgccgctctccgacggcggcgtgctgctgggcgccagcccggagctgctgctgcgtaaagaaggacagcacttcagctctctgccgctggccggctccgcccgtcgccagccggacgatgtgctggatcgggaagcaggcaacaggctgttggcctccggcaaagatcgccacgagcacgagctggtgacccaggcgatgaagagcgtgctgggcccgcgcagcagtcagctgtcgctaccggagtcgccgcagctgattaccaccccgacgctctggcatctggcgacgccgatcgcaggcaccgcgctggcggaagaaaacgccatgtcgctggcctgtctgctgcacccgacgccggcgctgagcggtttcccgcatcaggcggcgaagcgcctgattgctgaactggaacccttcgatcgccagctgttcggtggcatcgtcggctggtgcgatgacgaaggcaacggcgagtgggtggtgactatccgctgcgcgcgtctgcagcagcgtacgctgcgcctgtttgccggcgcgggcattgttccggcctcctcgccgctgggcgaatggcgcgaaaccggcgtcaaactgaccaccatgcttaacgtatttggcttgaactaa

SEQ ID NO: 234950 - DNA, 306 bp, Klebsiella pneumoniae
atgaagtgtccgttttttcttaaatgcctatggatattaggtcgtgccgttaggtatctcttagcgctggtagtgtgtctgcttagcagttgtgccgggcagcaggctcctgcgtttccaatactcggcgcctattttcctgcctggatagcctgctctcttttcggcatcgttattgccattatcgccaggatagtctttattcgctttggtatcgatgacgcacttccgatacggttactcatttatgtatgcctggcgcttgccgccgcggctctctcatcgttgcttatttttgcgcattaa

SEQ ID NO: 234951 - DNA, 1014 bp, Klebsiella pneumoniae
atggcgttaatcattagcggcgtaattattattgcggcggttattttgggctggtacaccctgcgtcaggatgcccgccaccccgtatccgaagatacggtaatcggcgctgatgtggtacacgtcagcagcgccattcctggtcgaattatatcaattaaggtgaaggaaaacggggctatacgccagggcgaggtgatgtttactattgacccctatctgtatcagttgcgggtcgagcaggcgcgggcagagctgaaaatggccgaggccgcgtgggatgcccagcatcgaaccgtcaaagcggagcaatctaatgcggcgataaccagtgaccaaatcacccgggcgcgcgctaatcttcagctggcgagccaaacgctggccaggctgcagccattactggcaaaaggctatgttaccgcccagcaggtggatgatgccgccacggcgaaacgcgatgctgaaatcagccttcagcaggccttaaagcaagccgaggcggccgatgcgctggtcagcactaccgcggcctcagaagcgttggtgagcgcacgccgcgctgcgctagccatcgcgctaagggaactggaaaataccactattcgtgcgccgcacaatgggctggtggtggggctcaaggtggcatcgggagagtttgttatgcccgatcaggccatcttcacgctgattgaccgcgatcgctggtatgcctcggccttctttcgcgagaccgatctaaaaaatatcagaccgggagattgcgcgaccgtgtacgtgatggctgacaggaagcgcgcgcttaaaggtcgcgtggagggaattggctgggggatcagcactcaggaccagatatctcttccgcgccaattaccctatgtcgccaggtcgctgaactgggtacgcgtcgctcagcgcttccccgtcaggatcacgctgctagaaccgcctgccgacctgatgcgggttggcgccagcgccgttgccgtggtggatcatggcgccagctgctaa

SEQ ID NO: 234952 - DNA, 1836 bp, Klebsiella pneumoniae
atgctccgacagatacatgccgatctggcctggtttccgggccgacgcgccacaacctggcgaatggcggcgctctgttcattgatggcgatggttgccatgctgtatggcattccggaagcggccatcagttgttatttgatcttattcgtaatgaagccggatccagtgaccagtatcgtgatagctcttgccgtctcgatactggtttcaattgtggccagcctgattatccttattttgccctggactctggaacatcccctgctgagaatgacggtgctggtggtcagctcgttcacctttctctggctaagttcagccagcaagctgagggcggtgggctcgattatcgctctggccatcgcctttgcgatgtcattatccggagctgcgcccaatggtgaactggcgacacgcgcggtgctttatgcctggctcatggcggtgacgccgatggcgctcctggccgtcttcaatttgttttttggcggagcgtcatggaaatggctgcgtatgacgttaaccaaacgtcttatcacggccgccaacgcgctacgccatccgaacgacagcaatatcgcggcagtccgcgctcaattactcgaaggacaagcggaacttcttcaacgcgtcgcgctcatccgactgttccggctatgccccaccgccgatattgcgtggtttgaggcggctattaatcacagctaccatttgctgttggcgattgccggccaggacaaaagcgcccagcgaaccaaccatcccgacctcgcggaatggtgcgaaaacgcggcccgggctgttagcggaaaacgggctattgcccctcccggaggcccacagcatagcagctgcgagattcgcgaggcgcttgccgcgcttgccgcgcttgccatgggagtacattgccatatcccccctccgtcaagggcgtcatttttcgtcgacgatgcatttaccaacccgattcatcagcattttgcccttaagaccacagccgccagtctgatctgttatctcatctatacgacgctggactggcaggatattcacacagcaatggtcacctgctatgtcgccgcgctcggtactaccggcgaaacaatccacaagctggccctgaggctcctgggatgcctgacgggggcgctcatcggcgcgctttcattattgtttgtcgtccccgctatgaccgatataggccagcttatggggctgatctttgtagttattttaccagtggcatgggtggcggccgggaacgaacggatagcttacgcagggatccaggctggactggcctttttattgaccgtactgcagggctttggcccccccggccagttggacgtggcgttcgatcggatcatcggcattctgctgggtaacctggtagtatatgtcctattcacccgactttggcccacggccatcgctgattctgttcgcgcccatatccacaaggcattaagcggattagccacactggcggcgctcccctccggtgagcgagccacggcgctcagggaggcggcgagtatagaagcagcgctcttctgcgccttcgaggccataaaattactcccttttgagccgctatcactgcgcccctctgcacttgaaaccgtaaaaatgaaggccatcctggcggaaattgccagagtctgccccttgctctatgtcgcggataatacaacgcatccccatgctgaacggctacgccgcctcgcagcaggtcgttcttcccaggctgaaagccacatccaggcattagcggcggctaaaggtgctattcacgacagtatttcgcggcttgaggagctcatgcaatga

SEQ ID NO: 234953 - DNA, 1278 bp, Klebsiella pneumoniae
atgccagacttaaccttcaaaattttctcgctaatcgacaataaaaaaatcgaatccgccgcctccccggggttaaaaatgaagcagataatttctcctgtccaccgtttgatcctaagtaaaaaaaccaggccaggggtgcgttttgcagcgtggctgaaaggggcgatgcttctggcaatgttacctcaatcggtctcggctattgtgctaggaccgggttatacaaaacttggtaactggaatcccacggtgaccgcaacgcaggatggccgtaatttcaggggcctagggagcggcaactttgacgggatcaacgcaggggattatccaaattttatgtcactacaggcttacgccaatacgacatcggtactccaggaaaactgtaatggagggggggtgattttaccctgggtaaccacaggtgatggctggagcggatatcgcattgctacaggcgtctttctgatcatttctggtacagcgtcaggcacacagagatgggagggtgcaggacacggaacgggggttattacgggtacacgtacgacaaccggtagtgcagcctggagctccacgggaacgccctctggtaacaacagaacgggttataccgctaactgcgcgggcatttggccctactatgatgctggattgtttacgcttaaagcgggtactaccagcaaagcgtcgcttgagtatggcgtttacgttttaccaggaacggcatcagcaacctataccgatcactccctggtgtttggcctgtcgttgggaggctcgataccgactgtctatgagcgacttattctccctccccttgagattaataaggcgacatgcaccgtagtgactcccggactcatcgcctttggtgacgtcacggcaggccaggcttcagccgggaaaggtattgcggttccggcgacgctgggagtttcgtgtactaattactcaggctctactattcaggtaagttattccgtcaaacccaaaagtcaggcgggaggtaaatatacgctccccctgatttccacaggcggcggaattgcgggcgatgtccggggatttctgggcccctccgctgagaacgacgcagggtgtgtggataaagcatcatcggtccccatggataatactctggttcccctgcgcactgtcgccaataccagcaccaactcctggacggatcccctgacctgggtgttatgcccgcgagtgaatgctaaacctggccccgctacggctaccgcgacaatcgaagtaaactggtaa

SEQ ID NO: 234954 - DNA, 438 bp, Klebsiella pneumoniae
atgccaactatttcaagaaaagaatatgccagcctgtttggcccgacggtcggagataaaatccgcctgggtgagaccgacctttatatcgaaattgagaaagacctccgcggctatggtgacgaatcggtctatggtggcggtaaatcactgcgtgatggaatgggatcgaataataccttaacgcgcgataacggcgttctggacctggtgattaccaacgtcacgattctcgatgccaaactgggcgtcattaaggccgacgtcggtattaaagatggcctgattgttggcattggtaaaagcggtaacccggccattatggatggcgtgacgcagaatatgattgtcgggctcagcactgacgccatttccggggaacacttgatcctgaccgcggccggcatcgacagccatatccatcttatttcaccgtag

SEQ ID NO: 234955 - DNA, 1110 bp, Klebsiella pneumoniae
atgaatattgttttacataaaagtcttccttttagtatgggaggggttttgttaggtatgatttcattttttggcagtatgtcatcatcctctgccgcagtcataaacgcgcaacccgggcaagggttcatgccggtgagttccttttcgggaacagttcgagttcctgtaagctcttcaatcaatagtgcccaatcacaatatgctggctttgcgattgcgccaaatagtgctggcgtggatgccctatgccaaagtaacctgtcacagtggaaaacgatcgatggttactatggttacgaagtcatgtccggcgttttgttggtgatttataatacacaaattacgggcgacgtggtcagttctaccggcggctctatcgcggtaaacgggaatattagttctaccggaattttgtcgggttctattccaccgaaacgtaatggcgttaactgttattcatacctaaccggtgagagggtaaccactacagaaacgattacacaattcagcggcagctatggttattatatttcttctacagcatcgttaacacctgaaacaggtttccagcccacaacaattgcgttccggcgtgcaatgggtattggtcaggcgtggaatgctaactatatttccattaatcccggcgataatcttatcatcaaagaaccgcctatgacctgctctgtctcggtgccgccggtagactttggtgaggtggcttccacagcggttggcaacaaggtggtggtggaatccacattgggggttaactgtacaaatacgtccaacaattccatacccatcacgtacagcatgacgccaaaaactcaggcgggcgatcaaaccagtatcccgatgatctcaaaggccgggggaaccgtgggcgatatccggggatttcttggtgcaaacgcctctgcagatgccgggtgtgtagcgaagacttcatcggtacgcatggatggttctcagacgccgctgcgtaccgtgcccagcaacaatagtgctccgtggtctagtcctctggtgtgggtattatgccccaaggcaacggcaaaacctggggtagcctcagcggcagctacctttgagttaaactggtaa

SEQ ID NO: 234956 - DNA, 435 bp, Klebsiella pneumoniae
atgccctctctggcggggggcagcgcatggatcaacagcccggcgttaactccggagcgtctgaagggcaaagtggtgctggtggatttctggacccgggagtgtatcaactgtcagcataccctgccttacgtgcgcgactgggcgaacaaataccgcgcggcgggcctggtggtgattggcgttcataccccggaatatccctgggagcgttcgttgcccctgctgcgccaggcggtgaaggactggcggataacctacccggtggtggcggataatgagtacgccatctggaacgccttcggcaatcagtactggccggcgcattacattttcgacgctcgcggacagctgcgttataccgccttcggcgaaggggattatgcccaccaggagcaggtgatccagcagctgctgcaggagagcaaagcctga

SEQ ID NO: 234957 - DNA, 657 bp, Klebsiella pneumoniae
atgtctcgtctttatcttcttctggacgaactgacacaaggggaaatcacaccggcattattgcaacatgtgttgaaagcatttctggtatctcatcagggacgtagtgatgaagccagtattgagatttcaggggagttgttactgtcgcgtaagtcgttaaattctaatcagtccgactggaaagcttatcctctggctctgagcgccgaattcaggcaatctttttcgattaccctcaaagtgggtatcccttattcatcaacctgcccggcttccgctgcacttagccgccacgttgcgggtttgcagtttagcaaagactttggtaactggatcgacagcctcccggtagcagaaatagccgactggcttgttgagaaaggaatgccggcaaccccgcacagccagcgaaactgggcatgggtgaatatccgtcttaatcaatcagctcaatcacaggcagtgattgagctgattgattatgctgaagttgctctcgggacagccgtgcaaacggttgtcaaacggagcgacgaacaggcttttgcggtggctaatggtcagaatctgatgttttgcgaagatgctgcccgtcggctcaataacatttttcgttgtgcgcccttttgtgaggcatttgatatcagggggtga

SEQ ID NO: 234958 - DNA, 1191 bp, Klebsiella pneumoniae
atgcttctttcacggcgaatttttattcagaatgcagcattaggattatctgcagcaactctttcggcagcatctgttgcagcccccccccaactccccaccccgcatacaaccctaaagcaaaaaactgtaatacctcacgatcttattaagatcattagcttggatggactggagaaaaaggctaaaagtgttatgtctgaggctgcttacgcttatattgctcatggtgccggagatgaatggacctaccatgaaaaccgtcgggcgtttaatgattatccattattaccacacagattaagtggtgtggcagcagataagattgacattcaagttgagttgctgggacataagttacctcatccattactcattgctcctatgggagcacatatgtttgttcatcctgagggagaggttattgcagctgcaggagccgaaaattcaggtgccctttatgaatcttccggtgcttccaatcgccctctggaagatattgcaaaagccaacaaaggagctaaatggtttcagttatatttcaatgctgacactggggttactaaaagcttactggagcgagcaaaagcagcgggttattccgccataatcattacagctgatgcacttgggccaggaatgagtgatgcgtttcttagaatggaatcccctttccctgcaggagctactttcggaaatcatgacccacgctatggcggaaaaggggatttttttaatcaaaaagtagaacttacacctgcagacatcgagtttgtcaaaaaaataactgggttacctgtaattttgaaaggaatactcaggggagatgatgctgaaacagcaatccaagcaggggctgatgcaatacaggtatcaaaccatggggggcggcaaattgatggagtgccagcggcaataagtcagttgcaggaggttgcatccagagtggggcacaaagtgccgataatttttgacagtggcatccgccgtggaattgatattgtaagagctctttcattgggagccactgctgttgcgatcgggagacctattctttatggtatagctgttgctgggagcaatggtgttgcgagtgttattgagcatttgaagatggagttaaagagcgcaatgctattaacaggtgctgttacgctaaaagatttatcgtcaaaatttgttaagttttga

SEQ ID NO: 234959 - DNA, 363 bp, Klebsiella pneumoniae
atgaatacagataatcgtattcccgttatcgttctgactaggattctgggatcaagaaaaaccacactacttaacaatattctcagccagcagcacggcctgtgggtggcggttattgagaacgaattcggtgaaatcggtatagatgatgcattggttatcaatgcagatgaagaagtctttgagatgaataatggcagcatctgctgcacggtgcaaggcgatttgattcatatcctgagtcgtctgatgcaccgccgcgataaatttgaccgtattctgatcgaaaccaccgggatggccaatctactgagtgaagcaaatgaagagagagccgctaacgatcctgaatggttttcttag

SEQ ID NO: 234960 - DNA, 936 bp, Klebsiella pneumoniae
atgttattactggtgacgttctttcccgttctggtgcggctgggcgtcagtaaagcgtccgctgcctcgatgatcggcctgtgcgcgtttatggatcttggcccggcggttggaacggcgaatcttgcggccaaacatgccggaatggaaagcgcgatttactttgcgcactatcagatgccggtggcggctgtggttatgctggccgtcgcggtggtgattttctttaccgccaaatatttcgataaaaaagatgggtttgttccgggaacggaagaggttgcggaagaggaaggacgcaaagtgcccgccatttatgcgctgctgcctgtattacccgtcattctggttttaagcccgctggcgatcgcatccatcaaaattgacgttgtgacggcgatgatcctcggggtggtggtcgcttttttcttcgagctgttcgccacgcgtgatttccgcgcctgttgcaaaggggggcaggtatttttcaagggaatgggaagcatgtttaccagtatcgtttctttactggtctgtgcggatatctatggccaggggctacagaagagcggcgcagtggactatctccttcagtccgtacaaagcgccggtctgggctttaccagtatgacgctggtgatgacggcgctgctaggcgttactgcggtattaaccggttctggcgtggcggcattcttctccttttccgggctggcgccctctgtcgcggcgaagtttggtgaaagcgcggtcaatatgattctgcctatgcaactgatggcgggaatggggcgctctatttctccggttgcaggcatcattatcgccgtgagcaaagcgggagaatgttcaccgtttatgatcgtcagaagaacgctgctcccggcgttggctgggattgctgcgatgttgattgccaactatgtgctgatttaa

SEQ ID NO: 234961 - DNA, 630 bp, Klebsiella pneumoniae
atgcagaagctgcgcacaaatgtagcccagcgcaagatgatgcgctctttactgccgaatcacgcgaaagggtataaatatcgggggatcaccatctcaagcggtcatttaggctggcaaattcataatctcgtctatcagaatacattgcaaaaatgggacgttgtcatcttgcaaggcaactctacggagacgatctcgcagaaagagagcactcggcagaacttcatcgaatccgcgacaaaaatggcggatatggcgcatcaggcaggttcaaaagttgtgtacttcatgacctgggcaaagcgggctcaaccagaggatatacagaaacttgctgacgcctatgtttccattgcgcagaaaactggcggctatgtcgcgccggtcggcctagcttttgaaaaagcgcgtaaagcacacccggaaattaatctttattaccacgatggcgtacacccttccatcgcaggaacctatttagccgcctgtgtgttctttgccacgctgtataaccagtcgccagtgggcggagcgctgcccgtagacacggatatgaccccagccaccgcaaaagcattgcagcagattgcgtgggaaaccgtcagcgagtttcagaaatcatcataa

SEQ ID NO: 234962 - DNA, 918 bp, Klebsiella pneumoniae
gtgaaaaaaatcagtccttccgatgtgaaatatataaaactaggtcccggtggaaaatgggaagccgaatgtattgatactggtatcataaaatttggctaccacgagacaccaaatcaactctgtatagatggtaaatgggctgaggttcatgaaatatggaaaatcatcaggggaagtaaaacgggtacagctactagtgaccttaaccagataaaagtattttatactgctcaggaagatactgtctttatcaccttctacggtggttttctttattggtgcagaccaacaggcgacgtcactgttcttcaggatggcagcagaattcgtcagactattgatggatggcacaatcgtagcatcaacgggacaattttcactattagttcaataaatggtgagttgaatgcaacccatggattcagaggcactatctgtaatgttaaaaaagccgaatatgttatccgaaaaattaatgatgaatattcgcctgaagttattgagtttgatctcgccgaaactagctatctgaattcaattcgtcaactttgtaagctattgacatggcaagacttcgagttgctagtagaccttatattttctcaaagtggatggcgacgagtcggtagtctgggcaaaacgcaaaaaacgattgaccttgtattggaactaccgacaactcgcgaaagtgcattggttcaagttaagtccacagcagacaatgctacattggatgaatatgtaaaaagattccatgaatgtgatgcctacgacagaatgttttttgtctggcatagtggtccgctgaatgaagatcaacaaattgacggtgttacattaattgggcctgaaaaactatcagagattattttggaaagcgggttgacccgttggcttcgaaaaaaagtatggtga

SEQ ID NO: 234963 - DNA, 1287 bp, Klebsiella pneumoniae
atgtccgctcaacaatttgaaaaattagtcaatttatatcgtgggctcggtagacctgccatgactgattctcaatttgttttcaagggaaaacttagagataaccttacgcagctaaaagagctatgggatgaacataatccaatgctctcagattttgaaatattatttagtgattcaaatgccgggacttatttcggtgatatcttccccatcaatattgatcatgatacagatgtaacactgaaggtctctttacccggtggggattttcaatttgtagattcacttgatatctttttatcatttgataacaaattaaacatggggttagatgtcgagaatgtatatcttgttcaagaagattatatttttggagaaaatactgacaacctaacaattaaaaacacattaatactttctcattttataaatgaactcagcaaattagcaaactatattgatcgaattgatgacaatggccgccttaagattgtatttattgataccggaagttctaaaaaaacacctccaattgtacttgagccaaagatatcgatagataatgcttcttaccctgccgtagatttatcagtctttaataatatcaataatcatgagaatgataatgctcatgttcaagaaaaacaatcaatgtttagagtttcagtaatcgaagtgctacgagaagtagatgggaaggaagacaattttaataaattaattaaacattgggaactcctgaaagagacatattacggtaattttgaatgctatttgacgaacttttcatttctgaaacaaaaaaaagaagctgccgaaaattacatgtcagtatcaagtaaaatatcaaatactctatcctctatttcagggaaacttttcggtcttcccatttccataggtgttgctcttgctatattaaaatcatcagaaaaatttgaaagtattctcacattaattggtgtcgcaatcacatcactgttaatattatttaccattcaagatcagagaaaggtcctttattctataagggcgtccatagatgctttgtttagccatacaaaatcggctaaatctggtgaactgtcagaacttatagcctcccataaaagagatcttttttctcaggctgataaacttaactcagttatggttatctttttaattttatcagtcacaccattcatcctctcattattagtttatttatcgaaatttgaaccagccattgttattaaattcgatgagtatatatcaatattcatgaagcaattactatcttaa

SEQ ID NO: 234964 - DNA, 1086 bp, Klebsiella pneumoniae
atggcatttcagttaaggcattgtgttatacacgaactagtaaaagaaagtggaaaacagcgcgttgaggctattattaagcaggttctgcctacagatgacaaatatgtgcaggaattagtaaaatctctgaatgacttaattggaaaaaaagaaaaccaagcagcaagaggtacttttgacattgaggatcctacttacagggtacctaatgctttccaagactattacaacggtaaggcagagcctgattcatttcatacattttcaactgtgtgtatgaacgagcttactcggcaagcaaaagacccttcgagagttgccgcatccggtggagcgatagtatttgctcattacacaagtggcacctcaaacttcatgcttattacaatggttaagcaaaaggaagctttacggctagatgaaaatttaaagcccgtcgggatcgttcaaatagacatggccaagatacatcaggctgcaagggtaaattttgatagatattatcaatatgaaacattaccggaagaagaaaaacctacgtatctcgctttcgtcagtcctaaaataaatcaagatgcttcggggtattttgtagcagccttaggatgttcagatagtgttccctctgctaaagccactgatggcgcacttaatggagttaaacaatacttcgaagcgaataaagaattaactgcgtataaaaatcaagcatatgatgctgtactcaattatttaacattaaaagaagatggtaaattagcatctcttaccgaaatcgaccatgcagttagaagtacagttcctgcagataagtatgaacatatggataactttataacctatcttaatagtgaggaaattggactacctttagagttttctattaacagagctgtgctcgggagacgtgcgaaagtaaaagcaaagtcaaatgggtgggagttaaactttgaaagacgattttttggtacagctccaggatcagtaatccagtataatcgtgcagacaaaaaactgataatatcgaagctagacgaaaatatcatacaaaaattagaagctgttcttaaagagagagggtaa

SEQ ID NO: 234965 - DNA, 1470 bp, Klebsiella pneumoniae
atgaagagtatatcattgccgccatacgcaccaacactgatagaatcaacacgtgctattggctatacattagaagctgcgatcgccgacattatcgacaacagtatttcagcacaagcttcgtacactgatattttcttcttccccattggcaattcatacattgcaattatggatgatggatgcggaatggctgcagatgagattgataatgcgatgcgctatggtagccaaaatccgaatgaaaaacgcactgaaaatgacttaggacgctttgggcttggtctgaagacagcctcattatctcaatgtcgaaccctaacggtagttagtaagcaacgagattgcattgaagcaagacgatgggatattgaccatgtgattaaaacacaagattggtcactattagtgctagaatcagaggaaatagatcaaatccctcatattgataatctaaaaaaaataaaatctggcactcttgttgtatggcaaaatcttgataggctcaaaactggtgagatcgatttagaacaatcaatgggtaaaaagatggatgaaatgaggaagcatctatcactagtttttcatcgttatatcaatggggaatccggaataaggcgattaaatataaggatgaataacacatctgtcgaaccggtagatccttttctttcccatcgaaacacgcaaataatgtccgatgaatcaatatatattaaaaagtcaaaaatcattgttcgaccatatatattaccgcatatttcagacttgtctaaagaagagattggttctttaggaggtaaagaaggtctaaggaaaagacaaggcttttatatctatagaaataaaagattattaatatggggaacatggtttcgtatgatgcggcagggggaactttctaagctagcccgtattcagattgatatccctaacgaactagatagcctttggacgctagatatcaagaaatctactgctattccaccggaaatagtacgaaataatttaaaatcaattgtagaaagtctagcagacaaaagtaagaatacatgggtgtttcgtgggaaaagagaaacccaagattcagtcatacatatttggcaacgattcaaaggaaaaaatggagggtgttactataatataaatcgtgatcaccctctggtagaggcattctcagacacgacgcaaaatataagaaatatggtcgaaagcttacttaaatcaatagagtttggaataccgctaaatcagctatatctagatttgacatctgaaaaaatgatagaaaacgacaccagtattaataaacatgaagcagaacgtatttttcatgagcttttaggagaaaactccattagtaaagataaaattgacctgcttaatactcttgaaattacagaaccatttatggactacccagacctgattgaacattacagaaggaaaattattcatgacaacaactaa

SEQ ID NO: 234966 - DNA, 642 bp, Klebsiella pneumoniae
atgaaacgactgctgacagctctgctcctgtttattttcaacggcgtggccgccgcctcccctgcaacgccagaagtcgtccgctacgaccgctatctgctggtcagcacgtcaccgcaacagccgccactcgaacagcttacagccctgtccgttccgcccggttttcacccgacgatcggtgaagcgttacagtacctgctgcgcgacagcggctggtctttgtgccttgccgatgcgcgccgggcacagctttatgggctcccgttaccgctgagccagtacaacaccggcccgctgcgcctgaagagcgccctgcaactgctggcgggcccggcatggcggatgacctccgacgaaaaccaccgcgaagtctgtttcgccagcgaccattaccctccccccggcggtggcttaccgtcatcccgtgtctctccgccctttggggccattaacggccccgtttttttttcgccgggcccctacagcgtggtgatatccgcctggcggttgtcgtgccgccagaggccatttacctccatcaggtggtgtggctgcgcgggggagagcagtggcgcggttggcagctggagcggtttgatgagcgccgggctatattccgtcacggcaaacgtcagttga

SEQ ID NO: 234967 - DNA, 645 bp, Klebsiella pneumoniae
atgagtgagcagcgaacgcctccgtcacgcccaccacagggaccgattggctggctgctgtcgctgatcgggcggctcatcgggctggttattggcgcgctggtgctacgggtagtgctggaactggcggggctgtatttctggtggccgcatgagggaagcgagcatgttttccaggtgatgaggcgggagcaggtggaactggttagtgcattacagccgcatccgctgggggatgaaattacgatactactgaaaagtggagcaccccacattctgaaggccagacataagacaaactggccccacctggaacctttcaccattctggcttatacgctggtgagttttatgctgcgcctggtatggctcgccgtcatgctacccctgctctgtctgtgtgcattaatcgggctgacagacggactggtccggcgggatttgaggcggtttggctccgggctggaatcggtttttctccaccgctacgttatcaggtccggcagttcagtcgctacaacgctttgggtgttttatctggcgcagccgctgtttctgcctgcgatgctggttttactgcctgccgccttatggtttgggataacggtatggatggcagcagggagttttaaacggtggttataa

SEQ ID NO: 234968 - DNA, 714 bp, Klebsiella pneumoniae
gtggtaagaattgctggaagaagaacagtaacccaatggttcgagttgcgagcacgtttggtaaatgatttctctcatgaggactggattgaagcgcttaatttttttgatgagcggataaatgaaagatatcttaatcctattaattgtattgaagatagtaaaactgggcgaggtttaaaaggagcaggtttcgctgtttgtacgttgatatgtgctttaattgaaaccttagaaacatttcatagtggaaaaagtttcaagaaaacacctgatcctgaaaatccctatgaatacggtcatcgtaaaagtaaggagcattttacaaattttattaaaacaaaatttccccttagcattcattttgaagtcgataatgatttggcagatcatttttactcaggggttcggtgttctttactacatgatgcctcaacatgtgatggttgggtaatcaatactcgagaaaaacaaacaatagtgattcgtggtgaggaaaagatattaaacagacgcttatttataaaggatattaagcagtatatccaagaatataaaactagtttaatggaacccgataatcaagatctccgggatgcctttatcagaaaatttgatgggatctgtgtagctagtcaaattgtgcgtcaggagtcagttgctgagctacaaggagagccgcctccacctcactacatcccatctcccgcataa

SEQ ID NO: 234969 - DNA, 225 bp, Klebsiella pneumoniae
atgacttctatctactcaaatgactatcagatggtgattaaagctctccgggaagcgcggattgcttgtggcatcacccagcaagaggttgcctgtgctttcggaaggccacagtcatttattgcaaaggtagaaagcggtgaaaggcggctggatgttgtcgagtttgttcgttattgccgtttggttaacattgaacctgtcagcattttagataaattgtaa

SEQ ID NO: 234970 - DNA, 252 bp, Klebsiella pneumoniae
atgaacgcttatttttcaaatgacgggcgggcgaacaaatcgggtatttacatcatcaataatggaatgggaacggcatttgtctctgctatatctgcaacggtcaatggcaaaaaagttgaacctgttgccgggaatatttttgtcggagcagtgcaggcgttaggcctggatatccagtgctttgtgattggcggacccagaccaaatgattcatttaaagttggcgaggaggcgaggagattttcttaa

SEQ ID NO: 234971 - DNA, 969 bp, Klebsiella pneumoniae
atgacaattaagaagagagtttttgttgctgggcataatggtatggttggttcagctatcgtaagacaattgaaaaacagagacgacattgagctcgtactgcgttcacgtcaggagctcaacctgcttaatgctcaagacgtaaataattttttcgctaatgagcgtattgacgaagtgtatttagctgctgcaaaagttggcggaatagttgcgaataatacttatcctgctgattttatatatgaaaatattctcattgaagctaatatcatacatgctgcacatgtaaatgatgtctataagcttatgtttctaggttcatcttgtatttatccaaaatatgctaagcaaccgattagtgagtccgaattactacaaggaacacttgaatcaacgaatgaaccttatgctatagcaaaaatcgccggtattaaactgtgcgagtcttataatcggcaatataatcgcgattatcgttcagtaatgccaactaacttatatggagaaaacgataatttccatccttctaattcgcatgtaattcctgcattactacgccgttttcatgaagcaaagttagaaggtctaccacaagttgttgtatggggtagcgggacaccgatgcgcgagtttctgcatgttgatgatatggctgctgcatctatttatgtcatggagcttgataaagcactttggcaggagcaaacacaaccaatgctgtcacatattaacgtaggcactggcgttgattgttctattaaagagttagcggaaacaatttcaaaagttgttggttatcaaggggaggtcgtttttgattctaccaaacctgacggcactcctagaaagttattagatgtttcgagattggtaggtttaggctggaagtatcagattaaccttgaagcaggcttggcacggacttatgaatggtttttaaaaaatcaacaaagcttccggagttaa

SEQ ID NO: 234972 - DNA, 207 bp, Klebsiella pneumoniae; identical to SEQ ID NO: 109850

SEQ ID NO: 234973 - DNA, 1359 bp, Klebsiella pneumoniae; identical to SEQ ID NO: 109849

SEQ ID NO: 234974 - DNA, 639 bp, Klebsiella pneumoniae; identical to SEQ ID NO: 109848

SEQ ID NO: 234975 - DNA, 831 bp, Klebsiella pneumoniae; identical to SEQ ID NO: 109847

SEQ ID NO: 234976 - DNA, 129 bp, Klebsiella pneumoniae; identical to SEQ ID NO: 109846

SEQ ID NO: 234977 - DNA, 339 bp, Klebsiella pneumoniae; identical to SEQ ID NO: 109845

SEQ ID NO: 234978 - DNA, 195 bp, Klebsiella pneumoniae; identical to SEQ ID NO: 109841

SEQ ID NO: 234979 - DNA, 1104 bp, Klebsiella pneumoniae; identical to SEQ ID NO: 109840

SEQ ID NO: 234980 - DNA, 360 bp, Klebsiella pneumoniae
atgtggagtttacaggtgaaacatggggccttattatccggttcagtggtggaacgggccgattgtgtccatgctctggccagacagcttaacattctcatcagcgcattgtatggcagcgatcttcgtgtggtcctgcgcattgatgagttgcagcatcagccctttgatattcgacaatttgaataccactttcccatcgttattgcggtaaaactggcaattgccgacgacctaaccataccactggctaggatgttggatgaagaccgggcgtttatcgacagtattctggctgagatgctaaaccgtagtgaagtactcgcctgcatcagagactattttcgtaacggacaataa

SEQ ID NO: 234981 - DNA, 462 bp, Klebsiella pneumoniae
atgacctgcgtcgtccgacgatggaggaaatcggttatcctaccggtatttttatcgctggacgggatcaccggcagccagcgcgaatatattcagtggttgctgaagactaggtccggcaagggtaagccgaaagatattctgatgaccgaagccactgacctgatggcgatgaaacttcgtacactgctgcaggtccagttgcacctgacgctggcggtggaagcaggatatcagacaggtgaaaagccgattaccgccacgctggttgaatccgtgctctcccgccagctggatgaccgggaaccaacacttacgtggcatggttaccagctgaaggatatggtggagcagttcgatgcaaaaccggctgaaataagggcattatttaacaatcagttagacccagcccgcacagccgagctacacgacaggatgctggctgttggtttgccgatatga

SEQ ID NO: 234982 - DNA, 306 bp, Klebsiella pneumoniae
atgattataacgtctatgcgcccccccctagccctacgtcagatggtgcttgttaaggataaacttccgaaatacctgctgatgccgaaagtgagcctcctgcgccactacgtgctcggatcttcaccacaaaatgctgctgctccccctatgaaacactggagcacacatgagccagagctgacctggagttatttttttctggcgccgccttggctgtttgtcaaactgaccgggctttacagcgggtcgagaaagccgccagaacagtcggtggtcagcctgaccagtctccccgttgattag

SEQ ID NO: 234983 - DNA, 354 bp, Klebsiella pneumoniae
atgtccgaaataaccgaaacccatgccgcctgggtcccgccgccgtttccgccgcagggacgtctgccgggccgggcgctgcaggttgggcagaactgccatcagcagaacagcgacgagcggcgctatcaccaggaactgtgcctggctgccggacggcgcgtggagccgccgtgctgcaagacgctgcacatcagcctgtttttcgacggtacgggtaataacctgaacaatgacctgctgctgtctgacccgaagcacccgaccaatatcgcgcgtttgtttcgtgccaccattggcgacggcaccgccggcggctcagtatcaacggccagtcgggcatcgattcaatag

SEQ ID NO: 234984 - DNA, 672 bp, Klebsiella pneumoniae
atgaacattcctcaacagttgatcttgccggacactgtccatgaaggaattgttattaacagtgcagaaatgcggctgtactactaccccaaaggtaccaacacggtgattgtgttaccgattggtatcggagagttaggaaaagacacaccactccactggacaacgaaagttgaacgtaagaaagcaagtccaacttggacaccgatggcgaaaatgcatgacgaataccgtgctgcaggtaaacctctaccgaccgtcgtgcctgctggtccagataaccctatggggttgtatgcgctgtacattgggcgtctgtatgcgattcacgggaccaatgctaacttcggtattggcctgcgcgtcagccacggctgcgtccgtttgcgcagcggcgacataaagttcttgttcgaaaatgtgccaatcggtacccgcgtacagtttattaacgagccggtgaaagcgaccactgaaccggatggtagccgttacattgaaatccataatcctttatctagcactgaaaaacagtttgaagatagtgaggccgtaccgcttaacctgaccaaaagggttcaaagctttatcggccagcctgatgttgatcagtttgtagcgaagcaggccattcagaaccgttctggtatgccagttcgtctgaatatatga

SEQ ID NO: 234985 - DNA, 543 bp, Klebsiella pneumoniae
atgtttagtcttgtgaagaatagctccgatagccgtataacatggctcataatggctttaactgctttcgctttggaaatagttgcgctttggttccagtatgtaatgcagttaaggccttgtgtcctttgtatctacgagcgctgtgcattgtttggaataatgggggcagggattactggagcgatagctccacgtactccactgcgctatctggcgttcgctatatggatttatagtgcagtccgcggcattcagctcgcgtgggagcagactcaacttcagcttcatccatctcccttcatgacctgcgattttgctgctcattttccctcttggctaccactggataaatggttaccacaagtatttattgccaccggagattgtgcggaacatcagtggaactttctgacgttaagtatgcctcagtggatggtgggcattttctcagcttacttgattattgctgtactaatattgattgcacgtctgatcaaatcagacggttcttctactaccactgagggatacacacgatga

SEQ ID NO: 234986 - DNA, 561 bp, Klebsiella pneumoniae; identical to SEQ ID NO: 109836

SEQ ID NO: 234987 - DNA, 4128 bp, Klebsiella pneumoniae
atgaataaaatctattttcataaatattgtcatatcactcactcagtgaaagttgtatccgaactagccaaaaaaagaagtcgaggaagacgaaaactttcaacgcttctactgctgaatattgtcacttttatccctgcaatatcttctgcatctgtggtcggtaatgatgtatcttaccaaacttaccgtgactttgctgaaaataaggggcaatttagtgttggcgcagaaagaattcatgtttttaacaaacagggtaagagttttagtctgctaaatgctggtccaatgccggattttagtgcttcagatatttacgggatatccactcttgtaaatcctcagtatatttcgagtgtaaaacacaatggaagctacaccaatgtaagctttggaaatggtgaaaataagtataatattgttaatcgaaataatcatccctcccaggattttcatttgccaaggctggataaattagttactgaagttataccaacagcagtgacaaaagaagggcaagcgccatatgcctatgctgcatttatgggacgctatactgcattttaccgactagggagtggtacccagtatgtaaaagacagaaacaataacatacatcttatatcaaatccttatcgttatttgatcggcggtactgtagcccaaccatattcgtctaatatgattattgcaagtaatcccggtaatgtatttgctgaggttaatgggccattatcaagttatggtgcgccaggggatagcggttctccattgtttgcttatgattctttagaaaaaaaatgggtaatggtcggagtattagatacatggagcggagaaaaaggaacaaacagtgtgtgggaggttcttcctctggagttccttgaacatacaatgagtaaagataatgactctccagttaagtttaatgcatccacagataaatcgttggcttggtcttttaatcgaggtactggtattggtgtcctaaaacagggaaatatcacatatgccatgcatggtcaacgcaaccatgatctggatgcaggaaaaaatctactgtttacaggtaagaatggggatattgatttgcttgatgatgtttatcaaggcgcgggttctttaacattcaaagatgactatacagtccactcatcaaaagataagatctggagtgggtctggagtcattatagataaaggagttacagtaaattggcaggttaatggtgtaaagggtgataaccttcataaacttggggaggggactcttctagtaagcgctaaaggcgttaatgaaggtggattaaaagtgggggatgggattacaatcttaaatcagaaagcggacgaacgcgggaatattcaagcttttagcagcgttaatattgctagcggccgcccaagtgtcatcctcggagataacaaacagattaatccagataatatcacatggggatatcgcggtggggtattagacatcaacggaaacgatcttattttccatcagctaaaggctgctgattatggtgcgatactagcaaataactcagcagattttgcgactgttactctagattatagcttgaaacctaatgatattgaactggagtcttgggctgaatcgcgaaacggcactattggtaatctttataaatataataacccctatacgcacacgaccgatttttttattcttaataaaagtaggtatggttatttccccgccaatcaaagtagtactgatgtttggaaatatgttggccacaaccagagtgatgctcaaaaattagcggccgatcatatcaatgccgctggttatgtgttccacggacagctgaaggggaatctgaatgtggaaaaccatcttcccagaggaagttcaggagcgttggttatggatggttctgctgataccaatggtagttttacccaagagaacgggcgtcttaccatgcagggacatccggtcattcatgcatataatgagcaatgggtcgcagataaaatagcacaactcggagaccactcagtcctaactcaaccaacttcttttcagcaggatgattgggagaacaggacatttgcttttcgctccctagtacttaagaatgccgattttggtcttgggagaaatgcgacacttactacaaatattatagcaaataactccaaggtgactttgggggacaaaagagtgtttatcgataaaaaggatggggctggtacaaattttaaacttgaagaaggtgagtcaaccccacaaaaagcatccgacaaaagcttatttaagggaggagtcaagcttgaaaacaactctgttctgaacattaatggagcattccgagggggtatccaagcaaatggcagtactgtaaatatatcatcaaatgatgctatactgggagatagctcattgtcagatacatctgttaatttggttaaaggggcaaacattcttgcaactaagggaattagttccgatagtgtaataaatatatctgatgccatatttaatatcaatggtcgtgctgatgaaacgtcccatgcacttcatcctgtgtataactcagccagttcatggaatctgaatggtgataatgcaagattaaatgtcggtccctacagcatattatctggagatatcaccgctcacggtgctggagttgtttcaattgggggagggggagagcttagcccggatttaacacctgaagaaaatatcttgctaagtgtatttaatggctataaaaatacctgggaaggagctttgaatgcagctaatgctcagatcagtatgactgatacgttatgggctatggatggcaattcaaaagcaggaaaattgaagcttaatagagcattggtcgggtttaatgatagtacatcacattttgtcacgttaacaactgataatttagattcgacaggatcagcttttgtcatgcgaacagatttcaagaattcagacaaactcgttattaacaaaatggcaacgggtgataataataaaattttgatgaactttcttaaaaaaactcctgattcaagcttgtttgacatccccattgtcattgctccgaaaggaacttcagatagtttatttacagcatcaactcagactgtagggtttagtgacatcactcccaacataaatatcagagagaataatgggcataaagaatggattttaaatggctataaatcaacgcaaaataagcagagaagtaatgcagcagcgacttttatgcacattaattacaatagctttattacagaaataaataatatgaataaaagactgggggacttacgagggataaatgataacacaggtagctgggttcgtttattgagtggttctggctctggtgctgaaggacttaaggacaactacactctgcttcaaatgggggtagatagcagacatgagttaaataacatgaatttatttacaggactcatgacaacctacacaaacacagatattagcacttcaacagctctgtatagtggtaatactaaatcatggggattcggtgtttatgctagtgggttatttccctctggtggatattttgatttgatagccaaatacatttacaataaaaataattacagacttgattttttaggtgcaggaattcaaaaatttcactcgcacacactttatgcagggactgaagttggataccgctaccgcctgacggactcgatatttatggagccccaggcagaactagttttcgggggagaaccgggtcattcctttaactggagtgataaaggaatggatgtatctatgcagcgtgataaatccaatttactcatcggcaggactggtattgtatcgggtaagacattccttggtaaggggtggagtatgacaactaagctaggattgaattatgagtttgatataactaaaagcgcagatacttacctcatggatgctgctggtaagcatcagattgacgggaagaaggatggtcgtatgttgttcagtgtgggggctaatgttaacttgggtgataatacccgtttggggctagaaactgagcgttccgctttcggtaggtataacacagacagtatgataaatgctaacctccgttactccttttaa

SEQ ID NO: 234988 - DNA, 957 bp, Klebsiella pneumoniae
atgacagcaaagctacccaaaatcagttatcccgtaccgtcaaacaaaaatggtcatgccttttcctctgcggaagagttgttatcgacgctcggaggggaaagctcaggactgtatctggtgggaagtcagggaatgtggcatggcggtatccatattactgatgccactattccctggtgcgccctgagtactgacagcgaagctgagaatgaatattgtcgtgagctctataaaggggaacaatttattcgttgtatggcggatggtgagatagtggcctggcgcgtcagtaaggactatgagagtgctgcgattgaatggtgcggtgaaaaactgttcctttccacttcctttgtgctggtgaaacattatatccagccgggtgatatggaagagagcggactgacatttttcactctgtatatgaatctggcgccttatgctgcttatcaacaacagggaagtctgtctgacagaaaagtggcaggcgtccagcgctattataccagtgccgaagatgtgcaggcagagcacgaagccgggaaactggataaagacacgcttgtcacgctgagtgacgctattgtcacccgcagcagagacaggcgtcagtttactgaagtgaccattgtcagtgagacgaaaaatacagcaggagacacccttgtcgctggcactaaagtctggacggtgtctgaccggggttctctgaaagcgctggcatcagcgcccgttccgtcctggtgggcaaaatgtactccggcttacaccactcagccggaaggggtggtgaagtgcacctcgcgtacagactgggcgtactatctgagccgggaagatgtgctgcactataaaaaggccggcaggctggcggcaggtttcccgctttcttacgagcccggtaatacggcgcagcaggtcatccgcccgggtatgggtggtgtcggatggtga

SEQ ID NO: 234989 - DNA, 858 bp, Klebsiella pneumoniae
atgattaaacgcatgtacgcgagtgtagtgttattcactatttttttttctaaagtcagctatgctgatgttacgatccaatccccgattggagggagtataactttttcacagaaaaaaaatggtgagcactgcgatgataattcatgggagaaaattatcttttccaatcatagttactctgctgatctcagtcgggatgaccgaacttacattgaagacggctcttcaaaagtatctccgtctgggaaatatttaattgttaatagtgtctctggtggaaccgtagaattcggagatggcacttcaaagtatgtagatagagcctattgtagcattgttgacatgagcaatggttgtatcgttagcgactgggatggagaagcatgtgggtatacctggacggaaggggaagatgtattagccaattcagaagatgcaggcgctgatgtttttgattttaattctatgcgaccttcaatcaataaaatgaaaaataaactatcttcattggatatcagacgtgcaagtaatatgcttcgttgtgatgctccctcaaaagaaaatatagataaatatcagcaattagcgaaagagaatgaaaagacaaaaaaaattgtaataaatgccatctttgattacttgcatagcattgaaaatgaagcatcgattaactcgaaggtatatttattcactgctccagatagtaatgctcaaactaaatcctatcttgtacctggagataaaataaaaataatacaatattcctctgataataaatgggtaaaaattggttataataattcaaaaggaacgccgtttgttgcctgggtcaaggttgactctgtaattaaataa

SEQ ID NO: 234990 - DNA, 387 bp, Klebsiella pneumoniae
atgctgcatatggataatggtccggaatttatctctctggcactggctgaatgggcagagaagcatgcagtaaaactggagtttatccagtcgggtaagccgacgcagaacgctttcattgagcgctttaaccggacataccgtacagaaatactcgatttttatctgttcagaacgctgaatgaagtgcgggaaatcacggaaaaatggttgtcagaatataactgtgaactcccgcatgaatcgctgaacaatatgacgccggaggaataccgccaacaccattatctggccgggatcgcaaaaaaatgcatggaactaaaacaggtctatttacatgtgctatttttagcgcacacaaaattcgcattcctgttttccttatga

SEQ ID NO: 234991 - DNA, 942 bp, Klebsiella pneumoniae
atgaaaactacgccagaaactcttcttaatcaatgggataatattatatataaggatggtggtttcttacaaattgatacacaacatcctctcgaatggcatattgggtatcaatcggctaatcaaagaacactattactggtttgtaacgcagaaattaatgctatcgaatcatctaaatcaatgattgtaagtcgtcgtcaaagagaaatagataatcgttggactttaacattcgaattaatgcgaaatgcagaacaagatgttttcgcgatcttttgttgtgacatcatcgaattctctcgtacagcttcagatgaaaaagaagcattgacatttgtcattaagcgttacaggcagtggagccgattgcttgaattgcaaaaaaatggattaatggatgaaaataagtgtaagggtttattaggtgaattgctttttttagaagaatacatgagttatggcggctcggtgcagaatgcagtacaaggttgggttggggcggaaggtgcagatcaggattttatgtattctgaaggatggtatgaagtaaagagtataggcatttctgcagctagtgtaactatttcttcactggagcagcttgattgtacactggcaggagagctcgtggttgtacgtattgacaaagtagcgccagaaagagaaggatcaatttcactaaacgagatggtttgtagaatatgtagtaagctctcaccatactcagacactctggaactttttcaacataaattaacgagttacggatatattgatattaaggaatactctgaacaaaagtactactatcagggaatgcaacgatatgaggtagacacattatttccacgactaacctccaattcagtgcctatagaagtactatctttaagttatgaattgagtttacctgcaatgtctaaatggttgaaaggttaa

SEQ ID NO: 234992 - DNA, 1833 bp, Klebsiella pneumoniae
atggatgcacaggaatttagaaaagactttttggaagaagtgaaaattaacgctactgcaacaggagaaggatcctgtgcatcttttgtttctgcattttcccgtcgcttacaagatattgaatttttatcggattttacgtcatcttattttgaagggactggaaaatataataaaaaaattcgagttgatggttattcatatgatgaatttgataaaactatgcatcttgttattgctgactatgatggttccacaagtgaagcatatttatcaaaaataaaagcaaaaaaaatacaaaagcgattggtaaattttacatatgaggcgcgtaataactctctacatcaacgtatcgaaatgagtagaccatgctgggatttagtggatttgatgaaggagaaggagttagaactgcgaaaatatagttttcatatatttacttcatcaattatcccttctgatgtaataaaactcgaatctgaggatattgatgaaatacctacagaatgccaaatatggagtattgaacggctgtttaatatttgtagttcggatattggacggaatgccgtagaaattgactttaaagagtacacttccaatggaatttcttgtctaaatgctagcgaaacaataacaaaagacttcagaagttttctttgtattattccagggacggtattggcagatatttatgataagtatggtagtttattgttggaaggtaatgtacgttcattcctttcaaccaaagttgcggtaaacaagaaaattcgaacaactattatcgatttccctgaaagattttttgcttataataatggtatctcagcaacagcgatgaatgtgcagattgagtcaacttctgaagggcaacgtcttatagcagcaaaagattttcaaataataaatggaggacaaacgacagcatcattatccaatgcgcggtataaagataaatgcaatctgaacgaggtgttcgtgcaaatgaaacttactgttattgaaaagattgctgatgaggaggcgataaaattaatacaagatatatctcgttcatctaatagtcaaaataaagtaagtgatgctgatttcttttcaacccatccgtttcatgtacaaatggagcatttttcccaaaaactctatgctagagccattaatggttcacaattcgacaccaaatggttctatgaacgagcgcgaggacagtatcttcaaaaacaaatgcgcttaactcgggctgagaagaaaaaattccttctgcaaaaccccaaaaatcagctaattactaaaactgatctagctaaagtaagaaatacttgggatgggtttccacatattgttagccgtggagcccaaactaactttatagactttgcagagaaaacgactaaagagtggaataaaggagatgtcgataaatttagtgataagtattttcaggaaactgtcgccttgcttttaatttataagtatatggaaaaaatgatcccaaatcaaacatggtatttacagggatatcgcgcaaacattattacttataccattgcctttatgcgcatgttgataaaaaaacaattcaacaataaagatttagatttaatttcaatttggagtcgacaggcggtacctaacaccgtacagcaaacattaattgatttatcagaaaaagtctattttaaaattacagaaagcacacgaagtgtggagaatgtaactcaatggtgtaaacgcgaagaatgctggaatagcgtcaaaaatatttcctatattttacctgattcgatagaaaatttcttgacagcaaatgataaagcattcatttaa

SEQ ID NO: 234993 - DNA, 1644 bp, Klebsiella pneumoniae
atggactcaaaaatgagcgaacaagttaagttaaaatcgaaatatagtatagtagatttgttcgctggtgccggtgggctcagctacggcttccttcaaacggaaagattttcgatcaaagcagcttttgaattgaatcctaatgctcggcagacatatcaacgaaatcacggcgagcatgtggctatgtatagcgacgtggaaaatgcactctctgagtcaatcagagcagaacttggacagattgatgttgttattggtggaccaccttgccaaggattctcaagtgctaaccgccaaaaaaatcatgcgatcagtcaaaataactcacttgtcaaaaagtttgtccaggccgttcttaatttaactcctaaagcatttgtaatggagaatgttagtttacttcaatccaaagttcaccgtttttatgtagatgagaatgatcaacatataattaaaaagtacaatatatcaactgaagatacggaaatccaacttcttgacaagcaattcctgtttgaagactctattaatatagttaatgacccaattaaaataaaaaaatatttatgggctgagaaagactatttttctctgaatgttgtttacaaagctcgcaagaatgaacataagctaaaagccacactagagaaacataaaaaaaacttactatctcttgcggaaaaattaatcatcaaggacgatataaatgatcatattactcattataattacctagcaggtaaagtaatcgttcaatactttaataatactaaggaagacaaaaaagctacacatttatgcattacaattgagcctgtaatcatgattcaacgaatgcttgctaagtccttggaaattcacaacaataaaataaatgttatagagtacacaacgaaacagggactagtggcaaaagttacatctatggcggtagttgattatatagagtcaatactaggttccgaagatagtggttatagtattacaaaaggtgtcttgtcagctacacatttcggtgtgccgcaaaaacgaatgcgctttgtaattatgggtgtaaagaaagaaattgctgaaaatattacattacccgtgggggattttactgaggatagttttagaacagttgaagatgctatcaaagatctagaaaatctcaaagtcgcaactacagttagcgaaggcagtattggtattcctatttctaagcagccagattctattagcgaattaggtcaacagcttcgtaattcgaaggtgctttataaccatattgctactgatactacgtctcacgcattagaacggtttaaagtcattcagcaaggttgcaatttccatgatttaccctctgagcttaagacgacatactcagatagctctcgcacacaaaatacaatttatctaaggttgaaatataatgaaccttcaggaacagtcgtaaatgtaagaaagtctatgtggatacatccgactcttgatcgtgcattgagtatacgcgaagctgctcgattacaaacttttcctgatagttttatattttgtggtgtaaaggattctcaatatcaacaaattggtaatgccgttccacctatgttagcaaaagctcttgctagacatttatgcggctatttagataagtaa

SEQ ID NO: 234994 - DNA, 264 bp, Klebsiella pneumoniae
atgacccaaaaaattaccgttagtgtcgctagttatgttcaacagcttgcaaatgataacaacgttacagctaaccgtgatggcatgagccgcgttgctgtggccattaccgcgcttgccgatgactctgtcgagctggataacgttgagcaattattggtaaaccttaaaaagaaaggtgtactcagtaaatctgaaattttacagcttcagggacgttacttccgcgaacaaaagcactttcataaaaaagctactgcatga

SEQ ID NO: 234995 - DNA, 651 bp, Klebsiella pneumoniae
atgacattcaggctgacgcagattgatgagttgatccggggacaacactatcacttagacgctggtgatttatgctattttttcggcgaatatacagccagacaacatgcagcctacagcgaaaccaatcagttgatcatgaacctcaagaagggtaacgagcgtcgagggttgcaggactaccactataaaggggctgcaataaaccgcgttgcacaaatgatcaccagcacaattggtaatattagtgattttacgtttgtccccgtaccgccttccaaatgccgggctgacgtagcctatgatgacagaatgacggccattcttcgtacggctcagactatgaacccgtctctggatttcagagaactggttctacagaaccagtcaacggctgcttcccatacttcaacagcaagccgcccgacacccgatgagattatggcaaactacagccttgatgccagtctgcttgcaggtatcaggagaaatatcgtcatttttgacgatgtgcttactgctggcagccattttaaagcgatgaaacagtttctgcggcaacacttacctgaagcaagcattctaggcctgttcgtggcgcgaacagcccgtgaggcagatgtaacaagcctatttgatcttgaagactaa

SEQ ID NO: 234996 - DNA, 894 bp, Klebsiella pneumoniae
atgtcacaacttgatttcggcagccagaaccctttcgaacgtgcgatttctccatttgaggagatggcagcgtacgaagcgctgtggaccgaaaaaggggcgacgttcaagactatcgccgataagttccgtcaggctccacaaggcgctgtcccttctgatttggtccccgaaagcacgattacaacttttaagaccaaactgaagcaaatcatgtctcgctacgctgtcgagaatattggtatccggatacatggtgctggcgaatatcctgagaagctgagagacgctcgtcacccgatcgaagtcctctactatcaggggtggtgggatctggtcaacacccggtcagtcgctgttgtcggttcaagaaaagtatcggaagaaggtgctcgccgtacccgccgactggtgaagtgtctggtggaagatggctttactatcgtctccgggcttgctgaaggggtagatactaatgcccatcagaccgcactagcgcttggtggaaagaccattgccgttatcggtacacctctttctcacaactatccgaagcagaatagcgagttgcaacgcaaaattcgtgataactatctgcttatcagccaagtgccattccagcgctatctagaccaagattaccgcagcaatcggattttcttcccggagcggaatatcaccatgtctgcgctgacagaggcgacggtcatcatcgaagcatcagaaacgtcaggtacgctgacccaagctcgtgcagcattagctcagggccgtaagttgttcatcctcgaatcctgtttccagaacccgtccattacgtggcctgcgaaatttgaggcattgggcgctatacgggtgaaggattacgaagacatcaggaaaaatctcgaatga

SEQ ID NO: 234997 - DNA, 282 bp, Klebsiella pneumoniae
atgccaacattatctctcatgggggataaaatgaacgtaacctcacccaaacttctggctcaggcagtcaggaatgctcgcaagcaacgtaagctgactcaacgcgaaactgcagatagtatgggcatgaaacaatcaacggtttcagagtttgagaaccatcccgagggggcccggttagatacgctctttaagctgcttgccgctctggaccttaagcttctgctcgtaagccggaggggcgaaaacaaatcgtctgatagctgggaccaggagtggtga

SEQ ID NO: 234998 - DNA, 705 bp, Klebsiella pneumoniae
gtgattcggactccgacagcgactcggattctgacagcgattccgactccgacagcgactccgactctgacagcgattcggactcggacagcgactcggactctgacagtgattccgactctgacagcgactcggattctgacagtgactcggattctgacagcgattcggattccgacagtgattccgactcggacagtgactcggattccgacagcgactcggattccgactccgacagcgattctgactcggacagcgattccgactccgacagtgattcggatgctgacagcgactctgactccgacagcgattcggattctgacagcgattcggactccgacagcgactcggactctgacagcgattcggactccgacagcgactcggactctgacagcgactccgattctgacagcgactctgactcggacagcgattcggattccgacagtgactccgactccgacagcgattcggatgctgacagcgattcggactctgacagtgactctgactccgacagcgattcggattccgacagtgattccgactcggacagtgactcggattccgacagtgactccgactctgacagtgattccgactctgacagcgactccgactctgattccgacagcgattcggataccgaaccgcaggcaaataatgatacccatacggcggctatcgataccgtag

SEQ ID NO: 234999 - DNA, 195 bp, Klebsiella pneumoniae; identical to SEQ ID NO: 179540

SEQ ID NO: 235000 - DNA, 435 bp, Klebsiella pneumoniae
atgtttaattctattcttgtcgtttgtacgggtaacatatgccgttctccattagctgaacgtattctccgtaaatctctaccgggtaaaaagattgattccgcaggaactaatgcactggttggtcatcctgcggattcaagtgcagaacatattgctcaactcaatcatttgtctttagaagggcataaagggcagcaatttacctcttcactaggaaggcaatatgatttgatacttgttatggagcgtaatcatattgagcatattagccatctagcaccggaagctcgtggtaaaataatgttgtttggccactggttaggggagaaagaaatacctgacccttataaaaaaagcgaagaggctttcgtttcagtgtttaatatcatccaacagtcagctgaaggttgggtaagtaaattatccatctag

SEQ ID NO: 235001 - DNA, 2172 bp, Klebsiella pneumoniae
atgtctttagaaaataataagcaagatgtaaaagataatgaagagattgatttgggacggttaattggagaactaattgaccacagaaaaataattatctcgattacagctctttttactctaattggtattgtctatgctctcttttcgacccctatatatcaggctaatgcgctgatacaagttgagcagaaacaagctaatgcaattttaagtaatttgagccaaatgcttcctgatagccagcctcagtctgcacctgaaatagctttacttcagtcaaggatgattcttggcaagactgttgatgatttaaatctgcaggcaaatgcaaaagaaaaattccttccggtactagggcgtggatgggcaaggttaactaataaaaataataatactcttaaaatctcaaggctctatatatcaggggcaacagatgaggacgatgctgaagtaaatctcagagttattagtaataattcatttgttgtaactggtgatgattttgaagttaaaggtgaagtaggcaagcttttagacgcaaaaggcctatctttgaaaattgatagtataagtgctccagaaggtactgaatttatacttacgtatgctacacgattaaaagcaataactgatttacaaaaagtatttagtgtatctgatcagggaaaagatacaggtatattaactttgtcattgcttgggagtaacccagagttaataaaggaaataattaatagtatcagtaagaattacttagaccaaaatatttctaggcaggctgctcaagacgcaaaaagccttgagttcttagatgcgcaattacctaaagttcgaagtgaacttgatattgcagaagataagttaaacgcatacagaagaaaaagtgattctgttgatttatcccttgaggctaagtccgtactagaccagattgtaaatgcggataatcaacttaacgagttaacatttagagaatccgaaatttcccagttgtatactaaagagcatcctacctataaggctcttttagagaaaagaaaaaccttacaagacgagcggagtaaattaaataaaagagtttcagcaatgccagagactcagcaagaggtattacgtcttagccgagatgttgagtctggtagagcagtttatatgcaactgttaaatagacaacaagagctcaatatttcaaaatcaagtgctattgggaatgtacggattattgatgacgcaataactgaacctaagccagtaaaacctaataagattttggtgttaattttaagttttattctggggataatattatctattggatatgtgcttctaaaaactttccttagaagaggtattgaatcaccagagcagttagaggaaataggcataaacgtatatgcaagcgttcctgtatctgaaacgttttcgaaaactgtgacggaaaatattggctggaaaaaacaaaaaaatcttgaaaattacggtttccttgcggtagacaatccagctgatttagctattgaagcgataaggggattgagaacaagtttacatttcgcgatgatggaagctcgcaataatgtattgatgatttctggggccagtcctaatgcagggaagacgtttataagttcaaacttggctgcggttatatctcaaagtggaaaaaaagtgcttctaatcgatactgacctacggaaaggatatctgcacagggtatttaacgttaataatactgcaggtctatctgattacttatcaggtaagctggatgttaaaactattatttcgaaatcaaaagacataggttttgatttcatttctagaggtacaacccccccaaatcctgcagagctattaatgcatccacgttttcaagatttagtatcatgggcaaatgaaaactatgatattgtgatcttagatacacctcctattttagctgttacagatgcagcaataataggtaattatgcaggaaccacactagtagttgcaagattcgaattaaatactgctaaagagattgctgtcagcattaaacggtttgaacaaagtggtgtacatgttaaaggctgtattttgaatggcatagtaaagaaagccagcagttattatggctatggatatagtcattatggttactcttatactgacaaggacgataaataa

SEQ ID NO: 235002 - DNA, 816 bp, Klebsiella pneumoniae
atgaaatattttattgctatacccacttataatggtggagatatttggaagttaacagcggcgaatataaagaaatattcaccacctgatgtatgtgtaaaaattgtcgactcaggaagtaaggataatactattgatatagctcaggaaatggggtttgaattttcaataatatccagtaatgattttaatcatggtggcacaagaaatttattagctgcggataatcgtttagattatgatgttgttatatttatgacgcaagatgctattcccgaacccaatttcatacaaggtattataagtgtgtttgacgaccctgctgttgcttgtgcgtacggtcgtcaaattcctcatgatgatgctaatccaattgcaagtcatgcgcggagttttaattatacaatgacttcatatactagtgatataaaatctatacatagtatggggttgaaagctgcatttatgtctaactcattttcagcatacagaatttcatcattcaaaaaattgggtggttttccatcaaatacaatattatgcgaagacatgtattttgctgcaagagccctcttatctggtcacaaagttgcctatgtttctaattcaatagttaagcactctcataactactcaccattcgaggaatttaaacgttattttgatattggtgtatttcacaaaaatgagccatggattagagaaaaatttggcagtgctggaggtgaagggaaaagatttattatatctgaaataaaatttctattaacgaaatcaccaaaatggctttttttatcaattattaacaactcctag

SEQ ID NO: 235003 - DNA, 1062 bp, Klebsiella pneumoniae
atgcacgtagaagactatatgaatgaaacacccgcctgtctgctcgctatgctgacgcagacgcgggaagatctctggcaggcggcaaaagcactaacggagcgcggcgtcacgcgtattatcctgaccggctccggtacctcttatcacggcgcgctgaccgcccgctcgtttatgcagcagtggtgcgggctacccgttgatgtctactggccttttctgctggatgattcggcgctgaccctcagcgacaaagcgctggtcatcggtatttctcagggaggcggcagcctctctaccctcgccgcaatggaacgcgcccgggcagccgggcatcttaccgcttccatggccggggaagcgccagccgttatcgaccgggcggcagatttggtcttaacagtaccctgtggagaagagcgggctggcgccaaaaccaaagggtatcactgcaccatacttaatctgatgctgctggggcttgctgtcgccagtcgccagcggcgcctgagcgatgaggagcgcaaggcgctactcatccgcatggataccacgtttaatcatttgccgacgctcattgaggcctcgcaggcgtgggttctcaatcatgcccgaccgcttatcgacagcgcggacattcgcctgaccggtccggcaaggctgtttggcaccgttcaggaaggtgcgctaaagatgcttgaaacgctacgctgtccggttgccggttacgaatttgaggagttcatccacgggatctataacgccttcgacgagcgctctaccctgatcatgctcgatccgtttcccgatgagcgtcaggatcgcctggcggaaatacttggcggctggactcagcatatttatcgcattggtccacaagtcgaaaataacggcaaaaatatgcccttcgcatttattaacgatcccgactttgcggtctttgaatatattattccgttacaaatggtttgtgcccgactgccgccagtgaagggcatcgatcccgcaataccgaaggatccgcagttccaccagaaaatgaaaagtaaacaactcaattaa

SEQ ID NO: 235004 - DNA, 855 bp, Klebsiella pneumoniae
atgagcgaaatgacgcaaactgtgactggcgctacccagccgcaaagcgatgatgcaagccgcatcaccgcccgcgatttacgcagcgtgttctggcgctcctttacgctacagggctcctggaactacgagcgccagcagcatatgggctatgccttcgcaatgtcgccagccctgaagcgcatctatcaggacccaacggagctggggcgcgccctgcagcgtcatctggtgctgtttaacaccacgccccatctctcgacctttatcttcggcctgtcgattgccatggaagaagagaaccagcgtaaccccgaatttaatgaggagtcgataaacgcgattaaaaccagcctgatgggaccgctggcgggcatcggcgactccatattctggggatcattaaaggttatcgccgccgggatgggtatctatttcgcccagcagggcagcctgctgggaccgatactggcgctgttagtttataacctgccgcatcttttgtgccgctggtatggcctgaagctcggctaccgggcgggtacgacctggctgatgagaatttaccaaagcggccttatggaccgggtgacctatatcgcatcaattgttggcctcatggtcgtcggcgcgatgaccgccagcatgatagatatcaccaccccgctcagctttaccgccgggcagaccaccatgaaggcgcaggagtttattgacaaaatacttccttcgctgctgccgctgcttttcacccttgggatgtacaagttgatccgcaagggagtcaatattaactggatcctgctaggaaccgtcgcgtttggcatggcggccagcgcgctaggcctgctttaa

SEQ ID NO: 235005 - DNA, 939 bp, Klebsiella pneumoniae
atgaaaaaatatatgactggcgcagttcgtttatccgcaatggtcgcgggcatgatgatggcatggcaggcagcggcggcgcagccgaaagagctcaatctgggcattctcggcggccagaacgccacccagcaaatcggcgataaccagtgcgtgaaggccttcctcgataaagagctgaacgtggataccaaactgcgcaactcttccgactattccggggtgatccagggcctgctggggggcaaagtcgacgtggtgctgagcatgtccccctcctcctacgcctcggtttatctcaataatccgaaagcggtggatatcgtcggcatcgccgtggacgacaaagatcagtctcgcggctatcactcggtggtgattgtcaaagccgactccccgtacaaaacgctggacgatttaaaaggcaaagccttcggcttcgccgatccggattccacttccgggtatctgatccctaaccatgcgtttaaagaaaaatttggcggtaacgccgacaacaaatacaacaacaccttctccagcgtcaccttctccggcggccatgagcaggacatcctcggcgtgctgaatggccagttcgcgggcgcggtcacgtgggcctcgatggttggcgattacaacaccggctacactaccggcgcgttcaaccgcctgattcgcatggatcatccggatctgatgaagcagatccgcattatctggcaatcgccgctgatcccgaacggcccgatcctggtgagcaatgcgctgccggcggactttaaggcgaaggtcgtggcggcagtgaaaaagctggacaccgaggatcacgcctgctttatcaaagcgatgggcggtactcagcacatcggcccgggcagcgtggctgacttccagcagattattgatatgaaacgcgagctggtgagcgcgcgttaa

SEQ ID NO: 235006 - DNA, 324 bp, Klebsiella pneumoniae
atgactgatatcaccgaactggcgcagagcctgaaagcggcggcagagaaagcaaaacatgcaggggagactccgataatgtctttcgatgctcggatctccgcgcttaacgaataccagattacggcatgcccagacaatatcctcgcgctggtagaggcgctggagaaggcgcagcatcgcatcaccgagctggagtcccgcaccgtgaagctgccagagtcattcaaactggctaaatcatcgagcggattaatgtactacttcgccgacgaggtcgatgcagcgattatcgccgctggcatcaaggtggaggatgagtga

SEQ ID NO: 235007 - DNA, 231 bp, Klebsiella pneumoniae
atggaaaataaaccagagtggcagcagcaggctgagaaacttgctgagctgtacggaacaagcttcgtgatattcaggaatggaaaggagcctgagtgtgtcgatcccacgaaagtggtgctttcatttgttgccgaaagcaaaaggcgctttgacgagttcaaagaaaccgtgcggcaggaacacgagatgggagccaggctgaccaggcatcgctttataccgaaatga

SEQ ID NO: 235008 - DNA, 675 bp, Klebsiella pneumoniae
atgagcatttatcaacgcattaacggcgctgactggcgcaatatctgggttgttggcgacctgcacggctgctacaccaacctgatgaaccggctggacgctgtcgggttcgacccagcacaggatctgctggtttcggttggcgacctcatcgaccgcggcaccgagaacgtcgaatgcctcgacctgattaatcagccatggttccgcgcggtgcgcggcaaccatgagcagatgatgctggatgccattgctgctgggtacgggcgatgggaactgcactggaggcagaacggcggaacctggtactacttcctcaacccggaggaggagattttggcaaagtcactaatccgcaaagttgcagaactgccgttcatcatcgaggtggagaaggacggcaagaagttcgtcatctgccacgcggattacccggacgatgattacgagttcggcaagccagtggacgcagatctggtgatctggaatcgtgagcgagtgagcgcagctcaggatgggattgtgaatgaaatatccggtgcagacctgtttatttttggtcacaccccggcacgtcagccaagccagtacgccaatcagatgtatatcgacactggggctgtattctgcggccgcctgaccttggtacagatcaagggtggcgatcatgcgtaa

SEQ ID NO: 235009 - DNA, 207 bp, Klebsiella pneumoniae
atgagtaaacacaactattacacttatttcgagggtattaacaaagatggagttgccgtgtatagcggcaatagcagcttctacactgagccatcctgtgctgatggcgagattattgaagagcactccaggtacttgcttctcgttgctcaacaagcaaatcccaaggttttacgaatagtgataaagagcatcacaaaactgtag

SEQ ID NO: 235010 - DNA, 657 bp, Klebsiella pneumoniae
atgcccgtatcacttagcgctcagcttggcagtaaagagcaggccgacgcgcaattggcgcagtcgatcatgtccgctatgcgcgtctctatgcctggtatcatccagtcgtttgaccctgatgccgtcactgccgttgttcaaccagccattaaaggctcagagcaggacgaatcaggcgcagatgtgtctgttaacattccgctgctggtggatgtccctgtcattttcccccgcggcggaggctgcacgctgacattccccgtcagcgccggcgatgaatgcctggttatctttgccgaccgctgcattgatttctggtggcagagcgggggcatacaggagccggtagacgagcgtatgcacgatctctcggatgcgttctgtatcgtcggcccgcagtcgcaggcaaagaaaatcggcggtatcagcactacagccgcgcagttgcgtaccgatgatggctccgcaatcattgaactggccgccggcggtgcagtgaccatcaccagcccgcagataaccatcaacgggcctctgcaggtcaatggcgaaatcacatcaaccggcgatcagctcgctggcggtattagccagatcggacatacccacggcggcgttgagcctggcggtggtagcacgggggcgccgcaatga

SEQ ID NO: 235011 - DNA, 582 bp, Klebsiella pneumoniae
atggcaactaacgattttaaaccctttgccactggcagtggggctaacgtattatcacaggctgattatgaagcgctttcagctctatcatcagggttcctttctggtaaagcctcttcagcacaggtaaataaagctctgcggcaagggacatttattgcatcttgtctggcacagttcgtgtcaaatgaacttaatatcaatattattgatggcggtgatgcaaatgggtttctggcaaacctgatcaatgccttaaactccaggagtggtgctgtagttgatgaagcctttccaaaaagaacattctctgccaatgattatattcgaattccggatgtaccaggaggtttgattatacagtatggctctggtgtctttaattctacaagcggaacggtcacatttccaaccccattcccgaatgctgcatttgcttgctttccggttaaaaatacatcagatgccgctagatatgttagctacagcaacttaacaaagtcctcctttaatgtatatggatggataagttcaggggcggggaatgttgataactttaactggttagcaataggatattaa

SEQ ID NO: 235012 - DNA, 252 bp, Klebsiella pneumoniae
atgttgaaaatgacattcaattttaacggcgtgacggtaactgacggtgtactcaatgtgattatgccctcaatcagcacggaccagacaacactgagtttcggactggcttaccgggtcagcgaaagcgatccattgctcaactcggaaacgtacagttgcccgtatgacctgacgggagcggaccctttcgcacaggcatacaattatattaaatcgctcagccagtttaacgatgctgttgaagcatga

SEQ ID NO: 235013 - DNA, 267 bp, Klebsiella pneumoniae
atgagttttacagtctctaaaaaaatacgtaaatgcggctactaccctgatttaggtattcaggagccagcagaggacattactgtcgatgtgacgtacgaagtgaccgggataaaaagtgtttacgggcaactgggtattgccacctacagtatgtccactccagagtgttccgtagcgggtgaaagggatttcgaatttgagtggtcaggtaccggtaatccactggaggccgcagagttggcccttgagaaggcgttgcagtaa

SEQ ID NO: 235014 - DNA, 141 bp, Klebsiella pneumoniae
atgaaatttggcgaagctcttgaggcagttaaatctggcgcgaagatttatcgcgaaggctggaacgggaaaggtcagtttgtcattaaggcaggtggatacaccgtcagcgaacctcgccccggcagtgattatgcatag

SEQ ID NO: 235015 - DNA, 195 bp, Klebsiella pneumoniae
atgcaaccacatcagcagcgccttgttcacgagcaaacagaacttcaggacaaatccactaaactggcagagttcatcaaatcatctccgatctttgcaggtcttgatggtaatcagcagggtctgctgaaagcccaattgggtgcgatgcaagcttacggcgagattcttatcctgcgcatcgctgcgttctaa

SEQ ID NO: 235016 - DNA, 309 bp, Klebsiella pneumoniae
atgattaatggtagggatgagatttttgctgtcaagggggccttttctaagcccgatgcgtccaacttggagtcaatttgcgcgaatattgagataaaattgaacgaaatgtatggtccaaaacaaggagaaaaggttactgctttatggaatccaattagattttacatttttagaagcacaacttcatctactggtgagatctatgacattatgatcggtgtacatagtaccgcagccgttgcccgcgagggacgagaacaattaataaagcagggctacgatgtaggtgatttggttgcttggtag

SEQ ID NO: 235017 - DNA, 513 bp, Klebsiella pneumoniae
atgtcttattatattcgtagtgtcaaatctgatttttgggaaggtgaattaccggagggtggtcatctctcaatgtcggttgatggaattacaaattgttgccaaacatcttcaaatgccttatctatttggaaaacagatagcttagacgtatatgatgataataataagagattacttgctgcgatagctctaatttatgataaacccagacctttaacttttgtttttttatcagatgaggagttgtcttctattggtgtaacgctacaggagacccctggagcaacgcctgttgaggattacaaggaaaaacacagagatatctgcaaattaactttagattctattgggaaattagcttggatcatccatgagaaggtcaacagtgatgactattataaccttgttactgaggatgaagtttccgggtttacaaaagagatgttccctgacattgactcacttcctgaaaaaaataaaatccagaagaagtggcgtggtttatattaa

SEQ ID NO: 235018 - DNA, 657 bp, Klebsiella pneumoniae
atgagtatcgagctaattttagatgaaaattatatatcaaacgatactaattatcttggggtgaatggcagtcgcactttggctgatataaagattcataataatgaacattatgttttaaaacgaaaggatgtaacagaggttgttattggttctctcggggggagtgtcgatggaaatactggttttgttggcgaatataacgtagataaagccgaattcagtaatcaaacaaataaagttgtcaatgaaatttatcatcactttcttttggagaaaatagaacttggttgtgagtctaaaacagcagaattggtaagcaacctcattgatgagtatgggtataagtttgttgatacggttctatctcaacttatggggaaacatattatatcttgtggtaatccaattattatgtgtaagtttttaactttacttactgagatagatgctaaactaatcccaataacatctagttttgccattacttcatttgctcacaaaaaatataactccgttaaagaaatgattcttatggctattgaattatggaaacataaagatgcactcgtattactcgaggatatggagccttatagtaggagacctcttgaacaatatcggttgaaaattatagagatgcttaagagggtataa

SEQ ID NO: 235019 - DNA, 693 bp, Klebsiella pneumoniae
atggatttggtacttttctcatttaatattaatgtttttacacagcatgctattttaaagccagagtcaaggtcagtgatgaagctaatgccttttattgaagaaggtttttttcccagtcacggagatgcttttaataataactcaggctcgagtagtaaagtgttgaaagttgataaggaaatggacggttgccgtctgtctgttattttttcactttggtctgtaaatatcataattgaatccccggtttttttggaacagtcacgactcattaccaaggttgagtatttattctctttgattaatgatagttttgtcggtgataatatattggggaatcggcttgcagcaatattgactattggacttaaacattctgataaagttgattctcatatttaccacaaatacttaaaaggaaatgagattccatttgaatggtcggtgagacaagcatatagttgtcaacttttaaatgaagaaatatttaatatagtaaacataaccaaagggaatgcaaccatcagttacagcggaaaagtctttgagggtgatgctattgttattaacattgataacaatacacagcaaaataatacaaacaaaaggttttctttcaaagacacttcttttttaaaagagttggtaagtaagacccttagcgactattcgtcggtaaggggtgagtaa

SEQ ID NO: 235020 - DNA, 627 bp, Klebsiella pneumoniae
atgatttttaacgctgagatggtgcgggcgctgctgagcggcaggaagacgcagacccggcgaatcatcaagccgcagccagaggcaacattaagcggaagtttatccggtaagtggttaagcagacctcttaacggactgttgttgccgaaaattgaagatatcgcaatccattgtccgttcggtgtcgtcggtgatcgcatctgggtgcgagagacgtttcaggggccactgttcgactacgacctaatggatagctattgcaaagaccccactccgtttgagaagcccgaattctgcgtttacaaggctgatggagtgccagcgccagagttttacgatgcagatgatgaactgcattgctgctggcgaccatctatccacatgccgcgctgggccagccgcattcttctggaaatcaccaacgtgcgggttgaacgactgaagagcatcagtgacggcgatgcgctacgcgaagggtgcagtgccgccgacatgaagagtggcgactgtgtagctgatgtattcgcgcgcctgtgggcatcaatctacggttcagatagttggaatgccaacccctgggtttgggttatcgagttcaagcgcgttgaaggcggtgcagcatga

SEQ ID NO: 235021 - DNA, 2502 bp, Klebsiella pneumoniae
atgcgccacggcccggctcataccgttaccgtcgtcagcctctccatcctgctgggcggacagagcgcgctcttgcacgcccaggcgacctttaatatggatctgctggagaaaaacgaccatttgccggcagtggatctgcaacgcttcaatcagcaggcgggccagccgccaggcgtctatccggtgagctggcaggtcaacggcgtcacgctggacgcccgtaagaccgtcacgtttcgccagaacgatcgcggacagctcacgccctgccttaagccggaagatctgctgcaggccggagttaacccggccgtgctgtcccaggcgaccggcgcaacgtcccgctcatgtcccgagctcaacgcgctgctgccgggcagcacggtcaatttcgattttgctcatcagcggctggtaatgaccattcctcaggcgctgatgacgcaccgggcgagggataatgttccctctgcgctgtgggacgaaggtattagcgcctttcagagtaactatcgttattcaggcgccagccagcgtacccgcgagggcagcaccgagcgcgataactatctgatgttgaaaagcggcgtgaacgtcggcgcctggcgcctgcgcgccagcaatagcctgaccgccaacagcgatgataagccccagtggacgaccagcggcgcctggcttgagcgcgacctcacgcgctggcagagtgaactgaccctcggggataccttcacgtcgggcgatgtgtttgacgcggtacagtttcagggaatatccctcgcctccagcgatgcaatgctcccggactcgcagaaaggttttgccccgaccatccgcgggattgccagaaccaacgcccaggtcacggttcggcaaaatggctacgtgctgtatcaaacctacgtcacccccggcgcgttcgtgattgacgatctttatcccaccgccagcagcggcaatcttgaggttgccgtcaaagagtcggatggcgaaatccgccgcttcacccagccgtatgcttcggtgaccagcatgcagcgcgaaggcagcctgaaatacaacctggtcgccgggcgctaccatagcgacgatgccagccagcgaccgttgatgatgcagctgtcgctgatgcgcgggttcgcccataacctgacgctgtttggcggactgcagagcgcggcgcaataccataacctctcggtcggcgaaggacaggggttgggagaagccggggcgctctcgctgcagctgttaaacgcccgcgaccggcaccagcaggatccgatcgatggccgggcctggcagctccagtacagcaaaggttttgatcgtctcggcacgcagttgactttcaccggctggcgttattcgcatcagcgctatgccacgctgagcgaggcgttttccagcccgggtaacgaagacgacctgcaggatagcgacaacaaaaaagcaaccctgcaaatcaccgccagccagagcctgccgtacgatatcaccctctatctgagccttgaccaggacagctactggtcagggggcgcctcacagcgtaccgccaatatggggatcagcagccaggttcacggtatcgcgtggtcgctcagctacagcgactcccgcagcagccacggtgacgaggaggatgacgagccgcattccgacaaagtggtgacattgtcactttccgtgccgttgagccacctgctgccggggagctatgccggctataccctgacctcctcccgccacagcgttggcagtcagatggtcagcctcaacggcacattgctggacaatcacgcgcttagctacgccgtcagccaaacccgcgatcggcaaaacgggtccagcggcagcctgacggccgggtacagcagtggaagaggcgatctgaatctcggctacagccacgattcgcaggccgctcgtctgaactacggcgccagcgggggcattctgattcaccgccacggggtagtctttacaccggaaatgaatggcgctgtcgtcctgattgacgccggtggcgccgggggtgtgaccctcgccaaccagaaaaccatcgccaccaatggtgacgggtacgccgtgctgcccttcgccaccgcctatcaccgcaacgacgtgtctctcgacagccattcgctgccggagaatgtggatctggccaacagcaccgtgacgctggtccctaccaaagacgcggtggttctggcgcgctttcacacccacgttggctataaggcgctgtttacgctgcagtcgcggggacaaccgctgccctttggcagcgaagtacgcgctaaggacaccaacagcatcgttgccagcgagggtcaggtgtacctggccggcctggcgccaaaaggcaccctgtatgcgcaatgggggccaggccctcagcagcgctgtagcgcccgctacgatctcaccccgacgctggcgcagaccccccatccactcatcttacagcagacgttatcatgtcctttttaa

SEQ ID NO: 235022 - DNA, 216 bp, Klebsiella pneumoniae
atggtggcggcagtgggtgaattccagatgccagcccgcttcgggcgcgccgagcattatcccgctgaatccttcatgatcggtaaagctgccgagctgctcgagtcccagcccggcgcaatacatgctggcggtggtgtccagttcgctgaccggcctggcaatgcgcatatgacagaacgacataatgactcccgtgagcataagttgagttga

SEQ ID NO: 235023 - DNA, 678 bp, Klebsiella pneumoniae
atgattgaactggagcagttggtcgccggctatgacggggtagcgatcacccctccgctgagcgggatgatatgccccggcagcctgacggcaattgttggcctcaatggctgcggaaaatcaacgctgctgaaaaccctcgccgggtttcttccgccggtcagtggccgcctgcgctggcagggaaaacggccggtgatcggctggctggcgcagcgccatgccctcgagtcgcagtttcctctcaacgtgcaggatgtggtaagccagggcgcatggcccggcgtgtcgctgctgcgcggtctggggggcggcacccggcgacgcatcggcgcggtgctggagcgggtcgggctggcgggcctggcgaaaacgccgatcgaagcgctctccggcggccagtttcagcgcatgctatttgcccgggtgatggtgcagcaggcgccgctggtgatgctcgacgagcccttcaccggtatcgacgaagcgaccagtcgcgaactaatggatttgatcctcgagatgcaccggcagggacagaccatcctggcggtgctgcatgataaccagcgggtggccgactttttccccgagacgctgctgctgactccccagcgcgcctgctggggcgctacccgggcggtgctcccggccttcagtcatgtgaggtcggcatga

SEQ ID NO: 235024 - DNA, 183 bp, Klebsiella pneumoniae
atgaaacgtagtgcaatagtggtcgcgctggccctcggcctgatggcgcagggggccatggcgaaaacgctgaatgtggtaagcagtttttcggtgttgggtgatatagcgcagcaggtcggcggggagaatgtccatgtggataccctggtcggtccggacggcgatccgcacaccttctaa

SEQ ID NO: 235025 - DNA, 294 bp, Klebsiella pneumoniae; identical to SEQ ID NO: 189183

SEQ ID NO: 235026 - DNA, 618 bp, Klebsiella pneumoniae
atgaaagaacgcggaatgatttttaacggggagatggtgcgggccattctcgacggacggaagacacagacgcgccggattataaaggactgcacggtcggaagagaccaaatttcaaaattcattcagatcgagaagaagtttatcggctgctacccggaagatgtacctgaactgatcagggaatgctgcccatacggagtaccaggcgatcgcatctgggtgcgggagtcctttcgggtgcatagccgggctacagacgtcgccaccctggtatacaaagccagcgagcgaaattcgtggacggagcaaacccaccgtgtacccgtagctgtctgcaataaaccggcaacgcctgagaaatggactccttcgctgcacatgccgcgctgggccagccgcattctgctggaaatcaccggcgtgcgcgtggagcgcctacgcagcatgagccaggacgatgcacgcgccgagggtgttattgccgcatctggccctatggaagccggtttagcattccgcgagctgtgggactcaatctacggcgaggagagctggaaagccaacccctgggtttgggttatcgagttcaagcgtgttgaaggtggtgcagtatga

SEQ ID NO: 235027 - DNA, 276 bp, Klebsiella pneumoniae
atgaaatttggcgaagctcttgaggcagttaaatccggcgcaaagatttatcgcgaaggctggaacggtaaagggcagtttgtcattaaggcaggtggatacaccgtcagcgaacctcgccccggcagtgattatgcaaaggcggggatcacaggcgagtttaccattgcgccacacctcgacctgaagaacgcacaaggcattatgcagcctggctgggttccgtcgcagggcgatctgtttgccgatgattggctggcaacgcctatcgattaa

SEQ ID NO: 235028 - DNA, 633 bp, Klebsiella pneumoniae
atgaacctgaacacgataagaaaagcgatgccatacataatccctgaagcagatttcgacagaaaactgaacatgtcggagagaaatgttactcacaccgaagactacattgcaaaaggtgtgaatgactttactctgccagggtttactacgccatatggttatcgccttgttaagtcgatcagagatgaccattacaggctgatcacagacagcgaaaatcctgagacagtctacgcggtaaaactgattttccgcgaagacatcgttgaaaccagaaaaagctgtactcagattttagtctggcgtacgcctaacgtgattcatgaccgagctgtacatggcctgcctcagatcttcttcgcgttcttccttgaacactatgcgatagtggtatctgacgagcagcaaacgttagatggcagaagattctgggaacgaatgatctcatgggctataaccactaatggttatcatgtatacgtttctgatgggactgaaatggatcgtccattaacgtttatgacatcatgggatgatttctatagcgtatgggctgacttctgctggggtaatgaccaagatattcatacccaccgccttctggtaattagcaaagaaaaactccattaa

SEQ ID NO: 235029 - DNA, 1359 bp, Klebsiella pneumoniae
atgataaattatactgatgagtcaacttttcttgaaaagcacaaaccgtttaggaagttttggacaattttatcacctcattatgtatctttactgcatgcacttgccaaaatgataaggggagggaatccaattcaagagctaccttccaatgatgaggattttcttgcagggtatgaaacctgtctcaaaaattggaaagacacacaaaaaatcatatcttttgagattattattcggctgagagatataaaaagattggaagttgaaaaaaaagaacatcatcgaaacaaggataaaggaaacaaagaaaagtgtattgatgaaataaatttaaaaaaatttgaaattcttattcttcgccgttgtattgactcaataatttggagcatacttgacgaagatcactcgagtttgcggcgtttgcctattaatgcaggcaatgacaatctatcagaagataacataattgattctatggtcgcagccgaccttatcaaccaggacaaacacgccgtagcgattgtctctgacatgagcacatttgttcatgtgggggatttagtcacctttaatccactggatggcttccagctcgtggaggttaaaacaggtgaaaagaataatgagctttatgaagctgctgaattttctgttatctcagagtgtccgcactttgaagaaaacttcattaacaatatgcctgacaatgatgttaagcaatttaatcgcataaaaaggcaaattattcgcggcatgaatgtgttggaggcgattaatactggcgagggctttgacaaccttcatcagtctaaagttaaaatcgatgagatagatcatccctctgaattttatacccaccgcttagttaaaatgtgggagattattcgcggaggaaaaaattgggcaattgatactattgatgagtgtttgttcttaggtatgtaccgtgattctgaaatgggctttgttgccttcaatggatggatggatagtctcggtataaaaagccctgttgtgaatataaatgattcattctttgaccctttgtctcggccatttatgagtttgcatctgccaactgaaatgctctccgatctcatgtcgggacaaataatcatcgtcatgtgttttgacaatgaacttttttttcaccgtgctaacaaaacgtacccaggtttattgctccttagcaatgcggcaagaacaaagcagccattagaaaatattcttcatgttggttcgcaagggatagcttcttacgtagatgggcataccagctttttaggtaatggtattgaatcccgaatccttttcgatcagcaacgacccgacaacattattgaagtggtttactga

SEQ ID NO: 235030 - DNA, 789 bp, Klebsiella pneumoniae
gtgggtggcttctccattgcggatctcactccccaatgcacgcagtcggccaaaaccaatcccaatgccagcacgacgcgacacgtaatcgataatggcagaggacgcagcgctgatccctttcaaactgtcttcggactcaatcagaacgcagctggagaactggcgcgtcggggtacggacgccggccatgattggggtgggcagagacaatttgaatgtactggtgacgtcatagaaccccttcaccatttccagacgtgttttgccggcacaaccatcttcccaattctggaaaagacacatacccaccagcatatacagctgctgcggggcttcgtaaatttcgccggtgactcggttctggacgaggtacttactcgccagctgaacagttgcggcataaccaaagagttcgtcacgcatgggtttgatatacacgccaagttctgcaatctcttcgcgggagtaaaacttaagcaaatcctcatcgtaaacgccgcggctgacgttgctgacgatatgatgatagaaacttgggtaagcgaattcgccgaaggcgtctttgcgaattttgaacatgttcagacgtgctgcgacctgggagtagttcggagtttcaggcgaaatcagatctgcagccgacttgaccaatgcctcatgaagctgcgaagttgtcatgccgtcaaaaatgctcgcggctgcgcccatggctacggcagaggcgcttacgttacgtataccttctacaccccacatcacgacgcggttgtacttctcttcggatag

SEQ ID NO: 235031 - DNA, 648 bp, Klebsiella pneumoniae
gtgaaatcacaagtagaagggaaaaacggaagagcattggttaaaattttaagttcagatgagttatcagacctgaaaaaagagtatgctgaacttggaatcgattctctacttgattcaggcattctgaaagaaatcccactagtaggtaccctagttggactatataatgttgttggttctgttcgtgaccacatttttacagaaaaaattttccgctttttaactgatttttctgaaatccctgaagcggatagaattaatatgatcgatagacttaatgaagatgataaattcgccggaagggcaggtgagagaatgcttgagattatcgatcgtatggaaagtgaagagaaacctgagctggtggctacgtttctaaaggcattttcaagaaaagaaatatcctttgaagaattaagaaggctcttgtccgctcttgaaaggcttccttcttttgatctatcaaaattgcctgattttattatttttgataacgacaaggcagaaggtcaggcactgagtgaagcacaaatgctctcgttcgttggtgctggattgggtcaatttaaaggcggatatggtggtagtataatacgtccaacagaattatgtaagctttttgtcaaggttggaaaaataaattag

SEQ ID NO: 235032 - DNA, 975 bp, Klebsiella pneumoniae
atgaaagaattatatatggaagattccacccttgtcatagggagcgtagagagtgttggtgaatttatagatttaattgaagaatcgaatggtgaatgggtctatggtaatttattcagaggacaagctgacgctaagtggccaatattgtcttccctgactagagctattattccaacgttaaaggatatttttcaaattacgggtgtaattgatatcaactctgaaatgtttgagtcagtttttaaaaacagtaactatgcggataatatgaatgaaaagttgcaaacaatattctctgcttatgtaaactttaagcacctattgcctccttatcttggtgagatagaaaataaagaatacatattaaactcagatttatcacttattttattagcacaacattatgggcttcctacaagatttattgattggagccttaaccctttagtcgctctttatttttcagtggaatcatcagagccgtcaacggataatagtgcggccgtatttagctattcaccggaagataccctcactggcgaggagttctatcaaggttatcagcacggatttaaagaaaaacatagtcatgaattatctcagcttactaccgcaggcaatggcggttttaattttttggatgctagtaaatcttcctcctataagtttagaaaacttgcaatagaggaaattgattttatccagccaagtccggtggctataaatcacttcaggttcgacaggagaatggatagccaggaatgcatgtttagttttcaaaataaattattgcaaccattcagacctaaagatactgacaatctgaaaaagattgagataaaaaaaccttatcaaattaaaactgaattgattcaattaggttttgtaacttcaaaaatatatccatcagtttctggattggtgcaaactttaaggtttaaccatgttaataaaaactttaagctactttga

SEQ ID NO: 235033 - DNA, 375 bp, Klebsiella pneumoniae
atgaaaaaaacactaataattctagggatacttgtagcattggttgggttcgtgctgtttggcattccagcccttctctacggcgtaccacgcattgtctcaccctcgacagctgccgattgcactcagtacacgaacgaggatattactaaagtgattagtgaagatttctataagcgcttgcctacctgggataatgacgttggtctgttgaaaagcaaacatcctgagttaacgtttgaaaaaccgagcatttcaggcggatcattttttgttccattcaaggcaaccagtaatataaggacaattcaatattttgcctcgtttgactgtaagtacgatcgaattgaatactcaagtgataaaactgaataa

SEQ ID NO: 235034 - DNA, 1539 bp, Klebsiella pneumoniae
atgacacctccagacaaaattgataccacaagtctactaaccatactgggcgtcatcgctgcggtttgggctcttataactccaaatgcacgtcttcgcttgcggttttgtctggcttggtgggattgggcaattattgttacttcatttatcctaagtaattacttagtattcgcgccaactttgaaagcattgggtttatattttagctttggcccttggatgtggggattagatagttcaagtgccgtatatcttatattacttactgtatcaatttatcttttagttcgtttaaaaaatccaaaactttcatctagcaggacaaagatatttctcgaattagtcgaaaatttacacctaactaaaaaatatgatgatcttgctcaattgcttgcgccgcaattagagaagttaatatcaataattgataaacccgtaaagcggagctttcttaataacattgccgaaaaacttaggctaactaatagtgatacagctgcagaacattcacgcgaagcattaataaatattgtttcctcccctgaactcacaaatcattttgctcttgctcacccctctctatgcttagagttaatcaagattgagtcaaaaattcgttctgattttacttataatttcatgaactcattgctcagttcacctagcagtcgtctatatgttgaactaaaaaataatctcaacacaagacgagggcatcgcttgttgattcccgaaagcaaccgtatcttacactttttcttctctaacgctaagtttgctgatcaaacacagatctatcgtgatattggaaacaacctcttctggagacttgatgaggatgaaagccttataaaaaaccttaataaaccattaggttcctacaatgaggtgtccaagtataagtgtcccatatattctggcgtcactatgtttgaaatcatggttcatgagggtattcatcaggggcatcaagatcacctgtggcttcattactatgatcattttgcagatagaattttaaagaatatggacaaacaaacaaatgaacacattggtgagtgggatactccttttcattacctgttatgtcacttattcagtgtcgctactgattgggcagaacaaagtgcatatattgatgaaaaggatatttctcaagaaaatacaaaaaacaatgtgcacttcgacaagcactatatttcaaaagaatctacaaaattacttggtaacatgctgcaaaaaaccatgcccaataataaattaagtttgttaactagaaggagaattttgagttctgttgtatcttgttatattagattgaaaagagataagaacttaagtgatattgcttcgtcattattaaagtatgctaccaaaggcactttaaactccgcaagcccgaattaccgcagaacactactagaaatatttaacactctcgatgattatcaattgaagagcgaagcaaaggagtttagagcagcaattgaatcggcaattcaacaacggcctaacccactgagctacaccatctaa

SEQ ID NO: 235035 - DNA, 1167 bp, Klebsiella pneumoniae
atgtctttttggaatgactcttaccagagcgaatttaactcaataaacctttggattgataaaaacatcagctataaagataccgtaccaggcaatattcaagcacttaaagataatgagtttaccgaggccgtattatttcttacttgggactattttcgcaatttatttatatatcatagagattctctcaataaatatactcagtttaatcagcgctacttggggaatagagccctccccacattaaatactcttgagtcaaatagaataacttttttaagtaatcttataagaattacgtatgaacactatttttggactcaaaacactactaaacttcctgtttttgtagaaagcgagacactggaacggttagagcaaatatctgtctcctctgatatacaggctcaattcttgtggattgaacgcacaatgccagcttcattaactatgagtattatgtcatcggaagaatttgtcacattgaaaaagatggctaacgatgtcaccggttatgaagaaaaattcagccaacagatagaagccgggactcaaaaagccaatgaaactatagaaacaatatccgatagacttacaaaattaatcaataaatcagaaaattctcaaagagatataagcaaatacgttgataaactgagtgaatacaaaagcgagtacaattttgttttgttaagcaaggctttctcaaacctgttgaggacaaaaaaatcagaatgtgattcaaaccatatacatataataatattttcatccttattaattgccacacctttactagctttatttaatcacatttttaaatggtattcagttgattttaatctaaatgcattttcttattacctgcccatactttcactggagttattattcttttattttatgcgcctttattatattgaagaaaaggctataaaagcacaaatacttcaaatagagcagcgcctaagtctatgcgagtttatacatgactacgtggagacaaaaaataactccggtgctgaaaaggaatcttggtcgctgtttgagaagttgattttcagcccaatacaggttacttctgaaaatataccgtctttactggatggtgcatcatctattgccgagttagcaggaaaagtattgtccaaagattctaaatag

SEQ ID NO: 235036 - DNA, 1491 bp, Klebsiella pneumoniae
atggcaatgtatgaagtaggcaccataacaggtgcagcaaatcaggcaaagatcacaggcacttctaccaaatggtctgaaactgctcttggtattcaggagggttcgattcttgtcgtttatcgcagtgggagcgcagatctgtatgcaatcaaatctgtcgacagtgatacacagctgactctgacacgaaatataacgtccgctttcactggagtgaaatatggcattattacatctgaaaccgccagcacatcgtcttttgcgaaccaactagccagtgcattcactctttggcgtaatgttgtccagggatggtctacagcgctgactggaagtggcaatattacgatgacggaccctatcacaggagtttcagtgaccgttccggctatatcaggaatggcaaaactgtcaggcggaaacacctttactggtaatcaaacaatatctagcgatgactcgggatttatcctcggtagaaattccgatattggccttgtcaaaaagaacggtacttttggcaagttgatggttggtaaatctactcgcttttctgtcgtaaaaagcgcggcagaccgcatttcagctactgatgcccagactgaaatctttggcgtagatagtagtggtaatgcagaagtgatcaataacctttcggttgcagggaaggccactgtaaaaggggacattacgggaagtggaagcataaacgctgggactaaagtatctgcggccagtattgaattatcatttaccacgccgtatatcgattttcatttcaacaatagcacttcggattacacgacccgactgattgaaaatacagcaggtgagttaactcttgaaggtgcatttatgtgcaaaaggcacctgtacgcttggggcgcaatgatggccagaaatattgccccaggcgcgccttctaacggtcagttgctcactggcgcgccgttccagtcaatgatccaaggacgtggcgcgtatggagatgctcgcggcgcagttgcgaactactatattgaggaacgggtaggagaagagcatagggcggttgtctatctcgatggttatggtcgaacagatgcatggctttttcgaccaggggggacgatcaccaccggcaaaggcgacgtcatgactaccggttccgacgttcgcctaaaagacagaattacagaatcccaggaaggggcatccagacgcattaacgcgctgggagtctgcgagttcaatatgaagggcgaaacacgtcggaggcgcggatttatagctcaacaagcggaacaggttgactcgctttatacctttcaaagtggcgatgtagaaattgatggtgagaagatcaatatcctaaacgtagatcagacagcaattgtcgcagacctggtaactaccgttcaggagcaatacgaatgtatcgaaaaactaaaaggtgagatccaaaatctaaaggttttagtgatgaacacatcagcaaaagcggcttaa

SEQ ID NO: 235037 - DNA, 288 bp, Klebsiella pneumoniae
atgacaccagagttactaaatacaatagggctgacttctaatatttgtggtgtaattctaattttcttctttgggctgcctcagccatcacatgatgaaggtgtgtctttaggggtgggggacggtacgcctttgggagatggaacaacggttggggagaggaatgttaaaatccgtaggcgaaaagctcgttataaaattttcgcctacgttgcgctcagtttaatgctttttggtttcttacttcaatttttagctttgcatattgatctaattccatttcattaa

SEQ ID NO: 235038 - DNA, 1143 bp, Klebsiella pneumoniae
atgagttactccactttccgtttgggcgctaacgacgcaaccaaagagcctatgttcctcgggcagtctgtcaacgttgcgcgctacgatcagcagaagtaccgcgatttcgaaaagctgatcgaaaaacaactctccttcttctggcgcccggaagaagtcgacataaccaccgatcgcatcgatttcaatactaagctgcaagagcatgagcgacacattttcctgagcaacctccgttaccagactctgctggattccgttcagggacgcagcccaaacgcaacgctgctgccgcttatttcaattccagagctcgaaacgtgggtggaaacatggtcgttctctgaaaccattcacagccgcagctacacccatattattcgcggcatggtggatgatccgagcattgtcttcgatggcattgtgaccgacgaggaaattatcagccgggctatcagtatctctacagagtacgacaagctctatgagatgacctgcgcgcgccagcatctgggagaagatgaattcgaacggctctacgtctccgaatttgacggaaagccctaccctctccagcgccagctgttccgtactttggtatccatcaacgcgctggaggccattcgtttttacgttagcttcgcctgtacgtttgcttttggagaaaggaaattacttgagggcaacaccaaaatcatgcgtttcattgcgcgcgatgaggcgcttcattgcgaaggcacagaacgaatgctccggtttatgcgttcaggccgcgaaggcttgctatgggcccagatcgctgcggatgaggaaccattcatctatcagaccatgatggacgttgccgaacaggaaatgcgctgggcagattacctgtttaaagacggctcaatgattggcttaaacgccgatatcctgaaaagctatgttaaataccgaaccaatcttgcgatgcgccgtcttggcctgaaaccactgtacccggagataaaagatgacccgctggtgtggatgaacaaatggctgttgtccgacaccttgcagattgcaccgcaggaagctgagcaaagcacttatctcgttggccagattgactccgctgttgatcgcgctggcctaagccagtttgccgatttgtaa

SEQ ID NO: 235039 - DNA, 804 bp, Klebsiella pneumoniae
atggggtattttctgctatctgacgggttgctttctgtcgggagagagggagtcaaaagctggacagggatcattacacctcaggataccgtcgaggaaatgcagacgtcattcagggtcccgtcggaggatgattttgatggcgtggatgtgaaatatatcaaccctgtgacctgggcggaggaaaccgtacagtgccggacgccggaaaatccttttccgcgcaaaacggaggcatacaccattgatgttgccatgactgcagatcgcgcctggcgtatcgggatgcgtcggttaatgaaatatctccatcaacgccgaacgtatactgctacggcttcgatgctgggatggtgtcatgacttcggtgatcacatcattttgtccgacgacattcgaaccgggaaaacccaaagttgcctgattgacgcgatgatttacgacttccaggaaatcacgctgcacgtcacggagccactggactggagctacgtgaatcctcgctgctggatacagtttcaggacggtcgaccatcatcgcgaatgctcacgccgcaacgggtagatgatttcacgctgacggtgccgtacaacgacgacctgcatcccggcgactggattatggacgacccagatattgatctgccgaagttattgttctgcgacagtgaaaagggtgcgcggcatgggatagtccaggaggttgccccatcaggtgacagcaactgtcagattactgcacctgaatataaagaaattttctaccagtacgacgacgccacatactccggcgacgtcgcttaa

SEQ ID NO: 235040 - DNA, 702 bp, Klebsiella pneumoniae
gtgaacaggaaattaaaaacgttaatttatattgttgaatgcgcaaccatcctttttgttacttttaccatcatatcattgtatcagacgattgttgatcaaaaactatatgaaagaagtttttgcctaagtagtcaatgtctggataattttgcgaaagaagtttcaggaattgtgttgtattttcaagcgtttggttatctaataacgacatttgtaactgtttttggtgtaattattgctttaatgacttattattcaggtgttaaaaataataacaataataattacactgctcaccttacaatgtttcgcgaattctctagtgctgaactttccaaaagaacgagtatacaccctgaaggtataaacctatttcgttggtataaagtaatgtttccaagggcaaaggatggggacattgccgtatctaatcattactttgctataattaatgatattaaggatgttattaatgaggcaaatgcacacataactgatgaaaataaagattacaaatataaagttcatcaaagaaagatgataacagtacttggtgaaataggaatacgcattagcaatggtccaaaaaacactttcattgatattgaaaggcaagtttttgagtttattgatacagtgaatctatcatttagccatcagattgttgagttgagtaaaattgaaaggaaatacatttaa

SEQ ID NO: 235041 - DNA, 1149 bp, Klebsiella pneumoniae
atgcaagatgaaattaatattaaaaatgaattggaaagacttgctaacctactcaatgaaactccgattaaaaaaaagaaagattctgaatatatttcattaattgacaaaaccgtttttaaaataaaagaatctctaaacaacatcaatcacgaaacaattaaagacattgtatccagaataaatgatggacatcttatttatattttaagtcgtgacttttttaaaccagcatcagatagaaacaattttctcattcaatttatcagcacggctattatcctaaaaaccattgaacatctgtattataaaaaatcagtctacggagctagattgaatgattattttggagtgcagttggtttcaaaatttatggcatctacaaataaaacctctaaaaaaaataaacacaatcctttagatgatctttatctagaaaaaacaaacaattcaaaatccatcaaattgaatattattaatgagttgaataataaattagcatatcagaatgctgataatgaacgcctcaaagaacagacagatcttctcagaacacagttatatgaattaacaagtagttatgaaaaaatacaacatcaactaaacgataaattcaaagaggaagtaaaaaacacactcggagagtttgtttctgatgccataaaagaattaagagacaatgaaaaaaaatataattatagaagtcgtttatggttaactggaggaagtattattagcacattaattgtattaacagcatgttatttagtattctctatgaatgcatacatggatttaaattttaaccgtgttttgtcatggcccacactactttattacataggaaagggtttggttgtgcttagttccctcacagcactcgcattctattgctttaaacaatcaaatgcatatgtacatgaatccttaaaacaaggggaacgtgttcatgccattcgatttggtgagttgtgtttaaatttatacggcaataaaatagacgaaaatcagataaaaacagtatttgaagattggaacattaatagtagcactgcttttttgaaacttgggaaaaatgaaacattagacatacctaacaatatatcaaatattatcaaatctacaattgaaagtgtaggcaaaaaataa

SEQ ID NO: 235042 - DNA, 255 bp, Klebsiella pneumoniae
atggcattaaaaatgacattcaattttaacggcgtgaccgtggtagatggcgtgcttaatgtgattatgccatcaatcagcaccgaccagacaacgcttaatttcggactggcttaccgggtcagcgaaagcgatccattgcttaactcggaaacgtacagttgcccgtatgacctgacgggagcggaccctttcacacaagcatacagcttcataaaaaatcttggctctttttatggggcgaaagatatataa

SEQ ID NO: 235043 - DNA, 1263 bp, Klebsiella pneumoniae
atggcactgactgacgcaaaaatccgggcagcaaagcctactgacaaggcttataaactcactgacggggctggcatgttcctgctggtacatcctaatggttcccgttactggcgtctccgttatcgtattctgggtaaggagaagactctggcacttggtgtgtatccagaagtttctctctccgaagctcgtacaaaacgggatgaggcccgaaaactgatttcagaggggattgacccttgcgaacagaaaagagttaaaaaagtagtccctgatttacagctctcttttgaacatattgcacgacgctggcatgccagtaataaacaatgggcacaatcacacagcgataaagtactcaaaagcctcgagacacacgttttcccctttatcggcaaccgggatatcacaacactcaatactccggacctgcttatccctgttcgtgctgcagaagcaaaacaaatttatgaaatcgctagtcgtctgcagcaaagaatatctgctgtaatgcgttacgccgtacagtctggcatcatcagatataacccggctctggatatggctggtgcattgaccacggtaaaacgccagcatcgccccgctctgaatctttcacgcctgcctgaacttctgtcgcgtattgacggttataaaggccagcctgtcacccggcttgccgttatgctgaatttactggtttttattcgttccagtgaactcagatatgcccgctggtctgaaattgatattgacaatgccatgtggactattccagccgaacgcgaacctctgcctggcgtaaaattctcacaccggggctccaagatgcggacaccacatcttgtgccactcagtaaacaggctgtagccatactgacagaacttcagacatgggcaggtgaaaatggtctgatatttacgggtgcacatgacccgcgtaaaccaatcagtgaaaatactgtaaataaagccctgagggtgatggggtatgacacaacccaggaagtctgtggccatggattccgggcgatggcgtgcagtgcattgattgaatcaggtttgtggtcccgcgatgctgtggaacgtcagatgagccatcaggaacgtaacggtgtacgtgctgcttacattcataaagcagaacatctggaagaacggcgactgatgctacagtggtgggccgattttctggatgcaaacagagaaaaatttatcagtccatttgaatatgcaaagattaataacccattaaaataa

SEQ ID NO: 235044 - DNA, 264 bp, Klebsiella pneumoniae
gtggctaacgataccactccttatcttatggtgctgctacttaataacgatgtctggtgtaagagtcgtgaggtggtggttctcagaaatctgattgagcaggcgtggggaaaagtattggatgaagataactccattacacatctggttgtgtatcctgaagtgctgacgttggtatttgatgcagctaacacatacaacgctgagcctggtgtactggaacagacggcccgggcttacattgaaatcacatggtgccattga

SEQ ID NO: 235045 - DNA, 519 bp, Klebsiella pneumoniae
atggtgtatctggaggacggggatatccgggagagctttttccggcgactggatccgactgaacccagtcagagcagtgtgggaaaatggagtcagcacgtaggcggttttttagccagttttaatattggcaaggcgctgcctgtcaggatgacggtatgctgggactcagttatcgataaaaaggcgtatgagacggagatctggttcagccgggatacgtggcagcagatgctgactgcctatcctgatacttatcgtccgggaaaaatatattaccgaaacaaaatgattattggcctgccccccggtggtaaagtcagggtatggttaaaagacaatcgtaatcctgttgtactccagaatcctgcccgacagttcaccctgacgggagatgatatgctgatatgcaaaaatgttcccaacaagattgatttcagttacatcaaggctaacggttacgatccatttatccgcgattttatcaaggaaaagccctatccgtatggtcactggtag

SEQ ID NO: 235046 - DNA, 1629 bp, Klebsiella pneumoniae
atgtcaacgaagcaaaaattagaacttaactggattggtaagcataagcgtcctcgtctggagccgcgtattctgctcgaagataaggagttatcttatggtgatgcggatagtgagaatctgctgattcatggggataatctactggcgttgaaggcactggagcagaagtatgcggggaaggtgaagtgtatatttatcgaccctccttataatactggaagtgcttttacacattacgatgatggacttgaacactctctatggctttgcttgatcagagatcggttagaattattacgcactttattatctgaagatggctctatatggataacaattgatgaccacgaagttcattatttaaaatgtctttgtgatgaaatattcggaaggaataactttatttcaaatgttatttgggaaaaatccgatagcccaagaatggatgctgcatttttctcttctcgccatgatcacatattagtgtacgcgaaagatcagtcaaaattcaaagtaaaaagacaaccactgtccctcaatgatctacctagccattacgataaagtagatccaagcggcaatccttactacctaaaaccgctaagggcaatgggacaagcagataaaagagaagatcgcccaacaatgtatttccctcttgttgcccccgatggcacagaaatttttccaaagcgccaagatggaactgatggacgttggcgttggggcgtacaaaaaatagatcaggagaaatggagaattgattggtcgaaaggacgaaatggttggactccatattttcgtgtatatgctgatagttcgtcaggtagaccgccagaaacgatatggtttcattctgaagttggaagtaacaggacatcaaaagccgaaattaagaaggtgattcctactataagtgcatttgatacacctaagccggaagctcttataaaaaaaatactggagattgcaactgacaatggtgatcttgttctagactcctttgctggttcaggcacaacaggggccgtagcacaaaagatggggcgtcagtggattatggttgaattaggcgaccactgtcggactcatattgttccgcgtatgaaaaaagtgattgatgggaaagatttaggcggtattacaaaatctgtaagctggcaaggtggtggaggttttcgttatttgagtctagcaccttcattgcttaaaaaagatacttggggtaattgggtaataaataaatattacaatcctgaaatgcttgctgaagccatgtgcaaacatatgaacttcacctatgcaccaagccagactcaatactggaatcacggttacagcaccgaaactgaccacatctacgtcactaccggttctttggcttatgaacaactgaaagttctgagtgaagaggtaggaactgaacgtacattactgatttgctgcaaagcctttatgactgaaggcgcggacttccctaacctgacgctggtaaaaattccgcgtgccattttgagcaaatgcgaatgggatcaggacgactatagctttacgctaaacgttctctctgattcagaacagcctgacgatattgactacgacgaagacaccgaagacgaagaataa

SEQ ID NO: 235047 - DNA, 240 bp, Klebsiella pneumoniae
atgggacgctggcttgctggcaggctcatgaaagagctggggctggtcagctgtcagcagccgactcaccggtataaacgtagtggtcatgaacatgttgctatccctaactaccttgaaaggcagttcgccgtgaccgagccaaatcaggtgtggtgcggtgatgtgacctatatctggacgggtaagcgctgggcgtacctcgccgttgttctcgacctgttcgcaagaaaaccgtaa

SEQ ID NO: 235048 - DNA, 975 bp, Klebsiella pneumoniae
atgtatgataaatggaaaaaagcagtaattcacctagaatgcgctatggatatagaaaaaatccatgaaaaaatacttagggattatgagcttgaaaacaaactaaacagaggtgaaatatcattagatcaatatcatgaagaaatttcaaatggatttgaattaaaaagatcatatgggaccgcgatatttataattcacaatgaaaatagatacttattaactgcgagacatgttcttttcgataaaccagcatcagataaacagtttgaagatgaccaaaaaaaacacaaagagcactctgcctctggaatctattcccctccaccaaagagagatgctaatactattttcgaacatatttttagagttccttcattggacgagaaaaaagaccttgacgcaaagcggcttttacttcgttctcttaatgcgggtgcttactgcgctagagcttatacattttcagattctgaaatggacttagccattatttcattagaccatagaagccctgaatttgctgatcatttgatagaacttggctacgtaccaatcccatcagaagaaatagaaagcgggtcattaaaggaaggagatgaagtatttactgttggattccctgctgccacatgttttttgggtcaatttttaaccgacccttcacttatgatgtcttcgtcgcatctattttcccttccagtcttttcctggggaaggatttcaatgctacatcataatttacctttttactggtgtgatatttccgcttaccctgggaatagtggcggccctctaatatcggatggaaaactagtcggcattgttgttgctcaggcattggtgtccattgacagtgcaccttctgtgagaacacgaattccttttgcaaaaataataaaaagcaattacataaaggatttaatcaaagagcaggaacaaaaagataaattattcaagactggggagtattaa

SEQ ID NO: 235049 - DNA, 240 bp, Klebsiella pneumoniae
atgccacgtcgatacgaaatagaagtggcctgccgggcggcgatagtcatcgagccaaatggcaggcgcactatcactaccggacgctttctgcaggaactggagagatataactggcactggtcgccccggcaggctaatcagtggatagagggctacgtgacaacgttccgcgacgtctcaacgcaggaaggtgacgatcgcacgttccagctttacaacccgaatggagggctgtaa

SEQ ID NO: 235050 - DNA, 810 bp, Klebsiella pneumoniae; identical to SEQ ID NO: 170105

SEQ ID NO: 235051 - DNA, 843 bp, Klebsiella pneumoniae
atgtcagacatcacaatctcccgtccggaagtggtcaccgggcatacggacgttatctgctcaaccagtatccgccacattctggctgtacgaaagagtacactgctgcaaatcgacacacttatccggcaactggctgaaatatcagcaatgacagaaagtattggcggtaaagccgccccggactgggccatgaaacaggattttcgctgcggctgctggctgatggagaaaccggaaaccgcaatgaaagccatcacacgcaatctcgatcgcgaaatctggcgtgacctgatgcaacgttcagggatgctttccttaatggatgcacaggcccgtgatacatggtaccggtcactggagcacgataattttccggaaatcagtgaagcgaacattctgagcacatttgaacaactacaccagaataaggatgaggtgtttgagcgaggggtgatcaacgtcttcaggggactgaactggaattacaaaaccaattgcccctgcaaatttggcagtaaaattatcgtcaacaacctagtgaggtgggaccggtgggggtttcatcttatcaccgggcaacagactgaccgactcgtcgacctggaaagaatgctacatctgttcagcggcaaaccgatccccgacaaccgggaaaacatcactattcgtctggatggtcacatccagtccgttcagggtaaagagcgctatgaagacgagatgttcatcattaaatactttaagaagggatctgcacacatcactttcaaaaggctggaactgattgacagaattaacgatataatagccaggtactttccttctgtgctctcagcctga

SEQ ID NO: 235052 - DNA, 423 bp, Klebsiella pneumoniae
atgaaactggccctgacgctggaagccgacagcattaatgcgcaggcgctgaacatggggcgcattgtcgttgacgtcgatggtattgagctcgctgaactgattaacaaagtcgctgaaaacggttattcactccgcgtggtgaatgaacgtgacgctaccgaaacaccggcgacttctgccagccctcatcagttgccggaagacaatacagtgatacagagcgtgatgccattaaccactgaaacagcgctggatatcctcattgcgtggctgcaggacaatatcgactgcgaatcgggaattatctttgacaacgatgaggataaaacggattcggtagcactgttgccctgtatcgaacaggcccgggaggatgtccgtactcttcgtcatctgcagcttctgcaccagaaccggtaa

SEQ ID NO: 235053 - DNA, 378 bp, Klebsiella pneumoniae
atgaaaacattacctgtattacccgggcaggcggccagttcacgcccgtctccggttgaaatctggcagacactgctcacccgactgctggatcagcactacggccttacgctgaatgacacaccgttcgctgatgaacgtgtgattgagcagcatattgaggcaggcatttcactgtgcgatgcggtgaactttctcgttgaaaaatacgcactggtacgtaccgacctgccgggattcagcgcctgtacccgttctcagttaataaacagtattgatatcctccgggcacgccgggcaaccggcctgatgacacgcgacaactacagaacggtaaataacattaccctgggtaaacatccgggggcgaaacaatga

SEQ ID NO: 235054 - DNA, 369 bp, Klebsiella pneumoniae
gtgtcagacacactccccgggacaacgcttcccgacgacaataacgaccgcacctggtggggactgccctgcaccgtgacgccctgttttgatgcccgtctggtacaggaaggcaaccggttgcattaccttgccgaccgcgccggtatcagagggcggttcagcgacgcggattcgtaccacctggaccaggcctttccgctgctgatgaaacaactggaactcatgctcaccagcggtgaactgaatccccgccatcagcataccgtcacgctgtatgcaaaagggctgacctgcgaagccgacaccctcggcagttgtggctacgtttatatggctgtttatccgacgcccgaaacgaaaaagtaa

SEQ ID NO: 235055 - DNA, 222 bp, Klebsiella pneumoniae
atgaaaatcatcacccgtggtgaagccatgcgtattcaccgtcagcatcctgcatcccgtctttttccgttctgtaccggtaaataccgctggcacggtagcacggatacatataccggccgtgaagtacaggatattcccggtgtgctggctgtgtttgcagaacgccggaaggacagttttggtccgtatgtccggctgatgagcgtcaccctgaactga

SEQ ID NO: 235056 - DNA, 477 bp, Klebsiella pneumoniae
atgcaacagctttcctttctgcccggagagatgacgcccggcgagcgcagcctcattcaacgggccctgaaaaccctggaccgccatcttcatgaacccggcgtggccttcacctccacgcatgcggcacgggaatggctgatactgaacatggcgggactggagcgggaagagttccgggtgctgtatctgaacaaccagaatcagctgattgccggtgaaaccctcttcactggcaccatcaaccgcacagaagtccatccccgggaggtgattaaacgcgccctgtaccacaatgccgctgccgtggtgctggcgcacaatcacccgtccggtgaagtcatccccagcaaggcagaccgccttatcactgagcgtctggtacaggcactggccctggtggatatccgggtaccggaccatctgataatcggtggcagccaggttttctcctttgcggaacacggtctgctttaa

SEQ ID NO: 235057 - DNA, 486 bp, Klebsiella pneumoniae
atgacaaccttttcgcatagctccaccacaccttctgtttccgtaaccactgcatcagggaataaccagtctcaactggttgccaccatagtccctgatgaacagcgcatcagcttctggccgcagcactttggcctcattccacagtgggtgaccctggagccccgtgtcttcggctggatggaccgtctgtgtgaagactactgcgggggtatctggaatctgtacaccctgaacaacggtggggcatttatggcacccgaaccggatgacgatgatgacgaaacatgggtactgttcaatgccatgaacggtaaccgcgctgaaatgagcccggaagccgccggcattgctgcctgcctgatgacttacagtcatcatgcctgtcgtacagagaattatgccatgacggttcattattaccggctgcgggattatgccctgcagcatccggaatgcagcgccattatgcgcatcatcgactga

SEQ ID NO: 235058 - DNA, 819 bp, Klebsiella pneumoniae
atgcaattagccagtcgttttggtcatgtaaatcagatacgccgtgaccgtccgctgacacacgaagaactgatgcgccatgtaccgagtatttttggggaaaaccgacatacctcccgaagtgaacactatgcgtacattcccactatcaccgtcctggaaaatctgcagcaggaaggctttcagccgttcttcgcctgccagacccgcgtgcgcgaccagagccgccgggaatacaccaaacacatgctgcgtctgcggcgtgacggggagagaaccggacaacatgtccctgaaattattctgctcaactcccatgacggtacctccagctaccagatgctaccgggttacttcagattcgtctgccagaacggctgcgtctgcggtcagtctctgggggaagtgcgtgttccacaccggggaaatgtggtggacagagtcattgaaggggcttacgaggtggtgggcgtgtttgaccggattgaggaaaagcgtgatgccatgcagtctctggtcttaccgccaccggcacgccaggcgctggcacaggcggcactgacttaccgttatggtgatgaacatcagccggtcaccaccgctgacattctgacaccgcgacgccgggaggattacggtaaggacctgtggagcgcatatcagaccatccaggagaatatgctgaaaggggggatttccggccgcagtgccagaggaaaacgtatccatacccgtgccattcacagtatcgacaccgacatcaagctcaatcgcgcattgtgggtgatggcggaaacgctgctggagagcctacgctga

SEQ ID NO: 235059 - DNA, 234 bp, Klebsiella pneumoniae; identical to SEQ ID NO: 28068

SEQ ID NO: 235060 - DNA, 2847 bp, Klebsiella pneumoniae
atgaaacgacatctgaacaccagctacaggctggtatggaatcacattacgggcaccctggtggtggcctccgaactggcccgctcacggggaaaacgcgccggtgtggcggttgcactgtctcttgctgctgtcacatcagtcccggtactggctgctgacacggttgtacaggcgggagaaaccgtgaacgacggaacactgacaaatcatgacaaccagattgtcctcggtacggccaacggaatgaccatcagtaccgggctggagtatgggccggataacgaggccaataccggcggacaatggatacaaaatggcggtatcgccaacaacactactgtcaccggtggtggtcttcagagagtgaatgccggaggaagcgtttcagacacggttatcagtgccggaggaggacagagccttcaggggcaggcagtgaacaccactctgaacggcggtgagcagtgggtacatgaaggcgggattgcaacgggtaccgtcattaatgagaagggctggcaggccgtcaaatccggcgcaatggcaaccgacacggttgtgaataccggcgcggaagggggaccggatgcagaaaatggtgataccgggcagtttgttcgcggaaatgccgtacgtaccactatcaataaaaatggtcgtcagattgtggtagccaccggagtggcaaacaccacggtggtttatgccggcggcgaccagacggtacatggccacgcactggataccacgctgaatggcggtaaccagtatgtgcacaacggcggtacagcgtctggcactgttgtgaacagtgacggctggcagattgtcaaggaaggtggtctggcggatttcaccatcgttaaccagaaaggcaaactgcaggtgaacgccggtggtacagccacgaatgtcaccctgaagcagggaggcgcactggtcaccagtacggcggcaaccgtcaccggcagcaaccgtctgggcaatttcacagtggaaaacggtaatgctgacggtgttgttctggagtccggtggtcgcctagatgtactggagggccattcagcctggaaaacactggtggatgacggcggtaccctggcagtgtctgccggtggtaaggcaacagatgtcaccatgacatccggtggtgccctgatagcagacagtggtgccactgttgaggggaccaatgccagcggtaagttcagtattgatggcatatccggtcaggccagcggcctgctactggaaaatggcggcagctttacggttaatgccgggggacaggcaggcaacaccactgtcggacatcgtggaacactgacgctggctgccgggggaagtctgagtggcagaacacagctcagtaaaggcgccagtatggtactgaatggtgatgtggtcagtaccggcgatattgttaacgcaggagagattcactttgataatcagacgacacaggatgccgtgctgagccgtgctgttgcaaaaggcgactccccggtaacgttccataaactgaccaccaccaacctcactggtcagggcggcaccatcaatatgcgtgttcgccttgatggcagcaatacctctgaccagctggtgattaatggtggtcaggcaaccggcaaaacctggcttgcgtttacaaatgtcggaaacagtaacctcggggtggcaacctccggacagggtatccgggttgtggatgcacagaatggtgccaccacagaagaaggtgcgtttgccctgagtcgcccgcttcaggccggagcctttaactacaccctgaaccgtgacagcgatgaagactggtacctgcgcagtgaaaatgcttatcgtgctgaagtccccctgtatgcctccatgctgacacaggcaatggactatgaccggattctggcaggctcccgcagccatcagaccggtgtaagcggtgaaaataacagcgtccgtctcagcattcagggcggtcatctcggtcacgataacaacggcggtattgcccgtggggccacgccggaaagcagcggcagctatggcttcgtccgtctggagggtgacctgctcagaacagaggttgccggtatgtctctgacgacaggggtgtatggtgctgcaggccattcttccgttgatgttaaggatgatgacggctcccgcgccggcacggtccgggatgatgccggcagcctgggcggatacctgaatctgacacacacgtcctccggcctgtgggctgacattgtggcacagggaacccgccacagcatgaaagcgtcatcggataataacgacttccgcgcccggggctggggctggctgggctcactggaaaccggtctgcccttcagtatcactgacaacctgatgctggagccacaactgcagtacacctggcaggggctctccctggatgacggccaggataacgccggttatgtgaagttcgggcatggcagtgcacaacatgtgcgtgccggcttccgtctgggcagccacaacgatatgacctttggcgaaggcacctcatcccgtgacactctgcgcgacagtgcaaaacaccgtgtgagtgaactgccggtgaactggtgggtacagccttctgttatccgcactttcagctctcggggtgacatgagcatgggtacagccgcagccggcagtaacatgacgttctcaccctcacagaatggcacatcactggacctgcaggccggactggaagcccgtgtccgggaaaatatcaccctgggcgttcaggccggttatgcccacagcgtcagcggcagcagtgctgaaggttataacggtcaggccacactgaatgtgactttctga

SEQ ID NO: 235061 - DNA, 873 bp, Klebsiella pneumoniae
atgaatccgtctgatgccattgaggcaattgaaaaaccgctctcctccctgccttactcactttcccgtcacatcctggaacatctgcgcaaactcaccagtcacgaacccgtgattggcattatgggtaaaagcggggccggtaaatcctcactctgtaatgcactgtttcagggggaggtcaccccggtcagtgatgttcacgccggcacccgggaagtgcggcgcttccgtctgagtggccacggtcacagcatggttatcactgacctgcccggggtgggcgagagccgggacagggatgcagagtatgaagccctgtaccgtgacattctgccagaactggacctggtgctgtggctgattaaagccgatgaccgcgccctgtctgtggatgagtatttctggcgacacatcctgcaccggggacatcagcaggtgctgtttgtggtgacgcaggccgacaaaacggagccctgccatgaatgggatatggccggcattcagccttctcccgcacaggcacagaacattcgggagaaaacggaggcggtattccgtctgttccggcccgtacatccggttgttgccgtatcggcccgcaccggctgggaactggatacgctggtcagtgcgctcatgacagcacttcccgaccatgccgccagtcccctgatgacccgcctgcaggacgagctgcgcacggaatctgtccgcgctcaggcccgtgaacaatttaccggtgcggtggaccggatatttgacacggcggagagcgtctgtattgcctctgttgcatgcacggttctgcgtgccgtccgtgacacggtggtctctgttgcccgcgcggtatggaactggattttcttctga

SEQ ID NO: 235062 - DNA, 735 bp, Klebsiella pneumoniae; identical to SEQ ID NO: 10387

SEQ ID NO: 235063 - DNA, 1119 bp, Klebsiella pneumoniae
gtggataggttgtacgaactgggaaagagatttgatagattattatacatgagtattgttgttgttatttttagtttcctcacctgctctttattaattacattaagcagccaaaacctatttgctttaataacctcatacaaagatataaaacaacaaattgaaacaaaaagaagaaaaatagaatttatcgaaacacaaatttcagctgttaatgaaagcgtatctgatattctagactttcgaaaaagaataaataaatcagagatggacacagtaagatataaatcagaaatagaaaatgaattcttttccattagaaaaaaaatgataaatgagggattgcgtgaaatagaccttgatgaggtgagttcaactaatgagttaaaatactttatgtacgatgtgttgaaaaaagagattgaaaaatcaagtgtgggctatattgtaagggataaaatagaatcggcccttcctgaaaaagataaaatcgcaaactatcatgatgcaatgaactggttggatggaaaaataaaagatgagagtaattcaaagatagagatagtcaacatagaatcaaccttaattatcccatttaaaataggtgacatggcatctagtgtatcattgataagtatagccaaaatagctagttatgctatgcctgtattcatggttttttggttgggttcactgttcgtcacgcggagaatagagatgatgaatcttatgaaaacaaaggatatatcattgatatacccacatattcttaatatcttctcagtggacacaacaaaatctcaagatttcaacctttatctcttaggcgatgaaaagataagaaaacaaataaacgcctctatatttttaattaaagcaataaaaggttttttatttatatcattagcactcgcaatgtgtgggccattgtattatggcgaatttatttacctggtaaactacaacacatcctcgctgccactattcattgtttcattttcttgcatgctaataaatataatccaagcagttgggtatgtttactttgagtcaatttcatctaatgttatttacagaataaaaaatggtgtgattgataggtatgaacttaatttttaa

SEQ ID NO: 235064 - DNA, 1083 bp, Klebsiella pneumoniae
atggacagaacaccacagccagcgcgtaccgggctgacggaaaggcttgctccggacattaaccgaattaacttttaccgtttctgccagcttcttgaacaaagccaaccacagacgccactgctggggagcacaaccaatccggcagacgatcctgtccgttttcgtccacatccggggatggggttcccggtaagcgaactaaaaagcgtcgaacaggatttggatcatcctgacgcgccacccacggtgcgcaccacgtttctggggctgtacggtgtggattcaccgctgccgacagcctatctcgactacatcgcgcagcgccgggacggccatgaagcgatgatggcgtttctggacatttttaaccatcgctttatcactcagtactatcgtatctggcgcaaatataattaccttacgtcgtttgaaccgggagccgtggataatatttcccgctgcctgctggggttgattggtctgggcattcccggcagcgaaaatcatatcgccacgccggtctcgcgttttctggcattactcagcgtgatgcgtctgccgacgcgtacagcagaaggcataacggcgctggtcagattactggccccccagacgcaagcgacagttatcccgcacgatccacaacaaattgtcctgcctgaacctgcgggtttatcaaaaagatcacgtatttgcctgaaaactcgggcactgctgggcaacaccggcactgacgttaacagccagttactgatgaagctgtataccgaagacgacggagaggcacgcggctggctgccgggcgggcaactacataccgacctgctggtgctgttgcgtgtctatctgggctggcgctaccaggcccgcctgcaactgaccttgcccgtcagtctgctgcctccggcacagttaggaaatcagcgcgttcaggtaagccgaacgggcgtgctgcgggcgtcttttgctgccccagtcgccggtacggtcacggtcagtctcgggcgttatcagggactcatgcccacatcatccacccgcgacagggagagtgttactcatgtttcttacaccctataa

SEQ ID NO: 235065 - DNA, 963 bp, Klebsiella pneumoniae
gtgttagttggtaagctggcgtattcttgggaaaaaagaggcggcaacttcggttcattaaaggagataaatgaaagaaaaattgaactgatgacagctgagcaggagccggttgaaaatgttcagtggattactggccgggattatattgtggtggtggccgcaaggacgaaatttaaagattctatggggaatcagtatcgttttgtaaactgcggattaagacagctacggctttttcctgaagtgaataaagataattattatatacagcgtattttcctgatgtttcagcagggatatgtggagaaaggcattgaattaattaatgaatatgttgaagaattaagtggtcgcgtggtttatgtgaaagacaaggctgaatttattaaattcctgaacagcagaaaagacaagaacagagtaattaaggagatggttattctgtgtcacggaattatcgacactgcatcatttgattatcatcatgaaaataaaggaaaggaaaagaccggtgagtttaaatccagagatgttgttgacgttcaggaggctgtctttgattatgatgccgttgtcacaacctatgcctgccgggccggtatttctgttaatggaaaagacctgaccggaatggatgccggacaggaaaacagtccggcacaaaagatggcggcttgctgggacgtgagtgtcagagcgtttgaaatgcggtcggattattcatcgatttacggaacgaaaaaagaaatacgtgcagcagaaaattatgaagatgttattgaagaatacgaggaaagcctgagtgaatataataagaaaaaggcgaatggtgatgtcgatattacgccgccccagaaacccgaaaattatgatgagatgtcaaaacgctatgatgatgtcacagcgagagatgctaacgctaaacgcggtgctggtccaattgcgccaaatggtgcgtag

SEQ ID NO: 235066 - DNA, 1437 bp, Klebsiella pneumoniae
atggagcgggtgcatcagcggaatataatccgtcagaaaaaactggagggaaaaattgaaggtcatgccagttttgcactgggggaggcgaaggccgaaacggccctgtacctgccggacaggttatgtgtcagccttttatttccggcgaaaaaagtgactccacagacaccggatggtgtctgtaatatgggagcgctgcgttttgccatgaaactggtattgtcaggtagcgttggtgccagtgctgcaattgaattaggggtgacagcagactggagtggagaaatgggaaagggctatggcattaaaggccgtcctgcaaccctgactgctccaccgttgccaggacagcagcaggtgaatttaaagacctcaacaatacctgaagcacaggggggaggtgaaattggtgtttttgttggtgctcaggcgggaggtaatatcagtggtgccattgagtggtttgacccgcatcctgatgatacgccagtagctataggtgttgagaaagataacaaaccccttgtcaataaagagaagaagtttgccgcgatagccaaactggaagcggggatgacggtgcaggcaggcgctgggggaagtggggttttttatatcacctatattcagggacgttttcgtatttactgtaaagcggctttatgttggggagtgggagccaaaggggaagtcggttttgaagttgatggcagcagttttgcggcttttatgaagagttttatgtttatgctgaggaatgtggattatcagaagattgagctgatgatggagggagatgccttccgttctttatgtgcaattcctattattatggcggcacaagggatacaggcaattgatgcgatgtacatcgatgtaactagagtgttagttaacttgagtaatcagattagtgatgagggaaaacgaattgatttaatgtatagtattttgtctaatccggatcagctaaaatatactcctccagaaacaaaaggggcagtgattgccacattaattgatcagaattgggtagactggcttgaccctcgcaatcaaaataatgattttttttccgttaacagctggaagctcggtcctctcaagaggcgaaagcaagcggtgtttatggcgctgaagtgggtacaaagtcaggcagattataacaatgttatgcagcatttgacgttgtcgccaggggagaagaaaggtaataaagaactgaatgaaaaggatgtgattaactttttaggtatcggggaacacaaattttttttctacaccaattatggtgaaaagctcaccttattgcataataacctcccggtttttgttgacccggatgagccatttaaacccattcctgacatccttatgtcagaatatcttgccatgatcgacgaccagcacccgacggggacaatgactgcctga

SEQ ID NO: 235067 - DNA, 507 bp, Klebsiella pneumoniae; identical to SEQ ID NO: 214891

SEQ ID NO: 235068 - DNA, 3006 bp, Klebsiella pneumoniae
atgcccgttgactttctgaccactgagcagactgaaagctatggcagattcaccggtgaaccggatgagcttcagctggcacgatattttcaccttgatgaagcagacaaggaatttatcggaaaaagcagaggtgatcacaaccgtctgggcattgccctgcaaattggatgtgtccgttttctgggcaccttcctcaccgatatgaatcatattccttccggcgtccggcattttaccgccagacagctcgggattcgtgatatcaccgttcttgcagaatacggtcagagggaaaatacccgccgtgagcatgcagcgctgatacgtcagcactatcagtatcgtgaatttgcctggccctggacatttcgccttacccgtcttttatatacccggagctggataagcaacgaacgtcctggcctgcttttcgatctggcgacagggtggcttatgcaacatcgtattattctccccggagccactacgctgacccggttgatttcagaggtaagggaaaaggcgacgttgcgcctgtggaacaaactggcactgataccgtcagccgaacagcgttcacagctggagatgctgctggggccaactgattgcagccgcctgtctttactggaatcactgaaaaagggccctgtgaccatcagtggtccggcgtttaatgaagcaattgaacgctggaaaactctgaacgattttggcctgcatgctgaaaacctgagtacactcccggctgtgcgcctgaaaaatctcgcacgttatgctggtatgacttcggtgttcaatattgccaggatgtcaccgcagaaaaggatggcggttctggttgcctttgtccttgcatgggaaacgctggcgctggatgatgcattggacgttctggacgccatgctggccgttatcatccgtgacgccagaaagattgggcagaaaaaacggctccgctcgctgaaggatctggataaatctgcattggcgctcgccagcgcatgttcgtacctgctgaaagaagaaacaccggacgaatcgattcgtgctgaggtgttcagctacatcccaaggcaaaagctggctgaaatcatcacgcttgtccgtgaaatttcccggccctcagacgataattttcatgaagaaatggtggagcagtacgggcgcgttcgtcgtttcctgccccatctgctgaataccgttaaattttcatccgcacctgccggggttaccactctgaatgcctgtgactacctcagccgggagttcagctcacggcggcagttttttgacgacgcaccaacggaaattatcagtcggtcatggaaacggctggtgattaacaaggaaaaacatatcacccgcaggggatacacgctctgctttctcagtaaactgcaggatagtctgaggcggagggatgtctacgttaccggcagtaaccggtggggagatcctcgtgcaagattactacagggtgctgactggcaggcaaaccggattaaggtttatcgttctttggggcacccgacagacccgcaggaagcaataaaatctctgggtcatcagcttgatagtcgttacagacaggttgctgcacgtctttgcgaaaatgaggctgtcgaactcgatgtttctggcccgaagccccggttgacaatttctcccctcgccagtcttgatgagccggacagtctgaaacgactgagcaaaatgatcagtgatctactccctccggtggatttaacggagttgctgctcgaaattaacgcccataccggatttgctgatgagtttttccatgctagtgaagccagtgccagagttgatgatctgcccgtcagcatcagcgccgtgctgatggctgaagcctgcaatatcggtctggaaccactgatcagatcaaatgttcctgcactgacccgacaccggctgaactggacaaaagcgaactatctgcgggctgaaactatcaccagcgctaatgccagactggttgattttcaggcaacgctgccactggcacagatatggggtggaggagaagtggcatctgcagatggaatgcgctttgttacgccagtcagaacaatcaatgccggaccgaaccgcaaatactttggtaataacagagggatcacctggtacaactttgtgtccgatcagtattccggctttcatggcatcgttataccggggacgctgagggactctatctttgtgctggaaggtcttctggaacaggagaccgggctgaatccaaccgaaattatgaccgatacagcaggtgccagcgaacttgtctttggccttttctggctgctgggataccagttttctccacgcctggctgatgccggtgcttcggttttctggcgaatggaccatgatgccgactatggcgtgctgaatgatattgccagagggcaatcagatccccgaaaaatagtccttcagtgggacgaaatgatccggaccgctggctccctgaagctgggcaaagtacaggtttcagtgctggtccgttcattgctgaaaagtgaacgtccttccggactgactcaggcaatcattgaagtggggcgcatcaacaaaacgctgtatctgcttaattatattgatgatgaagattaccgccggcgcattctgacccagcttaatcggggagaaagtcgccatgccgttgccagagccatctgtcacggtcaaaaaggtgagataagaaaacgatataccgacggtcaggaagatcaactgggcacactggggctggtcactaacgccgtcgtgttatggaacactatttatatgcaggcagccctggatcatctccgggcgcagggtgaaacactgaatgatgaagatatcgcacgcctctccccgctttgccacggacatatcaatatgctcggccattattccttcacgctggcagaactggtgaccaaaggacatctgagaccattaaaagaggcgtcagaggcagaaaacgttgcttaa

SEQ ID NO: 235069 - DNA, 558 bp, Klebsiella pneumoniae; identical to SEQ ID NO: 7707

SEQ ID NO: 235070 - DNA, 861 bp, Klebsiella pneumoniae; identical to SEQ ID NO: 5314

SEQ ID NO: 235071 - DNA, 831 bp, Klebsiella pneumoniae; identical to SEQ ID NO: 36219

SEQ ID NO: 235072 - DNA, 132 bp, Klebsiella pneumoniae; identical to SEQ ID NO: 102396

SEQ ID NO: 235073 - DNA, 1278 bp, Klebsiella pneumoniae; identical to SEQ ID NO: 52758

SEQ ID NO: 235074 - DNA, 327 bp, Klebsiella pneumoniae; identical to SEQ ID NO: 52759

SEQ ID NO: 235075 - DNA, 675 bp, Klebsiella pneumoniae; identical to SEQ ID NO: 52760

SEQ ID NO: 235076 - DNA, 1200 bp, Klebsiella pneumoniae; identical to SEQ ID NO: 36224

SEQ ID NO: 235077 - DNA, 867 bp, Klebsiella pneumoniae; identical to SEQ ID NO: 36225

SEQ ID NO: 235078 - DNA, 375 bp, Klebsiella pneumoniae
atgaaagcgctggaaatggcatgggaaacccgtggtaagcccggcggggtgatgttccacagcgtccagggcagtcattatacgagcaggcagttccggcagttattgtggcgataccagatcagacagagtatgagccggcgcggaaactgctgggataacagcccaatggaacgcttcttcaggagtctgaagaacgaatggatgccggtggtgggttacgtaagcttcagcgaggcagctcacgccataacggactatatcgttggatattacaacgcactaagaccgcacgaatataacggtgggttacccccaaacgaatcggaaaatcgatactggaaaaactctaactcggtggccagtttttgttga

SEQ ID NO: 235079 - DNA, 426 bp, Klebsiella pneumoniae
atgaacggtataaaaacggggctggggatgacgccgggtgaacacattatcagtgccgactctgcgctcagcagaaatatccggcagtgtttctgcctttcctgtcgtggccggttgattttgcagacagatgctcagggggcgtggtttgagcatgatttacatgccctgagcgcgcaacagaaggcggcctgcgtggtgctgaatccggaaaagtcccacccttacattgaggatatggcgatgtttctatcgccattaccggtcgtgctggagtggcattgtgtgatgtgcgggcagcattttcccgggaaaaagttctgcgaagcctgtggcacggggatctattccagagcaacatgtacgaagtctgtttacagctaccagccagacttgtttcaggactgcggaggtgcgagtacttaa

SEQ ID NO: 235080 - DNA, 384 bp, Klebsiella pneumoniae
atgtacgcaaaatcctttatcgctcttgatggcaacggacatctgacgggcgcccgtactgcacaggccgcaccttatgctcactacacctgccacctttgcggcagtgcactcagataccacccgcagtacgacactgaacttccctggtttgaacacactgacgacgggctgactgagcacggtcaacagtgcccttatgtcagaccggagcgcagggaggtacgcttgattaagcgtctgcagaaattcgtaccggatgccttacccgtggtgcgtaaagccagctggcactgcagacaatgtcatcacgattattatggggagcggtactgcactcactgccatacagggcacttcagtgaggagggagtggctgaatga

SEQ ID NO: 235081 - DNA, 600 bp, Klebsiella pneumoniae
atgaagacttacaacaccaatcccggttacgaaatggatccccagcttctgacacactttaaccagcatctggattcattattcgggatatattcgaaactgttaccgttcagaatggattttgcttaccgaaaaaacaccctcagctacaggtgtgcctgcaggtacgccatgtgcgcggagatactgcgactgattaacgaagtgggagagaaactggtcgggtatgcctgggtaatggaatatacggaacgtaaagggcttcacattcattttgtgggctatctgaacggtcagagccacaggagttcgtatctggtatccagattgatgggagatatctggaggcgggttaccgagggtgatggttactaccactggtgccggtttaataaaaattatccggtaaacattaaccacgtcattcactattcagatcacaaagcggtgaatgccttacgctatgccctcagctacctggccaaacgagaacagaaagaatgtggcatcatcctgaaatgcagcgggcttcctgaaaaaagtaatcgggggcgaccgcgactgggcagcaccctgccggagagatgttctctggtgtaa

SEQ ID NO: 235082 - DNA, 792 bp, Klebsiella pneumoniae
atgacaacacgtataactttcaatatgaccagtgatgagacgctgcgaattgtggatgagtactgtcatacccacaaactttcgcgctctaaggtaatcgacgcattactcagcgccacagcacctgtccttaacgatattaactgttattatcaacttgcaggcaaactgcagtcacgcttattaaatggagtgtatcaacgggatcttcctaacaaacgcaatgtcgtcagtgcagagaagtactgtctggagatctgggaaaacaaacttttcaccaaaagaatcctggagtttgacagttcaaatggtgttctgtacgcgctgaaacataaaagacactatcgccgggacaagatgattggaagggttgaaagccggtgtatcaaagacatttgcgaataccagatgcaactgtccggggagaaggcaaaatatgcctgttttatttatatcgaaagaacaatatacaatcacgataatccatccggtgggacacctgtaaaagcggctgttggtaatgcagtcatcctgctggcaaaagacgtgatatatgacgagtacttttttgatctgcggcagtcatttttcgtgagcgttaaagatctgatggcctctggcgcaaaaggtattccggagacacagaaatatccggacgtttattgctggatcccgcttttctccataaattccggcgtggtcattaccccggtctataaaattgatccccggaaacccttaacggtaaaaaaaccggatcagatcactgttgtttgtaattacagagaataa

SEQ ID NO: 235083 - DNA, 207 bp, Klebsiella pneumoniae
atgaccaccccagtttcgctgatggatgaccagatggtcgatatggcgtttatcactcagctgaccggcctgaccgataagtggttttacaagctcatcaaggatggggcctttcctgcgcccatcaaaatggggcgcagctcccgctggctgaaaagtgaagtggaagcctggctgcaggcgcgtattgcacagtcccgtccgtaa

SEQ ID NO: 235084 - DNA, 603 bp, Klebsiella pneumoniae
atgaaaccacagtatcagacccgttacgaactgctccacgaaagctaccagaaatggctgaccggcttcacccgacatgccgtatcctggggcgtgtgtcatccgaatatccactacttccatactctgacgcccgggtgggtgtcattcaatggtgaaaaaccggagattgccatcgttccccgtagtctgcaccggctgatttatggtccggacaaacggagttccccgtctctggatgatgatctggtggtgaacttatgcaccagtgaacatctgctggttcatcatccgatgctggaaggcattctgctgtctgaatgtgaacgtctgaagcaacattctctggcaaacaaactgatcagcctcttccgtcagtttggcggcacggagttacgtctcaaactggtctggctctgctggcttgacttaatgaccggaaacagccttgacaactggacgaaaaacctgaaacacaaatcagaaaaagatctggagcaatggatcattgcacgtcagggtcagagtgaaccactgacaaatctgatggatcagtacgtgcttatggcataccgtacatcggttgatgccgctcacagttga

SEQ ID NO: 235085 - DNA, 624 bp, Klebsiella pneumoniae
atgcgcaccgtgcatccggataaaatctatcgtgaaattatatggttctgctccggttacctgcggaaatccggaccagaggctacgaggacgatcatcaactcaatattctgtgaatgggccagcatcttcaatgattactcctcccccttttcgtgggtggacagcagggacagtgaacagtgtgactggttatggaacgccatgcaggtccggtgtgtgggaaccccgctgaatccccttaccccggagcagaaatactggttcgcctgcgccacgtttgataactgggaaggctggaatgagcaacaggtacagtttttactgaaaagtaatcccagacgaaacagagcgaagtttacgataagtcccttcccggcactcagggttaaacagcataaagctgttcttcttgatgagctgaaaagtgcccgggagcaacaaaaaaggcgtgatgagcgtgctgatggttccgtcccgctgaaactgtccggaaaaatccacaaacagcttgaaagtattgcccgaagtcgtggtgtccccccaaaaaaaatgctgaatgaaatgattgagcaggcgcacctggattttgtggcaaatgagcagcataagacccggagttaa

SEQ ID NO: 235086 - DNA, 249 bp, Klebsiella pneumoniae
ttgcatagctccactctgttaggcgaaggcttcaccctgatgtttctcggcatgggctttgtgctggcgtttctgctgctgctcattttcgccatccggggaatgtccctcgccgtcaaccgcctgtttcctgagccgcctgccgcccccaaaccggcgccggccgccgtcgcgcccgccgacgatttcgcccgcctgaagccggcgattgtcgccgccattcaccaccatcgccgtcttcacccttaa

SEQ ID NO: 235087 - DNA, 765 bp, Klebsiella pneumoniae
gtgttatgtgctatcttttttttattgaaaattaaaattacttttagttttttagtatggggaactattttctcaatacttatcactgttttatatgatttctataaaaattttattcgttttcgactacgcattacaaataaatggttgtacatttattcaaaaagtggttttaatatttcactgatctattttttgttttccttcatatcaaactcagatatattaatcatttcgcatcttgcagatcaaaacattgtttatgattattcgttggcttttaagttatcagcatcatgccttataattcatactttttttgcgtcaatgtcacaagttgaatttgttaaaaataactttttgatcaatttggcaattaaaaaattgtattttacaagcattagtgtgtctttattggttataatagcgttaaatatcgttggtgtgtatgtgctccatttttttggtgtctatccacataatgaacatgtatttaggtgggttatactgataaaatcattaggcgctatattttatatagcacttgggtttaatgcttcatttttgctaataacaaatagatttaaaaatatcataatttcatgccttgtttttgtgattttattcatatctgtagcatgtttatcttatgtatgcggtgttggtggatggcattcaattctatactcttggttaatgtcatatttagtatattcactattgctttttttatatttcaaaagaaaaggaaactataatggctaa

SEQ ID NO: 235088 - DNA, 1116 bp, Klebsiella pneumoniae
atggctaagtttttacttgttgggcaggcagatcatgataattttggtgatagtctaatttattattgctatttatctttactcaaagaaatgggacatgatgctgatattctgaatgcgtctgaacagtttactgggcggattcacttcttgggactacaagttaagaatattgatacaaagaatattaaaaatatagaggataattataatggtgtcatctttatcccaggcggatattttggatgtccagattttacagatgtattatggcagaaaaaatgggttgagagtgattactttaaatcaatttttgacactatagataaattatctataccgatctatattcatggtgcagaggtcggtccatttgctaaacctatagttttcaaatatttcaaaaatgttattagctcatcgagtaaagtttttgttcgaaactctggtagtgcttcgtatgtcaagactactatgggcatagacactactgttttaccagactttattttttcattaaaacactttgtaaatattggaaaaaaagagaagttattcaaactcgggattcatatcactgggaaagtatttgcaaataactttctttccaagaggttcatgagttctttaattgaggttataaaccaacaggaaatcggaagcgtattgctattttccgatcagataattccaaagcgattcaaaaatgcaattgatgaattcaggaaaaatgttaatgctaatactcgattagaagtacgtgattacgatgatatggcaagtgtcatatctaatgctgcagagtgtgatacgatcgttacatcgaaactgcatgtcggagttactggcttagtttttggcgctaaagtattatgtatcgcgtctcatcctaaactgaaacgtttttatcaagataataatttatcagaagcttacttgaattattttctgactagcaactttaagaaaaagaaagaattaaaaaaggtgcttgatgctacttttggcgattatcaaagtacttcattagaagataacataaaaaatactttatctatatataaaaatactcttgctgatattgtttctgattctttatgtgagggacgcaattga

SEQ ID NO: 235089 - DNA, 1131 bp, Klebsiella pneumoniae
ttgattaaagttacatttattgtaagagatgattttcatcataaatttggtggtgatactcatcaaattgagcaatatatacggtgtaatactgaccctggtatttccctttcaacaatgactctaacgcagtttcaaaaatgtaacgattataataaaactgatttctatatcattacaaatattgatagagccgctgattttatccaaatggggttagtgtgtaaaaagaataatctgtttaataagacttttgttcttcctattcatcatagccatgaggcaatgaatcattttaacgagtggcggttttcgagagtttggccattagttaatttcttaggtggtactttatttatagagaagttgaagggcatatatcggggggtgttatcaaaacagtatcgcacttcaattagttcggtgttttcaaattacaaggcgcatattgctgctattattactaagtctttaggactgatttgcatagctaatggtgaatatgaaaatatatgtagggatttttctgtttcagacttggaatatttcattgttagaaacggtgtttctgcagaaatatcacaatatgccgatcaagacataaaaaaaagatattttgatgtaatagtatgcggacgagttgaggaaagaaaaaatcagattgccataattgaatcattgcaatcatacaatctaagaatactttttcttgggggtgttaatcattttaataaaaaatatgctgataaattttttgagaaaatcaaagggaaagataatattacacatatcgatcaagtccaacctgctgatgtgcttaagttttatgggaatagcaagttatctttatctgctagctggtttgaagtttcatcattagctgatattgaagcttcatattgtggttgttttattttctcatctcaaaatggccattcggcagaaatagtccctgataatcaaatcaagttagtagcacccgataatttagtgaggttaggagagtcgattataagtgctattaaattatgggaagaattaccacttataaaaagacaaccatacacatgggaagactccagtcgtgcactggttgcaggcttaaagaagtatattaacaagaatacataa

SEQ ID NO: 235090 - DNA, 2010 bp, Klebsiella pneumoniae
atgccacttcttgttactgcgctaggtgcgaaatcgaataattctaataataatgagcatgttattataaatccattagattcaaatagttcaaactcttcttcaaccttgtcttcgcctgcaataataactaatagtgtgaaaaatttagtacgggatggtaaggctgggcttaaacgtcattttggagcaaagggggatggtattcatgatgatacaaatgcttttgaagattggtgggattgcttaatagatatatcttcaggcagaatcaatgcggtatctgatgagttaccttttatgttgcaaaaaggacccgtattagaaatcgagagcggcgtgtttatttactcaggtaaagggcttgattttgttaatgattcatcattaattttgaacgtgactggacaaagttcgttgtccagcaaaattttaataaataatgattcatatttatttgatttgagccggaatcctgtatataccaacctttctaacttgacagtgtatggtggcaaaggtgctattagattacaatcgaaagaaagaacaacaacagggatccatcttttcagtagcttaagagtttcacgttattctgaatgtgctattagtaataattctatagacatgccttattttcgcgttgaaagttgcattttttatggggatgtttctaaaactaccattggagtctgtgtttcgggatactcagcaggtggttatatttctaattgtatattctccgacaatgtttatggaatcaaactcgctgtttcaaatgatgggggtatgagcaatggacctgcaactccttataatattgttcaaaatgatttttaccgtacaggagacttaaagaaaaactcatacgatatttggatcgaaccgggtctgacgtcaaataattctgggcgaggtattgtattttgccgtaataaatttggacaggaacatttaatcaaaggagattgtcatgttttaatcgctgactctagtgacggatatggagacaatttgaatggagatcgattgcactcttcaaataaatcaaaagggtttgtatctggcatgcgatttgattctaacaatgttaattcaatgcatgaaggatattcagctcctttcattaaaacatttacttcgaatttaggaaacaattacttctctgatatatatgacaacggtatgcctgagtatataatatcatttgcggatgagctaatgccggatgccatagataatctctcgaggaataactattttgacgctagtcagtgcatatcactacaaaaaggaagcgatcctaaaatgctttctaataaagagggggtgtttacagtaaatgatccacttgattattattgtggacatcctcaagtatcttttaagtatgggatatctatgcccattaattttctatggttatataaatcaccgacaaacaaattattattagaggatattaagtattctttaaccgataattcgtatggtggtaaaaatgaagccatggtaattcattcaattacgtcaaagtcaagagtttatactatcatcaagcattcatctccacacactaagcactggatcgatttcgaattaaagtcaattaatattaacaagaatactattgtggtttttgaattgacaagttttgataacaagataatttttttgcgtcgaaaaattcttctttcagaacacaagtcttggcaaaaggtcatcttgccatttattcctctgacaagcatgccatacaaaatttcattatacgcaatcccacatgctgattcgtcgtttatattaggtaactttaatgtttatataaatgaggggcctattaatacgggccataatggcgggggcgacatgagatggaatatgcaacatcaagtttacggcgatatacatgagtggtacgattctgatggtaataagagagccaaatgtggtattccagaattcgacaaagacggagttgtgatatcttcgaatcctcttttttaa

SEQ ID NO: 235091 - DNA, 195 bp, Klebsiella pneumoniae; identical to SEQ ID NO: 36234

SEQ ID NO: 235092 - DNA, 1536 bp, Klebsiella pneumoniae
atggaaacctgttttaagatccttcagctcaagttcgacaagaagctgactaaccgttgtatcggactgacgttacacatcagcgcctcaaccgtttttgaggttcttgcccgcttcaaagcctcttctctgtcatggccattacctgctgatatatcccatgacacgctggagaaactcatttttccgcccaaagacacctttgcatcagagcttgtaatgcctgacatgttgtacttcgatacggaaatgagaaaaccaggtgtgacgcggcaactgttgtggatggaatacaaggcacaggcgggtgacaaagcgatgggatactcgcacttctgccgttgctaccgggagtggaaaaaaacgcgacgtctctccatgcgccaggagcatcgtgccggcgaaaagctttttatcgacttctgtggtcctacggttcctgttattaatccggacaccggtgagatacgccgcgtggcaatcttcgtggccgtaatgggggcgtccaactatacctacgttgaagcgtgcgaaggtcaggacatgatgtcatggttaaatgcccacagccgttgcctgaccttcctgggcggcgtaccgaagctgctcatccccgataacctcagaagcgcagtgaaaaaggccgatcgatatgagcctgtcatcaacgacagttatcaggcactggctgagcactatggcacggttatcatcccggcccgaccacgcaaacctaaagataaaccaaaagcagaaaacggcgtcctcatcgtcgaacgatggcttcttgcccgcatccgtaatgaaaccttccacacgctcagggcgctgaatgcgcgccttagggagttactgacagacatgaataaccggccaatgaaggggtacggcaatcaaacccgtgcagaacgcttccgcatactggatgcgccagcactctctccgctgcctctggcaccttatgaatacacggaatacaaagctgtgaaggttggccctgactaccacgttgaatatgcccgtcactggtactccgttccacacgaactggtcggtcagcgtctgtcactgaaggcggggcagtcggtggtacagctctggcacaaggggcagtgtgtggcgcaacatccgcgcagcacacatgaatataaacacacaaccaatccgcttcacatgccagagcgccaccggcagcacgggacatggacaccggaacgcctgatcgagcagggaaaacgtacgggcccgtccacaggccgggtggttgaatccatgctgaaggcaaaaccccatccggaactggcttatcgtgcagttctggggctgctggcacttcagaaaaaatacggcccggaacggctggaaaaggcctgttacgttgccctgcactataacgcccctgacagacgctttatcgacaatctgctgcgtcaccatcgggagaacctggagcttccattatcccgccagggcgaacaacatccggcatatgcttcagagcatgaaaacctgcgtggtccgggctactaccactga

SEQ ID NO: 235093 - DNA, 756 bp, Klebsiella pneumoniae
atgagtgataacctgttaaacaaactgacccaactgaaactcccggcgatggccgggagcctgatacggcagcaggaaacgcctcagacctacgacgaactgtcgttcgaggaaaggctgacgctgctggttgatgacgagcttctgagcagggaaaacagccgtgtggcacggttgagaaaaaatgccggcctgaaataccaggcaacaccggaagggctgcgctatccggcctcaagaggtctgcgggctgaacagatgagagaactgctgaacggccactacataacccacaggaaaaacctgctgataaccggtccgacaggatgtggcaagagctggatagccaatgcgctgggcgaacaggcatgtcgacagaaacacagcgtccggtactgtagaaccgggcgattactggaacaactggctcagggacgtgttgatggcagctggctgaaatatctgaaacagttgcaaaaaatacaggttctaatcctggacgatctggggctggaacagttaagtaacgcccagtgtaatgaccttctggagctcatagaggatcgttacggacaaagcagcacgatagtggtaagccagttcccagtagataaatggcatggtctgatggagaacccaacaacagcagatgccatcctggacagactggtacataactcacaccgggtggtccttcagggagagtcactgaggaaaaatcccccggtagtggaaagcagcgaaaaaacgcgttaa

SEQ ID NO: 235094 - DNA, 1056 bp, Klebsiella pneumoniae
atggctataacggacttgttcttaacaagaataacagggataaatcgtcgtaagtatacacctcctgatgtaactaaagcttattgtcaaataatgaaggtgatgaattttattttaattgcttcattgtttgtgtttgtttttataaataagggattgttcattgatagttacgtgtatcaatctctcagagttgatgatttttcggataaaatatctggggtcattgggttatataatacaatcgagctgttttatattttatctctatttttcttggtgataataaataagcaccgaaaattcgtgatcttttcttttctttgctttttagtgttaaaaatgttaatcggtagtcgtttaatgctagtccctccattgcttttatatctatggataatgataaatgactcggaatcgagaagaacaataccgttcagaaaaatcttggtttatttatgtttgattttagttttgttcgttgcagccaactattttagatccttgaaaggagattcactaggatttataggtgcaatagagcaattcacatatgaattcctttttgcaactatttctagcttatattcaatcaattatgtgaatatacataactcacctgatacagttgggatgctctttgatagtataaaaggcgttataccttcttttttatatggcggtgcggaaattaaaaaatcaatgatgacatatgagatgtggaagtcctcaatcggtggttataggtctataagtccggttggtggttactatattgtagggcaagtttatctgtggcttaagagttccttgatggtatacatcttttttatatcatatgcggctttgcttcatttttctgagttgtatttaaaggttaaaaagaactttttaggtaaaatgattttttctcaaatggtgttttttggaatggtatatggtgttagaacagaaatatggattttccaaaaaatatatttacaacaatttcttatgacaacagttctattcatgggaattgtatatctaattaaacaattgctgacaaaaaaatga

SEQ ID NO: 235095 - DNA, 495 bp, Klebsiella pneumoniae
atgacgacatcgcagggaagagctacagctaccgtcagcggcggggtggcaggccgtaaacactggattgatttcgatgtgcgccggagtgcatcaaatccggtgggttccgtggtaatggaggtaatggatagcacaggagttaccgtaattttccgcaggattattcttctggatacggtagcccgctggcaaaaagtcattctgccgtatattcccaacgagagtggagatattgtcgtccgcttccgctcaaatctgtacgtcgcaggtgcagccacgaattttgtcattggcaatctcaatgtttaccgaaacgaaacgccagtgaatacggggcataacagcggtctgcgtatgcagtgggatctgcaacacgcagtgaaaggcgcacgacatgaatggtacgacaatacaggtaacctgagagcaaaaaatggggcgccgacgtctgtcaccgatggcgtgattatcagtgcaaacccggtagtgtga

SEQ ID NO: 235096 - DNA, 1155 bp, Klebsiella pneumoniae
atggtgcaggatgttagtattggtattgttgctgattggttagttacttatgcaggagctgaaagagtaattaaggagtttgtcgatctgtaccctgagtcaagtctatacgctatagtcgattttttatctgaagatgcaaggaaagaactgcattgtaaaaaagtgcaaacttcttttattcagaattttccaaaaagtaaagataaatatcaactttatctcccttttatgcctctggctattgaacaactcgatgtatcatctcacaatattattatttctagtagccatgctgttgctaaaggtattttaactggacctgaccagcttcatattagctatgtacattctccaattcgttatgcttgggatttgcagcatcaatatttaaaggaagctggtttggttaaaggagtcaaaggcaaccttgctcgatggctattacacaagattagattatgggattatcgtactgctaatggtgttgaccattttattgctaattcacagttcatagctcgaaggataaaaaaggtgtacggtagagatgcggacgtgatttacccgccggttgatattggtcgattcacgcttaatgaaaataaatcggattattatttgactgcatcgcggatggtaccatataaacgcatggacttaatagttgaagcttttagccacatgcctgataaaagattagttgtaattggttcgggttctgagatggaaaaaataaagtctaaggcctcaaaaaatatcgaaatcctagggtaccaacctaattctattatgcaagagcatatgcagaatgcgaaagcatttgtctttgctgctgaagaggatttcggcataactccagtagaggcccaggcttgcggtactcctgtcatagcttttggcaaggggggatctcttgagacaattagaccttatggggttgaaaagcctacaggagtattttttgataagcaggatgtcagttctgtcatacaggcaatcgagaaatttgaaacagtctctgatacaatcgagcctactgcttgtagagaaaattcagttagattttcttcggaacgttttcaaaacgaattctcaaattatttaaacaatagatgggatgactttttagatagaaaaagaattcaatattaa

SEQ ID NO: 235097 - DNA, 597 bp, Klebsiella pneumoniae
atggcgcagtattcttttgtaaaagcacctggtaatgtattaataccggcgacgcctgacgcccgagaatttttagaaaaaaaagtccgtatgggcggtattttgtatgcggattttaagcaggcaagaaacccggcattccaccgtaaatttttcgccctcctgaatctgggctttgattactggcaaccgtccggcggtgcaatatcgccagccgataaaaaactggtacacggctatgtgcagctggtggcccactatgctggacatgccgacactttgcaggaactagcggatcagtatctccgcgatgaagcggaaaaacgcgccgggaatatcagcgcggtaaaatcgtttgaagctttccgttcctgggtaactatcgaggccgggttttataccgaataccagatgcctgatggcaccactcgcaaggagcccaaatcgatatcgttcgcaaaaatggacgatgtagagttttcccagctgtacaaatccgtattagacgtcctctggaacttcattctgttccgcaccttcccaacgcagcaggcagcagaaaacgccgcttcgcaattattcagctatgctgcgtga

SEQ ID NO: 235098 - DNA, 564 bp, Klebsiella pneumoniae
atggctgacagtatttctatctgctctaacgcactgctggcgctcggtgctcacccgattaacagtttcgacgaaaacaccgatcacgcccgtctgtgctcaaacctttatcccaccgtacgcaataagctgctgcgcgcacatccgtggaactgcgttgtaaaacgtgtcgtgctctctcctgtcagtacagcgccggtattcggttttcgctttcagttcgcactccccggtgatcttcttcgcgttctgtccgtcggggaaccttgcgacgatatcccgtaccgcgtcgaaggcaaccggctgctggcgaacgtgcaagtgctgaagctgcgttatgtgttccgcaacgaagacgaatccacctgggatgccgcactcgttgatgtggctgaaatgatgatgcaggcaaagctggcctatgccgtcaccggctctaccagcctgcgcgacagtctcgcccaggaatcgctggtactgctgaagcaggcaaaggccgtggacggtcaggaagacccaccggaagagcttggcggctatccaacgtacgaatcgaggttctga

SEQ ID NO: 235099 - DNA, 1995 bp, Klebsiella pneumoniae
atgcgcgccaatctgattaaaaccaacttcaccgccggcgaaatctccccgcgtcttatggggcgcgtggatatcgatcgctatgcgaacggcgcgaagacgctggaaaatagtgtggtcgtggtgcagggcggggtaatgcgccgtcccggctcgcagttcgtagcggccacaaagtatggcgataaaaaatctcgcctcatcccgtacgtcttcaaccgcacacaggcttacattctggagtttggtgacggctatctgcgaatttaccaggatggtaagcagctggtgaacgacgataacacgccgtacgaaatcgccagcccgtacacctctgacatgctgccatcggtaaattacgttcagggcgccgataccatgtttctggtgcatcaggccgttaaaccgtaccgcctgcagcgacgggggcaaaccgattgggtgctggaaccggcgccgtttatcgttgaacccttcgacgaagtacgcgatacaccgcaaaagtggtgcaagccatcggtgaaagaattcgtcggctcggaaatcacgttgaccctgagcgatgaagaaccaccagaaggtagcgaagacccgccgccgtttactggtgatggctgggtgtctgaagatgtgggctcgtacgtcaggattaacagcggtctggtgctgattaagagcgtgaccagtgcgcaggttgccgtcggtaccattcgcaccgatttaagcgcaacgcaggcggcatcgccgggcgcctggactcgcgaggattccgtctggacggatgaatttggatacccgggcgcggtaacgctttatcagcagcggctggttctggccggttcgccgcagtatccgcaaactatctggtggagtgagtcgggcgtatacctctctttcgagctgggaaccgacgacgacgacgcgatcagctttacgctgtcttctgaccagctcaacccgattgtgcacctcgcgcagatgaatacgctaattgcgctgacgtacggcggcgagtttaccattaccgccggcaacgatgcggcgattacgcctaccaatatttcggtaaaaaatcccagtccgtacggatgcaatgggatccgcccggtgcgcgtcggtaccgaaattatgttcgtccagcgttctggccgtaagctgtacgctgtcgcctatgaccccgacagctatgtagcctactcggccaacgatatgaccgtactggcggaacacatcacagaaggcggcgtgatcgatatggcgtatcagcagcaacctgatgcgtttacctggctggttcgcaatgatggcgtaatggtgacgatggctatcgaccgggcgcagaacgttgtcgcgtggtcacgacagatcaccagtggtgcgtttgaatctgtagcgactattccctcagcgactgacgatgtggtgtacgccattgtgcgccgtacggtcaacggccagaccgttcgctatgtcgaaatgttcagtaacgccctgtacaccgatgcagctgtgactggctccagcgacgccggcgcaacgacatggggcggactgtcgcacctcgaaggcgagaccgtcgatattgttgcagacggctctgtgatgccgcaggcagtcgtatcatccggccaaatcacgttatcgcgcaaagcctacaaagtcgaaatcggcctgcattttgaaacgactattaccacgctgacgcctgaagtcgctacgtctgaaggcaccacgcagaacacccgcaagcgcacaagtgaagtcactatgcgtttcctcgaaaccactggcgccgagtgcaacggccaggtgatcccgttccgcacgtttgggccaaaaatcctcaaccagccggcgccgttgttcaccggcgatcactactggggaaaactaggctgggagcgcggagaagacacgctgactattcagcagcgccagccgctgccgttccaccttctcgccattgtcatcgtatttaccagcaacgggggctaa

SEQ ID NO: 235100 - DNA, 489 bp, Klebsiella pneumoniae
atgtgcactggcgtagaaatcgctgtaatagcgtcctcagtgctggccgccggcggcgcagcgtatagcggccagcagcagaaaaaaatggcgaactatcaggcagcacaggcggaagctgatgcagaggcgagccagaaagccgcaagggtggaagccgaccgtatccgtaaagccgggcgagaacaggccgcagcggccaacgcttcgctggcggcgtcgggtgtcgaaactggcgaaggtaccgcgctgcgcatcacctcaggcattaccggaaacgcagagcaggacgccttccagaccatccttaccggaaataaccagggggccaggctcaatgcacaggctcaggccgaccggatcagcggaaagaatgcggcgatggcgggaaacatcagcgccggtagctcacttttgagcgcaggcgggacagcgtatagcggctggaagtctgccaaggcaggtaaatacggattatacgcggagtaa

SEQ ID NO: 235101 - DNA, 1956 bp, Klebsiella pneumoniae
gtgaaaattccaacaggtaattttggcaacgttacgccccaggcacagccaacacgcatagacgtagctaacgcaggcgcagtgggtgctgcagttaagggattagcggatgatattcatcagcaggcggacgctattgttagagccagagcgggcgagggacttctggattaccagatcaaaattaaagatataaacgaaaacatcaggcagggcgtcgaagacggaaccattaaagcagaccagattgataatatttataaaacagctgtatcaaagctggagaaaccaaattttggaggccttgatctcgcaggaatggaagtcgcgcaacgcggcatcaaacgttatgaggctgatggccatgctactgctcagggtctataccgtacagcattaaaaatagaagcaaaagatcaggtcgatactcaacttgaccaattgggtaagctaacaaattaccctgatgctgatatcgaaaaaattaatggtatgtccgcggcgttggatactcaaggccgtttagcttatggcgcccaatgggccaaagttcggcagagttggatagacaaaaactggtttaatcaggcgcaacaacgcttaatgtctgcccgtaatgatggttctgctctctctgctcttaataacgaattgactggtgaaaaaggtttttatgtcgataagctcgaccccgagaagcgtaatgcgcttgttaatcaggctatggggtatcaggctcgcatagaggccagagcaatagcggcacaaaaccatgctgatatgttggcaatgcggagagagaacgcggctatgcatgccagtaccagtatgcaaatgcgtattgctaacggtgaaattcctacggatcaggattggaataattatttaacttcagtatcgggaaccagtcaggatggtaccgccccggttctgcggtcggcgatgttggagactcagcgtctttacagcctcccgccggagaaagctcaagcagaagtggatagccttgcgttatcgctgaagaaaaacggtggcagtgaaatccagtacaaagtgcttaacgctgtacaaagcaatatcgatcaccgccgtacacagctacagaaaaaccctcaggcggtttttgcaatggattccggtacgccgctggagccgctcaatccccaatccgcattgcaacagccgggagattggggggctggattagtacaacgacaggccaactctgacgctattactcagaaatatggtgccacagcgggaaagaatctgctgacgaccgaagagctagggaatgcgaaggatgcctacgaaaaaatgtctcccgatcagcggatccagttttggcgaaatactcaagccagcagcacgccagcgatcgcctcacgtttagccagggagattggcggcgatgctctgcaggtttctgctgtggctgggcttgccaacaaccctgccgggtacaaaaccgcgctagcggtggaaaacggttcgcggcttttaaatccaattgatggagcacctaaagtaagactgcccgcaagctttgatctggacgtagctgatgccataaaaaaacagtatcccaccctcagccccgcgcaggtacaacgtcttattccggtagtaagggattaccatatcggtacaggtgggtcccccgataagacaccaaaagctgaagcattacacgaagttataggcaagcctgtgaatgtttacggcagctatgcaattgcccccgcgggcaccgatgaaaacacctttattgatgccttaaaaataggggtcaaccgattgggcgacagcgctcaggatgtaaaaaatggcctaagtcagggcgtgtacggctttgtctcggattctgatggtaatcaggtgctgatcaacgctgcaacccaacgccgggttgttggaaaagacgggcgcccggtagtgatcgaggtgggtaaatga

SEQ ID NO: 235102 - DNA, 1329 bp, Klebsiella pneumoniae
atgagcatactctttaacccggagctggatagtgctcttaacgccaacggtaccgaaagcgttaaagatattgatgcaggattgtttcaaggggttggtcaaggcgttagtacagggttttctaacgcaggcacgtcactacagcgcattggcttaaccacgctcggccgcgggcagatgcaagtcgccgcagctcagatgcaggctacagcgaatatcactggtaacgaggcccttagtaatgccgctcaagatgttttaagtgctcctgaacctacagaggaccagttaccacagtacaaatcgttcgatagcgatcaggtgggagcagttggtaccattctgggtggacttgttcagcaatcgccatcattagcattaatggcggtaaaccctgtggcgggcgtttccgttgctggggcgcaagggtacacggaagctcacgcagaaggcgcgagattggggcttactggtgaagatctggaagactattcagcagttggtggggcgactatggcggctggagctgccattcccggctttacaggcgtgggtaaaggtgcagttttatacggctcacgcttccttgccggcggggtggttaacagtatcaccggtgaggtcgatcgctgggggcgcgcagaaattcttgatagcgcaggttttcacgatcaggccagacagatgcgccaggctgatgccgccagccgagttactgaatttgtgctcggtggcgcgtttgggctactgggtggcggtcacagaaccgaaacaggaaggactggtgacttagaacgcgggataaccagtattcatgaagatgcagctaccgctcacattattcatgataattacgtaacggaaactgccccgggtctctctgctgatgcgagaagcgaggcggggcatgtggcggctatggactccgctatcgattccgtaaatagcggacgtggcgtagatgttacagatcacctcacgggtgatcgtacgtttatcgttcatggcgatattgatgcaggtaacgttgcccgccaacagttggcgggtgattcttcgaaacgtattgatgccgtagtgcaggcagctgaccggcaggcaatacctgagaaagttaatagctattcaccaggcgttttaagtgatgcaaccgatcagcctttccagcttctacgtgaacaaatggatgctgtagcagaaaaccatccggagcttcgtgatctcgttgcacagcacattgataactttgaagccgaatataccaccgcacgtcgtaatgcagagctatatgatgtagctgctgcctgcgcccttaaatttggatcctga

SEQ ID NO: 235103 - DNA, 2499 bp, Klebsiella pneumoniae
atgaaaccacaatgtatacaggcagtagaggcacaccttagcgctgtcagtggcaagccggttaagcttacggccgcggctatttcgcgtatcgatgaaagaatgcatgaaggtgcaaaagtgctggcccgccgggatcgcgcctcctggcaatcaatgtctcctgatgagcgtacgattgccattggtcaatgggtgagggaacaagaacaagggcaagcagacagccaggcaaggagtaaagttcgccagctttccgctattgtcgatgcagctaaaaggcttgatgcgatggcgggtgccaggccagacaaagcagggaaatggagtaaatctctgatcgatgtactggagggcgtagataacaccttgcgcggagcggagcaggtcgcggtaagaggattcggcgatatgctaaaagcggccagagtcgggccgtggacgatggattttggcaataagcgcagcgatgctttctttgctgatgtcgtgcgcgaaatctacggcaccgatacaggaaatgctaccgctaaaagctttgcgcaaaagtggtcggccaccatggacggttatcgcgaggcccgaaaccgggctggtggaactgtaggtaaactggataattacgctccacaatcccatgatgctacggttatgcagcgggttggtaaacccgcatgggtttcttttatgatgaagaatctcgatcgggagcaatatcttagtgaaaccggcactcgtctcacggatccagaacttgagagcgtagtgggaaaaatgtacgactccatcgtaactgatggcgcaaataaaattcagcttgatttacaaggattggctgagggggcgtccagcagttttggaagcgccaacatcgcgagaatgcttaatagcagccatagagagattcatttacgagatgctgatgccgtcatcgcttataacaatcagttcagtgatcgcgctcttggtgcgtcattctttagccatctaaacggcgccgccagagatgtagcgctcattaatgagatggggccaaaccctgcgcttactttcgcgacgttaaaagatacagcagcgaagcgggatagccagatgcctggggccgtttttgaaggcgatggtagtgtcaaaggaggaaaccggggagcattcggcccagaggcttactttcgtcaaataatgcgtaataacgcagatttcaccgattttgatcgcattagtagcgcgttaactgcgtaccaggctgcaacaaaattaaccagcacagggctacgctcagttttccaggacacgccgggtatgcttctgaatatggctgatgtgggtcagttgcacaacattggcactgtactgcgtacagccttccgtccaaaagaagcggctcagttcgggattggtgctgaagtggcggtacgcgctgcgcgtgaaggtgccgaaagaataatggcacaggggcgttttaacctggctaacgcccttagtcgatacgctcaggccactatgaaatacacgttgcttgacgcctggacgaacgcggcccggcgagcggggcagacctcgcatgcactggcattaggtgaatggtcacatctgccttggagtaagctggatagtagccagcgcgggctattgaataatgccggtatcactgaaggtgattggcagcacatcatgagcgtcccccgcaagaaactacgcgggcaagatatacacgatgtgtctgatgtatctgcgttagggctttcccctgatgagactatgcgcctgcaatctcaaatgatggggtttatcagaatgggcggcgatatcgttacttcagagcataaccttacggcacaaacattaatgagtgctggtgggcggactaatgccttgaccaaacaggtaatgcttttcaaaaatgctggtgcgatacagaccgcgcatatgttggatcgccttagtcgtaaatcaggcacaaccaaagtaggttatgttgcggcgacggctgcactatccgcaagctttggttatatggctctggtagctcaggcggtaaccagcgggcagaatccaccaccaccagatgatatacgaaccattggaaaggctatggccgtagctggtggctttgcgatggttcaggatctgattaccagcatgtacgatgctgttagtggggataacagtggccacagttcaagtgctgtacctatttttggtgatcttgcaacgttgggtaaaattgcctttactgccccaattgacccacagaaagccgggtatatggctatcaagtttggtcgccagcaaattgctccgttgaattactggtatacaaaggcggcggttgatcatatgtttttcaacgatgcggccgaagcgctcaatccaggctatcagcgaaggctgagaaagtatgctgctcagaaaggtcaacagtatttttgggatccatctggagacctagcggcaccagaaatgggatactataaaaaagaattcgaattgggtaattag

SEQ ID NO: 235104 - DNA, 651 bp, Klebsiella pneumoniae
atggaaattttctgggtagttgttggcgtagttgttgtgatcttgttcgttatcaatcagaacagaacaaaaatcacaaatcgaaccgttataaccagaaacaaaactgttaaaactgaagatggggaaatccgtattcagcaaacacaagtgattgacagcgcttcgactcagtatacgaaacctaataccttaaataacgaaagtcattctgaatatgacaaagctgttatatccgattattacaaacaggtttctgagcagaaatctgtcgagtctttgcacacggagcagcagacctttattcagcctcaaagagttgaaaaagtcgttaacccgctcccctcttccacgatttcacctacgttaattgaaaataccgttcaagttgctgatgggcgtaaggtctgtacgcgatgcagtagaaacctgcccttagataaatatagaaaatctagtaaacacgctgatggatatacaacttggtgtgcacactgcctggatggtccaaaaaacacacagcatactaaatggtgtccaatttgtgagatccgccgtaaacgcacaagctattacaaaaacgcaaacaaccgtgatgggttgatgtcatggtgcaaaaattgttgggattcgtacaaaggtaaacgttaa

SEQ ID NO: 235105 - DNA, 3105 bp, Klebsiella pneumoniae
atgtcggtacccaaccagacaccctataacgtttacaccgccaacgggttgacgaccgtttttacctttgaattttacattatcagcgctgacgatctgcaggtcagtatcaacgggggcgttgtcaccagcggttacacagtaggaggcgtcggcaataaagacggtggggatattacttttctgacgccaccggaaagtggtgcggtggttatgctcgaacgtgtagtgccgacctaccgacttactgattaccaggataacggcgacctcctggctgatactgtaaataaggatttcgaccgtttatggatggcgatgcagcgcgctttcctctatctggggctggcgttaacccggccgctgctggggggcccctttgacgctgaagggtaccgaataaccaacatcggtgctcctgtcagcgccggcgatgcggcaacaaaagggtatgttgataacgcagtattgacgtcggtttcttcaaacttcagccgtacccttcgggtgcctgagaattatgttaaccagttgcccagcgctgcggcgcgccgtaacaaagctttcggctttgacgacgctggtgatccttcgtttatcgaccctgcggctacaggattgtggggctatacgctgctcgattcgttcgagctgggcgcgaccctgaattatcgctaccaggcactgaagaagacaagcaccggcgaatacttccgctgggatggtgctttgcctaaaacggtaccggccgggtccactccggagagtaccggcggcgtgggtttaggcgcatgggtaagtataggcgatgctggtctacggtctcagttgggtacgatcttcatgccaggcccgtccgggaatgcggggatcgatacagcgaatctgcagtcagcgctgttgctgggtggtaagattgtctgcaacaagccagggacgtattactacaacacatatagcgtcattaagtccggtacctctttcgagatcgccgctggtgccacgtggaaacaggtagagggtaaatctaacccgttcctggtaaacgaaggtttcagcgcgaccaggtttgtcgtaaccagcatggttaaaaacgataccgccattaatatttaccttgatggttctgatattaaaagtaaaaactacatcacggtatcgtgtgccggtcatccgtttgtgcgcggagactgggccgcattccatggcgcaaaagagttcggctacgacgggattatgcgcgtaatttccatcatcgacgcaaacacctttgtggctgaaagtcattctatgcctgttgatgcatcggccacccccgacgacgaatactggaatggcatgtggtgctttaaagccgacagcaatatcgaggttgatatccagggacggctggatggcaactggcgtgggaactccacagcatcgacgaccgattttgacgagcgatgcaaatttatggggctggttttctggggtgtacagcacctttccgtgcgtatcaatgacgcttttaatatcaggaaatacaccgcgctttttgctaacgtgcgcaatgtgcatatcccccgcataaacttctacaatttttccgatggtgtgcatttccagccgccatatgccggggtgagtatcggaacgctggctggcgctaccggtgacgatatgctcgcgctcaccaacggtgactacgagacctaccagctgagccgcggacatgggtattcaatctatgccgatcaccttttccctcagaacgcgctgaccgcaatgaaagttgtcggggctacgaactatcgttactgggatatcgggataggctctatttccgggtcgacgcggcttcatgttattgccgcaatccgcgatctgccattgaaatggacggatattggtagattccatattgggtcgtgcgcctgcgtctctcagacaaaagacgatttttatctcaacaccgaccggatggacgagtttgtcatcgataactatacggtctgctcgcccgagggcgggacgcacagtatcacgatgggtaaccgttacggcacaacgaacaacatcgccgcgattaagctgcgcaatgtgcagtacaaggaaggcgtacacctcaaatcgttctacatcgggactaactgtaatatcgggttgctggacatcgagttcgcaaacgccaccccgctgaacggcgcgctggctggcgttcttaccgcgccggctatgacctatgacggcgacgcgggtgaatctaccggtgggtttatcgatacgctccgcctgtcaggcaagtatgtattcccgcaggtcaatatcggccgcctggcatggctgcgctataaatggaatcgcatcttcctggataatctgtacgttgaaaatggtgagcgtgttatccacgaaaacgaaattactggtaatgacggaaaaattttctgcaataacgttcacgtcagaaacacgcatgacttctgtaacacttataacaaggtgcaggcgtatcactcttccacgttgctggaaacaaccgatatgccgtactggttgcgtgatgcgtctgctgagcttcgcatttatggcgcagttaagaccctgaatgacacaggcgtctgtcgcgtagaatatggcaagtattatgctaaaggcctggacgttcctgtcaacctgttcgacttcccgcctgcggggaatcatggtgatgttgtctttaacaccaacccggcagggtatgtggtaggacgacatcagtacaacagcgtgaacagcacatgggaactggaaaaccgcgcgagtatcagccagataccatcagactctatagcaacgacgtataacccggactggaaccgcggctttaactgggtgcagacgctgactcaggatatcgagttcaccgccggcgctgcaaatcttgcgaagctgaatcgcggcgataaagtgcggctgtacctgacacaggacgccaccggcggaagggctgtaacgttcagcacagcctacaagttcccggttgcgtgggtgaatggtggcaccacagggcagcatacgatcggcgaatttgtctacgatgggcagttcctggtgctggaacgtgctaacgtctggtactga

SEQ ID NO: 235106 - DNA, 243 bp, Klebsiella pneumoniae
atggttacaaacactcactctagctatatgactggggatgatgctatcgcgagagctatcgaactgaaagagtcagctgactataaagacaggatggtagccataactgcttttgcttttcacttcggtgagcacatttccaggaccgcagaaaaacacctcaatgatctaacgtcagaccctaatccagatgtggcggagcttgcagtagaggcgcttaaacgctgtaatctaatgccttag

SEQ ID NO: 235107 - DNA, 756 bp, Klebsiella pneumoniae
atgggtattcgtcaaataattaaaggccttgacggctctcagcagagtatcggttattcagcagcggttccctcaggtcttcagtacatcaatttctttggtggcgacgttgaccaggggagaaacctggcagatggtggggcatctgcccgcgtggttgggaacccagtggtgggtgatatgtcgtcaggcgtgctctgtacttctcattctgattatatccagaccgcagttgctcaggcgcagaaaatgacagtaatgggtgttttctgccccgacagtgatactcgcgcgtatgcagtctcgaatgctacagctgcgcggccgatcgggttttccgtctatgctcagccttccggcacagctggcattcataacctggtcgtgcagttcggtggtgttaacgccagcaccggcgtaaacatggcaatcattgctgcaatcaataacgcgatttctaataacgtcccgttcgcatttgcggccacgcttgattactcagcacttgcggcaacgaaagtcaacgtcaggaacctgaagggcggtaggtctgctactgatactcgcgctatttcatcagctggtagcggtgctgcgggcctgatcatcgggtcagaccttgacgcgaccacttatgctggaacgcgcgttttacaaatggcagcatggaacagagtgctgacagatgacgagattgctgcacaatacaatcagattaagagctactatctgaatgttcatggtatcgctgtttga

SEQ ID NO: 235108 - DNA, 1821 bp, Klebsiella pneumoniae
atgccgtctcagcaatccattgaggaattgcagcaattaattcaaaacgatccttccgtagagccatttgtacaatgggagggggacggcgggtttattgttgccaagctggataaatccgcgctaaagacagctgggtttgaagttggcgaagatttaatctcaatgtcagcaatgaatgttgaaaaaataactgaggcggaaagtgttgttcaggatgaatacgggtttatcttcgagcggagaacctcggaatattttgaaacagccgccgggcggtttatctcagtcgataacaatgattacgtgatcgaggatgagcatggttttcagcttttctcggtgatgaatcagaaaaaaaacgacgccccggacacatccgacatcgagcgaaaggcgtttattgctgaaatggacaatgccgctcttgctgccagtgccgcgataaacaatacactggttaccggtattcagcggccagtgttcgatttcaaccttgtgattacctacgggcagtcattatcaacgggtacggaaggttggcctgcactttcaaccgtagcaatcgaggcttctaacatcctgatgttcggtgatgcagtgcgtcctaacactgaccgtgatactggcggcagcacatggaacccggtgggcggtgatgccctgaatccgcttgttgctgttacacaatccatcggcggagccgatgttctgacggctacgcaagaggcagcgctgacaccaggcgtaaccaacgaaggggagactgttgacgttggtgcagtgaatttctggcgccagcttcagaatgacttccgaggcatcagcgttaaccccgacaggaaaatcgttgtcctgaactgtggcgtacaagggcgaaccgttgagcagttatcaaaaggtaacgcgctgaatcactataaccgggttattgaagcggtgacgaaggttaaggcatatatcaacagccagtttcccaccgccactgtgggtattgtctcgtttatttatatgcagggcgagtggaactactggacgcagtccagcggtacgcatgacagggagacgttccttgagctcacaaaacaattacgcactgacctgataaatgattgcgcgtacggaatctgtgggcaggcattacctcctgcgtgggtgacgtatcagaccggcggaacacatacgagcgacgccaataacctgtctatcggcatggcgcagattgacatgatagacaaagttccaggttgttggatggcgaccccaatctattacgtgacagacaaaaccggcggtcatcttgacccaaatggttatcgctgggctggtatgcagttcgggaaggtgttgcatcgcattctagacaggggcattgactggaaaccattgaaaccgatcaaactaattcgttattcatctgacgaaatcattattaactttatgacgccgtcaccgccgcttcagtttaaagaagcctatgatgtaaatgtggcgaagatgtaccaaaataagggttttaccgttaaggatgataacggagttgttgcgatttcttccgtggaaattgtcgggcagtcaactgtatcaatcaaacttggagcgcaaacaacgggtgatgtttacgtgtggtacgcgccaaaagtgacgtacaacggtaatggtaatctctgtgacagcgattcaaccattgccccttacaactacgaatataacgccggaaacggtcagtacgaatcggcaaatattgccgcacttgtaaataaaccctatccgttaaataactggtgtgttgcattcagaataaaagtagaggaaatataa

SEQ ID NO: 235109 - DNA, 327 bp, Klebsiella pneumoniae
gtgctgccgcccagcaagcccaggatgcagctggctcagctcttttatccaagcaaagcgcggctacatcagaagaaaactcactgcaatatgcaacagaggcgggagttgcaagagatgaggctgtggcttccgcatcaaccgccgcagagttcggcgacaataagctcacctttgctgataccactgccggtcttgcagggacaacatctggtcaatatttccgggttcctcagggtgccggtaatgttctggcatttagatattaccaaaataatgccggcgtggcttctgaggttgctgagtatcccgggcaaggttccataa

SEQ ID NO: 235110 - DNA, 705 bp, Klebsiella pneumoniae
atgactaaaatgaatgtagcaaatcgcagctcagttgtcactaagatgtcaagtcgcgagatcgctaaattgacaggtaagcagcataaagatgtgcttcatgactgccgaaaaatgttcgaatcgctcaatcttcaatcggcggacttttccgccgattaccaagatggccgaggacgcacttatcaggagtactggcttgatcaggacctgaccatgacactgatgatggggtacagcattccgctccgtcataaagtagcgactcgctggcgtcaactggagtcaggcgaggttctaccgcagaaatcagcgtcgcatcttcctgagttccggcgcgcccgcgcaatcaagatggaggttgaggcgatgagcctcgctctttcctttatgccgaagcttagcgatgtcgccaagcaaaccgcaatggcacgggcggtaaatgatgcggcgggtattgagttgttgccattacctaagctcgaagagcattaccacagcgctagcgaagtgggagaaatgctcggcgtatcggcgcaaaaggtggggcgtatcgccaatgccaacaatctcaagacggacgaatttgggatttttgtgatggataagtcagcctactccagcaagcaggttgaggcgttccgctacaatgcagaaggggttcaggcgcttcgccaccttattcatggtgctgatgtggcttaa

SEQ ID NO: 235111 - DNA, 654 bp, Klebsiella pneumoniae
atgataaaaaaaacagttttaatattttttattgctttgtctggctgtgccatgtccccatctgaatatattgattaccagaaagccaacaagtttgatgaaacaaagttccctactaattctagcggcatgcagtctgtaaaagatttgcgagaaatttataaaaaggaaaccggggacaatcttccagagcaagatacaagtgactgtctaaaagacaataaatgctatttcaatagatacagcgatcttcttcacgatctaatgtaccaacgacaaattgagaagcagaaaaaagaaaacgaagcatttgcagcgcagaaagaagctgagtgtcaggctagtaaggagtgtatggccaagcgtgagattgatgccgcgtcttacactttaaataatgtctactattctctaatggcccgatacccataccagcaggctgactctgacgccggggtaaggcatatgtgccgggtggctggagcagctcaaagggaaggcgtgacccttgagtttatgaaacagcacatcagcttaacagaaggaattggccctgaaatgagataccaaataatccaggttgctgaggcctgctggaaaatgagcaagtacggcgttccggacggtaccacgcagatcaagtcgatgtactag

SEQ ID NO: 235112 - DNA, 255 bp, Klebsiella pneumoniae
atgaataaccgaatcgttgagtgcgcctccagagcggggcgcgacttctcagagttcatgactggcgagaagaacatgatggaggcgctgcgttctgctgaagagttcaccgagcagttacgcattcacggctgcgttaatcaccatttcgtcaatttcatgatgatgaaagcgatcatgaaggtatttgacgacttgcgccgagaggagttgcgggaagagcgacgacgcaagcgtgaagagaagaagaaatga

SEQ ID NO: 235113 - DNA, 729 bp, Klebsiella pneumoniae
atgtctaatatcataccgattgagttcgaaggtcaccctatgcgtttttctgacgacggatggtttgatgcaaccactgccgcagagaaatttggaaaagcaccaaacgatttccttcgcttacctgaaacagactcatacattcaggcccttgagcgtagatacgggaaaatctcgtatgtaaaaacaagccgtgcccgcaaagaccgaggcggcggtacatggctacaccctaaactggccgtacgttttgctcgttggctctctgtcgattttgaaatctggtgcgatgagcaaatcgacgccatcatccagggcgcagcacatcaaattgatgacgacagaatcaaagccatttttctgcttagcgagtctcagccatgggaaaaacggttcagcgatcccttttatgccgcgctgttcaaaatgtcgggattgccgcgtcatcgccctgggcgccgtcctgctttgttcggaatgattagtgccaaatgggtttatggcccggttctgccgccagaggtttatgcagaagtcaaaagtaggctggcaactggcgacaagattcatcagcacctaaagcctgacgcgctgactctcgttgaacggcaaatcatcgccgttaccagcatagctaatggttgctcagattatcgagactttgaagcccgctgcatggccgcgttcccggttaaggggcagatgaaaatgctgtatgcggcggcgtga

SEQ ID NO: 235114 - DNA, 543 bp, Klebsiella pneumoniae
atgacagcagatcagattatcgagggcatccttggtaaagaagggggttacgtaaataacccgaatgataaaggcggccctacgcgttggggcatcacgcagactaccgcccgcgcatatggttacgcaggcgatatgaaggcgttaccacgggatacagccaaagccatttatctgtcgcaatactggactgaaccgaagttcgaccgcattgccgagttgtcgccagccattgcacaggagttgtgtgataccggcgtgaacatggggccgcgtgtcgccagtacattcctgcagcgctggttatcggcgctgaatatgcagggcaagctatatccggacctgaagccggacggcgcgatcggcaatatcaccatcgccgccctgaaaagttatctcgctgttcgtggcaaagatggtgaaaccacactactgaaggggctgaattgcagccagggggctcgctatcttgagcttgctgaagctcgggcggcaaatgaagattttctctatggttgggtaaaggaaagagtggaactatga

SEQ ID NO: 235115 - DNA, 1179 bp, Klebsiella pneumoniae
atgagcagtaataatcagagaaccttcaaagacttagtaagcatatacaaagctgcttcctttgtaggcaacacatctgaagcctctattatgctcgacaaggaagagctgcgtgagattctgcatgatatcgcgcagcatcctgatgactttggggtaacgattgagtctggcaatttagagctcggagagatcctaaccttacatgtagccccaccaaaacttcgtatggggcaacttcacttttcatttaacgaataccttaaaaattctaaaaacaggataaaagaagcaaataatttttttattgtcgaccttaatttttacaataaagaacgtgaggcattgccaatcatatcaagataccgcaatgtgttacgattaattactttatttaaagaatgttctgcatatctcgacgagactaatgctgagcttgttttcgtcgacactaatgttcttaaaataccggtaaactatactgctgaagaccttgtcgattctaatgacagtctcattcaaagcttgatcgcaaatttcgctgaagatactcacaaagaacaaaaattaaccatacttgctagcagcataaaatccctatgcgaatcaaaaagcaaagaatcttctttctcgtctatgttaagagatttgaaactactatctgaaagttttcaaaaaggatataaagtatttgtatctggattctcctacgaaaaaatactcgatcaacttcgtgtagccaaaatagaagagatggggaaaatacataaggttttcagtgatatacagaatcaaattcttggtatacctgtcgcaacagtcatagttgcgacacaaatgaaacaagcaaacggctgggatagccaagctttaataaatactgcagtcgtgctgggtgccttattttttacaattatgattcttttcgtccttttcaaccaatggcaaacgctctcagcaataagtgacgaattaaagcataagaaagaacaagccgagagcaattacaaagcaatctacgatgatatcaatactacgtttgatagtttaacaactaggttacgcgttcagaaaatagtttttatcaccctaggtttcattgtagcctgcgggttatatttaacctttagattttattttttccttactccatatgccactcagtatctattccattga

SEQ ID NO: 235116 - DNA, 1032 bp, Klebsiella pneumoniae
atgactgcagcagaccaggtaattacaacacatagattcatcgttcatattatggaaaaagagcagcaaggtgtggccactttgttcccttgtccagatgaaaaaccggtgcagcaagcatcacgagaccttgtgaatgcactgactaaaagatattcagggcgagctggcaaaggttatggaaagtttgaagacgatcgcgatagctatcctatgggaaatatcgttgatgattactttgtaagcacaactcattccttctatgacaccagtattcgcatgctcaatcatcttaaagcacgagctgatgatgaagtaatgtctaccggtggttatgtaataattgctcataatgaggttaacggtaatcattatttaatggtagctatccttacgtccgcttctggttcaacagtgcaagatttcgacattcaagaaagtgagtatttagacatagcaaaacttcgcgttgctggtcgaattgaccttacaggtaaagtagaaggtaaagaacgttacatcagtttcctgaagggacagaactctgttgctggatattttaaaaaatttcttggatgtaatgatattttaattgcgaagcaggaaacgactaaattacgcgacgctcttttggaatttgcaactgaaagagaatttgagcctgagactcgagaagaatttctcaatcgtgctcatgaacaattgaaaaatctcaatcgttctggggaaacttttgacactcaaatatttgccaacgaactatggcctgccgatcctgatcttctagttgcaaaactgacaaatgaagggcttgaattctcagacggttttgttcctgacggcacggtcatcagggggctaatcagtttcaaaggtaaatcacgtcactggtctttaaaattcgaacgtgccgcattacatgatggaagcgttcagtatgattcagcaaacgataaattgatacttactgagattccagatactcttagggatgaaattttatcagaattgggtgaagaggatgagcagtaa

SEQ ID NO: 235117 - DNA, 1311 bp, Klebsiella pneumoniae
atgaaaaacgacctcgaaaagaaggtgatgcgtaaggttaccctacgcattattcctttcatcatgctgctgtacttcattgccttccttgaccgcgtcaacattggctttgccgccctgaccatgaatcaggatctgggattttcacccaccgtttttggtctgggcgctggcattttcttcctgggttattttctgtttgaggtaccgtcaaacttaattcttcataaagtgggcgcccgcatctggatcgcccgcgtcatgattacctggggattcgtctctggctgcatggcttttgtgcagggcacgacgagcttctacattctgcgttttctgctcggcgtggcggaagccggtttcttcccggggatcattctctatctcagctactggtttcctgccgccaggcgtgcgcaggtcactgccatctttatggccgcagctcccctgtcgacagcactgggatcgccggtttcggccgcactgctggagatgcatggcttccttggctacgccggctggcagtggatgtttgtactggaagctttgccggcgctggtgctcggtgttgtggttctgttcttcctgacggatcgtccggccaaggccaaatggctgactgatcaagagcgtgcctggctggaaaacgccatgcaagacgaggagcgggcacgggcggcaaaacagagccattccagcgcatggcgagggctagcggatatacgcgtcctggcgctggcgctggtctatttcggtacctcagccgggctgtatacgcttggcatctggtccccgcaaatcattcgcagtttcggtgcttcctcgctggagattggtttcctgaacgcctttccggcggtgatcggcgtcatcgccatgatcctctgggcgcgtcattccgatcgaaccaaagagcgcagctggcacgtcattggcgcctgcctgctggcgggtgccgggctgatatacgccggtaatgtcagcacattgtttaccgtaatggtcgccttaacgctggtcaccgtggggattagcgcatcaaaaccacctttgtggagcatgccaaccctgttcctcagcggcccggctgcggccgctggcattgccgctatcaactccatcggcaacctcggcggtttcgttggcccgatgatgattggcgtgatccgcgagcaaaccggtagctacagctggggcctgtactttgtcgccggattgctggcgctctcggccctcgtggtcatgattctttctgccagagcgaacaaatcgccgacggcagagcttccacatcctcatactcattaa

SEQ ID NO: 235118 - DNA, 951 bp, Klebsiella pneumoniae
atgttcaacgacgccattgtttatgaccgctacgggccgccggccgccgtgctgaccctgaaacgcctgccgctggcgccgctggcgggcggacgggtgcgggtcaggatgcgctttgccccggtgaatccttcggatctgatccccgtgaccggtgcctatcgccatcgcacccgactgccggccgtcgccggctatgaaggacttggcgaggtggtcgccgcgccatacggcagccggctggccgcgggacagcgggtactgcccctgcgcgggggcggcacctggcagcggtttatcgatctggatgagacctggctggtgccggtgccgccggcggttgacgatctgctggccgcccgcgggtatatcaatccgctgaccgcgatgctgatgctcaagcgctggccggttgccggaagacacctcgtgctgaccgcggcatcatcctcctgcgccagtctgctgggacagtgggcgctggcgatgggcgcccgctcggtgagcgggattattcgctcgccgcagcatcgggcgcgcctggaacaggccgggatctatccgatcctcgataccgaccgggcgctgatggagaaggtcagccagcacagcgatctggtgtttgacgcggtgggcggcgaactggcgaatacgctgctgtcggtgctgcccgggtcgtcgaccctgatctcctatgggctgttatccgggcggccgctgacccagacgcgcggtagcgcgacggtgcgcaagtttcatctgcgggaggcgctgccgacactcagcgtggcggcgtggcgggcagcgttcgacgaaatctggcagcgcctgccaacgacctcccagccgccggcccagcgcatagcgttgaacgactggcgggaggcgattgccgccgccggccagccgggaagaggcggtaagatcctgctggatttcaccgctggttaa

SEQ ID NO: 235119 - DNA, 822 bp, Klebsiella pneumoniae
atggccattgatttatcagattctcatgacagactttctcgagcaaagaaactactttcagagcttgatgaggaaataaataattacgttgctagcaacccaattaaaatagacctagtacctgacgatgggatgattgcaagcgttaacgaatcaggagaattagttttaactccagaccgttacgcacaggcaggaaaggaaaacatcttagttctaagggcgtcaattgaaaagaagcagagcaagcaaattaacataatgctcggggatgttattgaaaacatcaggatatgctatgaatacctagcacagtctatcggtagagatattgggatgagcaatgaagaatttagaaaaattcattacccatcgacaaaattagaaagcggtgttgatgctgaaattttaaaatacttcaaaggatatgaacatttagatattgtaaaaaaaataaaagataccgagccattttttaatggcaaatttaatattaaagaggttgccgagcttagcaatttaaataaacacagaaaacctataagctttattggatttgctggcggatttccggtgagtattggtaatggattgagtataggcaacatgaccattggaattgatccgcttattggttacgctgacatcacaaagattcataaaaatcatataagccagataagttattcacaaccgatagcaaatatctctattgattttagtaaaataaacacaacgaaagatgaatttgatacaccagcttacgattatgttcatcaatgcataaggcatgcagaagaagtagtaaggctcttcgaatag

SEQ ID NO: 235120 - DNA, 2766 bp, Klebsiella pneumoniae
atggcctttgatccgccgattggctcttcagcccctgaagtattattgataaacgcaaagaaccttgattttgctatgaatgacattacaacagcgttctggaaagacaggttcggtcaggaaagaaaaacctggtatgggattgaatcatctttagaagtaatgcgagcagcacaactggcggcttttatttcccagttcaatcaacaggcgcaggagtttgacgcgcagataagcagccaggcctcacgatacgaggccgtgctgcaggaggcagggagaacagttttagggcgttatgaggatggcccctggacgctgaccagttataaccagctgatttcctacggtggaacattctggaaactggctgcatcggtcgctatcggcaccggatataccacggcgggcaacacacccggaacctggaataccactgatcgggctaactttgtcgatgttgggcaagaccaactccggacggagctgggcactatttttatgcctggtgcttccggaaatgcagctactgatgtgcagttgttacaagctgcgttaaatgtcggcggcaagattagctacaatctccccggcgagtatttgtacggcactcatagcgtgattaaatccggtacgtcatttcatactgccgctggtgtgaactggaaacaggtagcaggtaaggttaacccgttcctagtcaatgaggcattttcagcgtcgcgttatgctgtaaccagcatgacgaaaaacactactgcgattaacatctaccttgatggttcggatatcaaaagcgccaactacattacggtggtctgcgaaaatcatccgttcgtacgtggagactgggcggcatttcatggtgcgaaggagttcggctacgacggggttatgcgggttatttccattaccgatgcgaacaccttcattgttgaaagtcattcgacgatgactgctgattcagccacagccaataccgatttctggaacgggctgttttgttttaaagcagacacgaatattgaggtcgatattcaggggcggatagatggcaactggcggggaaactccacggcatcaacgacggattttgacgagcgcgtcaaatttatgggcatgtcgttctggggagtcaataaccttactgtcaggcttaatgacgcatttaatatccgaaaatatgccgtgctgctggctaacgttcgaaacgtccaggtaccgcgcattaacttttataacttctcagatggcctgcatattcaaccgccttttgtcggtatcagtgtaggcacacttgccggggcaacaggcgatgacctgctggcgctgacgaacggtgactatgaggcgtatcagctcagccggggacatgggtatagtatctatgttgaccacctgatgccacagaacgccctgacggcattaaaagcggccggtgcaccgggttataagttctgggatattgatattggctctatttccggttcaacgcgtctgcaaattatctctgccatccgtgacggcattctttcctacaccgatattggacgcctccgcattcgctcgtgctcttgtgtgtcgcagacgaaagatgatttctatctcaacaccgaccaaatggagagcttcatcattgatgactacgaggtgtgctcgctaaacagcggcacctggtgcatcacgatggggaatcgttacggcatcaccggtaacatcaaacacatcggtattaaaaacatccgctataaagagggagttcctcttaaatctattgcgtacgttggctataactgcagcgtcagatttatggacctgcattttgccaacgccgcgccactcaatggcgcacaggctgttgtgcatacggagcgggccggaacccagagtggggatgcgggcgagtctgccggtggctttattgatacccttaaaatttcgggtaaatttaccttcccgaatgcaggtatcggtcggcttatctggatgcgggcgaagtggaatcgcatcttcctggataatctggtcgttgagggcggtgagcgcatcatccatgaaaaccttgtcacgggtaataagggcaaggtgttctgcaacaatgttcacgttaagggcgccagcggattctgcaacacctataacgaaatcgaggcatatcacgcatccactctgctggaaacgaccgatatgccttactggctgcgtgatattttagccaggctttatatttatggtgcggtacagaccctgaataacaatggcgtttgccgcattgagcaggggcaattttatgctaatggtcttgatgtacccgttaacctgactgatttcccgccagcaggtaatcacggtgacgtcgtgttcaatacaaatcccgtgggcaatcctgtaggacgatatcagttcaacggcgccaataatacctgggagctggagaacagggcgagcatcagtcagtcaccatcagatgcttcagcaacgatctataacccgatatggggccgggggttcaactgggttcagacgttaacgcaggacgttcagttcaccgcatcagcagcaaacctctcaacgctcaatcgcggagataaaatccgtctctacctcacccaggatgctaccggaggacgggtagtaacgttcagtacagcgtttaaattcccggttgcctgggtgagcggtggcaccgcaggccagcacaccatcggtgagtttgtctacgacgggcagttcctggtgctggagcgggctaacgtctggtactga

SEQ ID NO: 235121 - DNA, 405 bp, Klebsiella pneumoniae
atgcttgagatcatcgaagatgaaagcgacgcaaaagaagttatttcgtctaaagttcgtgataatgtcattctgcatatcgttaacttagttaataatggggaaattaccctgggcataactcttttctgtaaaggtactgtgattgcaggtgatgttattcctggttcagagtatttttcttcaatgtcggagagttgcgcagggaaaagttcaatcttgcaaaagctttatactgatattggttgtcagttttatggcaaagatcctcatccgctaaattatattcatttgaagaacgttgttgtgaaaggtgccggctcaacacttacgccatttgaaggaggccttctaagaatgcgtattgatgaaatcgatgggcatattgtggggaggccttcttaa

SEQ ID NO: 235122 - DNA, 366 bp, Klebsiella pneumoniae
atgattaacttaattactacctatcgccgccgaattttaaaagcagccttgttacgccaccagcgaaagactgggagtagcttacttgtcattaagcttaacaagggtgggattagtactatcgaattaactgagattcttcttgatggattgttgcggaaattcgagcgactggctctcggtgaatacggaaatgtggaaggcgtgaaagctcttaagggaatctacagcaactctgttgatgttaatggcagcggcgaattcctcacagaaagcgggaaagagttaatcgacgagcttatttctgaactggtggagttcgtcaaaaagcagaaaccagttactgcggagtccggcaatgaataa

SEQ ID NO: 235123 - DNA, 300 bp, Klebsiella pneumoniae
atgccaattcgtgaagagcgatccaccgccgtggtgtttggcggggcgaaaatgccggacctcagcgaggccggcaggcaatctgcggaaaagctgtttgccaccgccaccatgctactggcccacggcgggcaaaatttatttggcgaatggtctattgccgacgcagacctggcgctgatgctcaaccgcctggttctcaatggcgataaggttccggaggcgctggctgattatgcgtctttccagtggcagcgggcctcaatccagcgttacgtggcgctttccgccaaacgctga

SEQ ID NO: 235124 - DNA, 894 bp, Klebsiella pneumoniae
atgaagatcctgcttactggtggtaccggcctgattggccgacatctgatacccagattgctggagctcgggcatagcgtcacggtctccacgcgacatccggataccgcccgcgcccgtctcgatccgcgcgtcaccctgtggcgcgatttcgagggccatcaccacctcaatgacattgatgccgtcatcaatctggcgggtgaacccatcgctgataaacgctggacggccgagcagaaacaacgcttgtgccatagccgctgggatctcacgcagcggctggtgggcctgatccacgccagcgacacccctccctccgtgctgatcagcgggtctgccatcggctactatggcgacctcggcgaggtggtggtgaccgaagaagagccaccgcacaatgagtttacccataagctgtgcgcccgctgggagcaaattgcctgcgaagcgcaaagcgagcgcacccgcgtctgcctgctgcgcaccggcgtggtactggctccgcggggcggtattctcggcaaaatgacacccgcctttaagctcggcctcggcgggcctatcggcaatggcagacagtacctggcctggatccatatcgacgatatggttaacggcattctgtggctgctggataacgatctgcgcggtccgttcaatatggtttctccctacccggtgcataacgagcagttcgcccatgcgctgggtcatgcgctccatcgaccggcgattttccgcgttcccgccgccgctatccgcctgttgatgggggaatccaccgtcctggtgcttggcggccagcgcgcgctgccaaagcgtctggaggccgccggctttgccttccgctggtacgatctggacgaagcgctaaaggatgtgctgagttaa

SEQ ID NO: 235125 - DNA, 783 bp, Klebsiella pneumoniae
atgaaaaaactggcgttgtctctctctttagcgctggccctttccagcgtttccacggtctttgccgccatcccgcaaaaaattcgtatcggtaccgatccgacttatgctcccttcgaatcgaagaatgcgcagggagaattggtcggttttgatatcgatctggcaaaagagctgtgtaagcgtattaatacgcaatgtacttttgttgaaaacccgctggatgcgctgatcccctccttaaaagcgaagaaaatcgacgcgattatgtcttcgctgtcgattactgaaaagcgccagcaggaaattgccttcactgacaagctgtatgcggcagattcgcgtctggtggtgaaaaagggcagcccggtaacgccggatctcgccaccctcaagggtaagcgcgtgggcgtgctgcaggggacgactcaggaaacctatggcaatgagcactgggcgccgaaaggtatcgaaattgtctcctatcaggggcaggacaatatctattccgacctgaccgccggccggatcgacgccgcgttccaggatgaggtcgcggccagcgaagggttcctgaaacagcctattggtaaagattaccagtttggcggcccgtcaatcaaagacgagaaactgtttggtgttggcaccggtatggggctgcgtaaggaagacaacgaactgcgtgaagcgctgaataaggcgtttgcagagatgcgtaaggacggcacctacgacaagctggcgaaaaaatatttcgattttaacgtatacggcgaataa

SEQ ID NO: 235126 - DNA, 687 bp, Klebsiella pneumoniae
atgattgataaaagcgtatcgacgctgagcgaggccatcgccgggatccacgatggggcgactattatgatcggcggctttggccccgccggccagccgacctttctgattgacgccctgattgaccagggcgcccgcgacctgaccatcattaataacaacgccggcaacggggaagtgggtctcgcggcgctgctgaaagccgggcgagtacgcaagatgatctgctccttcccgcgccaggtggattcccagattttcgatgatctctaccgtcgcggcaaagtggagctggagctggtgccgcagggcaacctcgcggcgcggatccaggcggctggcgccgggctgggggcggtgtttacccccaccggctacggcacgccgctggcggaaggtaaggagacacgggaaatcgacggtcgccactacgtgctggagtacccgatcaaagccgatttcgcgctgattaaagcccaccagggcgaccgctggggcaacctggtctatcgcaaggcggcgcgcaactttggcccgatcatggcgacagcggcgaaaaccaccatcgtagaggtctcgcagctggtggcgctgggcgacctcgatccggaaaacatcatcacccccggcattttcgtccagcgcgtcttctcgctggaaaacctgactgccgcacaacgcgcctga

SEQ ID NO: 235127 - DNA, 807 bp, Klebsiella pneumoniae
atggacaagcatccagacgatttactgaccggcgacggcgatccgtttaaaggcgatcctaactttatggcctccctggcgcggggtctggaggtgattcaggcgttcacgccgcagcggcccctgctgtctatctcacagatcagtcagaagaccggcatcccgcgcgccgcggtgcgccgctgcctgtataccctgagcaagctggggttcgtctatgccgaagacggtaagaatttccagctgcggccgcggatcctggcgctgggccacgcctggctggcctcgacgccgctggcgcgttcggcgcagccggtgctgcggcatctgagcgaaatgctcaatgagtcctgctccatcgcgaccctcgacggcgacgatatcctgtatatcgcccgcgcctccagctcgcggattatgaccatcgacctggatatcggcagtcgccttccggcgtgggcgacctcgatgggccgggtgctgctgagccatcagccggaggagaagctcaacgatatgctgggccgggtgaccatgatccgctataccccacagacggtggattcggtggcgaagctgcgcgccgaactgaaacgggtgcatcagcaggggtatgccctcaacgatcaggagctggagatggggctgcgctccctcgcggtcccgctgtttaacgctcaggggcaggtccaggcggcgctcaacgtcggggtgcatgcgggccagatgacggcccgcgagatgatcgagcgcgtgctgccggagctgcaaaaagccgcccgcgagctgacgctgcttctgcgctaa

SEQ ID NO: 235128 - DNA, 564 bp, Klebsiella pneumoniae
atgaaccttgatgacaaatccctgtttcttgacgccatggaagatgtccagcctctgaaacgtaataatgacgtgcactggcatcccgggcgtaacagccgggccccgcaacgcgtcgataccctgcagctggataattttctcaccaccggctatctcgatatcgtgccgctcgccacgccgctggagtttaagcgagaagggctgcagagcggcgtgctggataagctgcggcgggggaaatacagccagcaggcgagcctctccctgctgcgccagccggtggaacagtgccggcagatgctcttcgcctttatggtgcaggcgcagaaagaggggttacgcaatgtgctgatcgttcacggcaaaggccgcgacgaccagtcccacgccaatattatccgcagctatctggcgcgctggctggaagagctgccggaggtgcaggccttctgcgccgcgcttccgcatcatggcggcagcggcgcctgctatgttgcgctgcgtaaatcggcgcaggcgaagcaggagacctgggagcagcacgccaagcgcagtcgttag

SEQ ID NO: 235129 - DNA, 1311 bp, Klebsiella pneumoniae
atgccgcaacttgatgaatacctccgccagctggcgccctccatgacccaatggcgccgtgattttcacctgcacgctgaatccggctggctggagtttcgcaccgccagtaaggtcgcggatattcttgacgggctaggctatcagctggcgctaggccgcgacgtcatcgatgccgacagccggatggggctgccggacgaggagaccctggcccgggctttcgaacgcgcccgcgaacagggcgcgccggagcgctggctgccggcgtttgaaggcggtttcgccggcgtggtggccacgctcgacaccgggcggcccgggccaaccctggcctttcgcgtcgatatggatgccctcgatctcaacgaacagcatgacgatagccaccgcccccatcgcgatcatttcgcctcctgcaacgccggcatgatgcacgcctgcggccatgacggccataccgccatcgggctggggctggcgcatgtgctcaagcagtatgccgcccagctcaatggcgtcattaaactgattttccagcctgctgaagagggtacccgcggcgcccgcgcgatggtggccgccggcgtggttgatgacgtggattatttcacggcgatccatatcgggaccggcgtgccggcaggtaccgtcgtctgcggtggagacaactttatggccaccaccaaattcgacgtgcagttcagcggcgtggccgcccacgccggcggcaagcccgaggacgggcgcaacgcgctgctggccgccgcccaggccgcccttggcctgcacgccatcccgccgcacagcgccggcgcctcgcgggtcaacgtcggggtgatgcaggccggtaccgggcgcaacgtggtgccctcttccgcgctgttaaaagtggaaacccgcggcgaaagcgaagccattaatcagtacgtgttcgagcgggcgcagcacgtcgtcgccggggctgcggcgatgtacgaagcccgctacgaactgcgcatgatgggcgcggcgaccgccagcgcaccgtcgccggcgtgggtggactatctgcgcgaacaggccgcccgggtgcccggcgtgcaacaggcggtggatcgcatcgccgccccggcgggctcggaagacgccaccctgatgatggcccgggtccaggcgcgcggcggcctcgcctcgtacatgattttcggcactgaactcagcgccggtcaccacaacgaaaagtttgacttcgacgagagcgtgatggcggtagcggtcgaaaccctggcgcgcgtcgcgcttaactttccctggcagcggggggtgtaa

SEQ ID NO: 235130 - DNA, 1446 bp, Klebsiella pneumoniae
atggaagccatttttcagtttgtggacgaggtggttgaggcacaacgcgacacctactgcgccatcgccgacgatatctgggaccacccggagacccgctttgaggagttctggtcagcccaacgactggccgacgccctggaggcggaaggttttcagctcacccgcgatgccggcgggatcccgaatgcctttatcgccagcgtcggtgagggccaaccggtcattgccctgctcggcgaatttgacgccctggcgggactcagccagcaggcccacagcgcggaaccgacgcccttgacaccgggagccaacggccacggctgtgggcacaatctgctcggcaccgcggcattcgccgcggcggtcgccgccaaaggctggctgcagcagcacggcgacagcggcactctgcgcttctacggttgtcccggcgaggaaggcggttcgggaaaaacctttatggtgcgcgaagggttgtttgatgatgtcgatgcggcgctgacctggcatccggaagcctgggccgggatgttcagcacccgcaccctcgccaacattcaggcggcatggcgatttaccggcaccgcggcccacgccgctaattcgccgcacctgggccggagcgcgctggatgccgtcaccctgatgaccaccggcagcaatttcctcaatgaacatatcatcgagaaggcgcgcgtccattacgccattaccgataccggcggcgtctcgcccaacgtggtgcaggcgcaggcggaagtgctgtatttgatccgcgcgccggagatggccgacgctgagcaaatcttcgcccgcatagagaagattgcccagggggccgcgctgatgaccgagacccaggtcagctgccgctttgaaaaagcctgctccagctatctgcccaaccgcacgcttgaggcggcgatgtatcaggcggtctgtcattacggtacccccgcctggagcgacgaggaacgcgcttttgccgcggcgatccgcgccactctcagcgccaacgatattaacaacagcctgaacaatattgccggcaccagtggcgaggaaggcaaaacgttcgctcgtcgccaccgcgacaccttgctgattgatgaggtggcgccctgggcggccacggataacgtcctcgccggatccaccgacgtcggcgatgttagctggaaagcgccggtggcccagtgcttcagcccgtgcttcgcggtgggtaccccgctgcacagctggcagctggtgagccagggcagaacctccatagcccataaagggatgttgctggcggggaaagtcctcgcggcgaccgccatccgtttattcagcgacagcgccctgctggcggccagccagcaagagctcaggcaggtactggccgaacgcccctatcgttgcccgatcccggcggaggtgagtccgtccgttttacgataa

SEQ ID NO: 235131 - DNA, 159 bp, Klebsiella pneumoniae
atgcaatatatactgactggcgtaatcgtactgatcttcagcggtctggttattcacggtatgtcgctgttgcttgagcgggggtatcgcgcgcttttcggcatattcgccggagccggggaagcgacccgtaagttcaaagtgaagatatcgcgttaa

SEQ ID NO: 235132 - DNA, 516 bp, Klebsiella pneumoniae
atgttgaccttgctgcaggataaaatggataccccgctggggccgttgtgggtgctttgcgacgaacagtttaatttgcgcgccgtcgagtgggacgagcaccgcgatcggatggaaacgctgctcgacgttcactatcgccgggaaggctatcagcgcgtcgactgccgcaatcccggcggtctcagcagtaagctgagcgactattttgccggcgatttagccattatcgagactctgcctaccgccaccgccggcaccccttttcagcgccaggtctggcaggcgttacgcgatatcccttgtggccaggtgatgcactacggccaactggccgaggcgctcggtcgtcccggcgccgcgcgcgcggtgggcgccgccaatggcgccaatccggtgagtatcgtggtgccctgccatcgggtcatcgggcgcaacggcaccatgaccggctatgccggcggcgtacagcgtaaagagtggcttttgcgtcatgagggctatctgttgctttga

SEQ ID NO: 235133 - DNA, 753 bp, Klebsiella pneumoniae
atgatccctgagaagcgaattattcgacgcattcagtctggcggttgtgcaatccattgtcaggattgcagcattagccagctctgcatcccctttactctgaacgagcatgagcttgatcagctggataatattatcgagcggaaaaagcctatccagaaaggtcaaaccttgttcaaagccggtgatgagctgaagtcgttgtacgctattcgctccgggaccatcaaaagctataccatcaccgagcaaggtgatgagcagatcactggcttccatctggcgggcgacctggtgggctttgacgccatcggcaccggtctgcacccgagctttgcgcaggcgctggaaacctcaatggtctgcgagatccccttcgaaacccttgacgatctttccggaaaaatgcccaatctgcgtcagcagatgatgcgcctgatgagcggtgagattaaaggcgaccaggatatgatcctgttgctttccaaaaagaatgccgaagagcgcctggccgcgtttatctataacctttctcgtcgtttcgcccagcgcggcttctcaccacgtgagttccggctgaccatgacccgcggcgatattggcaactatctcggcctcaccgtcgaaaccatcagccgtctgctgggccgttttcagaaaagcggcatgctggcggtgaaaggcaaatatatcactattgaaaacagcgatctgctggcccagctggccggacaggcgcgcaacgttgcttaa

SEQ ID NO: 235134 - DNA, 948 bp, Klebsiella pneumoniae
atggcgaagtatcagagcatgctggtagtaatcgatcctaaccaggacgaccagccggcgctaaggcgagcggtgtacctgcaccaacggattggtggacgcatcaaagcctttttgccgatctatgatttttcctatgaaatgaccaccctgctgtcgccggatgagcggacggcaatgcgccagggcgtcattgcccaacgaacggcctggatccgcgagcaggcgaaattctacctggaatcgggcgtgccgattgacgtgaaagtggtgtggcacaaccgccccttcgaagcgattattcaggaggtggtcagtgagaaacacgatctgctgctgaagatggcccaccagcacgacaaactggaggccgtgatctttaccccgacggactggcatctgctgcgtaaatgcccttgcccggtgtggatggtcaaagaccagccgtggccggaaggcggcaaagcgctggtcgccgtcaatctcgccagcgaagagaattatcacaacacccttaacgagaagctggttcgcgaaacgctgtcgctggcggaagaagtcaaccacactgaagtgcacctgatcggtgcctacccggtgacgccgatcaatatcgcgatagaactgccggattttgatcccagcgtctacaacgacgcgatccgcggccagcatctgctggcgatgaaagcgctgcggcagaagtttggcatcgatgaaaaattcacccacgtcgaaaaaggactgcctgaagaggtgatcccggacctcgccgagcatctgcaggcggggatcgtggtgctgggaacagtcggacgtaccggcctgtcggcggcgttcctcggcaataccgcggaacaggttgtcgaccacctgcgctgtgacctgctggtgctgaaaccggaggcctaccagacgccggtggaactggacgacgacgacgattaa

SEQ ID NO: 235135 - DNA, 222 bp, Klebsiella pneumoniae; identical to SEQ ID NO: 211620

SEQ ID NO: 235136 - DNA, 1389 bp, Klebsiella pneumoniae
atgtctggtggattagtaacggctgcatacattgttgctgcaatcctgtttattttcagcctggcgggcctgtcgaaacacgaaacgtcgcagcagggcaactatttcggcatcgccgggatggccattgccctgatcgctaccatcctggggccggacgccggcaacgtcggctggattattcttgcgatggtgatcggcggggcgatcggtattcgtctggcgaagaaggtcgagatgaccgaaatgccggagctggtggctatcctgcacagcttcgtgggtctggcagcggtgctggtgggtttcaacagctacctgcagcatgaaaccggtatggagcaaattctggtcaatattcatttgaccgaagtgttcctcgggatcttcatcggcgcggtgaccttcaccggttcggtggtggcgtttggtaaactgcgcggcaaaatttcctccaggccgctgatgctgcccaatcgccataagctgaacctggcggcgctggtggtttccttcatcctgatggtgatttttgttcgctctgacagcaccggcacccaggtcctgtgcctgctggtgatgaccgcgatcgcgctggcctttggctggcacctggtggcctctatcggcggtgcggacatgccggtggtggtctcgatgctcaactcttactcgggctgggcggcagcggcggcgggctttatgctgagtaatgacctgctgatcgtcaccggcgcgctggtgggctcttccggcgccatcctctcttacattatgtgtaaggcgatgaaccgctcctttatcagcgtgatcgccgggggcttcggcaccgatggttcctccagcggcggcgatgaagaagtgggcgagcatcgcgagattagtgccgaagagacggcggagatgctgaaaaactcgcactcggtgatcatcaccccgggctacggtatggcggtggctcaggcgcagtatccggtagcagaaattaccgagaagctgcgggcgcggggtatcaaagtacgctttggtattcatccggtggccgggcgcctgccggggcatatgaacgtcctgctggcggaagccaaagtgccttacgacatcgtgctggagatggatgagatcaacgacgatttcagcgacaccgacaccgtgctggtgatcggcgccaacgataccgtcaacccggcggcgcaggacgatccgaagagcccgatcgccggcatgccggtgctcgaggtgtggaaagcgcagaatgtggtggtctttaagcgttcaatgaacaccggttacgccggcgtacagaacccgctgttctttaaagagaacactcatatgctgtttggcgatgctaaagccagcgtcgatgcgatcctgaaagcgctgtaa

SEQ ID NO: 235137 - DNA, 1530 bp, Klebsiella pneumoniae; identical to SEQ ID NO: 211622

SEQ ID NO: 235138 - DNA, 951 bp, Klebsiella pneumoniae
atgaagcttaaaaacaccctcctggcgtctgctctcctgacaaccgccacgttgtctgcccatgcagcgaccgagttgaccccggagcaggcggctgcgctgaagccctacgatcgcgttgtcgtcaccggccggtttaatgccattggcgatgcggtacaggcagtatcgcgcaaagccgacaaagacggcgcggcctcattctatgttgtcgacacgtcggactacggcaatggcggcaactggcgcgtcacggctgacctttataaagaagacgcgccgaaagcggatgcgccgaagaatcgcattatcaacggcgtgatggagttgccgaaagatcaggccgttgagctgatgccttacgacaccgtcaccgttcagggcttctatcgcagccagccggaagtcaacgacgccatcaccaaagcggcgaaagcaaaaggcgcctatgcgttctttatcgtccgccaggttgacgccaaccagggcggcaaccagcgcattaccgcttatatctacaaaaaagatgctgaaaaacgcgtgctgcagagcccggacgctatcccggctgactctgaagctggccgcgcagcgctggccaaaggcggcgaagcggcgaagaacgttgaaattccgggcgttgccaccaccgccgcggtgggttcgggtaccggcgttgggcgtttctttgagactcagtcttcgaaaggtggacgttacactgtcaccctgccgaacggcactaaggtcgaagaagtgaacaaagtgactgcggcgcaaatggtgccgttcgataacatccagttcaccggcaactacggcaacatgaccgagatctcctatcagacggcgaaacgcgcggcgaagaaaggggcgaagtactaccacatcacccgccagtggcaggaacgcggcggcaacatcaccatcagcgccgatttgtacaaataa

SEQ ID NO: 235139 - DNA, 1383 bp, Klebsiella pneumoniae
atggaaaagaaactgggcctgagcgccctgaccgccctggtccttagctcaatgctcggcgctggcgtattcagtttgccgcaaaatatggctgccgtggccagcccctccgctctgctcattggctgggccatcaccggcgtcgggatcctgtttctcgctttcgccatgctgctgttgacccgtattcgtcccgacctcgacggcgggatcttcacctacgctcgcgaaggattcggcgaactgatcggcttctgctccgcctggggatactggctgtgcgcggtgatcgccaacgtctcctatctggttatcgtcttttcggcgctcagttttttcaccgatacccctgagctgcgcctgtttggcgatggtaatacctggcagtctatcgttggcgcgtcggttctgctgtgggtcgtccactttctggtcctgcgcggtgtccagacggcagcggggattaacctggtggccaccctcgccaagcttctgccgctgggcgcctttgtcgcgctcgccgccctggcctttcagctggatacgttccgcctcgattttagcggcctggcgctgggcgtgccggtatgggagcaggtcaaaaacaccatgctgatcaccctgtgggtgtttatcggcgtggagggggcggtagtcgtgtccgcgcgggcgcgacacaagcgcgacgttggccgcgcgacgctgctggcggtgctgtcggccctcgcggtgtatctgctggtcaccctgctgtcgctgggcgtcgtgccgcgcagcgaactggccgaaatgcgcaacccgtcgatggcgggactgatggtcaggctgatggggtcgtggggggagatcgtcattgccgccgggctgatcgtgtcggtgtgcggcgcttatctcagctggaccatcatggccgcggaggtgcctttcctcgccgccactcataaagccttcccgcgcctgtttgcccgtcagaatagcaacaacgccccctccgcctcattgtggttgaccaatatcagcgttcaggtatcgctggtgctgatctggctgaccgggtcggactacggcacgctgctgactattgcgtcagaaatgatcctcgtgccttatctgctggtcggcgcctttctgctgaaaatcgccactcgcccgctgcataaagcggtggctatcggcgcctgtatttatggcatatggttattatacgcgtcggggcctgtgcatttgctgttgtcggtggtactttacgctccgggtcttctggtctttttgtacgcccgacgtacgcaccagcacgatcgttcgctcaaacgccgcgaagtggcgctaattggtttattgctggttgccgctgtgccggcaacgtggatgctggtggggtaa

SEQ ID NO: 235140 - DNA, 723 bp, Klebsiella pneumoniae
atggctgaacaacagccccgcccgattctgatcacaggagcaggccgccgcatcggcctcgctctggcacaccattttctgcaacagcgccaaccggtcatcgtcagctatcgtacgccctatccggcgattgacggcctgcgcgaagcgggcgcgctctgcctgcaggccgattttagcagcgatgacggcattctgaccttcgctgaagcggtcaaatcacacaccaacggtctgcgcgccatcatccataacgccagcgactggatggcggaaaagccgggcgtcccgctgagcaccgtcatcaaccgcatgatgcagatccacgtccacgccccctatctgctcaaccatgcgctggaggcgttgctgcgcggccacggccatgccgccagcgacattatccatatcaccgattacgtggtggagcgcgggagcgacaaacatatcgcctacgccgccagcaaagccgccctggataacatgacccgctccttcgctcgcaagctggcgccagaggttaaggtcaacgccatcgcgccgtcgctaatcatgtttaatgagggtgacgacgaggcctatcgtcagcaggcgctggataaatcgctgatgaaaatcgcccctggcgaaaaagagattagcgatctcatcgattacctgtttaccagccgctacgttaccggccgctcattcgctgtcgacggcggccgcccgctgcgctag

SEQ ID NO: 235141 - DNA, 336 bp, Klebsiella pneumoniae
atggggctgttaatcaaagggctgttgggagcgctggtggtggtgctgattggcgtgctggcgaaaaccaaaaactacgctatcgctggcctggtcccgctgtttcccacctttgcgctcatcgcccattatattgtcgccagcgagcgggggatcgaagccctgcgcgcgaccatcgtattcggcatgtggtcgattcttccctattttatctatctgctgtcactgtggtatttcaccgggattatgcgcctgccgttggcgctggcaggcgcagtgggatgctgggggctgtgcgcctggctgttaatcctcggctggggccgtttccactag

SEQ ID NO: 235142 - DNA, 720 bp, Klebsiella pneumoniae
atgaataaaatcgtttttgttgaggatgaccctgaggtaggcacgctgatcgccgcctatctcggcaagcatgatatggatgtggtggtcgagcctcgcggcgaccgcgctgaggaggtgatcgcgcgggagaaaccggatctggtgctgctggacattatgctgcccggcaaggacggaatgacgctctgtcgcgatctgcgcgggcaatggcaagggccgattgtcctgctgacttcgctcgacagcgatatgaaccatatcctctccctggagatgggcgccagcgattatattctgaaaaccaccccgccagcggtacttctcgcgcgactgcgtctgcatttgcgccagcatattgctccggcaggcgccggatccgcctcctcaacgctcacgccacataaaaccatctccttcggctcgctgaccattgacccggtcaaccgccaggtgctgcttggcggagaaaacgtcgccctgtcgaccgccgatttcgatctgctgtgggagttggccacccacgccgggcagattatggaccgcgacgcactgctgaaaaatttacgcggcgttacctatgacgggatggatcgcagcgtcgacgtggctatctcccgcctgcgcaaaaaactgctcgacaacgccacggagccctatcgtattaagaccgttcgcaacaaaggctacctgttcgcccctcacgcctgggataactaa

SEQ ID NO: 235143 - DNA, 363 bp, Klebsiella pneumoniae
atgatgaaatacgttgtacttttggcactctcactgttcacttctctctctggctgggctttttctctcgacaacgccgatattcgactcctctgtccgcagcgcgggcaaatcgaggtgatccttcatcgctatgaacatacccagcaatcctgggggcagcatcactttgaaaccggcggcggccacgttcgccaggggccgctgctggtgatcccgtttgccaacctcgatcagatgatttaccaccagaccaccggcgagtttgcttactggtatgccgaaacggaaaagctggtgcgctgtcggctgctgagtctgacgaccacctatccggtagacattccttattatcgtgagtag

SEQ ID NO: 235144 - DNA, 1302 bp, Klebsiella pneumoniae
atgaaaaagctgttcgtgcagttctatcttctgctcttcgtctgctttctggtgatgaccatgctggtcggtctggtctataaatttaccgcggagcgcgccggacggcagtcgcttgacgatttgatgaaaagctcgctgtatctgatgcgcagcgagctgcgggagataccgccgcgcgactggagcaagacccttaaagagctggacctgaatttatcgtttgatctgcacatcgagccgatcagcaaatttaagctgtcggaaagctcgatgcagcacctgcgcgccggcgatatcgtcgccctcgacgatcagtacacctttattcagcgcattccccgcagccactatgtgctgtcggtgggtccggtgccctatctctattttctgcatgagatgcgcctgctggacgtggcgctgatggcgtttattgctatctcgctggcctttccggtgtttatctggatgcgcccgcactggcaggacatgctgcgcattgagacggccgcccagcgctttggcgaaggtcacctcagcgagcgcattcacttcgacagtatgtccagcttcgagcggctcggggtggcctttaaccaaatggccgataacattaatgcgcttattgccagcaaaaagcagctgattgacggcatcgcccatgaactcaggacaccgctggtacgcctgcgctaccgtctggagatgagcgagaatctcagcgaggcggaatcgcaggcgctgaaccgcgatatcggtcagctggagtcgctgattgaagagctcctgacctacgcccgcctcgaccgcccgcagacggagctcagcctgacgactcccgattttcccgcctggatcagcgatcacgtcgaggatatccagatggttaacccacagcgcgaggtcgccctggcgacgctgacccacggtaactacggcgcgctcgatatgcgactgatggagcgggtgctggataatttggtcaataacgccctgcgctacagcagccagcgggtggcggtcagcctgacgctgcagggttcgcgcgcatcgttgctggttgaggatgacggcccgggaatcgcccccgaggagcgcgagcgggtgtttgagccctttgtccgccttgaccccagccgggaccgggcgacaggaggctgcggcctcggcctggcgattgtccacagtatcgcccaggcgatgggcggcgaggtgcgctgcgaggccagccctctcggcggcgcccgcttctgctttagctggccggtctatcatcagctgcctgatttcacctctgcctga

SEQ ID NO: 235145 - DNA, 933 bp, Klebsiella pneumoniae
atggccagctacgacctcgttgaacgtctgaataatacctttcgccagatcgagctggagctgcaggcgctccagcaggcgttaagtgactgccgtctgctggcgggccgggtatttgaactgccggcgatcggtaaggatgccgagcacgatccgctggccactattccggtggtgcagcacatcggcaagacggccctggcgcacgccctgcgccactacagccatctgtttatccagcagcaatcggaaaaccgcagcagcaaggccgccgtacgcctgccgggggctatctgccttcaggttaccgccgcggagcagcaggatctgctggcgcgtattcagcatatcaatgccctgaaggccaccttcgagaagatcgtcaccgtcgactccggcctgccccccaccgcccgttttgagtgggtacaccgtcatttgccggggttgatcacccttagcgcctaccgcacgctgacgcccctcatcgacccgagcaccatccgcttcggctgggccaataagcacgtcatcaagaatctgacccgcgaccaggtgttgatgatgctggagaaaagcctgcaagcgccgcgggcggtgccgccgtggacccgggagcagtggcagagcaaactggaaagggagtatcaggatatcgccgccctgccgcagcgggcgcggctgaaaataaaacgaccggtgaaagtccagccgatcgcccgcgtctggtacgccggcgagcagaaacaggtacagtacgcctgccccagcccgctgatcgccctgatgtccggcagccggggggtcagcgtaccggatattggcgagctgctgaactatgatgccgacaatgtgcagtatcgctacaaaccggaggcgcagtcgctgagattgcttatcccgcgcctgcacctctggctggctagcgaatag

SEQ ID NO: 235146 - DNA, 1401 bp, Klebsiella pneumoniae
atgacaacgcatcgcagtgaaaaagactcgatgggcgccatcgaggtcccggccgataaactctggggcgcccagacccagcgctcgctggagcatttccgcatctcgaccgaaaaaatgcccggggagctgatatacgccctggcgctgaccaagcgggcggcggcgaaggttaaccaggatctcggactgctgacggcggagaaagccggggcgatcgtcgccgccgctgacgaagtgctggccggaaagcacgcgcaggagttccccctggctatctggcagaccggctccggcacccaaagcaatatgaatatgaacgaggtgctggccaaccgcgccagtgaactgctcggcggagaacgggggatggcgcgaaaaattcatcccaatgacgatgtgaataagagccagagctcaaatgatgtattccccaccgccatgcacgtcgcggcgctgattgccctgcgggaaaaagtgatcccgtcgctgcaggcgctgcgggcgacgctcaatgaaaaagcggtggccttcagggatatcgtcaagatcggccgcacccatctgcaggacgccacgccgctcaccttaggccaggagatctccggctgggtggcgatgctggaccatagcctgaagcacattgaagccagtcagccgcatcttgccgagctggcgctgggcgggacggcggtaggaaccgggctgaatacccatccggaatatgccgtacgggtggcggccgagctggcgtcgctaagcggacagccatttgtcaccgcgccgaacaaattcgaagcgctggccactgtggatgccctggtccatgcccacggcgcgctgaaaggcctggcggcctcgctgatgaaaatcgctaacgatgtccgctggctggcctccggcccccgctgcggcattggtgaaatcgccatcccggaaaacgagccagggtcatcgattatgccgggcaaggttaacccaacccagtgcgaagctctgaccatggtctgctgccaggtgatgggcaacgacgtggcagtgaatatcggcggtgcttccggcaactttgagcttaacgtctatcgcccgatggtcatccacaacttcctgcagtcggtgcgtctgctggcggacggtatggcgagctttaacgagcactgtgcggtgggtattgaaccgaatcgcgagcggatcagtcagttgctcaatgagtcgctgatgctggttactgcgctgaatacccatatcggctacgacaaggcggcggaaatcgctaaaaaagcgcaccatgaggggctgactctcaaagcctcggcgctggcgctgggctacctgacggaagccgaattcgacagctgggtgcgcccggaagagatggtcggcagcctggctattcgctag

SEQ ID NO: 235147 - DNA, 1647 bp, Klebsiella pneumoniae
atgtcgaataaaccgtttgtttaccaggatccttttccgctcaaaaaggatgacaccgagtattatctcctcagcagtgattacgtctccgtcgccgaattcgccggccaggaagtgctaaaagttgaccctcaggcgctgacccttctggcgcagcatgctttccacgacgcctcctttatgcttcgccctgcgcatcagcagcaggtggcggatatccttaacgatccggaagccagcgaaaacgataaatacgtcgcgctgcagttcctgcgcaactcggatatcgccgccaaaggtattctgcccacctgccaggacaccggcaccgcgatcatcatgggtaaaaaaggccagcgcgtgtggaccggcggcggcgatgaagccgccctggcgcagggggtgtataacacctatatccaggacaacctgcgctactcgcagaacgcgccgctggatatgtataaagaggttaacactggcaccaacctgccggcgcagatcgatctctatgctaccgatggcgatgagtacaaattcctctgcatcgccaagggcggcggctcggcgaacaaaacctatctgtaccaggaaaccaaagcgctgatcaccccggcgaagctgaaaaattacctcgtcgagaagatgcgcaccctcggtactgccgcctgtccaccgtaccatatcgccttcgtgatcggcggtacctcggcggaagcgacgctgaagaccgtgaagctggcgtccaccaaatactacgatggcctgccgaccgaaggtaacgagcacggccaggcgttccgcgacgtgcaactggagcaggagctgctgctggaggcgcagaaccttggtctcggcgcgcagttcggcggcaaatactttgcccacgatatccgcgtgatccgtctgccgcgtcacggcgcttcctgcccggtagggatgggggtttcctgttccgccgaccgcaacatcaaagccaagattaaccgcgacggcatctggatcgagaagctggagagcaacccggggaaatatatccctgagcatctgcgccaggccggggaaggcgaagcggtgaaggtaaatcttaaccagccgatgagcgagatcctggcgcagctgtcgcagtatccggtgtccacccgcctgtcgctgagcgggactatcatcgtcgcccgcgatatcgcccacgctaagctgaaggagcttatcgacaacggcgaggcgctgccgcaatacgtcaaagatcacccgatctactacgcaggtccggccaagacgccggacggttacgcctccggctctctggggccgaccaccgcaggccgcatggactcttacgttgatctgctgcagtcccatggggcgagcaagatcatgctggcgaaaggcaaccgcagccagcaggtcaccgacgcctgccacaaacacggcggcttctacctcggcagcatcggcggcccggcggcagtgctggcccagcagagcatcaagagcctcgagtgcgtggcctatccggagctgggtatggaggctatctggaaaattgaagtggaggatttcccggcctttatcctcgttgatgataaaggcaatgacttcttccagcagatccagacctcgcagtgcgctcgctgcgtgaagtaa

SEQ ID NO: 235148 - DNA, 1176 bp, Klebsiella pneumoniae
atgcaaaagctgattaacgccgtgcagaactatgcatggggaagccacaccgccttaactgaactgtatggcatcgccaacccggacaatctgccgatggcagagctgtggatgggggcgcatccgaagagcagctcgcggatcctggcggccgacggccagccgcgttcactgcgcgaggtgattgacgcggataaagccgctctgctcggcgacaaggttgccgcccgctttggtgaactgccgttcctgtttaaggtactgtgcgccgctcagccgctctcaattcaggtgcatcccaacaagcgggcctcggaagaaggtttcgcccgcgagaacgccgccggtatccctctctccgccgccgagcgtaactacaaagatccgaaccacaaaccggagctggtttttgccctgacgccgttcctggcgatgaatgcatttcgcgagttcagcgagattgtcaccctgctgcagccggtggctagcgcgcatccggcaatcggcgccttcctgcagcagccggacgcgactcacctgagccagctgtttgccagcctgctaaatatgcagggtgaggaaaaggccaaggcgctgcaggtgctgcgcgacgtactggcccgtgaacaaggcgaaccgtggcagactatccgcctgatcgcggaattctatccggacgacagcggcctcttctccccgctgctgctgaacgtggtgaagctgaacccaggcgaagcgatgttcctgtttgctgaaacgccgcacgcctatctgcagggggtggcgctggaggtgatggccaactcggataacgtactgcgcgccggcctgacgccgaaatacattgatattcctgagctggttgctaacgtcaagttcgaggctaaaccggcgggtgagctgttgacccagccgcagcgtcacggcgcggaactcgacttcccgatcccggtggaagattttgccttctccctgcatgacctctccgccgaggccagcgatctggcccaggcaagcgcggcgatcgtgttctgcgtcgacggcgaagccgtactgcgcaaaggcgaccagagcctgaccctcaagccgggcgattcggccttcgtggccgccagtgaatcgccggtgcaggtcagcggccgcggccgcgtggcgcgcgttttcaataagctctag

SEQ ID NO: 235149 - DNA, 1545 bp, Klebsiella pneumoniae
gtggcgctgggcgtggtatggacaggcggcgcctggttcactggtaaacagctggaaggccggatcgccgatatggtgcagcaggcaaacgcccagctgcgcagcagcgcgccggagtcaggtctggagctgagctatcaggactaccagcgcgggctgttcagcagccatctgcagctggtggtgaagccgatcgccggtcaggctaacggctggctggccgccggtcagagcgtggtgcttgacgaagtggtcgatcatggccccttcccgctggcctcgttaaaagcctttaatctggcgccggcaatggcttccgtccacaccacgctggtgaaaaacgacgccagccaggcgctgttcgagatagccaaaggcgacaccccctttaccgtcgatacgcgcattgcctacagcggcgacagccagtcggctatcgtccttaacgccctcgactacgctaaaggcgatgagaaagtcaccttcagcggcggtcagttccagctcgacgccgaccgcgacggcaaaaacatcagcctgaagggccaggccggcagcgggcagatcgatgcgctcaacgaatataatcagaaggtacagctgcgcttcgtcaacctgaccaccgacggcgccaccgagctggccagcttcaacgaacgtatcggccagcaaaaaatgaccctcgataaactggccatcagcgtcgaaggcaaagagctggcgctgatcgacggcatggcgctggacggcggctcgacgctgacccaggacggcaaaggcgtgaacagccaggtgaactacaccgtcaacagcctcaagctgcaggggcaggatatgggcagcggcaaacttacgctgaaagtggataacgtcgacggtcaggcgtggcaccagttcagtcagcagtacagcgcgcagtctcaggcgctgctggcgaaaccggagctggcgcagaatccggagctgtatcagcaggccctcaccgaaacgctgttcaatgcgctgccgatcctgctcaaaggcaacccgtcggtgaccatctctccgctgagctggcgcaatgccaaaggcgaaagcaccctcaacctctcggttctgctgaaagatccggcccaggtgaccgctccgccgcagaccctggcggacagcctggatcgcgtggtgcagtccctggacggcaaagtggtgatcccggtggatatggcgacggagtttatgactaagatcgccggtctggaaggctatcagccggccgatgccgccaagcttgccgatcagcaggtcaaaggcctggcggcgatgggccagatgttccgcattaccaccatggaagataacgccatcagcagcagtctgcagtacgcgaacggccaggtgacgctgaacggacagaaaatgccgctgcaagattttgccgcgatgtttggtctggaagcgccttcgctgccggacagcgcgccgcaggaaggccagccgcagcaggaaggccagccgcagcaggatgacgccgctcctcagcaggacgacgccgccccgcagccgtaa

SEQ ID NO: 235150 - DNA, 1029 bp, Klebsiella pneumoniae
atggcaatcgcaaaaaagatcaccatcaatgatgtggcgctggctgccggcgtctccgtgagtaccgtttcactggtactgagcggcaaagggcgcatctccagcgccaccggcgagcgggttaatcaggctatcgaacagctgggatttgtgcgcaatcgtcaggcggcctcgctgcgcggtgggcagagcggcgtgattggccttatcgtcagcgacctgtcaaaaccgttttatgctgaattaaccgccggcctcaccgatgccctggagaggcaggggaaaatggtatttctcacccagggaggccgcagcggcgagaagatggcccagcggtttgatacgctggcggcgcagggggtggacggggtgattatcgccggggcgatcgaccgcgggagcgagctgcgcgagcgtgcggcggaggcgggggtgccgctggtgtttgcttcccgcgccagctatcttgacgatgtcgacctgatccgcccggacaacatgcaggcggcgcagctggtgacggagcatcttatccgccgcggccatcagcggatcgcctggctcggcgggcagagtgcttcgctgacgcgcgccgagcgggtcggcggctattgcgccaccttgctgaaatacggcctgccgtttcacagcgaatgggtgctggagtgcgagtccagtcagaagcaggcggcggaggcgatgaccggcctgctgcgccagaatccgaccattaccgcggtgctgtgctacaacaacgtggtagccaccggcgcgtggttcggtttgttacgggctggaagacagagcggggaagatggcgttgagagctactttgagcagcgggtggcgctggcggcgtttgccgacgtgccggaggccgccctcgacgacctgcccctcacctgggtgaccaccccggcgcgggagatggggaaaagcctggcggattcgatgctgcggcggctggaagaggggactggcgagacgcgaaaccagattatgcccccgcggctggtgacgcgaaaataa

SEQ ID NO: 235151 - DNA, 1593 bp, Klebsiella pneumoniae
atgacggcgaaaacagcaccaaaaatcaccttatgggaatttttccagcagctgggaaaaaccttcatgctgcccgtagcgttgctctcgttttgcgggatcatgctggggatcggcagctcgctaagcagtcacgatgttttgactctgctgccgtggctggatatgccgctgctgcaggccatctttatctggatgagcaaggtcggctcctttgccttcagcttcctgccggtcatgttttgtatcgccatcccgctgggtctggcgcgagagaacaaaggcgtcgccgccttcgccggcttcgttggctacgcggtcatgaacctggcggtcaacttctggctgaccgcgaagggtattctgcccaccaccgacgccgcgatcctgaaggccaacaatatccagaacattatcggcattccgtcaatcgataccgggatcctcggggcggtgatcgccgggattatcgtctggctgctgcatgagcgcttccataacattcgcctgccggacgccctggccttcttcggcggcacccgcttcgtgccgatcgtcaccaccgtggtgctggggctggtcgggctggcgatcccgctggtgtggccagtcttcgctatggggatcaacgccctcgggaagatgatcaacagcgccggggattttgggccgatgatcttcggcaccggcgagcgactgctgctgccgtttggcctgcaccatattctggtggcgctgatccgctttaccgaagccggcggcactctcgacgtctgcggccacagcgtcagcggcgcgctgaccatcttccaggcgcagctgagctgtccgacgacccacggcttcgccgaaagcgccacccgtttcctgtcgcagggtaaaatgccggcattcctcggcggcctgccgggagccgcgctggcgatgtaccactgcgcccgtccggaaaaccgacataaaattaaaggcctgctgatctccggggtcatcgcctgcgtggtcggcggcaccaccgagccgctggagttcttgttcttgtttgtcgcgccggtcctgtatgtcatccacgcgctgctgaccggtctcggctttaccatcatggcggtgctcggggtaaccatcggcaacaccgacggcaatatcatcgacttcgtggtgtttggcattctgcatggcctggccaccaagtggtatctggtgccggtggtggcggctatctggttcgcggtctactatgccatcttccgcttcgccatcacccgcttcaatctgaaaacgccgggccgcgacatcgacactgccgccagcgtggagaaagccgtcgccggtaccatcggcaaatccgggtataacgtaccggcgattctggcggcgctcggcggcgcagagaacattgtttcgctggataactgcattacccgtctgcgcctgtcggtgcacgatatgagcaaagtggacgccgccgcgctgaaagcccatcgcgccatcggggtggtacagctcaaccagcataatctgcaggtggttattggcccgcaggtacagtcggtaaaagatgagatggccacgctgatgaataccgtgcaggcctga

SEQ ID NO: 235152 - DNA, 1173 bp, Klebsiella pneumoniae
atgtttgattttgccacccctatcgatcgccacggcacctggtgcacgcaatgggactatgtcgccgaccggtttggcgccgccgatctgctgccgttcactatttccgatatggatttcgccaccgcgccctgtattctcgacgccgtcagccagcggctggcccacggggtgttcggctacagccgctggcgcaacgaggcgtttctcggggcgattgcccactggtacgccagccgctttaacagcgacatcgatccgcaatctgtggtctacggaccgtcggttatctatatggtggcggaaaccatccgccagtggtcgaaagaaggcgacggcatcgtggtccacacccctgcctacgatgcgttctataacaccatcaccgctaaccggcggcggattgccccggtgccattgatcctgaaggataatcggtggcgctgcgatatggagcgcctggaggcggcgctggcggagccaaagaataccctgctgctgctgtgcagcccgcacaacccaacggggaaagtctggcgtcgcgaggagctggagaccatggcggccctgtgtcaaaaacatggcgtcagggtgattagcgacgaaattcatatggacatgacctggggcgaacaccgccatatcccgtggagcgaggtcgctcagggaccatgggcgctgttcacctccggttcgaagagcttcaatattccggcctttaccggggcctacggctttatccccgaagagaacgagcgcgacagctacctgcaggcgctaaagggtcgcgacgggctctcttccccttccgtgccggcgctggtcgcccatatcgccgcctaccgcgacggggctccctggctcgatgccctgcgcgactacctgcaggcgaatatgcgctatgtcgccgacacgctcaacaacgccttccccgcgctctgctggcagccgccggaggccacctacctggcatggatcgacctgcgcccgctcaacgttgacgatcgcgcgctacagcaggcgctgatcgccgaacagaaggtggcgattatgccgggttatacctatggtcctgagggcaacggctttctgcgtctcaacgtcggctgcccgcgcgagaagctggaacgcggtgtcgaaggactgattgccgccctgcgcagcctcagctga

SEQ ID NO: 235153 - DNA, 1029 bp, Klebsiella pneumoniae
atgagtcaagacgtcaccgcgaagatgttaaagcccgattttgatagtgaagtttccggcctggtgcatggctatttgtttcatgaacagcgccccccgcagccgatcgcctctggcgaggtctgcgcccgctatcaggcgctcgccgatgacaaggcgtttatctggttacacctgaatcttaatcacgccaccgccgagaaatggttaaccagccactttccggtggccgattttttcttcgaggagatccgcagcggctcgcacaccacccgcattgagcgacagggggaaaatctgttcgctgtgcttaacgatgtgctgtttcgtccgcaggataccagcgcggaaaccgccacgctgtggctctactgtagccccaggctggtggtgacggcgcgcttcaaaccgttgcggtttatcgaatggatgctgccgcgcttgcagacgctcagggtgaacacgtctactgagctgctggcctttctgctggaggagcaggaggaggtgctggagcaggtcgtccgccaggccagccgccatgttgaccttattgaagagcgtcttctgagcaatcacgtgcagcgcaaccgggccgatctggcgcggctacggcggatgcttttacgcttccagcggctgctggcgccggagccggcggcgatgttccggctgcttaaccggccgccggcgtggatggatcgcgcggtggtgcaggcgtttcgtcagttcaccgaagagtttagcgtggtgcttaacgatctgtcgggcctgatcgagcgcatcagtctgctgcaggaggagattggcgcccgccagctggagcagagcaatcgcaccctctataccctgacggtgatcaccgtcctcgcgctgccgattaacatcgtcgccggtttcttcggcatgaacgtcggtgggatcccgctggcaagcaaccaccacgggtttatcctgctggtggtgattgtcgctgtctttaccctcggcgccggttatctggcgtttcgccggcgcgatgacctgtag

SEQ ID NO: 235154 - DNA, 204 bp, Klebsiella pneumoniae; identical to SEQ ID NO: 211639

SEQ ID NO: 235155 - DNA, 480 bp, Klebsiella pneumoniae
atggttgccatgccgtcggcgcaggccggggaattaagcctctattcgatgaataccggctcctatgtctatcatatgacgggtaaccacggacaatataacgaacatttcaataacaactttttctcggtggagcgcaagttttctcagaattcaaaatacagcgtgctggtcggaacgatgaaaaacagctttgacgatcgttgcctgaccctcggcgtgcgccgcgactggctgaaaaacgataccggctgggtactgaaaggggtgtatgcctataccggggaatttttctttgatgccttcagccactgtggggattccggcacctaccgcaccgccaaaaaaatcaccggcatcggtttttcgccctacctctatcatggcctgcaatataatttcaccgattatttcggtgtggaaggcggcattattgtgccggcgatctttgtgatgagtgttcagtggagctttcgctag

SEQ ID NO: 235156 - DNA, 354 bp, Klebsiella pneumoniae
gtgttagccactctcctcgttgcgctggtcgctattattcatctcgccatcctggtgctggagatgtttctctgggaaggctccgccgggcgccgggcctttaacctcagcgccgatttcgcccggcagacccgggtgctggcggccaaccagggcttgtataacggctttctggccgccggcctggcatgggggctgtggctgggggcgccgggggtgcaggtggttatctttttcctggcctgcgtgctggccgccgggattttcggcgcgctgaccgccagccgcaaaattctctatattcaggcgctgcccgcgctgctggcgctggttgccgtgctgacgcaagcgtag

SEQ ID NO: 235157 - DNA, 1209 bp, Klebsiella pneumoniae
atgacatggcaatccttcaaacaggcctggcttatccggttctggtctcctgtcccggcggtcattgccgcgggcattctctctacctactattttggcatcaccggcaccttctgggcggtgaccggcgaattcacccgctggggtggtcagctgctgcagctgctgggcgtccacagcgaacagtggggctattaccagctgatacatctcgaagggtcgccgctgacccgcatcgatggcaggatgatcatcggcatgttcggcggctgcctggccgccgcgctgtgggcgaataacgtcaaactgcgcttgccacgcagccggatccgcattgcgcaggccgtggcgggcggcatcatcgccgggttcggcgcacggctggcgatgggctgcaacctggcggccttcttcaccggcattccgcagttctccctgcacgcctggctgtttgccatcgccaccgccatcggctcctggtttggcgcccgcttcacgctgctgcccctttttcgcatcccggtaaaaatgcaaaaagtgtccgccgcctcgcccttaacccaaaaaccgcagcaggcgcgccgccgcttccgcctggggatggtggtctttttcgccatgatcggctggggcctgctcaccgccgcagaccacccggcgctcggcctggcgatgctgttcggtattggctttggtctgcttatcgagcgcgcgcagatctgctttacctccgcctttcgcgatatgtggatcaccggccggacggtgatggcgaaggcgattatcttcggcatggcggcgagcgccatcggtatcttcagctatgtgcaattggggatggcgccgaaaattatgtgggccggtcctaatgcggcgattggcgggctactatttggctttggcatcgtgctggccggcggctgtgagaccggctggatgtaccgggcggtggagggccaggttcactactggtgggttgggctgggcaacgtcatcggctcaacgctgctcgcctggtgctgggaagatatcgccgccccgctcgccacccactggcagaaagtcaacctgctgaacgccttcggtccctttggcggactactggccacctatctactgctgctgatcgccctgctgctggtgatcgcctgggagagacattttttccgccgccaggcggcggtccggaccgtgaaggagagcgcatga

SEQ ID NO: 235158 - DNA, 234 bp, Klebsiella pneumoniae; identical to SEQ ID NO: 211643

SEQ ID NO: 235159 - DNA, 393 bp, Klebsiella pneumoniae
atggaactgctggtcaggctgggtcatttttttgagcaagcgcgttctgacgccgactatgccaccttcgccaatgaactgcgtcggcatcaggtctcctactacatctattttgtttccaccggcaatatgaatttcgtaatggcaaacgacgaggtggtctcggtaaaaagcgcccgcgggctgctgcgcgttcgcgctgaggccagccattgtctgaccagggccgccgttatccgccactttgcccgggccattaactttgaacagtactgccgggatctcgccagcgccggggtgtttaagtggatcgtcgatctggaagaggagacccggcactactggtcgaaggataatacgctgttatataaagagtgcctgatgcccccctga

SEQ ID NO: 235160 - DNA, 159 bp, Klebsiella pneumoniae; identical to SEQ ID NO: 136317

SEQ ID NO: 235161 - DNA, 999 bp, Klebsiella pneumoniae
atgagtaaacttgggattaatggatttggtcgtatcggacgtctggtgttacgtcgtttattagaagtcgacagcagcctggaagtggtagctatcaacgacctcacttcgccaaaggtgctggcctacctgttgaagcatgattcaaactacggccccttcccgtggagcgtcgactttaccgaagatgcgctgatcgtcaacggcaaaaccattacggtgtatgccgaaaaagaggcgcagcatattccatggcaggcggcaggcgccgaggtgattgtggagtgtaccgggttctacacctcggccgagaaatcgcaagcccatctccaggccggcgcgcgcaaagtgctgatttccgcccccgccggcgagatgaaaaccatcgtctacaacgtcaacgatgacaccctgaccccggatgacaccatcatctccgtggcctcctgcaccaccaattgcctggcgccgatggccaaagttctgcaggatgccttcggcatcaccgtaggcaccatgaccaccatccacgcctataccggcacccagtcgctggtggacgggccgcgcggaaaagatctgcgcgcctccagggcggcggcggaaaacgttatcccgcacactaccggcgcggcaaaagccattggcctggtgatccctgccctgagcggtaagctgaaaggccatgcccagcgcgtaccgaccaaaaccggctcagtgacggagctggtatcggtgctggagaaaaaggtgactgcggatgaggtcaatcaggcgatgaggcaggcggctgagggcaatgaatcctttggttacaccgaagaggagatcgtctcttccgatatcatcggcagccatttcggttcgatctacgatgctacccagctggagattgtggaggccggcggcgtacagctggtgaaaaccgtcgcctggtacgataacgaatacggctttgtcacccaactgatccgcgtgctggagaaatttgcccgctaa

SEQ ID NO: 235162 - DNA, 1440 bp, Klebsiella pneumoniae
atgacagcacccgttcaacacccgatgtatattgatggccagttcgtttccggtcgcggcgacggctggatcgacgtgcttaacccggcgaccgaagcgctgctgtcgcggatcccggacgggactgccgaagaggcgcggctggcgattgacgccgccgagcgcgcccagcccggctgggaagcgctgccggccattgagcgtgcgggctggctgcgcaaaattgccgccggtatccgtcagcgtgccgacgagatcgccgggctgattgtcgctgaaggcggcaagatccagcagctggcggcggtggaggttgcgttcaccgcggactatctcgactatatggcagaatgggcgcgccgttacgaaggtgagatcgtgcagagcgatcgcccgggggagaatatccttgtctttaaacgcgcgctgggggtgaccaccgggatcctgccgtggaacttcccgttctttcttatcgcccgcaagctggcgccggccctgatcactggaaataccatcgtcattaagcccagcgaatttacgcccaataatgccatcgcctttgccgagattgtccatcaggttgggttgccgaaaggggtctttaaccttgtgcttggccgcggagaaaccgttggccaggagctggccggcaatccgaaggtggcgatggtcagcatgaccggcagcgtggcggcgggagaaaaaattatggccgctgcggcgaaaaatatcaccaaagtgtgcctcgagctcggcggcaaagcgcctgccattgtaatggacgatgcggatctggagctggcggtgaaagcggtagtggactcgcgggtgattaacaccgggcaggtgtgtaactgcgtcgagcgggtctatgttcagcagggaatatacgaccgcttcgtcaaccgcctcggtgaggcgatgaaggccgtccagtttggcgacccggcgacgcgagatgacatcgcgatggggccgctgatcaacgcggcggcgcgggaccaggtggcgggcaaagtggcgaaggcggtggcgcagggggcgcgggtggcgctgggcggtcagccgctggagggcaaaggctatttttatccgccgaccctgctgctggatgtacgtcaggagatggacattatccatgaggaaaccttcggtccggtgctgccggtggtggccttttcgaccctcgatgaggcgctggcgatggccaatgacagcgattatggcctgacctcctcaatctatacccgcgatctgaacgtggcgatgaaagcgattaagggactgaagtttggcgaaacctatatcaaccgtgagaactttgaggcgatgcaggggttccacgccggctggcgtaagtcggggatcggcggggcagatggccgccacggcctgaatgagtacctgcagacccaggtggtctatctgcaggcctga

SEQ ID NO: 235163 - DNA, 801 bp, Klebsiella pneumoniae
atggcagaacaatttcctccgctgtcggcagcgacgctggcggcggctaaccaggtcggcgcctggctggcgcaggacgatctggcgacgctgcccgcgctgccgcaggtggacgtggtagtgctggccggcaacgccgtgatcccagccatcgacgccgcctgccgtctggcggcggcgcaggcggtcccgctgctgatcagcggcggcgtgggacattctacgggctatctctacgaggcggtgcgccaggatccccgttaccgtacgttgccggtggatggccgcccggaagcgcatgttctggccgacattgctcatgactactggcacatcccccattcgcggctggtggtggaggaccagtcaaccaactgcggtgagaacgcccgttttacccggaccacgctggagagccgggggctcgcccatcgtcgcgggatcgtcattcaggacccgactatgcagcggcgaaccatggctaccttcgcccgcgtctggcagggggcgacgccgccgccgcagtggttgagctttcccggctgctcgccggtgctggagcagaccgatggccaactggggttcgcgggcggcggagcggggctctggccggtcacccgctacctggcgctgctgctgggcgagctgccgcgcctgcaggatacccctgaagggtacggtccgcggggaaaagacttcatcagccatgtcaccttcccgccggagatcctcgacgcctggcgacagctgcgggaggacgcccagcttgccggggcgctgcaggcccgcaccctcggctga

SEQ ID NO: 235164 - DNA, 1326 bp, Klebsiella pneumoniae
atgagcaatccacaagacaacactgcatccattctgcagaaaaacaagaaggtactgatcgcgagcctgacaggcagcgccatcgaatggttcgattattttctctatggcaccgccgccgcgctggtgttcaacaaaatcttctttccgatggtcgacccggttatcggcctgatcctctcctggctctccttctcgctgacgttttttatccgccccatcggcggcgtgattttcgcccatatcggcgatcgcatcggccgcaagaagacgctggtgctgaccctgtcgctgatggggagcgccacggtggcgatcggcctgctgcccacctacgagatggtgggcctctgggcgccggccctgctgattatcctgcgcattattcagggcatgggtatcggcggcgaatggggcggcgcgctgctgctggcctatgaatacgcgccggaaaagcggaaaggctttttcggcagcattccccaggccggggtgaccattggcatgttgatggcgacatttatcgtctcgctgatgacgctgttcgatgaggcgcagtttctcgcctggggctggcgcataccgttcctgctcagctctgtcctcgtttttctcggcctgtggatccgcaaagatatcgacgaaacgcccgcctttaagcaggtgaaaaaatccggccaggtggcgaaggccccgctgcgcgatacgctcaagcaccactggcgggaagtgctgatcgccgccggcctgaaagtggtggagaccgcccccttctatatcttctccacctttgtggtcagctacgccaccaccaccctgagctatcagaagtcgcaggcgctggaatccgtgaccctgggcgcgctggtggccaccgtgatgatcccgctgatggggctgctgtcagacaaggtgggtcggcaaaagatgtacaccctgagcgtggtgctgctggggctgtttatcgtcccgtggttcctgctgctcgacaccggcaccggctggggcatcatgctggcgacgatcgttgccttcggcatcctgtgggcgccggtaaccgcggtgctcggcaccctgtgctctgagattttcagcgccaatgtgcgctataccgggatcaccctcggctaccagctgggcgccgcgctggccgggggcaccgcgccgcttatcgccaccggtctgctggcgaaatatgacggtgactggcggccggtggccatttatctgggcattacggtggcgatttcgctgctggcgatattctgcgccagccggatgaagtccgcgctgggcacggccccctcccgggcggaaagcgcctga

SEQ ID NO: 235165 - DNA, 1431 bp, Klebsiella pneumoniae
atgactgaacatcaacatcaggcgtcacctgccgccggaggtgaaggcgcgtcacagcttaagcgcgggctcagcgcccgccatatccagatgattgccctcggcggcgccatcggcaccgggctgtttatgggggcggggcgcaacatcgccgtcgccggcacctcgatcctggttatctatgtgctggtcgggttctttacctatatggtgatgcgggcgatgggcgagctgctgctcacccgccatgactaccgctcgtttgccgactttgtcggcgagtatctcgggccgcaggccagtttttacctcggctggacctactggctaagctgggtggtgacctgtatcgccgacgtggtggtctgcgggagctatatgcagtactggttcccggaactgtcggcgtggatgccggccctcagcatgctggcgattctgttcctgcttaacctgctgtcggtgaaaatgttcggcgaggcggagttctggttcgccctgatcaaggtgatcaccattatcgccctgatcggcaccggcggctggatgattgccaccggctggacctccccggacggcgtgacggcctccctcagccatctcaccgacccgacggcctttatgccccacggcatcaccggctttttcgccggcttccagatagcgatcttctcctttaccggcattgagctgctgggcaccatgacggcggagacccgcgatccgcagcgcattttgcccaaggcgatcaatgctctgccgctgcggattatcatcttctatctgctgtcgatggtggtgatcatcgctgtcgcctcgtggccgggggtgtcggcggagaccagccccttcgtgacgctgttcgccaaggccgggctgcctgccgccgcggcggtgattaactttgtggcgctgacctcggcgatgtcctcggccaacagcggggtcttctccagcacccgcatgctgtacggcctgtcggtggagaagcatgcgcactggcagtttcgtatcctgtcgcgcagtacccgcattccggtacgcagcctgctgttctcctgcttctgcatgctgatcggcacgctgttgctgtttctggtgccgaacgtgatgaccctgttcaccatcgtctcgaccctggcggcgattatggtggtgttcagctgggggatgatcctcgtggcctatctggtttaccgccgtcagcgtccggacctgcacgccgggtcgatctttaagatgcccgccggggtggtgatgagctgggtgagcctgctgttcttcgcgttcgctatcttcatcatgatctttgacccggacacgctgctggcgctgttggcttctccgctgtggtttatcgcgctgtggggcttctggaagctgaagcagcggcgcgaggggcagcttcagctggacaaccagagcgcctga

SEQ ID NO: 235166 - DNA, 996 bp, Klebsiella pneumoniae; identical to SEQ ID NO: 136339

SEQ ID NO: 235167 - DNA, 1341 bp, Klebsiella pneumoniae
atgtctggttttgaagcaaactttgatggcctggtcggcccgacgcaccactacgccggactctccgtcggcaatgaagcctcgcaaaataaccgcgatggtctctctaaccctaaaaaggcggcgctgcaggggctgtataaaatgaaagccctggccgaccgcggcttcgtacagggcattctgccgccgcagccgcggccgaatctgcgtctgctgcgcgaagtgggtttccagggcagcgatgagcaggttatccggcaggcggcccatgcggcgccgcagctgctctccgccttcagctccgcctcgtcgatgtggaccgccaacgcggcgactgtctcaccgtcggcggacagcgccgatggcaaagtccatttcaccgtcgccaacctgaacaataagctgcaccgtatgcaggaggcgcccaccacctcggcgatccttggcgccacgttcgccgatccgcgctactttgcccaccatgcggcgctgccgcagcatggcgacctcggcgatgaaggggcggccaaccataaccgcttctgccgggaatatgaccggcagggggtgcagtttttcgtctatggtcgacgcgccagcggcggtatcgccccggtgaagtatccggcgcggcagaccctcgaggccagcgaagcggtggcccgcctgcatcagctggatccgcgctacacggtgtttgcccagcaggcgccgcaggctatcgatcgcggcgtgtttcataacgacgtcattgcggtcagcaatcgccatgtgctatttcaccatcagcaggcgtttgtcgatcaggcgacagtgctggccacgctgcgggctaaaagcgacagtctggatatcccgttcaccagcgtggaagtgccggacgagcgggtttcgctcgacgacgccgtggcctcttacctgttcaacagccagctgctgagcaaaccagacggcaagatgctgatcgtggtgccggaggagtgccgccagcgggaaaacgtctggcgctatctcagcgatctcgccgccgatagcgcatcgccgatcgatgaagtggcggtctttgacctgcgggaaagcatgcgcaacggcggcggcccggcctgtctgcggctgcgggtggtgctcaacgaggcggagcgccagtcggtcaacgcccatagcctgatgaacgacgaacgttatcagcagttgacggcatgggtggaaaaacactatcgcgaccggctgcatgcccgcgatctggcggacccgcagctgctgcgcgaggtttatcaggcgctggatgagctgacgcagatcctgcgcctgggcgcggtctatgattttcagcgttaa

SEQ ID NO: 235168 - DNA, 1467 bp, Klebsiella pneumoniae
atggcggtaaaagcacagtttatagccgggcagtggctgccaggcagtggcgcaacgatgagcaaactggccccggaggatcagtcgctgctgtggcaggcggccagcgcgggggctgacgacgtccaggcggcctgcgccgcggcgcgcgcggcgttttatccctggtcgcaccggccgctggccgagcgtattgacgtcgtacagcgttttgccgcgctgctggagacgcataaagaggcgctggcgaccctgatttcccgcgagaccagcaagccgctgtgggagacccgcaccgaagtgcaggcgatgatcggcaaggccgcgatctccatcgaagcctatcaccagcggacgggctttcatgagtcgacgctgccggacggtaaagcgctgctgcgccacaaaccgcacggcgtgatggcggtctttggcccctacaacttcccgggccacctgcccaacggacatatcattccggcgctgatcgccgggaacaccattgtgtttaaacccagcgagctgacgccggctaccgctgaaatgaccgtccagctgtggcagcaggcgggcatccccgacggggcgatcaacctgctgcagggcggaaaagccaccggccaggcgctgctggaaaatcgtgatatcgacggcgtgctgttcaccggcagcgcggcggccggtttccacttccatcgctacttcggcggccagccggagaagatgctggccctcgagatgggcggcaacaacgcactgatcgtcgccgacgtggccgatatcgatgcggcgctgcatgtgattatccagtcggcgtttatctctgccgggcagcgctgcacctgcgcgcgccggctgatcgtgccgcgcggcgagcagggggatgcgctgctgcagcggctggtagaggccagcgcgcagatccgcgccggcaagtgggatgatcagccggcgccgtttatgggcggggtgatctctctcgacgctgcgcagaacatgctggcggcgcagcaaaaactggaggggctcggcggcaaggtgctgctgcgcatgcgccagcctgacccgcgctccacggtgctgaccccggggatcgtcgacgtcaccggtattgaggtgccggatgaagagtactttggcccgctgctgacgattatccgttacgacggcttcccggaggcgattcgcctcgccaatcagacccgctatggcctggccgtcgggctgatctccagcgatgcggcgcagtttgatcagctggcggacgaggcgcgagccgggatcgtcaactggaacaagccgctgaccggcgcatcgagtaaagcgccgtttggcggggtgggcgcctccggcaaccatcgcgcggcagcgtggtacgccgccgattactgtgcctggccgatggcctctctggtcagcgatacgctgacgcttccggcgacggtatcgccgggcctgccattctga

SEQ ID NO: 235169 - DNA, 1023 bp, Klebsiella pneumoniae
atgctatttcgtcccgtacgggaaaacgatctcgacgacatcgtccgcctcgccgcgcgggcgggggtcggcatgacctctttaccgcatgacgtcgggcgcctggcggcccggatccggcgcagtatcgagaccttcgccggcgaattgccacgcagccagcagggtttcctgtttgtgctggaggacaccgcgctggcgcgggtggtgggggtgagcgccattgaggtcgcagtgggcctggacgagccgttttacaattttcgcattcagaaaacggtgcgcgcctcgaaagcgctgggagtctataagccccaggagctgcttaatctcagctatgaccacaccgggcatagtgagctatgtacgctgtttctcgacccggcgtatcagcgcaaccgcaatggtctgctgctctccaaggcgcgctttttatttatcgccgcctttcgcgagtggttctccccgcacctgtttgccgaactgcgcggctgcagcgatgagcagggacagtcgccgttctgggatgcgctgggccatcatttcttcgacatcccgttcgccgatgccgaccggctgaccggcaccggcatgaaaacctttattgccgaactgatgccggcgtacccgatctatatctcactgctgccggaagcggcccgcggggtcatcggtcaggtgcatcccaataccgccccggcgcgggcgatcctcgagaaagagggtttcagctggcgcggctcggtggatattttcgatgccggtccggtgctggaggcggacaccgatcagatccgcgccgtgcgcgacagccagcgcctgcctgtccggcagctgatgggcgacctgccggcgccgaccctcgtcgccaacggtcaattcgacaactttcgggcgctgctggtggcccacgaagagcaggtatcgcttgacagcgccgcgctggacgcgctgcaggtcagtgaaaccgaccgcgtttttacggtaaccctgaatccagaggacaacagatcatggcggtaa

SEQ ID NO: 235170 - DNA, 1206 bp, Klebsiella pneumoniae
atgtcaggcagtatgactcgcgaagattttgacgcttacctggttccctgttttgcccccgcgccgtttattccggtcagagcggcgggctcccgcgtctgggaccagcaggggaaagagtatatcgatatggcgggcggcatcgcagtgaacgccctgggccatgctcacccggcgctggctcaggccctgcaggatcaactggcgaaactgtggcatatcggcaatggctataccaacgagccggtgctgcagctggcaaaaaccctcgtgcagtcgacctttgccgacaaggtgtttttctgcaactccggcgccgaagccaacgaggcggcccttaagctggcgcggaaatatgcccacgataaatttggcggtgaaaaaagcgaaatcatcgccttcaaccacgccttccatggccgcacgctgttcaccgtctccgttggcggccagccgaaatattccagcgattatgctccgctgccgcagggcattacccatctgccctataacgatatcgaggcggtcaccgcggcgatctcctcgcgcacctgcgcggtgatcgtcgagccgattatcggcgaaggcggggtgatcccggcggacccggcgttcctgcaggcgctgcgtaccctctgcgatcgccatcatgccactctgatattcgatgaggtgcagaccggcgccgggcgtaccggccatctctacgcctaccagcattacaacgtcgtcccggacattctcaccagcgccaaagggctggggggcggcttcccgatcggcgcgatgctggcgaaagaggcctgggcgcaggtcttccagccaggcacccatggcactaccttcggcggcaacccgctggcggcaaccgtcgctaacgccgtgctggcccatctcgatgcgccgctgctggcaggcgttggcgagcgccatgcgctgatcgttggccagttgaatgcgatctctgcccgttacgatgcgtttagcgccgtgcgcggcaccggtctgctgatcggcgctgagctggcggggccgctgcgcggcaaggccaaaacgttgaccaacctggcggcggaagaggggctgatcgccctgattgccggcccggacgtgctgcgcttcgcgccggcgctcaatatcccgctggcggatattgcggaagccttcgtgcgccttgatcgcgccgttgcccgcttaacccgctaa

SEQ ID NO: 235171 - DNA, 1275 bp, Klebsiella pneumoniae
atggaaaagttatcttacgcatctgaaagtagtacatctccatggaccacctacctgcgccagatcgaccgcgtcgcgccttatctcggcgatcttgcctactgggtggaaaccctgcgccatccgaagcgcgcgctgatcgtcgacattcctgtgcaaatggacgacggcaccatccgccacttcgagggctatcgcgttcagcacaatctgtcgcgcggaccgggtaaaggtggtgttcgctaccatccggatgtcgatcttaacgaagtcatggcactttctgcctggatgaccattaagtgcgccgcggtcaatattccttacggcggggccaaaggcggcatccgcgtcgaccccttctccttgtcggaaggtgaactggagcgtctgacccgccgctacaccagcgaaatcggcattattatcgggccgcagaaagatattccggcgccggacgtcggcaccaatggcaaagtgatggcatggatgatggacacctactccatgaaccatggcaccaccatcaccggcgtggtcaccggcaaaccgatccacctcggcggctccctcggtcgtgaaaaagccaccggacgcggagtgtttgtcaccggccgggaagttgcccgtcgcgccggtatcgaaattgaaggcgccaaagtggcgctgcagggctttggtaacgtcggtagcgaagcggcccgcctgttcgctggcgtcggcgctcgtatcgtggttattcaggatcataccgcgaccctgtataacgaaggcggaatcgatatggccgccctcaccgcctggcaggcggagaaaaagcagattgccggtttcccgggcgcccaggagatcgataaagacgccttctggaccaccccgatggacatcctgatcccggcggcgctggaagggcaaatcacccgcgagcgcgctgagaagctgacctgcaaactggtgctggaaggggccaacggcccaacctatccggaagcggacgacgtgctggccgagcgcggcgtgatcgtggtgccggacgttatctgcaacgccggcggggtgaccgtcagctactttgagtgggtacaggacatggccagcttcttctggagtgaagaggagatcaacgccaagatggaccgcattatgaccgacgctatcgtgcacgtctgggataaagccgccgagaaagagtgtacgctgcgcaccgccgcctatatcgtggcctgcgagcgcatcctgatggcgcgtaaagaccgcggcatctacccgggctga

SEQ ID NO: 235172 - DNA, 999 bp, Klebsiella pneumoniae
atgaaaacacgttatcttggaaaagagaagtttcaggtttccgcattaggtctcggatgtatggggatgagttttgcctatggcggcgctgaaacgtcgcaggcgataaatacgatccatgccgccatggacatgggcgtgaccttcctggataccgccgaagtatatggtcctttcgataatgaagttctggtcggaaaagcgattaaaggttttcgcgataaggtgcagattgccaccaaatttggatttcgtattttgccgaccggccagggtctggagcggatggccggcgttgacagccgtccggcacatattcgcgaatcagtggaagggtcgctgaagcgactgaatgtcgagaccatcgatctgctctatcagcaccgcgtcgatcccgcggtaccggtggaagaggtggtgggcactatggccgatctggttaaagagggtaaaattcgccatatcggtctgtcggaagtatctgctcagacgttgcgccgggcctgcaaggtacatccgatcgctgccgtgcagacggaatattcgctatggagccgcgagccggaggccggtattctccacacctgccgcgagctgggggtcggctttgtgccatacagcccgcttggccgcggcttcctgacggggacaattaccgatcccggcgttttgtcagcggatgatttccgccgccatctgccgcgcttccaggccgaaaccatgcgcaaaaaccagctgctgcttgagcgcctgcagcaggtggccacccgctatgacgcgacccttgcgcagattgcccttgcctgggtgatgagcaaaggcgaggatatcgtgcctatcccgggggcgaggaaaattgctcacctgcgcgacaatgccggcgccgcgaatattaccctcgcgccggaggacatcctcaccatcgaacatattttcactgccgacagcgtcactggcttacgctatacccagggcgactttgatttaatcgaaaaataa

SEQ ID NO: 235173 - DNA, 948 bp, Klebsiella pneumoniae
atgaaaaccttgcccgatctgcaacaaatagaaatattaatactcatagtgaaacatggcagttttcgtcaggccgctaaagcgttaaacctttccccaccggcccttaccgtcgctattaatcatctggaagaaaagttaggcgtgcgcctgctaaatcgctcaacacgcagtttgtcattaaccgcagtgggtgaggaatttcttaataatataacgccggtggtcaatgattatcgccgggtggtggacagtctgaattatcaccgtctgactccggaaggcgtggtgaaagttaatttaccgcgcattgttattgacctgttttttcaagactattttatcgcctttaaaaacgcctgtcccaatgtgacgctcgaactgtatgccaccgatcggaaagtcaatattatcgagtccggttttgacgccggcattcgctattcgcaggatgtgcccaaagagatgattgccatcccctttggcgagaaactatcgctgatcccggtggccagcccggactatatacgcgaagccggagagcccgataccccgcagtcattagttaatttccgctgcattaaccgctgttttcctggtggtgagaagtaccgctgggagtttattggccccagcggcgagcttagcgaggtcgcggttaaaggcgatctggtcgtcgatgccgatagcgcaatgatccaggccgcggagagcggattaggcatcgcctttgtctatcagtcgctggtgacgcagcagctgagcgcgggcagcctggtccatttgttacccgactaccgctatcctgccgaccatttctgcgtctactacccaagccggaaacatattcccgcccccctgcgggcctttatcgcctgggtgatggcgcagaataaaaatatcctcggtcagcagaccgcacgacacggatcgcggccggaagattaa

SEQ ID NO: 235174 - DNA, 432 bp, Klebsiella pneumoniae
atggacaatcgacagcttaccttctcccatcttttatacctcaccgcgcaccactggcggctggcggtcaatcgtcggctgaaaaatctcggtctcagccaggccagctgggtggcggtagcgtccatcgcccgccaccagcagccgctgtcgcaaagcgaactggcgcaggagctgggggtggagagcccgaccattgtgccgttgatccatcgtctggtcgccctcggactggttgagcgcatcaccaccgccagcgacaaacgtaagcgactgctggtggtcaccgacaaagggaaggccctctatgaacaggtcaaaacggtggctgacgatctgcgcgaagagatcctgacggcgattaccccacaggagcaggagcaaacccagcgggtgctggaaaagctgttgcgcgaagtggagaagaaataa

SEQ ID NO: 235175 - DNA, 1653 bp, Klebsiella pneumoniae
atgccccgtcgccaggataacccctacgccccgcatgactgggcgccgcatgaaaaaccggctctgctcggttcgccgtcgacgccgctgcacagtccggcgaaacgccttgcctacggcgtggtcggtctgctggtatgtctcaccggcgcgctgggcaacgcagtggtcaccgccaacctgcagctgctgcagggtaccttcgccgcctggtcgacagaaatcgcctggctgccagcggtatacgtgatgaccaacgtctccatcaacctgctgctggtgaaattccgccagcagtttggcctgcgcgctttcaccgaaggctttctggtgctctatgtgctggtcacctttttccacctcttcgtcaacgatctcagctcagcgatgatggttcgcgccgcccatggcatggtggccgcggcgctcagctcgctggggatctactaccaggtacaggcttggcctgcgcgccatcgcctgaaagggctgactatcggcatcaccggctcgtcgctggccattcccctggcgcgcctcttttccaccgaactgctgcagaccgatgaatggcgcggtctctacttctttgagctgggcctggcgctggtgtcgctggcctgcgtcatcgcgctaaaactgccgccaagcgatcgtaaaaaagtgttcgaaaaaaaagatttcattaccttctttctgctggcgcccggcatggcgctggtgtgcgccgtgctgtcgctggggcggctcgagtggtggtttgaagcgccgtggatcggctgggcgctggcggcggcggtaatactgatcgtcgctgcgattaccttcgagcataaccgcagcaaccccctgcttaataccaaatggctctccagcggcagcatcgtgcgtctgggcctgattatgctgttgatccgcatcgtgttggcggagcagaacaccggggtcatcggctggctgcagtacgttggcctgcaaaacgaacagatgactaacctcgcgtggtcgattttcgccggtattctgtgcgggatcattgccagctgtctgacgctcaacccgcagaagctctactggccgaccgccaccgcgctggcgctgatcatgatagcctcgctgctcgacagccagtccaacgccctcacccgtccggaacaattaatgttcagccagtttttactcggcttcggcagcgccttctttctggccccggcgatgctcgccgggattggcggcgtgtttgccgacccgcgcaacctggtcagcttctcggtgctgttcggtatgagccagaacattggcgggctgctcggctcggcgatcctcggcaccttccagacctggcgtgagaaattccactccagccagctggcggaccagataaccaccctgaacccgctgatcgtcgagcggctgcagcagtacagccagatgtatcagagccagattggcgacagtacgctgctcaacgttcaggccaccaccctgctgcaaaacgccgcgacgctgcaggccaatattctcgcctggaatgatacctatctgctgacggcggcgatctccgccgggacactagtgtgggttttctggcgcttaattcgcttacgactgactgcccgtatcgcgttgcaacgcgctaccggcagcaaataa

SEQ ID NO: 235176 - DNA, 1086 bp, Klebsiella pneumoniae
atgagtcagcaggatgcggccaaacaacaggccaacacccggaataatattcgcgtggtttccatttttaccgccgcggcgataggcctcgtcggcgtgctggtgatcctctacgcctggcaactgccgccgttcactcgtcatagccagtttaccgacaacgcctatgtgcgcgggcagaccacctttattagcccgcaggtcaacggctatatcaccgccgtcaacgtcaaagatttcgcgattgtccagccgggcgaggtgctgttccagatagacgatcgcatctataaacagcgggtgcatcaggcccaggctaccctggcgatgaaagaggccgcgctgcgcaataacctgcaacagcgcaaaagcgccgaggcgacgatcgccaagaatgaagccgcgctgcaaaacgcccgcgcgcagaatctgaaaatccaggccgatttaaaacgcatccagcagttaaccgccgacggttcgctgtcgatccgcgaacgtgattcggcgcgggccagcgcggcgcaaggggcggcggatattgagcaggcgaaagcggcgctggagatgtcgcgccaggaccgtgaatcgaccatcgtcaatcgcgattcgctggaggccgacgtggccagcgccaaagcggcgcttgagctggcgcagatcgacctgcagaatacccagattatcgcccccaccggcggccagctggggcagatctcggtgcgtcttggcgcctatgtcagcgccggaacccatctgacctcgctggttccgccgcagcactgggtgattgccaacctcaaagagacccagctggccgaagtacgcgttggccagccggtcaccttcaccgtagacgcgctcaacggcgagaccttccacggcaaggtgcagagtatctccccggcgaccggggtggagttcagcgccatctctccggacaacgccaccggcaatttcgtcaagatcgcccagcgcatcccggtgcgtattacggtcaacgacgggcaaaacaacagcgaacgcctgcggccggggatgtcggtgcaggtgactattgatacccgtgcggagaaacaaccatga

SEQ ID NO: 235177 - DNA, 660 bp, Klebsiella pneumoniae
atgcaacaacagtggtcggcagtagacaattatttgattaaggccttaattcccggcgatcctgtgctcgatcgggtactggaaaacaaccatcgtgccgggctcccggcacacgatgtcgccgccaatcagggtcagtttctcgccctgctggtacggctaacccaggctaagcggatactggagatcggcaccctcggcggctatagcaccatctggatggcgcgcgagcttcctgcagacggccaactcctcaccctggaggccgacgcgcatcatacccaggtggcgcgggagaatctgcagctggcgggcgttgaccagcgggtcacgctacgggagggacccgcgctacagtccctggaggcgcttggcgaatgtcccgctttcgacctgatcttcatcgatgccgataagccgaataacccccattatctgcgctgggcgctacgttattcccgcccaggaaccttaattattggcgataacgtggtacgcgacggcgaagtggtcaacccacagagcgccgacgagcgcgttcagggcgtgcgtcagttcattgagatgatgggcgccgagccacggttgacggcaacggcgctgcagaccgtgggcactaaaggctgggacggctttactctggcgtgggtaaacgcttaa

SEQ ID NO: 235178 - DNA, 3903 bp, Klebsiella pneumoniae
atgacagaacaacaaaaaatcaccttcccccagctttatcaacagctcgacggcctgatgctgcgcgacaaaacgcgctttgcccgccgtctacacggcgtgaagaaggttaaaaatcctgaatcgcaacaggccattctgcaggagatggcgctggagataagccaggcagccggtaaagtcctgctgcgcgaagcggcgcgtccggctatcacctatccggaaaacctgccggttagccagaaaaaacaagagattctcgaggcggtgcgcgaccaccaggtggtgatcgtcgccggggagaccggttcgggtaaaaccacccagctgcccaaaatctgcatggagctggggcgcgggctgaaaggactcatcggccatacccagccgcgtcgcctggcggcgcggaccgtcgccaatcgtattgccgaagagctgcagagcgagccgggcggctgcatcggctataaagtccgcttcagcgaccacgtcagcgaaaacaccatggttaagctgatgaccgacggtatcctgctggcggagatccagcaggatcgtctgttgatgcagtacgacaccatcattatcgatgaggcgcacgagcgcagtctgaatattgactttctgctcggctatctgaaagagctcctgccgcgccgcccggacctgaaaatcatcattacctcggcgaccatcgacccggaacgtttctcaaagcatttcaataatgcgccgattatcgaagtctccgggcggacttacccggtggaagtgcgctatcggccgatagtggaagaggcggacgataccgagcgcgatcagttacaggcgatctttgatgcggttgacgaactggggcgcgaagggcccggcgatattctaatctttatgagcggtgagcgggaaattcgcgataccgccgatgcgctgaataagctggatctgcgccataccgaagtgctgccgctgtacgcccgcctgtccaacagcgagcagaaccgcgtcttccagccgcacagcgggcggcgcatcgtgctggcgaccaacgtggcggaaacctcgctcaccgtgccgggcattaagtacgttatcgatcccggtactgcgcgtattagtcgctacagctatcgcaccaaggtgcagcgcctgccgatcgagccggtttcccaggcgtccgccaaccagcgtaagggccgctgcggccgcgtttcggaagggatctgtattcgtctttattcagaagacgatttcctgtcgcgcccggaatttaccgacccggagattctgcgcaccaacctggcgtcggtcatcctgcagatgaccgccctgggcttaggcgatatcgccgccttcccgtttgtcgaagcgccggataagcgcaatatccaggacggcgtacgcctgctggaagagctgggcgccatcaccaccgatgcgcaggcaacggcttataagctaaccccgctgggccgccagctcagccagctaccggtggatccgcgtctggcgcgcatggtgctggaggcgcagaagcacggctgcgtgcgggaagcgatgatcatcacctccgcgctgtcgatccaggacccgcgcgagaggccgatggacaaacagcaggcctctgacgaaaaacatcgccgcttccacgataaagagtccgatttcctcgccttcgtcaatctgtggaactacctcggcgagcagcagaaggcgctgtcgtcgaatcagttccgccgccagtgccgggtcgattttcttaactatctgcgcgtgcgcgagtggcaggacatctacacccagctgcgccaggtggtgaaagagcttggcctgccgatcaacagtgagccggcggaatatcgcgagatccatactgcgttgctgaccggtctgctgtcgcacatcggcatgaaggatgccgataaacaggagtataccggcgcccgtaatgcgcggttctctattttcccgggttccggcctgtttaaaaagccgccgaagtggacgatggtggccgagctggtggagaccagccggctgtgggggcgtattgccgcccgcattgagccagagtgggtggagccggtagcgcagcacctgatcaagcgctcatacagtgagccgcactgggagcggtcgcagggcgcggtaatggcgacggaaaaggtcaccgtctacggcctgccgatcgtcgccgcgcgtaaggtcaactacagccagattgatccggcgctgtgtcgtgagctatttatccgccacgcgctggtagagggcgactggcagacgcggcacgccttcttccgcgataacctgaagctgcgcgcggaaatcgaagagctggagcataagtcgcgccgtcgcgacatcctggtggatgacgagacgatgttcgagttttacgaccagcgcattagccacgatgtcatctccgctcgccactttgataagtggtggaagcaggccagccgcgaaacgccagacttgctcaattttgaaaagagcatgctgattaaagagggggcggagcaggtcagcaagctggactacccgaatttctggcatcagggcaatcttaaactgcgtcttagctatcagtttgaacctggcgccgatgccgatggcgtaacggtgcatattccgctgccgctgctgaaccaggtggaggaggccggatttgaatggcagatccctggcctgcgtcgcgagctcattatcgcgctgataaaatcgctgccgaagccggtacggcgcaatttcgtcccggctcccaactatgcggaagcgtttcttggccgggcggcgccgcttgagctgccgctgctcgattcgctggagcgcgagctgcgtaagatgaccggcgtgaccatcgaccgcgaagcctggcagtgggatcaggtgcccgatcacctgaaaatcaccttccgggtggtggatgataaaaacaagaagctgcaggaagggcgctcgctgcaggcgttgaaagacgccctgaagggcaaagtgcaggagacgctgtcggcggtcgctgatgacggtattgagcaaagcgggctgcatatctggagctttggcaccctggcggaaagttacgaacagaagcgcggtaactataaggtgaaagcctggccggcgctggtggacgagcgcgacagcgtggccatcaaactgtttgataatccacaggaacagcagcaggccatgtggcgcggtctgcgtcgcctgctgctgctcaacatcccgtcgccgattaagtatctgcacgagaaactaccgaataaagccaagcttgggctctactttaacccgtacggcaaagtgctggatctgattgacgattgcatctcctgcggcgttgataagcttatcgacgaggcgggcggtccggtgtggacggaagagggctttagtcagctgcacgataaagtgcgagccgagctcaacgacacggtggtggagatcgctaaacaggtcgagcagatcctcaccgcggtgttcaatatcaacaaacggctgaaaggccgggtggatatgaccatggcgctggggctgtcggatatcaaagcgcagatggcgggtctggtgtatcgcggctttgtcaccggcaacggtttccgccgtcttggcgatacgctgcgctatctgcaggcgattgaaaagcgtctggagaagatggctatcgatccgcaccgcgatcgggcgcagatgcttaaggtggagagcgtgcagcaggcgtggcagcagtggctgaataagctaccgccgaaccgccgtgaggacgacgatgtccgggagatccgctggatgatcgaggagctgcgggtcagcttcttcgcccagcagctgggcaccccgtatcctatctcggacaagcgagtgttgcaggcgatggagcaaattaccccatag

SEQ ID NO: 235179 - DNA, 606 bp, Klebsiella pneumoniae; identical to SEQ ID NO: 137444

SEQ ID NO: 235180 - DNA, 597 bp, Klebsiella pneumoniae
atgccgatatatcagattgatggactgacgccggtggtgccggaggagagttacgttcacccgaccgcggtgttgattggcgacgtgatcctcggcaaaggggtctatgttgggcccaacgccagcctgcgcggcgacttcgggcgcatcgtggtcaaagacggcgccaatattcaggataactgcgtgatgcatggcttccccggccaggatacggtggtggaagaggagggccatatcggccacggcgctattctgcacggctgcgtgattggccgcaacgcgctggtgggcatgagcgcggtgattatcgatggggcggtcattggcgaaaacagcattgtcggcgcttcggcctttgtcaaagccaacgccgagatgcccgccaaccatctgattatcggcagcccggcaaaagcgattcgcaccctgagcgaacaggagctggcgtggaaaaaacaaggtacccgtgaataccaggcgctggtggaacgctgtaagcagacgctgcaccaggtggagccattacgggaagtcgaagcagggcgtaagcggctggcgtttgatgaaaacctgcggccaaaagccgcaacctga

SEQ ID NO: 235181 - DNA, 936 bp, Klebsiella pneumoniae
atgaatcagatgagtaaactcgacgcctttattcaacaagcggtgacggcgatgcccatcagcggcacgtcattaattgcctcgctgtatggcgacgctttattacaacgcggtggggaagtgtggctgggcagcgtcgcggcgctgctggaaggattaggcttcggcgagcgcttcgtacgcaccgcgctgtttcgcctcaataaagaagagtggcttgatgttgtccgcatcggccggcgcagcttctatcgcctgagtgataaagggctgcgcctgacccggcgcgcggagcataaaatttatcgcgccagtgccccggaatgggacggtacctggctgctgctgctttcggaaggcctggagaaaaatgtgctcgccgacgttaaaaagcagctgctgtggcaggggtttggcgcgctggcgccgagcctgctggcctcgccgtcgcaaaagctggccgatgtccagtctctgctccacgaagcgggcgtcgccgaaaacgtcatctgttttgaagcccattcgccgctggcgctctccagggcggccctgcgcagccgggtggaggagtgctggcatctcaccgaacaaaatgagatgtacgaggcgtttatcgccttgttccgacctctactgccgctgctgcgcgattgcgacccgtcagagttgacgccggatcgctgtttccagatccaactgctccttatccatttctatcgccgggtggtgctcaaagacccgctgctgccggaagagctcctgccggcgcattgggcagggcaaaccgcccgccagctgtgtatcaatatttatcaacgcgtgagtcccggcgcgctggcgttcgtcagcgagaaaggtgagagctcggtgggcgagctcccggtgccgggtccgctctattatcagcgctttggcggtttgccgggcgcataa

SEQ ID NO: 235182 - DNA, 1206 bp, Klebsiella pneumoniae
atgcgcgacgcctttatttgtgacgggatccgtacgccgattggccgctacggcggcgcgctggccagtgtgcgcgccgacgacctggcggcgatcccgctgcgtgagctcctgagtcgtaatcccgggctcgacccggcagcaattgatgatgtgattttcggctgtgcgaatcaggccggggaagataaccgcaacgtggcgcacatggcgacgttgttggccggttacccgcataccgtgccgggcaccacgattaaccgcctgtgcggatcgggtctggatgccatcggctttgccgccagggcgatcaaagccggcgatgccgatctgctgattgctggcggcgtggaatcgatgtcgcgtgcgcctttcgtgatgggaaaagccagcgcgccgtaccagcgtcaggcggaactctttgataccacgattggctggcgttttgtgaacccgctcatggcgcaacacttcggaactgacagcatgccggaaacggccgagaatgtagctgaattgttaaatatcagccgggccgatcaggacgctttcgcctggcgcagccagcagcgcacggcgcaggcccagcgcgacggcattctggcgcaggagattgtgccggtgcagattgtcggccggaaaggggcggttagcgacgtgcgcgaggacgagcatccgcgcccggaaaccacgcttgagcagctggcgaaactgaaagcgccgttccgccagggcggcgtcattactgcgggcaatgcttccggcgtcaacgatggcgccgcggcgctgatcatcgccagcgaacagcaggccgctatccaggggctcacgccgcgggcgcgtatcgtggcgatggcgacggcgggtgtcgaaccgcgcctgatgggactggggccggtaccggcggtgcgtaaagtgctggagcgggcgggactcaatattaacgatatggatctgattgagctgaatgaggccttcgccgcccaggcgctgggggtgctcagacagctcggcgtgccggacgatgcggcgcacgtgaatcccaacggcggcgccatcgcgttaggccatccgctgggcatgagcggcgcgcggttagcgctgagcgccagccttgagctgcaacgccggggcgggcgctatgcgctgtgtacgatgtgtattggcgtgggtcagggcattgccatgatcctcgagcgagtgtga

SEQ ID NO: 235183 - DNA, 423 bp, Klebsiella pneumoniae
atgagcaatgatccgtggcgcaacgcgcgcgtgatgtacgaaaaagatacctgcgccagaaagatggggatcgaacttgtcgaaatagacgacggttttgcgcagatgagtatgaccgtctcggcggacatgcttaacggccatcaaacctgtcacggtggtcagctatttacgcttgccgataccgctttcgcctacgcctgtaacagccaggggctggcggcggtggcctcggcggcaagcattgattttcttcgtccggcgtttgccggcgaccggctggtcgccaccgccagagtcaaacagcagggcaagctgaccggcgtctacgacatcgaaattgttaatcaacagcaaaagattgtggccctgttccgcggcaaatcgcaccgcatcggcggcacaatcacgggagacgtgtaa

SEQ ID NO: 235184 - DNA, 1422 bp, Klebsiella pneumoniae
atgacgacatccttagtcaacgtggcggtgatcggcagcggcaccatgggggccggcatcgccgaagtggctgccgccgccgggcatccggtgcgtatttttgatattaaccctaaggctgtagacctggcgatagagggtatcgccgggcgtctggcgtcacgcgttgcgcggggcaaactggcgtcagagcaggctgatgcgctgctggcgcgcctgcatccggcccacgatttagccgcacttgccgacgcggatttagtgatcgaagcggcctctgaacggctggaggtcaaaacggcgctgttcgcgcagctggcggcgatctgcgcgccgtcaacgctgttgaccagtaatacctcgtctatttcgattaccgctatcgccgccggggtcaaaaacccggagcgggtggccgggctgcacttttttaatccggcgccggtgatgaagctggtcgaggtggtgagtggtcttgcgacctccaccgaagtggtggagcagctgtgccagtgcgtaagcggctgggggaaacagccggtgcgctgccgctcaacgcccggttttatcgttaaccgcgtagcgcgtccgttctacgctgaggcctggcgcgcgctggaagagcaggtcgccgccccggaggttatcgatgcagctttgcgtgacggcggcggcttcccgatgggaccgctggcgctgactgacctgataggccaggacgtcaacttcgccgtgacctgctcggtatttaacgccttctggcaggaccgccgttacctgccatctcttttgcagcaggagctggcgctggccgggcggctaggtaaaaagagcggccacggcgtctatcgctggcccgctgagacactgccggacgcggcgctgccgccggtaatgataggtgctgaatccgttaccgtcagaagtgacaatgtcactgaattagacgatgtcttgctgctggagactgaaggcgagaccgccctggcgctgagtattaagcatcaccgcccggtggtggtgtatgacctgtgcgccagcgatacggtggtgctggccgcagcggcaaccaacgcgcctgcggccactgataaggccgtgcattacttccagcagcagggcaagaaagtgctgcgtattgccgattatcccggcctgctggtgtggcgcacggtggcgatgctgattaacgaagcgctggatgcggtacaaaaaggcgtcgccagcccgcaggatatcgataccgcgatgcgccttggcgtgaactatccgcatggcccgctggcatggggagaacgccttggctggcggcgggtgctgcaactgctggagaacctgcaacaccattatggcgaggagcgctatcgccccagttccctgctgcgccagaaggcgctgatggagaagcaccatgagcaatga
